United States Patent Application Publication US 2022/0098586 A1 - sequence listing, part 2

SEQ ID NO: 10885 - DNA, 15 bp, Artificial Sequence
  source: /note="Description of Artificial Sequence: Synthetic oligonucleotide"
  source: /note="Description of Combined DNA/RNA Molecule: Synthetic oligonucleotide"
  source: /note="DNA/RNA"
  source: /note="5' tri-ethylene glycol (TEG)"
  modified_base (14)..(14): bicyclic nucleic acid (BNA)
  modified_base (15)..(15): bicyclic nucleic acid (BNA)
  source: /note="3' tri-ethylene glycol (TEG)"
gccagucgguaagtt

SEQ ID NO: 10886 - DNA, 14 bp, Artificial Sequence
  source: /note="Description of Artificial Sequence: Synthetic oligonucleotide"
  source: /note="Description of Combined DNA/RNA Molecule: Synthetic oligonucleotide"
  source: /note="DNA/RNA"
  source: /note="5' tri-ethylene glycol (TEG)"
  modified_base (13)..(13): bicyclic nucleic acid (BNA)
  modified_base (14)..(14): bicyclic nucleic acid (BNA)
  source: /note="3' tri-ethylene glycol (TEG)"
gccagucgguaagt

SEQ ID NO: 10887 - DNA, 20 bp, Artificial Sequence
  source: /note="Description of Artificial Sequence: Synthetic oligonucleotide"
  source: /note="Description of Combined DNA/RNA Molecule: Synthetic oligonucleotide"
  source: /note="DNA/RNA"
  source: /note="5' tri-ethylene glycol (TEG)"
  modified_base (19)..(19): bicyclic nucleic acid (BNA)
  modified_base (20)..(20): bicyclic nucleic acid (BNA)
  source: /note="3' tri-ethylene glycol (TEG)"
ucaaggaagauggcauuuct

SEQ ID NO: 10888 - RNA, 22 nt, Artificial Sequence
  source: /note="Description of Artificial Sequence: Synthetic oligonucleotide"
  source: /note="RNA"
  source: /note="5' tri-ethylene glycol (TEG)"
  modified_base (21)..(21): bicyclic nucleic acid (BNA)
  modified_base (22)..(22): bicyclic nucleic acid (BNA)
  source: /note="3' tri-ethylene glycol (TEG)"
ucaaggaagauggcauuucuag

SEQ ID NO: 10889 - DNA, 16 bp, Artificial Sequence
  source: /note="Description of Artificial Sequence: Synthetic oligonucleotide"
  source: /note="Description of Combined DNA/RNA Molecule: Synthetic oligonucleotide"
  source: /note="DNA/RNA"
  source: /note="5' tri-ethylene glycol (TEG)"
  modified_base (15)..(15): bicyclic nucleic acid (BNA)
  modified_base (16)..(16): bicyclic nucleic acid (BNA)
  source: /note="3' tri-ethylene glycol (TEG)"
ucaaggaagauggcat

SEQ ID NO: 10890 - DNA, 15 bp, Artificial Sequence
  source: /note="Description of Artificial Sequence: Synthetic oligonucleotide"
  source: /note="Description of Combined DNA/RNA Molecule: Synthetic oligonucleotide"
  source: /note="DNA/RNA"
  source: /note="5' tri-ethylene glycol (TEG)"
  modified_base (14)..(14): bicyclic nucleic acid (BNA)
  modified_base (15)..(15): bicyclic nucleic acid (BNA)
  source: /note="3' tri-ethylene glycol (TEG)"
gaagauggcauuuct

SEQ ID NO: 10891 - DNA, 21 bp, Artificial Sequence
  source: /note="Description of Artificial Sequence: Synthetic oligonucleotide"
  source: /note="Description of Combined DNA/RNA Molecule: Synthetic oligonucleotide"
  source: /note="DNA/RNA"
  source: /note="5' tri-ethylene glycol (TEG)"
  modified_base (20)..(20): bicyclic nucleic acid (BNA)
  modified_base (21)..(21): bicyclic nucleic acid (BNA)
  source: /note="3' tri-ethylene glycol (TEG)"
ucaaggaagauggcauuucta

SEQ ID NO: 10892 - DNA, 19 bp, Artificial Sequence
  source: /note="Description of Artificial Sequence: Synthetic oligonucleotide"
  source: /note="Description of Combined DNA/RNA Molecule: Synthetic oligonucleotide"
  source: /note="DNA/RNA"
  source: /note="5' tri-ethylene glycol (TEG)"
  modified_base (18)..(18): bicyclic nucleic acid (BNA)
  modified_base (19)..(19): bicyclic nucleic acid (BNA)
  source: /note="3' tri-ethylene glycol (TEG)"
ucaaggaagauggcauutc

SEQ ID NO: 10893 - DNA, 18 bp, Artificial Sequence
  source: /note="Description of Artificial Sequence: Synthetic oligonucleotide"
  source: /note="Description of Combined DNA/RNA Molecule: Synthetic oligonucleotide"
  source: /note="DNA/RNA"
  source: /note="5' tri-ethylene glycol (TEG)"
  modified_base (17)..(17): bicyclic nucleic acid (BNA)
  modified_base (18)..(18): bicyclic nucleic acid (BNA)
  source: /note="3' tri-ethylene glycol (TEG)"
ucaaggaagauggcautt

SEQ ID NO: 10894 - DNA, 17 bp, Artificial Sequence
  source: /note="Description of Artificial Sequence: Synthetic oligonucleotide"
  source: /note="Description of Combined DNA/RNA Molecule: Synthetic oligonucleotide"
  source: /note="DNA/RNA"
  source: /note="5' tri-ethylene glycol (TEG)"
  modified_base (16)..(16): bicyclic nucleic acid (BNA)
  modified_base (17)..(17): bicyclic nucleic acid (BNA)
  source: /note="3' tri-ethylene glycol (TEG)"
ucaaggaagauggcatt

SEQ ID NO: 10895 - RNA, 15 nt, Artificial Sequence
  source: /note="Description of Artificial Sequence: Synthetic oligonucleotide"
  source: /note="RNA"
  source: /note="5' tri-ethylene glycol (TEG)"
  modified_base (14)..(14): bicyclic nucleic acid (BNA)
  modified_base (15)..(15): bicyclic nucleic acid (BNA)
  source: /note="3' tri-ethylene glycol (TEG)"
ucaaggaagauggca

SEQ ID NO: 10896 - RNA, 14 nt, Artificial Sequence
  source: /note="Description of Artificial Sequence: Synthetic oligonucleotide"
  source: /note="RNA"
  source: /note="5' tri-ethylene glycol (TEG)"
  modified_base (13)..(13): bicyclic nucleic acid (BNA)
  modified_base (14)..(14): bicyclic nucleic acid (BNA)
  source: /note="3' tri-ethylene glycol (TEG)"
ucaaggaagauggc

SEQ ID NO: 10897 - RNA, 13 nt, Artificial Sequence
  source: /note="Description of Artificial Sequence: Synthetic oligonucleotide"
  source: /note="RNA"
  source: /note="5' tri-ethylene glycol (TEG)"
  modified_base (12)..(12): bicyclic nucleic acid (BNA)
  modified_base (13)..(13): bicyclic nucleic acid (BNA)
  source: /note="3' tri-ethylene glycol (TEG)"
ucaaggaagaugg

SEQ ID NO: 10898 - DNA, 12 bp, Artificial Sequence
  source: /note="Description of Artificial Sequence: Synthetic oligonucleotide"
  source: /note="Description of Combined DNA/RNA Molecule: Synthetic oligonucleotide"
  source: /note="DNA/RNA"
  source: /note="5' tri-ethylene glycol (TEG)"
  modified_base (11)..(11): bicyclic nucleic acid (BNA)
  modified_base (12)..(12): bicyclic nucleic acid (BNA)
  source: /note="3' tri-ethylene glycol (TEG)"
ucaaggaagatg

SEQ ID NO: 10899 - DNA, 11 bp, Artificial Sequence
  source: /note="Description of Artificial Sequence: Synthetic oligonucleotide"
  source: /note="Description of Combined DNA/RNA Molecule: Synthetic oligonucleotide"
  source: /note="DNA/RNA"
  source: /note="5' tri-ethylene glycol (TEG)"
  modified_base (10)..(10): bicyclic nucleic acid (BNA)
  modified_base (11)..(11): bicyclic nucleic acid (BNA)
  source: /note="3' tri-ethylene glycol (TEG)"
ucaaggaagat

SEQ ID NO: 10900 - RNA, 10 nt, Artificial Sequence
  source: /note="Description of Artificial Sequence: Synthetic oligonucleotide"
  source: /note="RNA"
  source: /note="5' tri-ethylene glycol (TEG)"
  modified_base (9)..(9): bicyclic nucleic acid (BNA)
  modified_base (10)..(10): bicyclic nucleic acid (BNA)
  source: /note="3' tri-ethylene glycol (TEG)"
ucaaggaaga

SEQ ID NO: 10901 - RNA, 9 nt, Artificial Sequence
  source: /note="Description of Artificial Sequence: Synthetic oligonucleotide"
  source: /note="RNA"
  source: /note="5' tri-ethylene glycol (TEG)"
  modified_base (8)..(8): bicyclic nucleic acid (BNA)
  modified_base (9)..(9): bicyclic nucleic acid (BNA)
  source: /note="3' tri-ethylene glycol (TEG)"
ucaaggaag

SEQ ID NO: 10902 - RNA, 21 nt, Artificial Sequence
  source: /note="Description of Artificial Sequence: Synthetic oligonucleotide"
  source: /note="RNA"
  source: /note="5' tri-ethylene glycol (TEG)"
  modified_base (20)..(20): bicyclic nucleic acid (BNA)
  modified_base (21)..(21): bicyclic nucleic acid (BNA)
  source: /note="3' tri-ethylene glycol (TEG)"
caaggaagauggcauuucuag

SEQ ID NO: 10903 - DNA, 20 bp, Artificial Sequence
  source: /note="Description of Artificial Sequence: Synthetic oligonucleotide"
  source: /note="Description of Combined DNA/RNA Molecule: Synthetic oligonucleotide"
  source: /note="DNA/RNA"
  source: /note="5' tri-ethylene glycol (TEG)"
  modified_base (19)..(19): bicyclic nucleic acid (BNA)
  modified_base (20)..(20): bicyclic nucleic acid (BNA)
  source: /note="3' tri-ethylene glycol (TEG)"
caaggaagauggcauuucta

SEQ ID NO: 10904 - DNA, 19 bp, Artificial Sequence
  source: /note="Description of Artificial Sequence: Synthetic oligonucleotide"
  source: /note="Description of Combined DNA/RNA Molecule: Synthetic oligonucleotide"
  source: /note="DNA/RNA"
  source: /note="5' tri-ethylene glycol (TEG)"
  modified_base (18)..(18): bicyclic nucleic acid (BNA)
  modified_base (19)..(19): bicyclic nucleic acid (BNA)
  source: /note="3' tri-ethylene glycol (TEG)"
caaggaagauggcauuuct

SEQ ID NO: 10905 - DNA, 18 bp, Artificial Sequence
  source: /note="Description of Artificial Sequence: Synthetic oligonucleotide"
  source: /note="Description of Combined DNA/RNA Molecule: Synthetic oligonucleotide"
  source: /note="DNA/RNA"
  source: /note="5' tri-ethylene glycol (TEG)"
  modified_base (17)..(17): bicyclic nucleic acid (BNA)
  modified_base (18)..(18): bicyclic nucleic acid (BNA)
  source: /note="3' tri-ethylene glycol (TEG)"
caaggaagauggcauutc

SEQ ID NO: 10906 - DNA, 17 bp, Artificial Sequence
  source: /note="Description of Artificial Sequence: Synthetic oligonucleotide"
  source: /note="Description of Combined DNA/RNA Molecule: Synthetic oligonucleotide"
  source: /note="DNA/RNA"
  source: /note="5' tri-ethylene glycol (TEG)"
  modified_base (16)..(16): bicyclic nucleic acid (BNA)
  modified_base (17)..(17): bicyclic nucleic acid (BNA)
  source: /note="3' tri-ethylene glycol (TEG)"
caaggaagauggcautt

SEQ ID NO: 10907 - DNA, 16 bp, Artificial Sequence
  source: /note="Description of Artificial Sequence: Synthetic oligonucleotide"
  source: /note="Description of Combined DNA/RNA Molecule: Synthetic oligonucleotide"
  source: /note="DNA/RNA"
  source: /note="5' tri-ethylene glycol (TEG)"
  modified_base (15)..(15): bicyclic nucleic acid (BNA)
  modified_base (16)..(16): bicyclic nucleic acid (BNA)
  source: /note="3' tri-ethylene glycol (TEG)"
caaggaagauggcatt

SEQ ID NO: 10908 - DNA, 15 bp, Artificial Sequence
  source: /note="Description of Artificial Sequence: Synthetic oligonucleotide"
  source: /note="Description of Combined DNA/RNA Molecule: Synthetic oligonucleotide"
  source: /note="DNA/RNA"
  source: /note="5' tri-ethylene glycol (TEG)"
  modified_base (14)..(14): bicyclic nucleic acid (BNA)
  modified_base (15)..(15): bicyclic nucleic acid (BNA)
  source: /note="3' tri-ethylene glycol (TEG)"
caaggaagauggcat

SEQ ID NO: 10909 - RNA, 14 nt, Artificial Sequence
  source: /note="Description of Artificial Sequence: Synthetic oligonucleotide"
  source: /note="RNA"
  source: /note="5' tri-ethylene glycol (TEG)"
  modified_base (13)..(13): bicyclic nucleic acid (BNA)
  modified_base (14)..(14): bicyclic nucleic acid (BNA)
  source: /note="3' tri-ethylene glycol (TEG)"
caaggaagauggca

SEQ ID NO: 10910 - RNA, 13 nt, Artificial Sequence
  source: /note="Description of Artificial Sequence: Synthetic oligonucleotide"
  source: /note="RNA"
  source: /note="5' tri-ethylene glycol (TEG)"
  modified_base (12)..(12): bicyclic nucleic acid (BNA)
  modified_base (13)..(13): bicyclic nucleic acid (BNA)
  source: /note="3' tri-ethylene glycol (TEG)"
caaggaagauggc

SEQ ID NO: 10911 - RNA, 12 nt, Artificial Sequence
  source: /note="Description of Artificial Sequence: Synthetic oligonucleotide"
  source: /note="RNA"
  source: /note="5' tri-ethylene glycol (TEG)"
  modified_base (11)..(11): bicyclic nucleic acid (BNA)
  modified_base (12)..(12): bicyclic nucleic acid (BNA)
  source: /note="3' tri-ethylene glycol (TEG)"
caaggaagaugg

SEQ ID NO: 10912 - DNA, 11 bp, Artificial Sequence
  source: /note="Description of Artificial Sequence: Synthetic oligonucleotide"
  source: /note="DNA/RNA"
  source: /note="5' tri-ethylene glycol (TEG)"
  modified_base (10)..(10): bicyclic nucleic acid (BNA)
  modified_base (11)..(11): bicyclic nucleic acid (BNA)
  source: /note="3' tri-ethylene glycol (TEG)"
caaggaagatg

SEQ ID NO: 10913 - DNA, 10 bp, Artificial Sequence
  source: /note="Description of Artificial Sequence: Synthetic oligonucleotide"
  source: /note="DNA/RNA"
  source: /note="5' tri-ethylene glycol (TEG)"
  modified_base (9)..(9): bicyclic nucleic acid (BNA)
  modified_base (10)..(10): bicyclic nucleic acid (BNA)
  source: /note="3' tri-ethylene glycol (TEG)"
caaggaagat

SEQ ID NO: 10914 - RNA, 9 nt, Artificial Sequence
  source: /note="Description of Artificial Sequence: Synthetic oligonucleotide"
  source: /note="RNA/Antisense Oligonucleotide"
  source: /note="5' tri-ethylene glycol (TEG)"
  modified_base (8)..(8): bicyclic nucleic acid (BNA)
  modified_base (9)..(9): bicyclic nucleic acid (BNA)
  source: /note="3' tri-ethylene glycol (TEG)"
caaggaaga

SEQ ID NO: 10915 - RNA, 8 nt, Artificial Sequence
  source: /note="Description of Artificial Sequence: Synthetic oligonucleotide"
  source: /note="RNA/Antisense Oligonucleotide"
  source: /note="5' tri-ethylene glycol (TEG)"
  modified_base (7)..(7): bicyclic nucleic acid (BNA)
  modified_base (8)..(8): bicyclic nucleic acid (BNA)
  source: /note="3' tri-ethylene glycol (TEG)"
caaggaag

SEQ ID NO: 10916 - RNA, 20 nt, Artificial Sequence
  source: /note="Description of Artificial Sequence: Synthetic oligonucleotide"
  source: /note="RNA"
  source: /note="5' tri-ethylene glycol (TEG)"
  modified_base (19)..(19): bicyclic nucleic acid (BNA)
  modified_base (20)..(20): bicyclic nucleic acid (BNA)
  source: /note="3' tri-ethylene glycol (TEG)"
aaggaagauggcauuucuag

SEQ ID NO: 10917 - DNA, 19 bp, Artificial Sequence
  source: /note="Description of Artificial Sequence: Synthetic oligonucleotide"
  source: /note="Description of Combined DNA/RNA Molecule: Synthetic oligonucleotide"
  source: /note="DNA/RNA"
  source: /note="5' tri-ethylene glycol (TEG)"
  modified_base (18)..(18): bicyclic nucleic acid (BNA)
  modified_base (19)..(19): bicyclic nucleic acid (BNA)
  source: /note="3' tri-ethylene glycol (TEG)"
aaggaagauggcauuucta

SEQ ID NO: 10918 - DNA, 18 bp, Artificial Sequence
  source: /note="Description of Artificial Sequence: Synthetic oligonucleotide"
  source: /note="Description of Combined DNA/RNA Molecule: Synthetic oligonucleotide"
  source: /note="DNA/RNA"
  source: /note="5' tri-ethylene glycol (TEG)"
  modified_base (17)..(17): bicyclic nucleic acid (BNA)
  modified_base (18)..(18): bicyclic nucleic acid (BNA)
  source: /note="3' tri-ethylene glycol (TEG)"
aaggaagauggcauuuct

SEQ ID NO: 10919 - DNA, 17 bp, Artificial Sequence
  source: /note="Description of Artificial Sequence: Synthetic oligonucleotide"
  source: /note="Description of Combined DNA/RNA Molecule: Synthetic oligonucleotide"
  source: /note="DNA/RNA"
  source: /note="5' tri-ethylene glycol (TEG)"
  modified_base (16)..(16): bicyclic nucleic acid (BNA)
  modified_base (17)..(17): bicyclic nucleic acid (BNA)
  source: /note="3' tri-ethylene glycol (TEG)"
aaggaagauggcauutc

SEQ ID NO: 10920 - DNA, 16 bp, Artificial Sequence
  source: /note="Description of Artificial Sequence: Synthetic oligonucleotide"
  source: /note="Description of Combined DNA/RNA Molecule: Synthetic oligonucleotide"
  source: /note="DNA/RNA"
  source: /note="5' tri-ethylene glycol (TEG)"
  modified_base (15)..(15): bicyclic nucleic acid (BNA)
  modified_base (16)..(16): bicyclic nucleic acid (BNA)
  source: /note="3' tri-ethylene glycol (TEG)"
aaggaagauggcautt

SEQ ID NO: 10921 - DNA, 15 bp, Artificial Sequence
  source: /note="Description of Artificial Sequence: Synthetic oligonucleotide"
  source: /note="Description of Combined DNA/RNA Molecule: Synthetic oligonucleotide"
  source: /note="DNA/RNA"
  source: /note="5' tri-ethylene glycol (TEG)"
  modified_base (14)..(14): bicyclic nucleic acid (BNA)
  modified_base (15)..(15): bicyclic nucleic acid (BNA)
  source: /note="3' tri-ethylene glycol (TEG)"
aaggaagauggcatt

SEQ ID NO: 10922 - DNA, 14 bp, Artificial Sequence
  source: /note="Description of Artificial Sequence: Synthetic oligonucleotide"
  source: /note="Description of Combined DNA/RNA Molecule: Synthetic oligonucleotide"
  source: /note="DNA/RNA"
  source: /note="5' tri-ethylene glycol (TEG)"
  modified_base (13)..(13): bicyclic nucleic acid (BNA)
  modified_base (14)..(14): bicyclic nucleic acid (BNA)
  source: /note="3' tri-ethylene glycol (TEG)"
aaggaagauggcat

SEQ ID NO: 10923 - RNA, 13 nt, Artificial Sequence
  source: /note="Description of Artificial Sequence: Synthetic oligonucleotide"
  source: /note="RNA"
  source: /note="5' tri-ethylene glycol (TEG)"
  modified_base (12)..(12): bicyclic nucleic acid (BNA)
  modified_base (13)..(13): bicyclic nucleic acid (BNA)
  source: /note="3' tri-ethylene glycol (TEG)"
aaggaagauggca

SEQ ID NO: 10924 - RNA, 12 nt, Artificial Sequence
  source: /note="Description of Artificial Sequence: Synthetic oligonucleotide"
  source: /note="RNA"
  source: /note="5' tri-ethylene glycol (TEG)"
  modified_base (11)..(11): bicyclic nucleic acid (BNA)
  modified_base (12)..(12): bicyclic nucleic acid (BNA)
  source: /note="3' tri-ethylene glycol (TEG)"
aaggaagauggc

SEQ ID NO: 10925 - RNA, 11 nt, Artificial Sequence
  source: /note="Description of Artificial Sequence: Synthetic oligonucleotide"
  source: /note="RNA"
  source: /note="5' tri-ethylene glycol (TEG)"
  modified_base (10)..(10): bicyclic nucleic acid (BNA)
  modified_base (11)..(11): bicyclic nucleic acid (BNA)
  source: /note="3' tri-ethylene glycol (TEG)"
aaggaagaugg

SEQ ID NO: 10926 - DNA, 10 bp, Artificial Sequence
  source: /note="Description of Artificial Sequence: Synthetic oligonucleotide"
  source: /note="DNA/RNA"
  source: /note="5' tri-ethylene glycol (TEG)"
  modified_base (9)..(9): bicyclic nucleic acid (BNA)
  modified_base (10)..(10): bicyclic nucleic acid (BNA)
  source: /note="3' tri-ethylene glycol (TEG)"
aaggaagatg

SEQ ID NO: 10927 - DNA, 9 bp, Artificial Sequence
  source: /note="Description of Artificial Sequence: Synthetic oligonucleotide"
  source: /note="DNA/RNA"
  source: /note="5' tri-ethylene glycol (TEG)"
  modified_base (8)..(8): bicyclic nucleic acid (BNA)
  modified_base (9)..(9): bicyclic nucleic acid (BNA)
  source: /note="3' tri-ethylene glycol (TEG)"
aaggaagat

SEQ ID NO: 10928 - RNA, 8 nt, Artificial Sequence
  source: /note="Description of Artificial Sequence: Synthetic oligonucleotide"
  source: /note="RNA/Antisense Oligonucleotide"
  source: /note="5' tri-ethylene glycol (TEG)"
  modified_base (7)..(7): bicyclic nucleic acid (BNA)
  modified_base (8)..(8): bicyclic nucleic acid (BNA)
  source: /note="3' tri-ethylene glycol (TEG)"
aaggaaga

SEQ ID NO: 10929 - RNA, 19 nt, Artificial Sequence
  source: /note="Description of Artificial Sequence: Synthetic oligonucleotide"
  source: /note="RNA"
  source: /note="5' tri-ethylene glycol (TEG)"
  modified_base (18)..(18): bicyclic nucleic acid (BNA)
  modified_base (19)..(19): bicyclic nucleic acid (BNA)
  source: /note="3' tri-ethylene glycol (TEG)"
aggaagauggcauuucuag

SEQ ID NO: 10930 - DNA, 18 bp, Artificial Sequence
  source: /note="Description of Artificial Sequence: Synthetic oligonucleotide"
  source: /note="Description of Combined DNA/RNA Molecule: Synthetic oligonucleotide"
  source: /note="DNA/RNA"
  source: /note="5' tri-ethylene glycol (TEG)"
  modified_base (17)..(17): bicyclic nucleic acid (BNA)
  modified_base (18)..(18): bicyclic nucleic acid (BNA)
  source: /note="3' tri-ethylene glycol (TEG)"
aggaagauggcauuucta

SEQ ID NO: 10931 - DNA, 17 bp, Artificial Sequence
  source: /note="Description of Artificial Sequence: Synthetic oligonucleotide"
  source: /note="Description of Combined DNA/RNA Molecule: Synthetic oligonucleotide"
  source: /note="DNA/RNA"
  source: /note="5' tri-ethylene glycol (TEG)"
  modified_base (16)..(16): bicyclic nucleic acid (BNA)
  modified_base (17)..(17): bicyclic nucleic acid (BNA)
  source: /note="3' tri-ethylene glycol (TEG)"
aggaagauggcauuuct

SEQ ID NO: 10932 - DNA, 16 bp, Artificial Sequence
  source: /note="Description of Artificial Sequence: Synthetic oligonucleotide"
  source: /note="Description of Combined DNA/RNA Molecule: Synthetic oligonucleotide"
  source: /note="DNA/RNA"
  source: /note="5' tri-ethylene glycol (TEG)"
  modified_base (15)..(15): bicyclic nucleic acid (BNA)
  modified_base (16)..(16): bicyclic nucleic acid (BNA)
  source: /note="3' tri-ethylene glycol (TEG)"
aggaagauggcauutc

SEQ ID NO: 10933 - DNA, 15 bp, Artificial Sequence
  source: /note="Description of Artificial Sequence: Synthetic oligonucleotide"
  source: /note="Description of Combined DNA/RNA Molecule: Synthetic oligonucleotide"
  source: /note="DNA/RNA"
  source: /note="5' tri-ethylene glycol (TEG)"
  modified_base (14)..(14): bicyclic nucleic acid (BNA)
  modified_base (15)..(15): bicyclic nucleic acid (BNA)
  source: /note="3' tri-ethylene glycol (TEG)"
aggaagauggcautt

SEQ ID NO: 10934 - DNA, 14 bp, Artificial Sequence
  source: /note="Description of Artificial Sequence: Synthetic oligonucleotide"
  source: /note="Description of Combined DNA/RNA Molecule: Synthetic oligonucleotide"
  source: /note="DNA/RNA"
  source: /note="5' tri-ethylene glycol (TEG)"
  modified_base (13)..(13): bicyclic nucleic acid (BNA)
  modified_base (14)..(14): bicyclic nucleic acid (BNA)
  source: /note="3' tri-ethylene glycol (TEG)"
aggaagauggcatt

SEQ ID NO: 10935 - DNA, 13 bp, Artificial Sequence
  source: /note="Description of Artificial Sequence: Synthetic oligonucleotide"
  source: /note="Description of Combined DNA/RNA Molecule: Synthetic oligonucleotide"
  source: /note="DNA/RNA"
  source: /note="5' tri-ethylene glycol (TEG)"
  modified_base (12)..(12): bicyclic nucleic acid (BNA)
  modified_base (13)..(13): bicyclic nucleic acid (BNA)
  source: /note="3' tri-ethylene glycol (TEG)"
aggaagauggcat

SEQ ID NO: 10936 - RNA, 12 nt, Artificial Sequence
  source: /note="Description of Artificial Sequence: Synthetic oligonucleotide"
  source: /note="RNA"
  source: /note="5' tri-ethylene glycol (TEG)"
  modified_base (11)..(11): bicyclic nucleic acid (BNA)
  modified_base (12)..(12): bicyclic nucleic acid (BNA)
  source: /note="3' tri-ethylene glycol (TEG)"
aggaagauggca

SEQ ID NO: 10937 - RNA, 10 nt, Artificial Sequence
  source: /note="Description of Artificial Sequence: Synthetic oligonucleotide"
  source: /note="RNA"
  source: /note="5' tri-ethylene glycol (TEG)"
  modified_base (9)..(9): bicyclic nucleic acid (BNA)
  modified_base (10)..(10): bicyclic nucleic acid (BNA)
  source: /note="3' tri-ethylene glycol (TEG)"
aggaagaugg

SEQ ID NO: 10938 - DNA, 9 bp, Artificial Sequence
  source: /note="Description of Artificial Sequence: Synthetic oligonucleotide"
  source: /note="DNA/RNA"
  source: /note="5' tri-ethylene glycol (TEG)"
  modified_base (8)..(8): bicyclic nucleic acid (BNA)
  modified_base (9)..(9): bicyclic nucleic acid (BNA)
  source: /note="3' tri-ethylene glycol (TEG)"
aggaagatg

SEQ ID NO: 10939 - DNA, 8 bp, Artificial Sequence
  source: /note="Description of Artificial Sequence: Synthetic oligonucleotide"
  source: /note="DNA/RNA"
  source: /note="5' tri-ethylene glycol (TEG)"
  modified_base (7)..(7): bicyclic nucleic acid (BNA)
  modified_base (8)..(8): bicyclic nucleic acid (BNA)
  source: /note="3' tri-ethylene glycol (TEG)"
aggaagat

SEQ ID NO: 10940 - RNA, 18 nt, Artificial Sequence
  source: /note="Description of Artificial Sequence: Synthetic oligonucleotide"
  source: /note="RNA"
  source: /note="5' tri-ethylene glycol (TEG)"
  modified_base (17)..(17): bicyclic nucleic acid (BNA)
  modified_base (18)..(18): bicyclic nucleic acid (BNA)
  source: /note="3' tri-ethylene glycol (TEG)"
ggaagauggcauuucuag

SEQ ID NO: 10941 - DNA, 17 bp, Artificial Sequence
  source: /note="Description of Artificial Sequence: Synthetic oligonucleotide"
  source: /note="Description of Combined DNA/RNA Molecule: Synthetic oligonucleotide"
  source: /note="DNA/RNA"
  source: /note="5' tri-ethylene glycol (TEG)"
  modified_base (16)..(16): bicyclic nucleic acid (BNA)
  modified_base (17)..(17): bicyclic nucleic acid (BNA)
  source: /note="3' tri-ethylene glycol (TEG)"
ggaagauggcauuucta

SEQ ID NO: 10942 - DNA, 16 bp, Artificial Sequence
  source: /note="Description of Artificial Sequence: Synthetic oligonucleotide"
  source: /note="Description of Combined DNA/RNA Molecule: Synthetic oligonucleotide"
  source: /note="DNA/RNA"
  source: /note="5' tri-ethylene glycol (TEG)"
  modified_base (15)..(15): bicyclic nucleic acid (BNA)
  modified_base (16)..(16): bicyclic nucleic acid (BNA)
  source: /note="3' tri-ethylene glycol (TEG)"
ggaagauggcauuuct

SEQ ID NO: 10943 - DNA, 15 bp, Artificial Sequence
  source: /note="Description of Artificial Sequence: Synthetic oligonucleotide"
  source: /note="Description of Combined DNA/RNA Molecule: Synthetic oligonucleotide"
  source: /note="DNA/RNA"
  source: /note="5' tri-ethylene glycol (TEG)"
  modified_base (14)..(14): bicyclic nucleic acid (BNA)
  modified_base (15)..(15): bicyclic nucleic acid (BNA)
  source: /note="3' tri-ethylene glycol (TEG)"
ggaagauggcauutc

SEQ ID NO: 10944 - DNA, 14 bp, Artificial Sequence
  source: /note="Description of Artificial Sequence: Synthetic oligonucleotide"
  source: /note="Description of Combined DNA/RNA Molecule: Synthetic oligonucleotide"
  source: /note="DNA/RNA"
  source: /note="5' tri-ethylene glycol (TEG)"
  modified_base (13)..(13): bicyclic nucleic acid (BNA)
  modified_base (14)..(14): bicyclic nucleic acid (BNA)
  source: /note="3' tri-ethylene glycol (TEG)"
ggaagauggcautt

SEQ ID NO: 10945 - DNA, 13 bp, Artificial Sequence
  source: /note="Description of Artificial Sequence: Synthetic oligonucleotide"
  source: /note="Description of Combined DNA/RNA Molecule: Synthetic oligonucleotide"
  source: /note="DNA/RNA"
  source: /note="5' tri-ethylene glycol (TEG)"
  modified_base (12)..(12): bicyclic nucleic acid (BNA)
  modified_base (13)..(13): bicyclic nucleic acid (BNA)
  source: /note="3' tri-ethylene glycol (TEG)"
ggaagauggcatt

SEQ ID NO: 10946 - DNA, 12 bp, Artificial Sequence
  source: /note="Description of Artificial Sequence: Synthetic oligonucleotide"
  source: /note="Description of Combined DNA/RNA Molecule: Synthetic oligonucleotide"
  source: /note="DNA/RNA"
  source: /note="5' tri-ethylene glycol (TEG)"
  modified_base (11)..(11): bicyclic nucleic acid (BNA)
  modified_base (12)..(12): bicyclic nucleic acid (BNA)
  source: /note="3' tri-ethylene glycol (TEG)"
ggaagauggcat

SEQ ID NO: 10947 - RNA, 11 nt, Artificial Sequence
  source: /note="Description of Artificial Sequence: Synthetic oligonucleotide"
  source: /note="RNA"
  source: /note="5' tri-ethylene glycol (TEG)"
  modified_base (10)..(10): bicyclic nucleic acid (BNA)
  modified_base (11)..(11): bicyclic nucleic acid (BNA)
  source: /note="3' tri-ethylene glycol (TEG)"
ggaagauggca

SEQ ID NO: 10948 - RNA, 10 nt, Artificial Sequence
  source: /note="Description of Artificial Sequence: Synthetic oligonucleotide"
  source: /note="RNA"
  source: /note="5' tri-ethylene glycol (TEG)"
  modified_base (9)..(9): bicyclic nucleic acid (BNA)
  modified_base (10)..(10): bicyclic nucleic acid (BNA)
  source: /note="3' tri-ethylene glycol (TEG)"
ggaagauggc

SEQ ID NO: 10949 - DNA, 8 bp, Artificial Sequence
  source: /note="Description of Artificial Sequence: Synthetic oligonucleotide"
  source: /note="DNA/RNA"
  source: /note="5' tri-ethylene glycol (TEG)"
  modified_base (7)..(7): bicyclic nucleic acid (BNA)
  modified_base (8)..(8): bicyclic nucleic acid (BNA)
  source: /note="3' tri-ethylene glycol (TEG)"
ggaagatg

SEQ ID NO: 10950 - RNA, 17 nt, Artificial Sequence
  source: /note="Description of Artificial Sequence: Synthetic oligonucleotide"
  source: /note="RNA"
  source: /note="5' tri-ethylene glycol (TEG)"
  modified_base (16)..(16): bicyclic nucleic acid (BNA)
  modified_base (17)..(17): bicyclic nucleic acid (BNA)
  source: /note="3' tri-ethylene glycol (TEG)"
gaagauggcauuucuag

SEQ ID NO: 10951 - DNA, 16 bp, Artificial Sequence
  source: /note="Description of Artificial Sequence: Synthetic oligonucleotide"
  source: /note="Description of Combined DNA/RNA Molecule: Synthetic oligonucleotide"
  source: /note="DNA/RNA"
  source: /note="5' tri-ethylene glycol (TEG)"
  modified_base (15)..(15): bicyclic nucleic acid (BNA)
  modified_base (16)..(16): bicyclic nucleic acid (BNA)
  source: /note="3' tri-ethylene glycol (TEG)"
gaagauggcauuucta

SEQ ID NO: 10952 - DNA, 14 bp, Artificial Sequence
  source: /note="Description of Artificial Sequence: Synthetic oligonucleotide"
  source: /note="Description of Combined DNA/RNA Molecule: Synthetic oligonucleotide"
  source: /note="DNA/RNA"
  source: /note="5' tri-ethylene glycol (TEG)"
  modified_base (13)..(13): bicyclic nucleic acid (BNA)
  modified_base (14)..(14): bicyclic nucleic acid (BNA)
  source: /note="3' tri-ethylene glycol (TEG)"
gaagauggcauutc

SEQ ID NO: 10953 - DNA, 13 bp, Artificial Sequence
  source: /note="Description of Artificial Sequence: Synthetic oligonucleotide"
  source: /note="Description of Combined DNA/RNA Molecule: Synthetic oligonucleotide"
  source: /note="DNA/RNA"
  source: /note="5' tri-ethylene glycol (TEG)"
  modified_base (12)..(12): bicyclic nucleic acid (BNA)
  modified_base (13)..(13): bicyclic nucleic acid (BNA)
  source: /note="3' tri-ethylene glycol (TEG)"
gaagauggcautt

SEQ ID NO: 10954 - DNA, 12 bp, Artificial Sequence
  source: /note="Description of Artificial Sequence: Synthetic oligonucleotide"
  source: /note="Description of Combined DNA/RNA Molecule: Synthetic oligonucleotide"
  source: /note="DNA/RNA"
  source: /note="5' tri-ethylene glycol (TEG)"
  modified_base (11)..(11): bicyclic nucleic acid (BNA)
  modified_base (12)..(12): bicyclic nucleic acid (BNA)
  source: /note="3' tri-ethylene glycol (TEG)"
gaagauggcatt

SEQ ID NO: 10955 - DNA, 11 bp, Artificial Sequence
  source: /note="Description of Artificial Sequence: Synthetic oligonucleotide"
  source: /note="Description of Combined DNA/RNA Molecule: Synthetic oligonucleotide"
  source: /note="DNA/RNA"
  source: /note="5' tri-ethylene glycol (TEG)"
  modified_base (10)..(10): bicyclic nucleic acid (BNA)
  modified_base (11)..(11): bicyclic nucleic acid (BNA)
  source: /note="3' tri-ethylene glycol (TEG)"
gaagauggcat

SEQ ID NO: 10956 - RNA, 10 nt, Artificial Sequence
  source: /note="Description of Artificial Sequence: Synthetic oligonucleotide"
  source: /note="RNA"
  source: /note="5' tri-ethylene glycol (TEG)"
  modified_base (9)..(9): bicyclic nucleic acid (BNA)
  modified_base (10)..(10): bicyclic nucleic acid (BNA)
  source: /note="3' tri-ethylene glycol (TEG)"
gaagauggca

SEQ ID NO: 10957 - RNA, 9 nt, Artificial Sequence
  source: /note="Description of Artificial Sequence: Synthetic oligonucleotide"
  source: /note="RNA"
  source: /note="5' tri-ethylene glycol (TEG)"
  modified_base (8)..(8): bicyclic nucleic acid (BNA)
  modified_base (9)..(9): bicyclic nucleic acid (BNA)
  source: /note="3' tri-ethylene glycol (TEG)"
gaagauggc

SEQ ID NO: 10958 - RNA, 8 nt, Artificial Sequence
  source: /note="Description of Artificial Sequence: Synthetic oligonucleotide"
  source: /note="RNA"
  source: /note="5' tri-ethylene glycol (TEG)"
  modified_base (7)..(7): bicyclic nucleic acid (BNA)
  modified_base (8)..(8): bicyclic nucleic acid (BNA)
  source: /note="3' tri-ethylene glycol (TEG)"
gaagaugg

SEQ ID NO: 10959 - RNA, 16 nt, Artificial Sequence
  source: /note="Description of Artificial Sequence: Synthetic oligonucleotide"
  source: /note="RNA"
  source: /note="5' tri-ethylene glycol (TEG)"
  modified_base (15)..(15): bicyclic nucleic acid (BNA)
  modified_base (16)..(16): bicyclic nucleic acid (BNA)
  source: /note="3' tri-ethylene glycol (TEG)"
aagauggcauuucuag

SEQ ID NO: 10960 - DNA, 15 bp, Artificial Sequence
  source: /note="Description of Artificial Sequence: Synthetic oligonucleotide"
  source: /note="Description of Combined DNA/RNA Molecule: Synthetic oligonucleotide"
  source: /note="DNA/RNA"
  source: /note="5' tri-ethylene glycol (TEG)"
  modified_base (14)..(14): bicyclic nucleic acid (BNA)
  modified_base (15)..(15): bicyclic nucleic acid (BNA)
  source: /note="3' tri-ethylene glycol (TEG)"
aagauggcauuucta

SEQ ID NO: 10961 - DNA, 14 bp, Artificial Sequence
  source: /note="Description of Artificial Sequence: Synthetic oligonucleotide"
  source: /note="Description of Combined DNA/RNA Molecule: Synthetic oligonucleotide"
  source: /note="DNA/RNA"
  source: /note="5' tri-ethylene glycol (TEG)"
  modified_base (13)..(13): bicyclic nucleic acid (BNA)
  modified_base (14)..(14): bicyclic nucleic acid (BNA)
  source: /note="3' tri-ethylene glycol (TEG)"
aagauggcauuuct

SEQ ID NO: 10962 - DNA, 13 bp, Artificial Sequence
  source: /note="Description of Artificial Sequence: Synthetic oligonucleotide"
  source: /note="Description of Combined DNA/RNA Molecule: Synthetic oligonucleotide"
  source: /note="DNA/RNA"
  source: /note="5' tri-ethylene glycol (TEG)"
  modified_base (12)..(12): bicyclic nucleic acid (BNA)
  modified_base (13)..(13): bicyclic nucleic acid (BNA)
  source: /note="3' tri-ethylene glycol (TEG)"
aagauggcauutc

SEQ ID NO: 10963 - DNA, 12 bp, Artificial Sequence
  source: /note="Description of Artificial Sequence: Synthetic oligonucleotide"
  source: /note="Description of Combined DNA/RNA Molecule: Synthetic oligonucleotide"
  source: /note="DNA/RNA"
  source: /note="5' tri-ethylene glycol (TEG)"
  modified_base (11)..(11): bicyclic nucleic acid (BNA)
  modified_base (12)..(12): bicyclic nucleic acid (BNA)
  source: /note="3' tri-ethylene glycol (TEG)"
aagauggcautt

SEQ ID NO: 10964 - DNA, 11 bp, Artificial Sequence
  source: /note="Description of Artificial Sequence: Synthetic oligonucleotide"
  source: /note="Description of Combined DNA/RNA Molecule: Synthetic oligonucleotide"
  source: /note="DNA/RNA"
  source: /note="5' tri-ethylene glycol (TEG)"
  modified_base (10)..(10): bicyclic nucleic acid (BNA)
  modified_base (11)..(11): bicyclic nucleic acid (BNA)
  source: /note="3' tri-ethylene glycol (TEG)"
aagauggcatt

SEQ ID NO: 10965 - DNA, 10 bp, Artificial Sequence
  source: /note="Description of Artificial Sequence: Synthetic oligonucleotide"
  source: /note="Description of Combined DNA/RNA Molecule: Synthetic oligonucleotide"
  source: /note="DNA/RNA"
  source: /note="5' tri-ethylene glycol (TEG)"
  modified_base (9)..(9): bicyclic nucleic acid (BNA)
  modified_base (10)..(10): bicyclic nucleic acid (BNA)
  source: /note="3' tri-ethylene glycol (TEG)"
aagauggcat

SEQ ID NO: 10966 - RNA, 9 nt, Artificial Sequence
  source: /note="Description of Artificial Sequence: Synthetic oligonucleotide"
  source: /note="RNA"
  source: /note="5' tri-ethylene glycol (TEG)"
  modified_base (8)..(8): bicyclic nucleic acid (BNA)
  modified_base (9)..(9): bicyclic nucleic acid (BNA)
  source: /note="3' tri-ethylene glycol (TEG)"
aagauggca

SEQ ID NO: 10967 - RNA, 8 nt, Artificial Sequence
  source: /note="Description of Artificial Sequence: Synthetic oligonucleotide"
  source: /note="RNA"
  source: /note="5' tri-ethylene glycol (TEG)"
  modified_base (7)..(7): bicyclic nucleic acid (BNA)
  modified_base (8)..(8): bicyclic nucleic acid (BNA)
  source: /note="3' tri-ethylene glycol (TEG)"
aagauggc

SEQ ID NO: 10968 - RNA, 15 nt, Artificial Sequence
  source: /note="Description of Artificial Sequence: Synthetic oligonucleotide"
  source: /note="RNA"
  source: /note="5' tri-ethylene glycol (TEG)"
  modified_base (14)..(14): bicyclic nucleic acid (BNA)
  modified_base (15)..(15): bicyclic nucleic acid (BNA)
  source: /note="3' tri-ethylene glycol (TEG)"
agauggcauuucuag

SEQ ID NO: 10969 - DNA, 14 bp, Artificial Sequence
  source: /note="Description of Artificial Sequence: Synthetic oligonucleotide"
  source: /note="Description of Combined DNA/RNA Molecule: Synthetic oligonucleotide"
  source: /note="DNA/RNA"
  source: /note="5' tri-ethylene glycol (TEG)"
  modified_base (13)..(13): bicyclic nucleic acid (BNA)
  modified_base (14)..(14): bicyclic nucleic acid (BNA)
  source: /note="3' tri-ethylene glycol (TEG)"
agauggcauuucta

SEQ ID NO: 10970 - DNA, 13 bp, Artificial Sequence
  source: /note="Description of Artificial Sequence: Synthetic oligonucleotide"
  source: /note="Description of Combined DNA/RNA Molecule: Synthetic oligonucleotide"
  source: /note="DNA/RNA"
  source: /note="5' tri-ethylene glycol (TEG)"
  modified_base (12)..(12): bicyclic nucleic acid (BNA)
  modified_base (13)..(13): bicyclic nucleic acid (BNA)
  source: /note="3' tri-ethylene glycol (TEG)"
agauggcauuuct

SEQ ID NO: 10971 - DNA, 12 bp, Artificial Sequence
  source: /note="Description of Artificial Sequence: Synthetic oligonucleotide"
  source: /note="Description of Combined DNA/RNA Molecule: Synthetic oligonucleotide"
  source: /note="DNA/RNA"
  source: /note="5' tri-ethylene glycol (TEG)"
  modified_base (11)..(11): bicyclic nucleic acid (BNA)
  modified_base (12)..(12): bicyclic nucleic acid (BNA)
  source: /note="3' tri-ethylene glycol (TEG)"
agauggcauutc

SEQ ID NO: 10972 - DNA, 11 bp, Artificial Sequence
  source: /note="Description of Artificial Sequence: Synthetic oligonucleotide"
  source: /note="Description of Combined DNA/RNA Molecule: Synthetic oligonucleotide"
  source: /note="DNA/RNA"
  source: /note="5' tri-ethylene glycol (TEG)"
  modified_base (10)..(10): bicyclic nucleic acid (BNA)
  modified_base (11)..(11): bicyclic nucleic acid (BNA)
  source: /note="3' tri-ethylene glycol (TEG)"
agauggcautt

SEQ ID NO: 10973 - DNA, 10 bp, Artificial Sequence
  source: /note="Description of Artificial Sequence: Synthetic oligonucleotide"
  source: /note="Description of Combined DNA/RNA Molecule: Synthetic oligonucleotide"
  source: /note="DNA/RNA"
  source: /note="5' tri-ethylene glycol (TEG)"
  modified_base (9)..(9): bicyclic nucleic acid (BNA)
  modified_base (10)..(10): bicyclic nucleic acid (BNA)
  source: /note="3' tri-ethylene glycol (TEG)"
agauggcatt

SEQ ID NO: 10974 - DNA, 9 bp, Artificial Sequence
  source: /note="Description of Artificial Sequence: Synthetic oligonucleotide"
  source: /note="Description of Combined DNA/RNA Molecule: Synthetic oligonucleotide"
  source: /note="DNA/RNA"
  source: /note="5' tri-ethylene glycol (TEG)"
  modified_base (8)..(8): bicyclic nucleic acid (BNA)
  modified_base (9)..(9): bicyclic nucleic acid (BNA)
  source: /note="3' tri-ethylene glycol (TEG)"
agauggcat

SEQ ID NO: 10975 - RNA, 8 nt, Artificial Sequence
  source: /note="Description of Artificial Sequence: Synthetic oligonucleotide"
  source: /note="RNA"
  source: /note="5' tri-ethylene glycol (TEG)"
  modified_base (7)..(7): bicyclic nucleic acid (BNA)
  modified_base (8)..(8): bicyclic nucleic acid (BNA)
  source: /note="3' tri-ethylene glycol (TEG)"
agauggca

SEQ ID NO: 10976 - RNA, 30 nt, Artificial Sequence; identical to SEQ ID NO: 284
  source: /note="Description of Artificial Sequence: Synthetic oligonucleotide"
  source: /note="RNA"
  source: /note="5' tri-ethylene glycol (TEG)"
  modified_base (29)..(29): bicyclic nucleic acid (BNA)
  modified_base (30)..(30): bicyclic nucleic acid (BNA)
  source: /note="3' tri-ethylene glycol (TEG)"

SEQ ID NO: 10977 - DNA, 29 bp, Artificial Sequence
  source: /note="Description of Artificial Sequence: Synthetic oligonucleotide"
  source: /note="Description of Combined DNA/RNA Molecule: Synthetic oligonucleotide"
  source: /note="DNA/RNA"
  source: /note="5' tri-ethylene glycol (TEG)"
  modified_base (28)..(28): bicyclic nucleic acid (BNA)
  modified_base (29)..(29): bicyclic nucleic acid (BNA)
  source: /note="3' tri-ethylene glycol (TEG)"
cuccaacaucaaggaagauggcauuucta

SEQ ID NO: 10978 - DNA, 28 bp, Artificial Sequence
  source: /note="Description of Artificial Sequence: Synthetic oligonucleotide"
  source: /note="Description of Combined DNA/RNA Molecule: Synthetic oligonucleotide"
  source: /note="DNA/RNA"
  source: /note="5' tri-ethylene glycol (TEG)"
  modified_base (27)..(27): bicyclic nucleic acid (BNA)
  modified_base (28)..(28): bicyclic nucleic acid (BNA)
  source: /note="3' tri-ethylene glycol (TEG)"
cuccaacaucaaggaagauggcauuuct

SEQ ID NO: 10979 - DNA, 27 bp, Artificial Sequence
  source: /note="Description of Artificial Sequence: Synthetic oligonucleotide"
  source: /note="Description of Combined DNA/RNA Molecule: Synthetic oligonucleotide"
  source: /note="DNA/RNA"
  source: /note="5' tri-ethylene glycol (TEG)"
  modified_base (26)..(26): bicyclic nucleic acid (BNA)
  modified_base (27)..(27): bicyclic nucleic acid (BNA)
  source: /note="3' tri-ethylene glycol (TEG)"
cuccaacaucaaggaagauggcauutc

SEQ ID NO: 10980 - DNA, 26 bp, Artificial Sequence
  source: /note="Description of Artificial Sequence: Synthetic oligonucleotide"
  source: /note="Description of Combined DNA/RNA Molecule: Synthetic oligonucleotide"
  source: /note="DNA/RNA"
  source: /note="5' tri-ethylene glycol (TEG)"
  modified_base (25)..(25): bicyclic nucleic acid (BNA)
  modified_base (26)..(26): bicyclic nucleic acid (BNA)
  source: /note="3' tri-ethylene glycol (TEG)"
cuccaacaucaaggaagauggcautt

SEQ ID NO: 10981 - DNA, 25 bp, Artificial Sequence
  source: /note="Description of Artificial Sequence: Synthetic oligonucleotide"
  source: /note="Description of Combined DNA/RNA Molecule: Synthetic oligonucleotide"
  source: /note="DNA/RNA"
  source: /note="5' tri-ethylene glycol (TEG)"
  modified_base (24)..(24): bicyclic nucleic acid (BNA)
  modified_base (25)..(25): bicyclic nucleic acid (BNA)
  source: /note="3' tri-ethylene glycol (TEG)"
cuccaacaucaaggaagauggcatt

SEQ ID NO: 10982 - DNA, 24 bp, Artificial Sequence
  source: /note="Description of Artificial Sequence: Synthetic oligonucleotide"
  source: /note="Description of Combined DNA/RNA Molecule: Synthetic oligonucleotide"
  source: /note="DNA/RNA"
  source: /note="5' tri-ethylene glycol (TEG)"
  modified_base (23)..(23): bicyclic nucleic acid (BNA)
  modified_base (24)..(24): bicyclic nucleic acid (BNA)
  source: /note="3' tri-ethylene glycol (TEG)"
cuccaacaucaaggaagauggcat

SEQ ID NO: 10983 - RNA, 23 nt, Artificial Sequence
  source: /note="Description of Artificial Sequence: Synthetic oligonucleotide"
  source: /note="RNA"
  source: /note="5' tri-ethylene glycol (TEG)"
  modified_base (22)..(22): bicyclic nucleic acid (BNA)
  modified_base (23)..(23): bicyclic nucleic acid (BNA)
  source: /note="3' tri-ethylene glycol (TEG)"
cuccaacaucaaggaagauggca

SEQ ID NO: 10984 - RNA, 22 nt, Artificial Sequence
  source: /note="Description of Artificial Sequence: Synthetic oligonucleotide"
  source: /note="RNA"
  source: /note="5' tri-ethylene glycol (TEG)"
  modified_base (21)..(21): bicyclic nucleic acid (BNA)
  modified_base (22)..(22): bicyclic nucleic acid (BNA)
  source: /note="3' tri-ethylene glycol (TEG)"
cuccaacaucaaggaagauggc

SEQ ID NO: 10985 - RNA, 21 nt, Artificial Sequence
  source: /note="Description of Artificial Sequence: Synthetic oligonucleotide"
  source: /note="RNA"
  source: /note="5' tri-ethylene glycol (TEG)"
  modified_base (20)..(20): bicyclic nucleic acid (BNA)
  modified_base (21)..(21): bicyclic nucleic acid (BNA)
  source: /note="3' tri-ethylene glycol (TEG)"
cuccaacaucaaggaagaugg

SEQ ID NO: 10986 - DNA, 20 bp, Artificial Sequence
  source: /note="Description of Artificial Sequence: Synthetic oligonucleotide"
  source: /note="Description of Combined DNA/RNA Molecule: Synthetic oligonucleotide"
  source: /note="DNA/RNA"
  source: /note="5' tri-ethylene glycol (TEG)"
  modified_base (19)..(19): bicyclic nucleic acid (BNA)
  modified_base (20)..(20): bicyclic nucleic acid (BNA)
  source: /note="3' tri-ethylene glycol (TEG)"
cuccaacaucaaggaagatg

SEQ ID NO: 10987 - DNA, 19 bp, Artificial Sequence
  source: /note="Description of Artificial Sequence: Synthetic oligonucleotide"
  source: /note="Description of Combined DNA/RNA Molecule: Synthetic oligonucleotide"
  source: /note="DNA/RNA"
  source: /note="5' tri-ethylene glycol (TEG)"
  modified_base (18)..(18): bicyclic nucleic acid (BNA)
  modified_base (19)..(19): bicyclic nucleic acid (BNA)
  source: /note="3' tri-ethylene glycol (TEG)"
cuccaacaucaaggaagat

SEQ ID NO: 10988 - RNA, 18 nt, Artificial Sequence
  source: /note="Description of Artificial Sequence: Synthetic oligonucleotide"
  source: /note="RNA"
  source: /note="5' tri-ethylene glycol (TEG)"
  modified_base (17)..(17): bicyclic nucleic acid (BNA)
  modified_base (18)..(18): bicyclic nucleic acid (BNA)
  source: /note="3' tri-ethylene glycol (TEG)"
cuccaacaucaaggaaga

SEQ ID NO: 10989 - RNA, 17 nt, Artificial Sequence
  source: /note="Description of Artificial Sequence: Synthetic oligonucleotide"
  source: /note="RNA"
  source: /note="5' tri-ethylene glycol (TEG)"
  modified_base (16)..(16): bicyclic nucleic acid (BNA)
  modified_base (17)..(17): bicyclic nucleic acid (BNA)
  source: /note="3' tri-ethylene glycol (TEG)"
cuccaacaucaaggaag

SEQ ID NO: 10990 - RNA, 29 nt, Artificial Sequence
  source: /note="Description of Artificial Sequence: Synthetic oligonucleotide"
  source: /note="RNA"
  source: /note="5' tri-ethylene glycol (TEG)"
  modified_base (28)..(28): bicyclic nucleic acid (BNA)
  modified_base (29)..(29): bicyclic nucleic acid (BNA)
  source: /note="3' tri-ethylene glycol (TEG)"
uccaacaucaaggaagauggcauuucuag

SEQ ID NO: 10991 - DNA, 28 bp, Artificial Sequence
  source: /note="Description of Artificial Sequence: Synthetic oligonucleotide"
  source: /note="Description of Combined DNA/RNA Molecule: Synthetic oligonucleotide"
  source: /note="DNA/RNA"
  source: /note="5' tri-ethylene glycol (TEG)"
  modified_base (27)..(27): bicyclic nucleic acid (BNA)
  modified_base (28)..(28): bicyclic nucleic acid (BNA)
  source: /note="3' tri-ethylene glycol (TEG)"
uccaacaucaaggaagauggcauuucta

SEQ ID NO: 10992 - DNA, 27 bp, Artificial Sequence
  source: /note="Description of Artificial Sequence: Synthetic oligonucleotide"
  source: /note="Description of Combined DNA/RNA Molecule: Synthetic oligonucleotide"
  source: /note="DNA/RNA"
  source: /note="5' tri-ethylene glycol (TEG)"
  modified_base (26)..(26): bicyclic nucleic acid (BNA)
  modified_base (27)..(27): bicyclic nucleic acid (BNA)
  source: /note="3' tri-ethylene glycol (TEG)"
uccaacaucaaggaagauggcauuuct

SEQ ID NO: 10993 - DNA, 26 bp, Artificial Sequence
  source: /note="Description of Artificial Sequence: Synthetic oligonucleotide"
  source: /note="Description of Combined DNA/RNA Molecule: Synthetic oligonucleotide"
  source: /note="DNA/RNA"
  source: /note="5' tri-ethylene glycol (TEG)"
  modified_base (25)..(25): bicyclic nucleic acid (BNA)
  modified_base (26)..(26): bicyclic nucleic acid (BNA)
  source: /note="3' tri-ethylene glycol (TEG)"
uccaacaucaaggaagauggcauutc

SEQ ID NO: 10994 - DNA, 25 bp, Artificial Sequence
  source: /note="Description of Artificial Sequence: Synthetic oligonucleotide"
  source: /note="Description of Combined DNA/RNA Molecule: Synthetic oligonucleotide"
  source: /note="DNA/RNA"
  source: /note="5' tri-ethylene glycol (TEG)"
  modified_base (24)..(24): bicyclic nucleic acid (BNA)
  modified_base (25)..(25): bicyclic nucleic acid (BNA)
  source: /note="3' tri-ethylene glycol (TEG)"
uccaacaucaaggaagauggcautt

SEQ ID NO: 10995 - DNA, 24 bp, Artificial Sequence
  source: /note="Description of Artificial Sequence: Synthetic oligonucleotide"
  source: /note="Description of Combined DNA/RNA Molecule: Synthetic oligonucleotide"
  source: /note="DNA/RNA"
  source: /note="5' tri-ethylene glycol (TEG)"
  modified_base (23)..(23): bicyclic nucleic acid (BNA)
  modified_base (24)..(24): bicyclic nucleic acid (BNA)
  source: /note="3' tri-ethylene glycol (TEG)"
uccaacaucaaggaagauggcatt

SEQ ID NO: 10996 - DNA, 23 bp, Artificial Sequence
  source: /note="Description of Artificial Sequence: Synthetic oligonucleotide"
  source: /note="Description of Combined DNA/RNA Molecule: Synthetic oligonucleotide"
  source: /note="DNA/RNA"
  source: /note="5' tri-ethylene glycol (TEG)"
  modified_base (22)..(22): bicyclic nucleic acid (BNA)
  modified_base (23)..(23): bicyclic nucleic acid (BNA)
  source: /note="3' tri-ethylene glycol (TEG)"
uccaacaucaaggaagauggcat

SEQ ID NO: 10997 - RNA, 22 nt, Artificial Sequence
  source: /note="Description of Artificial Sequence: Synthetic oligonucleotide"
  source: /note="RNA"
  source: /note="5' tri-ethylene glycol (TEG)"
  modified_base (21)..(21): bicyclic nucleic acid (BNA)
  modified_base (22)..(22): bicyclic nucleic acid (BNA)
  source: /note="3' tri-ethylene glycol (TEG)"
uccaacaucaaggaagauggca

SEQ ID NO: 10998 - RNA, 21 nt, Artificial Sequence
  source: /note="Description of Artificial Sequence: Synthetic oligonucleotide"
  source: /note="RNA"
  source: /note="5' tri-ethylene glycol (TEG)"
  modified_base (20)..(20): bicyclic nucleic acid (BNA)
  modified_base (21)..(21): bicyclic nucleic acid (BNA)
  source: /note="3' tri-ethylene glycol (TEG)"
uccaacaucaaggaagauggc

SEQ ID NO: 10999 - RNA, 20 nt, Artificial Sequence
  source: /note="Description of Artificial Sequence: Synthetic oligonucleotide"
  source: /note="RNA"
  source: /note="5' tri-ethylene glycol (TEG)"
  modified_base (19)..(19): bicyclic nucleic acid (BNA)
  modified_base (20)..(20): bicyclic nucleic acid (BNA)
  source: /note="3' tri-ethylene glycol (TEG)"
uccaacaucaaggaagaugg

SEQ ID NO: 11000 - DNA, 19 bp, Artificial Sequence
  source: /note="Description of Artificial Sequence: Synthetic oligonucleotide"
  source: /note="Description of Combined DNA/RNA Molecule: Synthetic oligonucleotide"
  source: /note="DNA/RNA"
  source: /note="5' tri-ethylene glycol (TEG)"
  modified_base (18)..(18): bicyclic nucleic acid (BNA)
  modified_base (19)..(19): bicyclic nucleic acid (BNA)
  source: /note="3' tri-ethylene glycol (TEG)"
uccaacaucaaggaagatg

SEQ ID NO: 11001 - DNA, 18 bp, Artificial Sequence
  source: /note="Description of Artificial Sequence: Synthetic oligonucleotide"
  source: /note="Description of Combined DNA/RNA Molecule: Synthetic oligonucleotide"
  source: /note="DNA/RNA"
  source: /note="5' tri-ethylene glycol (TEG)"
  modified_base (17)..(17): bicyclic nucleic acid (BNA)
  modified_base (18)..(18): bicyclic nucleic acid (BNA)
  source: /note="3' tri-ethylene glycol (TEG)"
uccaacaucaaggaagat

SEQ ID NO: 11002 - RNA, 17 nt, Artificial Sequence
  source: /note="Description of Artificial Sequence: Synthetic oligonucleotide"
  source: /note="RNA"
  source: /note="5' tri-ethylene glycol (TEG)"
  modified_base (16)..(16): bicyclic nucleic acid (BNA)
  modified_base (17)..(17): bicyclic nucleic acid (BNA)
  source: /note="3' tri-ethylene glycol (TEG)"
uccaacaucaaggaaga

SEQ ID NO: 11003 - RNA, 16 nt, Artificial Sequence
  source: /note="Description of Artificial Sequence: Synthetic oligonucleotide"
  source: /note="RNA"
  source: /note="5' tri-ethylene glycol (TEG)"
  modified_base (15)..(15): bicyclic nucleic acid (BNA)
  modified_base (16)..(16): bicyclic nucleic acid (BNA)
  source: /note="3' tri-ethylene glycol (TEG)"
uccaacaucaaggaag

SEQ ID NO: 11004 - RNA, 28 nt, Artificial Sequence
  source: /note="Description of Artificial Sequence: Synthetic oligonucleotide"
  source: /note="RNA"
  source: /note="5' tri-ethylene glycol (TEG)"
  modified_base (27)..(27): bicyclic nucleic acid (BNA)
  modified_base (28)..(28): bicyclic nucleic acid (BNA)
  source: /note="3' tri-ethylene glycol (TEG)"
ccaacaucaaggaagauggcauuucuag

SEQ ID NO: 11005 - DNA, 27 bp, Artificial Sequence
  source: /note="Description of Artificial Sequence: Synthetic oligonucleotide"
  source: /note="Description of Combined DNA/RNA Molecule: Synthetic oligonucleotide"
  source: /note="DNA/RNA"
  source: /note="5' tri-ethylene glycol (TEG)"
  modified_base (26)..(26): bicyclic nucleic acid (BNA)
  modified_base (27)..(27): bicyclic nucleic acid (BNA)
  source: /note="3' tri-ethylene glycol (TEG)"
ccaacaucaaggaagauggcauuucta

SEQ ID NO: 11006 - DNA, 26 bp, Artificial Sequence
  source: /note="Description of Artificial Sequence: Synthetic oligonucleotide"
  source: /note="Description of Combined DNA/RNA Molecule: Synthetic oligonucleotide"
  source: /note="DNA/RNA"
  source: /note="5' tri-ethylene glycol (TEG)"
  modified_base (25)..(25): bicyclic nucleic acid (BNA)
  modified_base (26)..(26): bicyclic nucleic acid (BNA)
  source: /note="3' tri-ethylene glycol (TEG)"
ccaacaucaaggaagauggcauuuct

SEQ ID NO: 11007 - DNA, 25 bp, Artificial Sequence
  source: /note="Description of Artificial Sequence: Synthetic oligonucleotide"
  source: /note="Description of Combined DNA/RNA Molecule: Synthetic oligonucleotide"
  source: /note="DNA/RNA"
  source: /note="5' tri-ethylene glycol (TEG)"
  modified_base (24)..(24): bicyclic nucleic acid (BNA)
  modified_base (25)..(25): bicyclic nucleic acid (BNA)
  source: /note="3' tri-ethylene glycol (TEG)"
ccaacaucaaggaagauggcauutc

SEQ ID NO: 11008 - DNA, 24 bp, Artificial Sequence
  source: /note="Description of Artificial Sequence: Synthetic oligonucleotide"
  source: /note="Description of Combined DNA/RNA Molecule: Synthetic oligonucleotide"
  source: /note="DNA/RNA"
  source: /note="5' tri-ethylene glycol (TEG)"
  modified_base (23)..(23): bicyclic nucleic acid (BNA)
  modified_base (24)..(24): bicyclic nucleic acid (BNA)
  source: /note="3' tri-ethylene glycol (TEG)"
ccaacaucaaggaagauggcautt

SEQ ID NO: 11009 - DNA, 23 bp, Artificial Sequence
  source: /note="Description of Artificial Sequence: Synthetic oligonucleotide"
  source: /note="Description of Combined DNA/RNA Molecule: Synthetic oligonucleotide"
  source: /note="DNA/RNA"
  source: /note="5' tri-ethylene glycol (TEG)"
  modified_base (22)..(22): bicyclic nucleic acid (BNA)
  modified_base (23)..(23): bicyclic nucleic acid (BNA)
  source: /note="3' tri-ethylene glycol (TEG)"
ccaacaucaaggaagauggcatt

SEQ ID NO: 11010 - DNA, 22 bp, Artificial Sequence
  source: /note="Description of Artificial Sequence: Synthetic oligonucleotide"
  source: /note="Description of Combined DNA/RNA Molecule: Synthetic oligonucleotide"
  source: /note="DNA/RNA"
  source: /note="5' tri-ethylene glycol (TEG)"
  modified_base (21)..(21): bicyclic nucleic acid (BNA)
  modified_base (22)..(22): bicyclic nucleic acid (BNA)
  source: /note="3' tri-ethylene glycol (TEG)"
ccaacaucaaggaagauggcat

SEQ ID NO: 11011 - RNA, 21 nt, Artificial Sequence
  source: /note="Description of Artificial Sequence: Synthetic oligonucleotide"
  source: /note="RNA"
  source: /note="5' tri-ethylene glycol (TEG)"
  modified_base (20)..(20): bicyclic nucleic acid (BNA)
  modified_base (21)..(21): bicyclic nucleic acid (BNA)
  source: /note="3' tri-ethylene glycol (TEG)"
ccaacaucaaggaagauggca

SEQ ID NO: 11012 - RNA, 20 nt, Artificial Sequence
  source: /note="Description of Artificial Sequence: Synthetic oligonucleotide"
  source: /note="RNA"
  source: /note="5' tri-ethylene glycol (TEG)"
  modified_base (19)..(19): bicyclic nucleic acid (BNA)
  modified_base (20)..(20): bicyclic nucleic acid (BNA)
  source: /note="3' tri-ethylene glycol (TEG)"
ccaacaucaaggaagauggc

SEQ ID NO: 11013 - RNA, 19 nt, Artificial Sequence
  source: /note="Description of Artificial Sequence: Synthetic oligonucleotide"
  source: /note="RNA"
  source: /note="5' tri-ethylene glycol (TEG)"
  modified_base (18)..(18): bicyclic nucleic acid (BNA)
  modified_base (19)..(19): bicyclic nucleic acid (BNA)
  source: /note="3' tri-ethylene glycol (TEG)"
ccaacaucaaggaagaugg

SEQ ID NO: 11014 - DNA, 18 bp, Artificial Sequence
  source: /note="Description of Artificial Sequence: Synthetic oligonucleotide"
  source: /note="Description of Combined DNA/RNA Molecule: Synthetic oligonucleotide"
  source: /note="DNA/RNA"
  source: /note="5' tri-ethylene glycol (TEG)"
  modified_base (17)..(17): bicyclic nucleic acid (BNA)
  modified_base (18)..(18): bicyclic nucleic acid (BNA)
  source: /note="3' tri-ethylene glycol (TEG)"
ccaacaucaaggaagatg

SEQ ID NO: 11015 - DNA, 17 bp, Artificial Sequence
  source: /note="Description of Artificial Sequence: Synthetic oligonucleotide"
  source: /note="Description of Combined DNA/RNA Molecule: Synthetic oligonucleotide"
  source: /note="DNA/RNA"
  source: /note="5' tri-ethylene glycol (TEG)"
  modified_base (16)..(16): bicyclic nucleic acid (BNA)
  modified_base (17)..(17): bicyclic nucleic acid (BNA)
  source: /note="3' tri-ethylene glycol (TEG)"
ccaacaucaaggaagat

SEQ ID NO: 11016 - RNA, 16 nt, Artificial Sequence
  source: /note="Description of Artificial Sequence: Synthetic oligonucleotide"
  source: /note="RNA"
  source: /note="5' tri-ethylene glycol (TEG)"
  modified_base (15)..(15): bicyclic nucleic acid (BNA)
  modified_base (16)..(16): bicyclic nucleic acid (BNA)
  source: /note="3' tri-ethylene glycol (TEG)"
ccaacaucaaggaaga

SEQ ID NO: 11017 - RNA, 15 nt, Artificial Sequence
  source: /note="Description of Artificial Sequence: Synthetic oligonucleotide"
  source: /note="RNA"
  source: /note="5' tri-ethylene glycol (TEG)"
  modified_base (14)..(14): bicyclic nucleic acid (BNA)
  modified_base (15)..(15): bicyclic nucleic acid (BNA)
  source: /note="3' tri-ethylene glycol (TEG)"
ccaacaucaaggaag

SEQ ID NO: 11018 - RNA, 27 nt, Artificial Sequence
  source: /note="Description of Artificial Sequence: Synthetic oligonucleotide"
  source: /note="RNA"
  source: /note="5' tri-ethylene glycol (TEG)"
  modified_base (26)..(26): bicyclic nucleic acid (BNA)
  modified_base (27)..(27): bicyclic nucleic acid (BNA)
  source: /note="3' tri-ethylene glycol (TEG)"
caacaucaaggaagauggcauuucuag

SEQ ID NO: 11019 - DNA, 26 bp, Artificial Sequence
  source: /note="Description of Artificial Sequence: Synthetic oligonucleotide"
  source: /note="Description of Combined DNA/RNA Molecule: Synthetic oligonucleotide"
  source: /note="DNA/RNA"
  source: /note="5' tri-ethylene glycol (TEG)"
  modified_base (25)..(25): bicyclic nucleic acid (BNA)
  modified_base (26)..(26): bicyclic nucleic acid (BNA)
  source: /note="3' tri-ethylene glycol (TEG)"
caacaucaaggaagauggcauuucta

SEQ ID NO: 11020 - DNA, 25 bp, Artificial Sequence
  source: /note="Description of Artificial Sequence: Synthetic oligonucleotide"
  source: /note="Description of Combined DNA/RNA Molecule: Synthetic oligonucleotide"
  source: /note="DNA/RNA"
  source: /note="5' tri-ethylene glycol (TEG)"
  modified_base (24)..(24): bicyclic nucleic acid (BNA)
  modified_base (25)..(25): bicyclic nucleic acid (BNA)
  source: /note="3' tri-ethylene glycol (TEG)"
caacaucaaggaagauggcauuuct

SEQ ID NO: 11021 - DNA, 24 bp, Artificial Sequence
  source: /note="Description of Artificial Sequence: Synthetic oligonucleotide"
  source: /note="Description of Combined DNA/RNA Molecule: Synthetic oligonucleotide"
  source: /note="DNA/RNA"
  source: /note="5' tri-ethylene glycol (TEG)"
  modified_base (23)..(23): bicyclic nucleic acid (BNA)
  modified_base (24)..(24): bicyclic nucleic acid (BNA)
  source: /note="3' tri-ethylene glycol (TEG)"
caacaucaaggaagauggcauutc

SEQ ID NO: 11022 - DNA, 23 bp, Artificial Sequence
  source: /note="Description of Artificial Sequence: Synthetic oligonucleotide"
  source: /note="Description of Combined DNA/RNA Molecule: Synthetic oligonucleotide"
  source: /note="DNA/RNA"
  source: /note="5' tri-ethylene glycol (TEG)"
  modified_base (22)..(22): bicyclic nucleic acid (BNA)
  modified_base (23)..(23): bicyclic nucleic acid (BNA)
  source: /note="3' tri-ethylene glycol (TEG)"
caacaucaaggaagauggcautt

SEQ ID NO: 11023 - DNA, 22 bp, Artificial Sequence
  source: /note="Description of Artificial Sequence: Synthetic oligonucleotide"
  source: /note="Description of Combined DNA/RNA Molecule: Synthetic oligonucleotide"
  source: /note="DNA/RNA"
  source: /note="5' tri-ethylene glycol (TEG)"
  modified_base (21)..(21): bicyclic nucleic acid (BNA)
  modified_base (22)..(22): bicyclic nucleic acid (BNA)
  source: /note="3' tri-ethylene glycol (TEG)"
caacaucaaggaagauggcatt

SEQ ID NO: 11024 - DNA, 21 bp, Artificial Sequence
  source: /note="Description of Artificial Sequence: Synthetic oligonucleotide"
  source: /note="Description of Combined DNA/RNA Molecule: Synthetic oligonucleotide"
  source: /note="DNA/RNA"
  source: /note="5' tri-ethylene glycol (TEG)"
  modified_base (20)..(20): bicyclic nucleic acid (BNA)
  modified_base (21)..(21): bicyclic nucleic acid (BNA)
  source: /note="3' tri-ethylene glycol (TEG)"
caacaucaaggaagauggcat

SEQ ID NO: 11025 - RNA, 20 nt, Artificial Sequence
  source: /note="Description of Artificial Sequence: Synthetic oligonucleotide"
  source: /note="RNA"
  source: /note="5' tri-ethylene glycol (TEG)"
  modified_base (19)..(19): bicyclic nucleic acid (BNA)
  modified_base (20)..(20): bicyclic nucleic acid (BNA)
  source: /note="3' tri-ethylene glycol (TEG)"
caacaucaaggaagauggca

SEQ ID NO: 11026 - RNA, 19 nt, Artificial Sequence
  source: /note="Description of Artificial Sequence: Synthetic oligonucleotide"
  source: /note="RNA"
  source: /note="5' tri-ethylene glycol (TEG)"
  modified_base (18)..(18): bicyclic nucleic acid (BNA)
  modified_base (19)..(19): bicyclic nucleic acid (BNA)
  source: /note="3' tri-ethylene glycol (TEG)"
caacaucaaggaagauggc

SEQ ID NO: 11027 - RNA, 18 nt, Artificial Sequence
  source: /note="Description of Artificial Sequence: Synthetic oligonucleotide"
  source: /note="RNA"
  source: /note="5' tri-ethylene glycol (TEG)"
  modified_base (17)..(17): bicyclic nucleic acid (BNA)
  modified_base (18)..(18): bicyclic nucleic acid (BNA)
  source: /note="3' tri-ethylene glycol (TEG)"
caacaucaaggaagaugg

SEQ ID NO: 11028 - DNA, 17 bp, Artificial Sequence
  source: /note="Description of Artificial Sequence: Synthetic oligonucleotide"
  source: /note="Description of Combined DNA/RNA Molecule: Synthetic oligonucleotide"
  source: /note="DNA/RNA"
  source: /note="5' tri-ethylene glycol (TEG)"
  modified_base (16)..(16): bicyclic nucleic acid (BNA)
  modified_base (17)..(17): bicyclic nucleic acid (BNA)
  source: /note="3' tri-ethylene glycol (TEG)"
caacaucaaggaagatg

SEQ ID NO: 11029 - DNA, 16 bp, Artificial Sequence
  source: /note="Description of Artificial Sequence: Synthetic oligonucleotide"
  source: /note="Description of Combined DNA/RNA Molecule: Synthetic oligonucleotide"
  source: /note="DNA/RNA"
  source: /note="5' tri-ethylene glycol (TEG)"
  modified_base (15)..(15): bicyclic nucleic acid (BNA)
  modified_base (16)..(16): bicyclic nucleic acid (BNA)
  source: /note="3' tri-ethylene glycol (TEG)"
caacaucaaggaagat

SEQ ID NO: 11030 - RNA, 15 nt, Artificial Sequence
  source: /note="Description of Artificial Sequence: Synthetic oligonucleotide"
  source: /note="RNA"
  source: /note="5' tri-ethylene glycol (TEG)"
  modified_base (14)..(14): bicyclic nucleic acid (BNA)
  modified_base (15)..(15): bicyclic nucleic acid (BNA)
  source: /note="3' tri-ethylene glycol (TEG)"
caacaucaaggaaga

SEQ ID NO: 11031 - RNA, 14 nt, Artificial Sequence
  source: /note="Description of Artificial Sequence: Synthetic oligonucleotide"
  source: /note="RNA"
  source: /note="5' tri-ethylene glycol (TEG)"
  modified_base (13)..(13): bicyclic nucleic acid (BNA)
  modified_base (14)..(14): bicyclic nucleic acid (BNA)
  source: /note="3' tri-ethylene glycol (TEG)"
caacaucaaggaag

SEQ ID NO: 11032 - RNA, 26 nt, Artificial Sequence
  source: /note="Description of Artificial Sequence: Synthetic oligonucleotide"
  source: /note="RNA"
  source: /note="5' tri-ethylene glycol (TEG)"
  modified_base (25)..(25): bicyclic nucleic acid (BNA)
  modified_base (26)..(26): bicyclic nucleic acid (BNA)
  source: /note="3' tri-ethylene glycol (TEG)"
aacaucaaggaagauggcauuucuag

SEQ ID NO: 11033 - DNA, 25 bp, Artificial Sequence
  source: /note="Description of Artificial Sequence: Synthetic oligonucleotide"
  source: /note="Description of Combined DNA/RNA Molecule: Synthetic oligonucleotide"
  source: /note="DNA/RNA"
  source: /note="5' tri-ethylene glycol (TEG)"
  modified_base (24)..(24): bicyclic nucleic acid (BNA)
  modified_base (25)..(25): bicyclic nucleic acid (BNA)
  source: /note="3' tri-ethylene glycol (TEG)"
aacaucaaggaagauggcauuucta

SEQ ID NO: 11034 - DNA, 24 bp, Artificial Sequence
  source: /note="Description of Artificial Sequence: Synthetic oligonucleotide"
  source: /note="Description of Combined DNA/RNA Molecule: Synthetic oligonucleotide"
  source: /note="DNA/RNA"
  source: /note="5' tri-ethylene glycol (TEG)"
  modified_base (23)..(23): bicyclic nucleic acid (BNA)
  modified_base (24)..(24): bicyclic nucleic acid (BNA)
  source: /note="3' tri-ethylene glycol (TEG)"
aacaucaaggaagauggcauuuct

SEQ ID NO: 11035 - DNA, 23 bp, Artificial Sequence
  source: /note="Description of Artificial Sequence: Synthetic oligonucleotide"
  source: /note="Description of Combined DNA/RNA Molecule: Synthetic oligonucleotide"
  source: /note="DNA/RNA"
  source: /note="5' tri-ethylene glycol (TEG)"
  modified_base (22)..(22): bicyclic nucleic acid (BNA)
  modified_base (23)..(23): bicyclic nucleic acid (BNA)
  source: /note="3' tri-ethylene glycol (TEG)"
aacaucaaggaagauggcauutc

SEQ ID NO: 11036 - DNA, 22 bp, Artificial Sequence
  source: /note="Description of Artificial Sequence: Synthetic oligonucleotide"
  source: /note="Description of Combined DNA/RNA Molecule: Synthetic oligonucleotide"
  source: /note="DNA/RNA"
  source: /note="5' tri-ethylene glycol (TEG)"
  modified_base (21)..(21): bicyclic nucleic acid (BNA)
  modified_base (22)..(22): bicyclic nucleic acid (BNA)
  source: /note="3' tri-ethylene glycol (TEG)"
aacaucaaggaagauggcautt

SEQ ID NO: 11037 - DNA, 21 bp, Artificial Sequence
  source: /note="Description of Artificial Sequence: Synthetic oligonucleotide"
  source: /note="Description of Combined DNA/RNA Molecule: Synthetic oligonucleotide"
  source: /note="DNA/RNA"
  source: /note="5' tri-ethylene glycol (TEG)"
  modified_base (20)..(20): bicyclic nucleic acid (BNA)
  modified_base (21)..(21): bicyclic nucleic acid (BNA)
  source: /note="3' tri-ethylene glycol (TEG)"
aacaucaaggaagauggcatt

SEQ ID NO: 11038 - DNA, 20 bp, Artificial Sequence
  source: /note="Description of Artificial Sequence: Synthetic oligonucleotide"
  source: /note="Description of Combined DNA/RNA Molecule: Synthetic oligonucleotide"
  source: /note="DNA/RNA"
  source: /note="5' tri-ethylene glycol (TEG)"
  modified_base (19)..(19): bicyclic nucleic acid (BNA)
  modified_base (20)..(20): bicyclic nucleic acid (BNA)
  source: /note="3' tri-ethylene glycol (TEG)"
aacaucaaggaagauggcat

SEQ ID NO: 11039 - RNA, 19 nt, Artificial Sequence
  source: /note="Description of Artificial Sequence: Synthetic oligonucleotide"
  source: /note="RNA"
  source: /note="5' tri-ethylene glycol (TEG)"
  modified_base (18)..(18): bicyclic nucleic acid (BNA)
  modified_base (19)..(19): bicyclic nucleic acid (BNA)
  source: /note="3' tri-ethylene glycol (TEG)"
aacaucaaggaagauggca

SEQ ID NO: 11040 - RNA, 18 nt, Artificial Sequence
  source: /note="Description of Artificial Sequence: Synthetic oligonucleotide"
  source: /note="RNA"
  source: /note="5' tri-ethylene glycol (TEG)"
  modified_base (17)..(17): bicyclic nucleic acid (BNA)
  modified_base (18)..(18): bicyclic nucleic acid (BNA)
  source: /note="3' tri-ethylene glycol (TEG)"
aacaucaaggaagauggc

SEQ ID NO: 11041 - RNA, 17 nt, Artificial Sequence
  source: /note="Description of Artificial Sequence: Synthetic oligonucleotide"
  source: /note="RNA"
  source: /note="5' tri-ethylene glycol (TEG)"
  modified_base (16)..(16): bicyclic nucleic acid (BNA)
  modified_base (17)..(17): bicyclic nucleic acid (BNA)
  source: /note="3' tri-ethylene glycol (TEG)"
aacaucaaggaagaugg

SEQ ID NO: 11042 - DNA, 16 bp, Artificial Sequence
  source: /note="Description of Artificial Sequence: Synthetic oligonucleotide"
  source: /note="Description of Combined DNA/RNA Molecule: Synthetic oligonucleotide"
  source: /note="DNA/RNA"
  source: /note="5' tri-ethylene glycol (TEG)"
  modified_base (15)..(15): bicyclic nucleic acid (BNA)
  modified_base (16)..(16): bicyclic nucleic acid (BNA)
  source: /note="3' tri-ethylene glycol (TEG)"
aacaucaaggaagatg

SEQ ID NO: 11043 - DNA, 15 bp, Artificial Sequence
  source: /note="Description of Artificial Sequence: Synthetic oligonucleotide"
  source: /note="Description of Combined DNA/RNA Molecule: Synthetic oligonucleotide"
  source: /note="DNA/RNA"
  source: /note="5' tri-ethylene glycol (TEG)"
  modified_base (14)..(14): bicyclic nucleic acid (BNA)
  modified_base (15)..(15): bicyclic nucleic acid (BNA)
  source: /note="3' tri-ethylene glycol (TEG)"
aacaucaaggaagat

SEQ ID NO: 11044 - RNA, 14 nt, Artificial Sequence
  source: /note="Description of Artificial Sequence: Synthetic oligonucleotide"
  source: /note="RNA"
  source: /note="5' tri-ethylene glycol (TEG)"
  modified_base (13)..(13): bicyclic nucleic acid (BNA)
  modified_base (14)..(14): bicyclic nucleic acid (BNA)
  source: /note="3' tri-ethylene glycol (TEG)"
aacaucaaggaaga

SEQ ID NO: 11045 - RNA, 13 nt, Artificial Sequence
  source: /note="Description of Artificial Sequence: Synthetic oligonucleotide"
  source: /note="RNA"
  source: /note="5' tri-ethylene glycol (TEG)"
  modified_base (12)..(12): bicyclic nucleic acid (BNA)
  modified_base (13)..(13): bicyclic nucleic acid (BNA)
  source: /note="3' tri-ethylene glycol (TEG)"
aacaucaaggaag

SEQ ID NO: 11046 - RNA, 25 nt, Artificial Sequence
  source: /note="Description of Artificial Sequence: Synthetic oligonucleotide"
  source: /note="RNA"
  source: /note="5' tri-ethylene glycol (TEG)"
  modified_base (24)..(24): bicyclic nucleic acid (BNA)
  modified_base (25)..(25): bicyclic nucleic acid (BNA)
  source: /note="3' tri-ethylene glycol (TEG)"
acaucaaggaagauggcauuucuag

SEQ ID NO: 11047 - DNA, 24 bp, Artificial Sequence
  source: /note="Description of Artificial Sequence: Synthetic oligonucleotide"
  source: /note="Description of Combined DNA/RNA Molecule: Synthetic oligonucleotide"
  source: /note="DNA/RNA"
  source: /note="5' tri-ethylene glycol (TEG)"
  modified_base (23)..(23): bicyclic nucleic acid (BNA)
  modified_base (24)..(24): bicyclic nucleic acid (BNA)
  source: /note="3' tri-ethylene glycol (TEG)"
acaucaaggaagauggcauuucta

SEQ ID NO: 11048 - DNA, 23 bp, Artificial Sequence
  source: /note="Description of Artificial Sequence: Synthetic oligonucleotide"
  source: /note="Description of Combined DNA/RNA Molecule: Synthetic oligonucleotide"
  source: /note="DNA/RNA"
  source: /note="5' tri-ethylene glycol (TEG)"
  modified_base (22)..(22): bicyclic nucleic acid (BNA)
  modified_base (23)..(23): bicyclic nucleic acid (BNA)
  source: /note="3' tri-ethylene glycol (TEG)"
acaucaaggaagauggcauuuct

SEQ ID NO: 11049 - DNA, 22 bp, Artificial Sequence
  source: /note="Description of Artificial Sequence: Synthetic oligonucleotide"
  source: /note="Description of Combined DNA/RNA Molecule: Synthetic oligonucleotide"
  source: /note="DNA/RNA"
  source: /note="5' tri-ethylene glycol (TEG)"
  modified_base (21)..(21): bicyclic nucleic acid (BNA)
  modified_base (22)..(22): bicyclic nucleic acid (BNA)
  source: /note="3' tri-ethylene glycol (TEG)"
acaucaaggaagauggcauutc

SEQ ID NO: 11050 - DNA, 21 bp, Artificial Sequence
  source: /note="Description of Artificial Sequence: Synthetic oligonucleotide"
  source: /note="Description of Combined DNA/RNA Molecule: Synthetic oligonucleotide"
  source: /note="DNA/RNA"
  source: /note="5' tri-ethylene glycol (TEG)"
  modified_base (20)..(20): bicyclic nucleic acid (BNA)
  modified_base (21)..(21): bicyclic nucleic acid (BNA)
  source: /note="3' tri-ethylene glycol (TEG)"
acaucaaggaagauggcautt

SEQ ID NO: 11051 - DNA, 20 bp, Artificial Sequence
  source: /note="Description of Artificial Sequence: Synthetic oligonucleotide"
  source: /note="Description of Combined DNA/RNA Molecule: Synthetic oligonucleotide"
  source: /note="DNA/RNA"
  source: /note="5' tri-ethylene glycol (TEG)"
  modified_base (19)..(19): bicyclic nucleic acid (BNA)
  modified_base (20)..(20): bicyclic nucleic acid (BNA)
  source: /note="3' tri-ethylene glycol (TEG)"
acaucaaggaagauggcatt

SEQ ID NO: 11052 - DNA, 19 bp, Artificial Sequence
  source: /note="Description of Artificial Sequence: Synthetic oligonucleotide"
  source: /note="Description of Combined DNA/RNA Molecule: Synthetic oligonucleotide"
  source: /note="DNA/RNA"
  source: /note="5' tri-ethylene glycol (TEG)"
  modified_base (18)..(18): bicyclic nucleic acid (BNA)
  modified_base (19)..(19): bicyclic nucleic acid (BNA)
  source: /note="3' tri-ethylene glycol (TEG)"
acaucaaggaagauggcat

SEQ ID NO: 11053 - RNA, 18 nt, Artificial Sequence
  source: /note="Description of Artificial Sequence: Synthetic oligonucleotide"
  source: /note="RNA"
  source: /note="5' tri-ethylene glycol (TEG)"
  modified_base (17)..(17): bicyclic nucleic acid (BNA)
  modified_base (18)..(18): bicyclic nucleic acid (BNA)
  source: /note="3' tri-ethylene glycol (TEG)"
acaucaaggaagauggca

SEQ ID NO: 11054 - RNA, 17 nt, Artificial Sequence
  source: /note="Description of Artificial Sequence: Synthetic oligonucleotide"
  source: /note="RNA"
  source: /note="5' tri-ethylene glycol (TEG)"
  modified_base (16)..(16): bicyclic nucleic acid (BNA)
  modified_base (17)..(17): bicyclic nucleic acid (BNA)
  source: /note="3' tri-ethylene glycol (TEG)"
acaucaaggaagauggc

SEQ ID NO: 11055 - RNA, 16 nt, Artificial Sequence
  source: /note="Description of Artificial Sequence: Synthetic oligonucleotide"
  source: /note="RNA"
  source: /note="5' tri-ethylene glycol (TEG)"
  modified_base (15)..(15): bicyclic nucleic acid (BNA)
  modified_base (16)..(16): bicyclic nucleic acid (BNA)
  source: /note="3' tri-ethylene glycol (TEG)"
acaucaaggaagaugg

SEQ ID NO: 11056 - DNA, 15 bp, Artificial Sequence
  source: /note="Description of Artificial Sequence: Synthetic oligonucleotide"
  source: /note="Description of Combined DNA/RNA Molecule: Synthetic oligonucleotide"
  source: /note="DNA/RNA"
  source: /note="5' tri-ethylene glycol (TEG)"
  modified_base (14)..(14): bicyclic nucleic acid (BNA)
  modified_base (15)..(15): bicyclic nucleic acid (BNA)
  source: /note="3' tri-ethylene glycol (TEG)"
acaucaaggaagatg

SEQ ID NO: 11057 - DNA, 14 bp, Artificial Sequence
  source: /note="Description of Artificial Sequence: Synthetic oligonucleotide"
  source: /note="Description of Combined DNA/RNA Molecule: Synthetic oligonucleotide"
  source: /note="DNA/RNA"
  source: /note="5' tri-ethylene glycol (TEG)"
  modified_base (13)..(13): bicyclic nucleic acid (BNA)
  modified_base (14)..(14): bicyclic nucleic acid (BNA)
  source: /note="3' tri-ethylene glycol (TEG)"
acaucaaggaagat

SEQ ID NO: 11058 - RNA, 13 nt, Artificial Sequence
  source: /note="Description of Artificial Sequence: Synthetic oligonucleotide"
  source: /note="RNA"
  source: /note="5' tri-ethylene glycol (TEG)"
  modified_base (12)..(12): bicyclic nucleic acid (BNA)
  modified_base (13)..(13): bicyclic nucleic acid (BNA)
  source: /note="3' tri-ethylene glycol (TEG)"
acaucaaggaaga

SEQ ID NO: 11059 - RNA, 12 nt, Artificial Sequence
  source: /note="Description of Artificial Sequence: Synthetic oligonucleotide"
  source: /note="RNA"
  source: /note="5' tri-ethylene glycol (TEG)"
  modified_base (11)..(11): bicyclic nucleic acid (BNA)
  modified_base (12)..(12): bicyclic nucleic acid (BNA)
  source: /note="3' tri-ethylene glycol (TEG)"
acaucaaggaag

SEQ ID NO: 11060 - RNA, 24 nt, Artificial Sequence
  source: /note="Description of Artificial Sequence: Synthetic oligonucleotide"
  source: /note="RNA"
  source: /note="5' tri-ethylene glycol (TEG)"
  modified_base (23)..(23): bicyclic nucleic acid (BNA)
  modified_base (24)..(24): bicyclic nucleic acid (BNA)
  source: /note="3' tri-ethylene glycol (TEG)"
caucaaggaagauggcauuucuag

SEQ ID NO: 11061 - DNA, 23 bp, Artificial Sequence
  source: /note="Description of Artificial Sequence: Synthetic oligonucleotide"
  source: /note="Description of Combined DNA/RNA Molecule: Synthetic oligonucleotide"
  source: /note="DNA/RNA"
  source: /note="5' tri-ethylene glycol (TEG)"
  modified_base (22)..(22): bicyclic nucleic acid (BNA)
  modified_base (23)..(23): bicyclic nucleic acid (BNA)
  source: /note="3' tri-ethylene glycol (TEG)"
caucaaggaagauggcauuucta

SEQ ID NO: 11062 - DNA, 22 bp, Artificial Sequence
  source: /note="Description of Artificial Sequence: Synthetic oligonucleotide"
  source: /note="Description of Combined DNA/RNA Molecule: Synthetic oligonucleotide"
  source: /note="DNA/RNA"
  source: /note="5' tri-ethylene glycol (TEG)"
  modified_base (21)..(21): bicyclic nucleic acid (BNA)
  modified_base (22)..(22): bicyclic nucleic acid (BNA)
  source: /note="3' tri-ethylene glycol (TEG)"
caucaaggaagauggcauuuct

SEQ ID NO: 11063 - DNA, 21 bp, Artificial Sequence
  source: /note="Description of Artificial Sequence: Synthetic oligonucleotide"
  source: /note="Description of Combined DNA/RNA Molecule: Synthetic oligonucleotide"
  source: /note="DNA/RNA"
  source: /note="5' tri-ethylene glycol (TEG)"
  modified_base (20)..(20): bicyclic nucleic acid (BNA)
  modified_base (21)..(21): bicyclic nucleic acid (BNA)
  source: /note="3' tri-ethylene glycol (TEG)"
caucaaggaagauggcauutc

SEQ ID NO: 11064 - DNA, 20 bp, Artificial Sequence
  source: /note="Description of Artificial Sequence: Synthetic oligonucleotide"
  source: /note="Description of Combined DNA/RNA Molecule: Synthetic oligonucleotide"
  source: /note="DNA/RNA"
  source: /note="5' tri-ethylene glycol (TEG)"
  modified_base (19)..(19): bicyclic nucleic acid (BNA)
  modified_base (20)..(20): bicyclic nucleic acid (BNA)
  source: /note="3' tri-ethylene glycol (TEG)"
caucaaggaagauggcautt

SEQ ID NO: 11065 - DNA, 19 bp, Artificial Sequence
  source: /note="Description of Artificial Sequence: Synthetic oligonucleotide"
  source: /note="Description of Combined DNA/RNA Molecule: Synthetic oligonucleotide"
  source: /note="DNA/RNA"
  source: /note="5' tri-ethylene glycol (TEG)"
  modified_base (18)..(18): bicyclic nucleic acid (BNA)
  modified_base (19)..(19): bicyclic nucleic acid (BNA)
  source: /note="3' tri-ethylene glycol (TEG)"
caucaaggaagauggcatt

SEQ ID NO: 11066 - DNA, 18 bp, Artificial Sequence
  source: /note="Description of Artificial Sequence: Synthetic oligonucleotide"
  source: /note="Description of Combined DNA/RNA Molecule: Synthetic oligonucleotide"
  source: /note="DNA/RNA"
  source: /note="5' tri-ethylene glycol (TEG)"
  modified_base (17)..(17): bicyclic nucleic acid (BNA)
  modified_base (18)..(18): bicyclic nucleic acid (BNA)
  source: /note="3' tri-ethylene glycol (TEG)"
caucaaggaagauggcat

SEQ ID NO: 11067 - RNA, 17 nt, Artificial Sequence
  source: /note="Description of Artificial Sequence: Synthetic oligonucleotide"
  source: /note="RNA"
  source: /note="5' tri-ethylene glycol (TEG)"
  modified_base (16)..(16): bicyclic nucleic acid (BNA)
  modified_base (17)..(17): bicyclic nucleic acid (BNA)
  source: /note="3' tri-ethylene glycol (TEG)"
caucaaggaagauggca

SEQ ID NO: 11068 - RNA, 16 nt, Artificial Sequence
  source: /note="Description of Artificial Sequence: Synthetic oligonucleotide"
  source: /note="RNA"
  source: /note="5' tri-ethylene glycol (TEG)"
  modified_base (15)..(15): bicyclic nucleic acid (BNA)
  modified_base (16)..(16): bicyclic nucleic acid (BNA)
  source: /note="3' tri-ethylene glycol (TEG)"
caucaaggaagauggc

SEQ ID NO: 11069 - RNA, 15 nt, Artificial Sequence
  source: /note="Description of Artificial Sequence: Synthetic oligonucleotide"
  source: /note="RNA"
  source: /note="5' tri-ethylene glycol (TEG)"
  modified_base (14)..(14): bicyclic nucleic acid (BNA)
  modified_base (15)..(15): bicyclic nucleic acid (BNA)
  source: /note="3' tri-ethylene glycol (TEG)"
caucaaggaagaugg

SEQ ID NO: 11070 - DNA, 14 bp, Artificial Sequence
  source: /note="Description of Artificial Sequence: Synthetic oligonucleotide"
  source: /note="Description of Combined DNA/RNA Molecule: Synthetic oligonucleotide"
  source: /note="DNA/RNA"
  source: /note="5' tri-ethylene glycol (TEG)"
  modified_base (13)..(13): bicyclic nucleic acid (BNA)
  modified_base (14)..(14): bicyclic nucleic acid (BNA)
  source: /note="3' tri-ethylene glycol (TEG)"
caucaaggaagatg

SEQ ID NO: 11071 - DNA, 13 bp, Artificial Sequence
  source: /note="Description of Artificial Sequence: Synthetic oligonucleotide"
  source: /note="Description of Combined DNA/RNA Molecule: Synthetic oligonucleotide"
  source: /note="DNA/RNA"
  source: /note="5' tri-ethylene glycol (TEG)"
  modified_base (12)..(12): bicyclic nucleic acid (BNA)
  modified_base (13)..(13): bicyclic nucleic acid (BNA)
  source: /note="3' tri-ethylene glycol (TEG)"
caucaaggaagat

SEQ ID NO: 11072 - RNA, 12 nt, Artificial Sequence
  source: /note="Description of Artificial Sequence: Synthetic oligonucleotide"
  source: /note="RNA"
  source: /note="5' tri-ethylene glycol (TEG)"
  modified_base (11)..(11): bicyclic nucleic acid (BNA)
  modified_base (12)..(12): bicyclic nucleic acid (BNA)
  source: /note="3' tri-ethylene glycol (TEG)"
caucaaggaaga

SEQ ID NO: 11073 - RNA, 11 nt, Artificial Sequence
  source: /note="Description of Artificial Sequence: Synthetic oligonucleotide"
  source: /note="RNA"
  source: /note="5' tri-ethylene glycol (TEG)"
  modified_base (10)..(10): bicyclic nucleic acid (BNA)
  modified_base (11)..(11): bicyclic nucleic acid (BNA)
  source: /note="3' tri-ethylene glycol (TEG)"
caucaaggaag

SEQ ID NO: 11074 - RNA, 23 nt, Artificial Sequence
  source: /note="Description of Artificial Sequence: Synthetic oligonucleotide"
  source: /note="RNA"
  source: /note="5' tri-ethylene glycol (TEG)"
  modified_base (22)..(22): bicyclic nucleic acid (BNA)
  modified_base (23)..(23): bicyclic nucleic acid (BNA)
  source: /note="3' tri-ethylene glycol (TEG)"
aucaaggaagauggcauuucuag

SEQ ID NO: 11075 - DNA, 22 bp, Artificial Sequence
  source: /note="Description of Artificial Sequence: Synthetic oligonucleotide"
  source: /note="Description of Combined DNA/RNA Molecule: Synthetic oligonucleotide"
  source: /note="DNA/RNA"
  source: /note="5' tri-ethylene glycol (TEG)"
  modified_base (21)..(21): bicyclic nucleic acid (BNA)
  modified_base (22)..(22): bicyclic nucleic acid (BNA)
  source: /note="3' tri-ethylene glycol (TEG)"
aucaaggaagauggcauuucta

SEQ ID NO: 11076 - DNA, 21 bp, Artificial Sequence
  source: /note="Description of Artificial Sequence: Synthetic oligonucleotide"
  source: /note="Description of Combined DNA/RNA Molecule: Synthetic oligonucleotide"
  source: /note="DNA/RNA"
  source: /note="5' tri-ethylene glycol (TEG)"
  modified_base (20)..(20): bicyclic nucleic acid (BNA)
  modified_base (21)..(21): bicyclic nucleic acid (BNA)
  source: /note="3' tri-ethylene glycol (TEG)"
aucaaggaagauggcauuuct

SEQ ID NO: 11077 - DNA, 20 bp, Artificial Sequence
  source: /note="Description of Artificial Sequence: Synthetic oligonucleotide"
  source: /note="Description of Combined DNA/RNA Molecule: Synthetic oligonucleotide"
  source: /note="DNA/RNA"
  source: /note="5' tri-ethylene glycol (TEG)"
  modified_base (19)..(19): bicyclic nucleic acid (BNA)
  modified_base (20)..(20): bicyclic nucleic acid (BNA)
  source: /note="3' tri-ethylene glycol (TEG)"
aucaaggaagauggcauutc

SEQ ID NO: 11078 - DNA, 19 bp, Artificial Sequence
  source: /note="Description of Artificial Sequence: Synthetic oligonucleotide"
  source: /note="Description of Combined DNA/RNA Molecule: Synthetic oligonucleotide"
  source: /note="DNA/RNA"
  source: /note="5' tri-ethylene glycol (TEG)"
  modified_base (18)..(18): bicyclic nucleic acid (BNA)
  modified_base (19)..(19): bicyclic nucleic acid (BNA)
  source: /note="3' tri-ethylene glycol (TEG)"
aucaaggaagauggcautt

SEQ ID NO: 11079 - DNA, 18 bp, Artificial Sequence
  source: /note="Description of Artificial Sequence: Synthetic oligonucleotide"
  source: /note="Description of Combined DNA/RNA Molecule: Synthetic oligonucleotide"
  source: /note="DNA/RNA"
  source: /note="5' tri-ethylene glycol (TEG)"
  modified_base (17)..(17): bicyclic nucleic acid (BNA)
  modified_base (18)..(18): bicyclic nucleic acid (BNA)
  source: /note="3' tri-ethylene glycol (TEG)"
aucaaggaagauggcatt

SEQ ID NO: 11080 - DNA, 17 bp, Artificial Sequence
  source: /note="Description of Artificial Sequence: Synthetic oligonucleotide"
  source: /note="Description of Combined DNA/RNA Molecule: Synthetic oligonucleotide"
  source: /note="DNA/RNA"
  source: /note="5' tri-ethylene glycol (TEG)"
  modified_base (16)..(16): bicyclic nucleic acid (BNA)
  modified_base (17)..(17): bicyclic nucleic acid (BNA)
  source: /note="3' tri-ethylene glycol (TEG)"
aucaaggaagauggcat

SEQ ID NO: 11081 - RNA, 16 nt, Artificial Sequence
  source: /note="Description of Artificial Sequence: Synthetic oligonucleotide"
  source: /note="RNA"
  source: /note="5' tri-ethylene glycol (TEG)"
  modified_base (15)..(15): bicyclic nucleic acid (BNA)
  modified_base (16)..(16): bicyclic nucleic acid (BNA)
  source: /note="3' tri-ethylene glycol (TEG)"
aucaaggaagauggca

SEQ ID NO: 11082 - RNA, 15 nt, Artificial Sequence
  source: /note="Description of Artificial Sequence: Synthetic oligonucleotide"
  source: /note="RNA"
  source: /note="5' tri-ethylene glycol (TEG)"
  modified_base (14)..(14): bicyclic nucleic acid (BNA)
  modified_base (15)..(15): bicyclic nucleic acid (BNA)
  source: /note="3' tri-ethylene glycol (TEG)"
aucaaggaagauggc

SEQ ID NO: 11083 - RNA, 14 nt, Artificial Sequence
  source: /note="Description of Artificial Sequence: Synthetic oligonucleotide"
  source: /note="RNA"
  source: /note="5' tri-ethylene glycol (TEG)"
  modified_base (13)..(13): bicyclic nucleic acid (BNA)
  modified_base (14)..(14): bicyclic nucleic acid (BNA)
  source: /note="3' tri-ethylene glycol (TEG)"
aucaaggaagaugg

SEQ ID NO: 11084 - DNA, 13 bp, Artificial Sequence
  source: /note="Description of Artificial Sequence: Synthetic oligonucleotide"
  source: /note="Description of Combined DNA/RNA Molecule: Synthetic oligonucleotide"
  source: /note="DNA/RNA"
  source: /note="5' tri-ethylene glycol (TEG)"
  modified_base (12)..(12): bicyclic nucleic acid (BNA)
  modified_base (13)..(13): bicyclic nucleic acid (BNA)
  source: /note="3' tri-ethylene glycol (TEG)"
aucaaggaagatg

SEQ ID NO: 11085 - DNA, 12 bp, Artificial Sequence
  source: /note="Description of Artificial Sequence: Synthetic oligonucleotide"
  source: /note="Description of Combined DNA/RNA Molecule: Synthetic oligonucleotide"
  source: /note="DNA/RNA"
  source: /note="5' tri-ethylene glycol (TEG)"
  modified_base (11)..(11): bicyclic nucleic acid (BNA)
  modified_base (12)..(12): bicyclic nucleic acid (BNA)
  source: /note="3' tri-ethylene glycol (TEG)"
aucaaggaagat

SEQ ID NO: 11086 - RNA, 11 nt, Artificial Sequence
  source: /note="Description of Artificial Sequence: Synthetic oligonucleotide"
  source: /note="RNA"
  source: /note="5' tri-ethylene glycol (TEG)"
  modified_base (10)..(10): bicyclic nucleic acid (BNA)
  modified_base (11)..(11): bicyclic nucleic acid (BNA)
  source: /note="3' tri-ethylene glycol (TEG)"
aucaaggaaga

SEQ ID NO: 11087 - RNA, 10 nt, Artificial Sequence
  source: /note="Description of Artificial Sequence: Synthetic oligonucleotide"
  source: /note="RNA"
  source: /note="5' tri-ethylene glycol (TEG)"
  modified_base (9)..(9): bicyclic nucleic acid (BNA)
  modified_base (10)..(10): bicyclic nucleic acid (BNA)
  source: /note="3' tri-ethylene glycol (TEG)"
aucaaggaag

SEQ ID NO: 11088 - DNA, 23 bp, Artificial Sequence
  source: /note="Description of Artificial Sequence: Synthetic oligonucleotide"
  source: /note="Description of Combined DNA/RNA Molecule: Synthetic oligonucleotide"
  source: /note="DNA/RNA"
  source: /note="5' tri-ethylene glycol (TEG)"
  modified_base (22)..(22): bicyclic nucleic acid (BNA)
  modified_base (23)..(23): bicyclic nucleic acid (BNA)
  source: /note="3' tri-ethylene glycol (TEG)"
ccagagcagguaccuccaacatc

SEQ ID NO: 11089 - RNA, 18 nt, Artificial Sequence
  source: /note="Description of Artificial Sequence: Synthetic oligonucleotide"
  source: /note="RNA"
  source: /note="5' tri-ethylene glycol (TEG)"
  modified_base (17)..(17): bicyclic nucleic acid (BNA)
  modified_base (18)..(18): bicyclic nucleic acid (BNA)
  source: /note="3' tri-ethylene glycol (TEG)"
ccagagcagguaccucca

SEQ ID NO: 11090 - DNA, 23 bp, Artificial Sequence
  source: /note="Description of Artificial Sequence: Synthetic oligonucleotide"
  source: /note="Description of Combined DNA/RNA Molecule: Synthetic oligonucleotide"
  source: /note="DNA/RNA"
  source: /note="5' tri-ethylene glycol (TEG)"
  modified_base (22)..(22): bicyclic nucleic acid (BNA)
  modified_base (23)..(23): bicyclic nucleic acid (BNA)
  source: /note="3' tri-ethylene glycol (TEG)"
ccucugugauuuuauaacuugat

SEQ ID NO: 11091 - DNA, 17 bp, Artificial Sequence
  source: /note="Description of Artificial Sequence: Synthetic oligonucleotide"
  source: /note="Description of Combined DNA/RNA Molecule: Synthetic oligonucleotide"
  source: /note="DNA/RNA"
  source: /note="5' tri-ethylene glycol (TEG)"
  modified_base (16)..(16): bicyclic nucleic acid (BNA)
  modified_base (17)..(17): bicyclic nucleic acid (BNA)
  source: /note="3' tri-ethylene glycol (TEG)"
ucacccaccaucaccct

SEQ ID NO: 11092 - RNA, 20 nt, Artificial Sequence
  source: /note="Description of Artificial Sequence: Synthetic oligonucleotide"
  source: /note="RNA"
  source: /note="5' tri-ethylene glycol (TEG)"
  modified_base (19)..(19): bicyclic nucleic acid (BNA)
  modified_base (20)..(20): bicyclic nucleic acid (BNA)
  source: /note="3' tri-ethylene glycol (TEG)"
ugauauccucaaggucaccc

SEQ ID NO: 11093 - DNA, 22 bp, Artificial Sequence
  source: /note="Description of Artificial Sequence: Synthetic oligonucleotide"
  source: /note="Description of Combined DNA/RNA Molecule: Synthetic oligonucleotide"
  source: /note="DNA/RNA"
  source: /note="5' tri-ethylene glycol (TEG)"
  modified_base (21)..(21): bicyclic nucleic acid (BNA)
  modified_base (22)..(22): bicyclic nucleic acid (BNA)
  source: /note="3' tri-ethylene glycol (TEG)"
cugcuugaugaucaucucgutg

SEQ ID NO: 11094 - DNA, 18 bp, Artificial Sequence
  source: /note="Description of Artificial Sequence: Synthetic oligonucleotide"
  source: /note="Description of Combined DNA/RNA Molecule: Synthetic oligonucleotide"
  source: /note="DNA/RNA"
  source: /note="5' tri-ethylene glycol (TEG)"
  modified_base (17)..(17): bicyclic nucleic acid (BNA)
  modified_base (18)..(18): bicyclic nucleic acid (BNA)
  source: /note="3' tri-ethylene glycol (TEG)"
cugcuugaugaucauctc

SEQ ID NO: 11095 - RNA, 19 nt, Artificial Sequence
  source: /note="Description of Artificial Sequence: Synthetic oligonucleotide"
  source: /note="RNA"
  source: /note="5' tri-ethylene glycol (TEG)"
  modified_base (18)..(18): bicyclic nucleic acid (BNA)
  modified_base (19)..(19): bicyclic nucleic acid (BNA)
  source: /note="3' tri-ethylene glycol (TEG)"
guuuccuuaguaaccacag

SEQ ID NO: 11096 - RNA, 17 nt, Artificial Sequence
  source: /note="Description of Artificial Sequence: Synthetic oligonucleotide"
  source: /note="RNA"
  source: /note="5' tri-ethylene glycol (TEG)"
  modified_base (16)..(16): bicyclic nucleic acid (BNA)
  modified_base (17)..(17): bicyclic nucleic acid (BNA)
  source: /note="3' tri-ethylene glycol (TEG)"
guuuccuuaguaaccac

SEQ ID NO: 11097 - DNA, 20 bp, Artificial Sequence
  source: /note="Description of Artificial Sequence: Synthetic oligonucleotide"
  source: /note="Description of Combined DNA/RNA Molecule: Synthetic oligonucleotide"
  source: /note="DNA/RNA"
  modified_base (1)..(1): bicyclic nucleic acid (BNA)
  modified_base (2)..(2): bicyclic nucleic acid (BNA)
  modified_base (19)..(19): bicyclic nucleic acid (BNA)
  modified_base (20)..(20): bicyclic nucleic acid (BNA)
tcaaggaagauggcauuuct

SEQ ID NO: 11098 - DNA, 22 bp, Artificial Sequence
  source: /note="Description of Artificial Sequence: Synthetic oligonucleotide"
  source: /note="Description of Combined DNA/RNA Molecule: Synthetic oligonucleotide"
  source: /note="DNA/RNA"
  modified_base (1)..(1): bicyclic nucleic acid (BNA)
  modified_base (2)..(2): bicyclic nucleic acid (BNA)
  modified_base (21)..(21): bicyclic nucleic acid (BNA)
  modified_base (22)..(22): bicyclic nucleic acid (BNA)
tcaaggaagauggcauuucuag

SEQ ID NO: 11099 - RNA, 18 nt, Artificial Sequence
  source: /note="Description of Artificial Sequence: Synthetic oligonucleotide"
  source: /note="RNA"
  modified_base (1)..(1): bicyclic nucleic acid (BNA)
  modified_base (2)..(2): bicyclic nucleic acid (BNA)
  modified_base (17)..(17): bicyclic nucleic acid (BNA)
  modified_base (18)..(18): bicyclic nucleic acid (BNA)
gguaaguucuguccaagc

SEQ ID NO: 11100 - DNA, 18 bp, Artificial Sequence
  source: /note="Description of Artificial Sequence: Synthetic oligonucleotide"
  source: /note="Description of Combined DNA/RNA Molecule: Synthetic oligonucleotide"
  source: /note="DNA/RNA"
  modified_base (1)..(1): bicyclic nucleic acid (BNA)
  modified_base (2)..(2): bicyclic nucleic acid (BNA)
  modified_base (17)..(17): bicyclic nucleic acid (BNA)
  modified_base (18)..(18): bicyclic nucleic acid (BNA)
gtaaguucuguccaagcc

SEQ ID NO: 11101 - RNA, 18 nt, Artificial Sequence
  source: /note="Description of Artificial Sequence: Synthetic oligonucleotide"
  source: /note="RNA"
  modified_base (1)..(1): bicyclic nucleic acid (BNA)
  modified_base (2)..(2): bicyclic nucleic acid (BNA)
  modified_base (17)..(17): bicyclic nucleic acid (BNA)
  modified_base (18)..(18): bicyclic nucleic acid (BNA)
agucgguaaguucugucc

SEQ ID NO: 11102 - DNA, 18 bp, Artificial Sequence
  source: /note="Description of Artificial Sequence: Synthetic oligonucleotide"
  source: /note="Description of Combined DNA/RNA Molecule: Synthetic oligonucleotide"
  source: /note="DNA/RNA"
  modified_base (1)..(1): bicyclic nucleic acid (BNA)
  modified_base (2)..(2): bicyclic nucleic acid (BNA)
  modified_base (17)..(17): bicyclic nucleic acid (BNA)
  modified_base (18)..(18): bicyclic nucleic acid (BNA)
ctguccaagcccgguuga

SEQ ID NO: 11103 - DNA, 15 bp, Artificial Sequence
  source: /note="Description of Artificial Sequence: Synthetic oligonucleotide"
  source: /note="Description of Combined DNA/RNA Molecule: Synthetic oligonucleotide"
  source: /note="DNA/RNA"
  modified_base (1)..(1): bicyclic nucleic acid (BNA)
  modified_base (2)..(2): bicyclic nucleic acid (BNA)
  modified_base (14)..(14): bicyclic nucleic acid (BNA)
  modified_base (15)..(15): bicyclic nucleic acid (BNA)
taaguucuguccaag

SEQ ID NO: 11104 - DNA, 20 bp, Artificial Sequence
  source: /note="Description of Artificial Sequence: Synthetic oligonucleotide"
  source: /note="Description of Combined DNA/RNA Molecule: Synthetic oligonucleotide"
  source: /note="DNA/RNA"
  modified_base (1)..(1): bicyclic nucleic acid (BNA)
  modified_base (2)..(2): bicyclic nucleic acid (BNA)
  modified_base (19)..(19): bicyclic nucleic acid (BNA)
  modified_base (20)..(20): bicyclic nucleic acid (BNA)
ttcuguccaagcccgguuga

SEQ ID NO: 11105 - DNA, 19 bp, Artificial Sequence
  source: /note="Description of Artificial Sequence: Synthetic oligonucleotide"
  source: /note="Description of Combined DNA/RNA Molecule: Synthetic oligonucleotide"
  source: /note="DNA/RNA"
  modified_base (1)..(1): bicyclic nucleic acid (BNA)
  modified_base (2)..(2): bicyclic nucleic acid (BNA)
  modified_base (18)..(18): bicyclic nucleic acid (BNA)
  modified_base (19)..(19): bicyclic nucleic acid (BNA)
ttcuguccaagcccggutg

SEQ ID NO: 11106 - DNA, 18 bp, Artificial Sequence
  source: /note="Description of Artificial Sequence: Synthetic oligonucleotide"
  source: /note="Description of Combined DNA/RNA Molecule: Synthetic oligonucleotide"
  source: /note="DNA/RNA"
  modified_base (1)..(1): bicyclic nucleic acid (BNA)
  modified_base (2)..(2): bicyclic nucleic acid (BNA)
  modified_base (17)..(17): bicyclic nucleic acid (BNA)
  modified_base (18)..(18): bicyclic nucleic acid (BNA)
ttcuguccaagcccggtt

SEQ ID NO: 11107 - DNA, 17 bp, Artificial Sequence
  source: /note="Description of Artificial Sequence: Synthetic oligonucleotide"
  source: /note="Description of Combined DNA/RNA Molecule: Synthetic oligonucleotide"
  source: /note="DNA/RNA"
  modified_base (1)..(1): bicyclic nucleic acid (BNA)
  modified_base (2)..(2): bicyclic nucleic acid (BNA)
  modified_base (16)..(16): bicyclic nucleic acid (BNA)
  modified_base (17)..(17): bicyclic nucleic acid (BNA)
ttcuguccaagcccggt

SEQ ID NO: 11108 - DNA, 16 bp, Artificial Sequence
  source: /note="Description of Artificial Sequence: Synthetic oligonucleotide"
  source: /note="Description of Combined DNA/RNA Molecule: Synthetic oligonucleotide"
  source: /note="DNA/RNA"
  modified_base (1)..(1): bicyclic nucleic acid (BNA)
  modified_base (2)..(2): bicyclic nucleic acid (BNA)
  modified_base (15)..(15): bicyclic nucleic acid (BNA)
  modified_base (16)..(16): bicyclic nucleic acid (BNA)
ttcuguccaagcccgg

SEQ ID NO: 11109 - DNA, 15 bp, Artificial Sequence
  source: /note="Description of Artificial Sequence: Synthetic oligonucleotide"
  source: /note="Description of Combined DNA/RNA Molecule: Synthetic oligonucleotide"
  source: /note="DNA/RNA"
  modified_base (1)..(1): bicyclic nucleic acid (BNA)
  modified_base (2)..(2): bicyclic nucleic acid (BNA)
  modified_base (14)..(14): bicyclic nucleic acid (BNA)
  modified_base (15)..(15): bicyclic nucleic acid (BNA)
ttcuguccaagcccg

SEQ ID NO: 11110 - DNA, 14 bp, Artificial Sequence
  source: /note="Description of Artificial Sequence: Synthetic oligonucleotide"
  source: /note="Description of Combined DNA/RNA Molecule: Synthetic oligonucleotide"
  source: /note="DNA/RNA"
  modified_base (1)..(1): bicyclic nucleic acid (BNA)
  modified_base (2)..(2): bicyclic nucleic acid (BNA)
  modified_base (13)..(13): bicyclic nucleic acid (BNA)
  modified_base (14)..(14): bicyclic nucleic acid (BNA)
ttcuguccaagccc

SEQ ID NO: 11111 - DNA, 13 bp, Artificial Sequence
  source: /note="Description of Artificial Sequence: Synthetic oligonucleotide"
  source: /note="Description of Combined DNA/RNA Molecule: Synthetic oligonucleotide"
  source: /note="DNA/RNA"
  modified_base (1)..(1): bicyclic nucleic acid (BNA)
  modified_base (2)..(2): bicyclic nucleic acid (BNA)
  modified_base (12)..(12): bicyclic nucleic acid (BNA)
  modified_base (13)..(13): bicyclic nucleic acid (BNA)
ttcuguccaagcc

SEQ ID NO: 11112 - DNA, 12 bp, Artificial Sequence
  source: /note="Description of Artificial Sequence: Synthetic oligonucleotide"
  source: /note="Description of Combined DNA/RNA Molecule: Synthetic oligonucleotide"
  source: /note="DNA/RNA"
  modified_base (1)..(1): bicyclic nucleic acid (BNA)
  modified_base (2)..(2): bicyclic nucleic acid (BNA)
  modified_base (11)..(11): bicyclic nucleic acid (BNA)
  modified_base (12)..(12): bicyclic nucleic acid (BNA)
ttcuguccaagc

SEQ ID NO: 11113 - DNA, 11 bp, Artificial Sequence
  source: /note="Description of Artificial Sequence: Synthetic oligonucleotide"
  source: /note="Description of Combined DNA/RNA Molecule: Synthetic oligonucleotide"
  source: /note="DNA/RNA"
  modified_base (1)..(1): bicyclic nucleic acid (BNA)
  modified_base (2)..(2): bicyclic nucleic acid (BNA)
  modified_base (10)..(10): bicyclic nucleic acid (BNA)
  modified_base (11)..(11): bicyclic nucleic acid (BNA)
ttcuguccaag

SEQ ID NO: 11114 - DNA, 10 bp, Artificial Sequence
  source: /note="Description of Artificial Sequence: Synthetic oligonucleotide"
  source: /note="Description of Combined DNA/RNA Molecule: Synthetic oligonucleotide"
  source: /note="DNA/RNA"
  modified_base (1)..(1): bicyclic nucleic acid (BNA)
  modified_base (2)..(2): bicyclic nucleic acid (BNA)
  modified_base (9)..(9): bicyclic nucleic acid (BNA)
  modified_base (10)..(10): bicyclic nucleic acid (BNA)
ttcuguccaa

SEQ ID NO: 11115 - DNA, 9 bp, Artificial Sequence
  source: /note="Description of Artificial Sequence: Synthetic oligonucleotide"
  source: /note="Description of Combined DNA/RNA Molecule: Synthetic oligonucleotide"
  source: /note="DNA/RNA"
  modified_base (1)..(1): bicyclic nucleic acid (BNA)
  modified_base (2)..(2): bicyclic nucleic acid (BNA)
  modified_base (8)..(8): bicyclic nucleic acid (BNA)
  modified_base (9)..(9): bicyclic nucleic acid (BNA)
ttcugucca

SEQ ID NO: 11116 - DNA, 8 bp, Artificial Sequence
  source: /note="Description of Artificial Sequence: Synthetic oligonucleotide"
  source: /note="Description of Combined DNA/RNA Molecule: Synthetic oligonucleotide"
  source: /note="DNA/RNA"
  modified_base (1)..(1): bicyclic nucleic acid (BNA)
  modified_base (2)..(2): bicyclic nucleic acid (BNA)
  modified_base (7)..(7): bicyclic nucleic acid (BNA)
  modified_base (8)..(8): bicyclic nucleic acid (BNA)
ttcugucc

SEQ ID NO: 11117 - DNA, 19 bp, Artificial Sequence
  source: /note="Description of Artificial Sequence: Synthetic oligonucleotide"
  source: /note="Description of Combined DNA/RNA Molecule: Synthetic oligonucleotide"
  source: /note="DNA/RNA"
  modified_base (1)..(1): bicyclic nucleic acid (BNA)
  modified_base (2)..(2): bicyclic nucleic acid (BNA)
  modified_base (18)..(18): bicyclic nucleic acid (BNA)
  modified_base (19)..(19): bicyclic nucleic acid (BNA)
tcuguccaagcccgguuga

SEQ ID NO: 11118 - DNA, 18 bp, Artificial Sequence
  source: /note="Description of Artificial Sequence: Synthetic oligonucleotide"
  source: /note="Description of Combined DNA/RNA Molecule: Synthetic oligonucleotide"
  source: /note="DNA/RNA"
  modified_base (1)..(1): bicyclic nucleic acid (BNA)
  modified_base (2)..(2): bicyclic nucleic acid (BNA)
  modified_base (17)..(17): bicyclic nucleic acid (BNA)
  modified_base (18)..(18): bicyclic nucleic acid (BNA)
tcuguccaagcccggutg

SEQ ID NO: 11119 - DNA, 17 bp, Artificial Sequence
  source: /note="Description of Artificial Sequence: Synthetic oligonucleotide"
  source: /note="Description of Combined DNA/RNA Molecule: Synthetic oligonucleotide"
  source: /note="DNA/RNA"
  modified_base (1)..(1): bicyclic nucleic acid (BNA)
  modified_base (2)..(2): bicyclic nucleic acid (BNA)
  modified_base (16)..(16): bicyclic nucleic acid (BNA)
  modified_base (17)..(17): bicyclic nucleic acid (BNA)
tcuguccaagcccggtt

SEQ ID NO: 11120 - DNA, 16 bp, Artificial Sequence
  source: /note="Description of Artificial Sequence: Synthetic oligonucleotide"
  source: /note="Description of Combined DNA/RNA Molecule: Synthetic oligonucleotide"
  source: /note="DNA/RNA"
  modified_base (1)..(1): bicyclic nucleic acid (BNA)
  modified_base (2)..(2): bicyclic nucleic acid (BNA)
  modified_base (15)..(15): bicyclic nucleic acid (BNA)
  modified_base (16)..(16): bicyclic nucleic acid (BNA)
tcuguccaagcccggt

SEQ ID NO: 11121 - DNA, 15 bp, Artificial Sequence
  source: /note="Description of Artificial Sequence: Synthetic oligonucleotide"
  source: /note="Description of Combined DNA/RNA Molecule: Synthetic oligonucleotide"
  source: /note="DNA/RNA"
  modified_base (1)..(1): bicyclic nucleic acid (BNA)
  modified_base (2)..(2): bicyclic nucleic acid (BNA)
  modified_base (14)..(14): bicyclic nucleic acid (BNA)
  modified_base (15)..(15): bicyclic nucleic acid (BNA)
tcuguccaagcccgg

SEQ ID NO: 11122 - DNA, 14 bp, Artificial Sequence
  source: /note="Description of Artificial Sequence: Synthetic oligonucleotide"
  source: /note="Description of Combined DNA/RNA Molecule: Synthetic oligonucleotide"
  source: /note="DNA/RNA"
  modified_base (1)..(1): bicyclic nucleic acid (BNA)
  modified_base (2)..(2): bicyclic nucleic acid (BNA)
  modified_base (13)..(13): bicyclic nucleic acid (BNA)
  modified_base (14)..(14): bicyclic nucleic acid (BNA)
tcuguccaagcccg

SEQ ID NO: 11123 - DNA, 13 bp, Artificial Sequence
  source: /note="Description of Artificial Sequence: Synthetic oligonucleotide"
  source: /note="Description of Combined DNA/RNA Molecule: Synthetic oligonucleotide"
  source: /note="DNA/RNA"
  modified_base (1)..(1): bicyclic nucleic acid (BNA)
  modified_base (2)..(2): bicyclic nucleic acid (BNA)
  modified_base (12)..(12): bicyclic nucleic acid (BNA)
  modified_base (13)..(13): bicyclic nucleic acid (BNA)
tcuguccaagccc

SEQ ID NO: 11124 - DNA, 12 bp, Artificial Sequence
  source: /note="Description of Artificial Sequence: Synthetic oligonucleotide"
  source: /note="Description of Combined DNA/RNA Molecule: Synthetic oligonucleotide"
  source: /note="DNA/RNA"
  modified_base (1)..(1): bicyclic nucleic acid (BNA)
  modified_base (2)..(2): bicyclic nucleic acid (BNA)
  modified_base (11)..(11): bicyclic nucleic acid (BNA)
  modified_base (12)..(12): bicyclic nucleic acid (BNA)
tcuguccaagcc

SEQ ID NO: 11125 - DNA, 11 bp, Artificial Sequence
  source: /note="Description of Artificial Sequence: Synthetic oligonucleotide"
  source: /note="Description of Combined DNA/RNA Molecule: Synthetic oligonucleotide"
  source: /note="DNA/RNA"
  modified_base (1)..(1): bicyclic nucleic acid (BNA)
  modified_base (2)..(2): bicyclic nucleic acid (BNA)
  modified_base (10)..(10): bicyclic nucleic acid (BNA)
  modified_base (11)..(11): bicyclic nucleic acid (BNA)
tcuguccaagc

SEQ ID NO: 11126 - DNA, 10 bp, Artificial Sequence
  source: /note="Description of Artificial Sequence: Synthetic oligonucleotide"
  source: /note="Description of Combined DNA/RNA Molecule: Synthetic oligonucleotide"
  source: /note="DNA/RNA"
  modified_base (1)..(1): bicyclic nucleic acid (BNA)
  modified_base (2)..(2): bicyclic nucleic acid (BNA)
  modified_base (9)..(9): bicyclic nucleic acid (BNA)
  modified_base (10)..(10): bicyclic nucleic acid (BNA)
tcuguccaag

SEQ ID NO: 11127 - DNA, 9 bp, Artificial Sequence
  source: /note="Description of Artificial Sequence: Synthetic oligonucleotide"
  source: /note="Description of Combined DNA/RNA Molecule: Synthetic oligonucleotide"
  source: /note="DNA/RNA"
  modified_base (1)..(1): bicyclic nucleic acid (BNA)
  modified_base (2)..(2): bicyclic nucleic acid (BNA)
  modified_base (8)..(8): bicyclic nucleic acid (BNA)
  modified_base (9)..(9): bicyclic nucleic acid (BNA)
tcuguccaa

SEQ ID NO: 11128 - DNA, 8 bp, Artificial Sequence
  source: /note="Description of Artificial Sequence: Synthetic oligonucleotide"
  source: /note="Description of Combined DNA/RNA Molecule: Synthetic oligonucleotide"
  source: /note="DNA/RNA"
  modified_base (1)..(1): bicyclic nucleic acid (BNA)
  modified_base (2)..(2): bicyclic nucleic acid (BNA)
  modified_base (7)..(7): bicyclic nucleic acid (BNA)
  modified_base (8)..(8): bicyclic nucleic acid (BNA)
tcugucca

SEQ ID NO: 11129 - DNA, 17 bp, Artificial Sequence
  source: /note="Description of Artificial Sequence: Synthetic oligonucleotide"
  source: /note="Description of Combined DNA/RNA Molecule: Synthetic oligonucleotide"
  source: /note="DNA/RNA"
  modified_base (1)..(1): bicyclic nucleic acid (BNA)
  modified_base (2)..(2): bicyclic nucleic acid (BNA)
  modified_base (16)..(16): bicyclic nucleic acid (BNA)
  modified_base (17)..(17): bicyclic nucleic acid (BNA)
ctguccaagcccggutg

SEQ ID NO: 11130 - DNA, 16 bp, Artificial Sequence
  source: /note="Description of Artificial Sequence: Synthetic oligonucleotide"
  source: /note="Description of Combined DNA/RNA Molecule: Synthetic oligonucleotide"
  source: /note="DNA/RNA"
  modified_base (1)..(1): bicyclic nucleic acid (BNA)
  modified_base (2)..(2): bicyclic nucleic acid (BNA)
  modified_base (15)..(15): bicyclic nucleic acid (BNA)
  modified_base (16)..(16): bicyclic nucleic acid (BNA)
ctguccaagcccggtt

SEQ ID NO: 11131 - DNA, 15 bp, Artificial Sequence
  source: /note="Description of Artificial Sequence: Synthetic oligonucleotide"
  source: /note="Description of Combined DNA/RNA Molecule: Synthetic oligonucleotide"
  source: /note="DNA/RNA"
  modified_base (1)..(1): bicyclic nucleic acid (BNA)
  modified_base (2)..(2): bicyclic nucleic acid (BNA)
  modified_base (14)..(14): bicyclic nucleic acid (BNA)
  modified_base (15)..(15): bicyclic nucleic acid (BNA)
ctguccaagcccggt

SEQ ID NO: 11132 - DNA, 14 bp, Artificial Sequence
  source: /note="Description of Artificial Sequence: Synthetic oligonucleotide"
  source: /note="Description of Combined DNA/RNA Molecule: Synthetic oligonucleotide"
  source: /note="DNA/RNA"
  modified_base (1)..(1): bicyclic nucleic acid (BNA)
  modified_base (2)..(2): bicyclic nucleic acid (BNA)
  modified_base (13)..(13): bicyclic nucleic acid (BNA)
  modified_base (14)..(14): bicyclic nucleic acid (BNA)
ctguccaagcccgg

SEQ ID NO: 11133 - DNA, 13 bp, Artificial Sequence
  source: /note="Description of Artificial Sequence: Synthetic oligonucleotide"
  source: /note="Description of Combined DNA/RNA Molecule: Synthetic oligonucleotide"
  source: /note="DNA/RNA"
  modified_base (1)..(1): bicyclic nucleic acid (BNA)
  modified_base (2)..(2): bicyclic nucleic acid (BNA)
  modified_base (12)..(12): bicyclic nucleic acid (BNA)
  modified_base (13)..(13): bicyclic nucleic acid (BNA)
ctguccaagcccg

SEQ ID NO: 11134 - DNA, 12 bp, Artificial Sequence
  source: /note="Description of Artificial Sequence: Synthetic oligonucleotide"
  source: /note="Description of Combined DNA/RNA Molecule: Synthetic oligonucleotide"
  source: /note="DNA/RNA"
  modified_base (1)..(1): bicyclic nucleic acid (BNA)
  modified_base (2)..(2): bicyclic nucleic acid (BNA)
  modified_base (11)..(11): bicyclic nucleic acid (BNA)
  modified_base (12)..(12): bicyclic nucleic acid (BNA)
ctguccaagccc

SEQ ID NO: 11135 - DNA, 11 bp, Artificial Sequence
  source: /note="Description of Artificial Sequence: Synthetic oligonucleotide"
  source: /note="Description of Combined DNA/RNA Molecule: Synthetic oligonucleotide"
  source: /note="DNA/RNA"
  modified_base (1)..(1): bicyclic nucleic acid (BNA)
  modified_base (2)..(2): bicyclic nucleic acid (BNA)
  modified_base (10)..(10): bicyclic nucleic acid (BNA)
  modified_base (11)..(11): bicyclic nucleic acid (BNA)
ctguccaagcc

SEQ ID NO: 11136 - DNA, 10 bp, Artificial Sequence
  source: /note="Description of Artificial Sequence: Synthetic oligonucleotide"
  source: /note="Description of Combined DNA/RNA Molecule: Synthetic oligonucleotide"
  source: /note="DNA/RNA"
  modified_base (1)..(1): bicyclic nucleic acid (BNA)
  modified_base (2)..(2): bicyclic nucleic acid (BNA)
  modified_base (9)..(9): bicyclic nucleic acid (BNA)
  modified_base (10)..(10): bicyclic nucleic acid (BNA)
ctguccaagc

SEQ ID NO: 11137 - DNA, 9 bp, Artificial Sequence
  source: /note="Description of Artificial Sequence: Synthetic oligonucleotide"
  source: /note="Description of Combined DNA/RNA Molecule: Synthetic oligonucleotide"
  source: /note="DNA/RNA"
  modified_base (1)..(1): bicyclic nucleic acid (BNA)
  modified_base (2)..(2): bicyclic nucleic acid (BNA)
  modified_base (8)..(8): bicyclic nucleic acid (BNA)
  modified_base (9)..(9): bicyclic nucleic acid (BNA)
ctguccaag

SEQ ID NO: 11138 - DNA, 8 bp, Artificial Sequence
  source: /note="Description of Artificial Sequence: Synthetic oligonucleotide"
  source: /note="Description of Combined DNA/RNA Molecule: Synthetic oligonucleotide"
  source: /note="DNA/RNA"
  modified_base (1)..(1): bicyclic nucleic acid (BNA)
  modified_base (2)..(2): bicyclic nucleic acid (BNA)
  modified_base (7)..(7): bicyclic nucleic acid (BNA)
  modified_base (8)..(8): bicyclic nucleic acid (BNA)
ctguccaa

SEQ ID NO: 11139 - DNA, 20 bp, Artificial Sequence
  source: /note="Description of Artificial Sequence: Synthetic oligonucleotide"
  source: /note="Description of Combined DNA/RNA Molecule: Synthetic oligonucleotide"
  source: /note="DNA/RNA"
  modified_base (1)..(1): bicyclic nucleic acid (BNA)
  modified_base (2)..(2): bicyclic nucleic acid (BNA)
  modified_base (19)..(19): bicyclic nucleic acid (BNA)
  modified_base (20)..(20): bicyclic nucleic acid (BNA)
gtucuguccaagcccggutg

SEQ ID NO: 11140 - DNA, 19 bp, Artificial Sequence
  source: /note="Description of Artificial Sequence: Synthetic oligonucleotide"
  source: /note="Description of Combined DNA/RNA Molecule: Synthetic oligonucleotide"
  source: /note="DNA/RNA"
  modified_base (1)..(1): bicyclic nucleic acid (BNA)
  modified_base (2)..(2): bicyclic nucleic acid (BNA)
  modified_base (18)..(18): bicyclic nucleic acid (BNA)
  modified_base (19)..(19): bicyclic nucleic acid (BNA)
gtucuguccaagcccggtt

SEQ ID NO: 11141 - DNA, 18 bp, Artificial Sequence
  source: /note="Description of Artificial Sequence: Synthetic oligonucleotide"
  source: /note="Description of Combined DNA/RNA Molecule: Synthetic oligonucleotide"
  source: /note="DNA/RNA"
  modified_base (1)..(1): bicyclic nucleic acid (BNA)
  modified_base (2)..(2): bicyclic nucleic acid (BNA)
  modified_base (17)..(17): bicyclic nucleic acid (BNA)
  modified_base (18)..(18): bicyclic nucleic acid (BNA)
gtucuguccaagcccggt

SEQ ID NO: 11142 - DNA, 17 bp, Artificial Sequence
  source: /note="Description of Artificial Sequence: Synthetic oligonucleotide"
  source: /note="Description of Combined DNA/RNA Molecule: Synthetic oligonucleotide"
  source: /note="DNA/RNA"
  modified_base (1)..(1): bicyclic nucleic acid (BNA)
  modified_base (2)..(2): bicyclic nucleic acid (BNA)
  modified_base (16)..(16): bicyclic nucleic acid (BNA)
  modified_base (17)..(17): bicyclic nucleic acid (BNA)
gtucuguccaagcccgg

SEQ ID NO: 11143 - DNA, 16 bp, Artificial Sequence
  source: /note="Description of Artificial Sequence: Synthetic oligonucleotide"
  source: /note="Description of Combined DNA/RNA Molecule: Synthetic oligonucleotide"
  source: /note="DNA/RNA"
  modified_base (1)..(1): bicyclic nucleic acid (BNA)
  modified_base (2)..(2): bicyclic nucleic acid (BNA)
  modified_base (15)..(15): bicyclic nucleic acid (BNA)
  modified_base (16)..(16): bicyclic nucleic acid (BNA)
gtucuguccaagcccg

SEQ ID NO: 11144 - DNA, 15 bp, Artificial Sequence
  source: /note="Description of Artificial Sequence: Synthetic oligonucleotide"
  source: /note="Description of Combined DNA/RNA Molecule: Synthetic oligonucleotide"
  source: /note="DNA/RNA"
  modified_base (1)..(1): bicyclic nucleic acid (BNA)
  modified_base (2)..(2): bicyclic nucleic acid (BNA)
  modified_base (14)..(14): bicyclic nucleic acid (BNA)
  modified_base (15)..(15): bicyclic nucleic acid (BNA)
gtucuguccaagccc

SEQ ID NO: 11145 - DNA, 14 bp, Artificial Sequence
  source: /note="Description of Artificial Sequence: Synthetic oligonucleotide"
  source: /note="Description of Combined DNA/RNA Molecule: Synthetic oligonucleotide"
  source: /note="DNA/RNA"
  modified_base (1)..(1): bicyclic nucleic acid (BNA)
  modified_base (2)..(2): bicyclic nucleic acid (BNA)
  modified_base (13)..(13): bicyclic nucleic acid (BNA)
  modified_base (14)..(14): bicyclic nucleic acid (BNA)
gtucuguccaagcc

SEQ ID NO: 11146 - DNA, 13 bp, Artificial Sequence
  source: /note="Description of Artificial Sequence: Synthetic oligonucleotide"
  source: /note="Description of Combined DNA/RNA Molecule: Synthetic oligonucleotide"
  source: /note="DNA/RNA"
  modified_base (1)..(1): bicyclic nucleic acid (BNA)
  modified_base (2)..(2): bicyclic nucleic acid (BNA)
  modified_base (12)..(12): bicyclic nucleic acid (BNA)
  modified_base (13)..(13): bicyclic nucleic acid (BNA)
gtucuguccaagc

SEQ ID NO: 11147 - DNA, 12 bp, Artificial Sequence
  source: /note="Description of Artificial Sequence: Synthetic oligonucleotide"
  source: /note="Description of Combined DNA/RNA Molecule: Synthetic oligonucleotide"
  source: /note="DNA/RNA"
  modified_base (1)..(1): bicyclic nucleic acid (BNA)
  modified_base (2)..(2): bicyclic nucleic acid (BNA)
  modified_base (11)..(11): bicyclic nucleic acid (BNA)
  modified_base (12)..(12): bicyclic nucleic acid (BNA)
gtucuguccaag

SEQ ID NO: 11148 - DNA, 11 bp, Artificial Sequence
  source: /note="Description of Artificial Sequence: Synthetic oligonucleotide"
  source: /note="Description of Combined DNA/RNA Molecule: Synthetic oligonucleotide"
  source: /note="DNA/RNA"
  modified_base (1)..(1): bicyclic nucleic acid (BNA)
  modified_base (2)..(2): bicyclic nucleic acid (BNA)
  modified_base (10)..(10): bicyclic nucleic acid (BNA)
  modified_base (11)..(11): bicyclic nucleic acid (BNA)
gtucuguccaa

SEQ ID NO: 11149 - DNA, 10 bp, Artificial Sequence
  source: /note="Description of Artificial Sequence: Synthetic oligonucleotide"
  source: /note="Description of Combined DNA/RNA Molecule: Synthetic oligonucleotide"
  source: /note="DNA/RNA"
  modified_base (1)..(1): bicyclic nucleic acid (BNA)
  modified_base (2)..(2): bicyclic nucleic acid (BNA)
  modified_base (9)..(9): bicyclic nucleic acid (BNA)
  modified_base (10)..(10): bicyclic nucleic acid (BNA)
gtucugucca

SEQ ID NO: 11150 - DNA, 9 bp, Artificial Sequence
  source: /note="Description of Artificial Sequence: Synthetic oligonucleotide"
  source: /note="Description of Combined DNA/RNA Molecule: Synthetic oligonucleotide"
  source: /note="DNA/RNA"
  modified_base (1)..(1): bicyclic nucleic acid (BNA)
  modified_base (2)..(2): bicyclic nucleic acid (BNA)
  modified_base (8)..(8): bicyclic nucleic acid (BNA)
  modified_base (9)..(9): bicyclic nucleic acid (BNA)
gtucugucc

SEQ ID NO: 11151 - DNA, 8 bp, Artificial Sequence
  source: /note="Description of Artificial Sequence: Synthetic oligonucleotide"
  source: /note="Description of Combined DNA/RNA Molecule: Synthetic oligonucleotide"
  source: /note="DNA/RNA"
  modified_base (1)..(1): bicyclic nucleic acid (BNA)
  modified_base (2)..(2): bicyclic nucleic acid (BNA)
  modified_base (7)..(7): bicyclic nucleic acid (BNA)
  modified_base (8)..(8): bicyclic nucleic acid (BNA)
gtucugtc

SEQ ID NO: 11152 - DNA, 20 bp, Artificial Sequence
  source: /note="Description of Artificial Sequence: Synthetic oligonucleotide"
  source: /note="Description of Combined DNA/RNA Molecule: Synthetic oligonucleotide"
  source: /note="DNA/RNA"
  modified_base (1)..(1): bicyclic nucleic acid (BNA)
  modified_base (2)..(2): bicyclic nucleic acid (BNA)
  modified_base (19)..(19): bicyclic nucleic acid (BNA)
  modified_base (20)..(20): bicyclic nucleic acid (BNA)
aguucuguccaagcccggtt

SEQ ID NO: 11153 - DNA, 19 bp, Artificial Sequence
  source: /note="Description of Artificial Sequence: Synthetic oligonucleotide"
  source: /note="Description of Combined DNA/RNA Molecule: Synthetic oligonucleotide"
  source: /note="DNA/RNA"
  modified_base (1)..(1): bicyclic nucleic acid (BNA)
  modified_base (2)..(2): bicyclic nucleic acid (BNA)
  modified_base (18)..(18): bicyclic nucleic acid (BNA)
  modified_base (19)..(19): bicyclic nucleic acid (BNA)
aguucuguccaagcccggt

SEQ ID NO: 11154 - RNA, 18 nt, Artificial Sequence
  source: /note="Description of Artificial Sequence: Synthetic oligonucleotide"
  source: /note="RNA"
  modified_base (1)..(1): bicyclic nucleic acid (BNA)
  modified_base (2)..(2): bicyclic nucleic acid (BNA)
  modified_base (17)..(17): bicyclic nucleic acid (BNA)
  modified_base (18)..(18): bicyclic nucleic acid (BNA)
aguucuguccaagcccgg

SEQ ID NO: 11155 - RNA, 17 nt, Artificial Sequence
  source: /note="Description of Artificial Sequence: Synthetic oligonucleotide"
  source: /note="RNA"
  modified_base (1)..(1): bicyclic nucleic acid (BNA)
  modified_base (2)..(2): bicyclic nucleic acid (BNA)
  modified_base (16)..(16): bicyclic nucleic acid (BNA)
  modified_base (17)..(17): bicyclic nucleic acid (BNA)
aguucuguccaagcccg

SEQ ID NO: 11156 - RNA, 16 nt, Artificial Sequence
  source: /note="Description of Artificial Sequence: Synthetic oligonucleotide"
  source: /note="RNA"
  modified_base (1)..(1): bicyclic nucleic acid (BNA)
  modified_base (2)..(2): bicyclic nucleic acid (BNA)
  modified_base (15)..(15): bicyclic nucleic acid (BNA)
  modified_base (16)..(16): bicyclic nucleic acid (BNA)
aguucuguccaagccc

SEQ ID NO: 11157 - RNA, 15 nt, Artificial Sequence
  source: /note="Description of Artificial Sequence: Synthetic oligonucleotide"
  source: /note="RNA"
  modified_base (1)..(1): bicyclic nucleic acid (BNA)
  modified_base (2)..(2): bicyclic nucleic acid (BNA)
  modified_base (14)..(14): bicyclic nucleic acid (BNA)
  modified_base (15)..(15): bicyclic nucleic acid (BNA)
aguucuguccaagcc

SEQ ID NO: 11158 - RNA, 14 nt, Artificial Sequence
  source: /note="Description of Artificial Sequence: Synthetic oligonucleotide"
  source: /note="RNA"
  modified_base (1)..(1): bicyclic nucleic acid (BNA)
  modified_base (2)..(2): bicyclic nucleic acid (BNA)
  modified_base (13)..(13): bicyclic nucleic acid (BNA)
  modified_base (14)..(14): bicyclic nucleic acid (BNA)
aguucuguccaagc

SEQ ID NO: 11159 - RNA, 13 nt, Artificial Sequence
  source: /note="Description of Artificial Sequence: Synthetic oligonucleotide"
  source: /note="RNA"
  modified_base (1)..(1): bicyclic nucleic acid (BNA)
  modified_base (2)..(2): bicyclic nucleic acid (BNA)
  modified_base (12)..(12): bicyclic nucleic acid (BNA)
  modified_base (13)..(13): bicyclic nucleic acid (BNA)
aguucuguccaag

SEQ ID NO: 11160 - RNA, 12 nt, Artificial Sequence
  source: /note="Description of Artificial Sequence: Synthetic oligonucleotide"
  source: /note="RNA"
  modified_base (1)..(1): bicyclic nucleic acid (BNA)
  modified_base (2)..(2): bicyclic nucleic acid (BNA)
  modified_base (11)..(11): bicyclic nucleic acid (BNA)
  modified_base (12)..(12): bicyclic nucleic acid (BNA)
aguucuguccaa

SEQ ID NO: 11161 - RNA, 11 nt, Artificial Sequence
  source: /note="Description of Artificial Sequence: Synthetic oligonucleotide"
  source: /note="RNA"
  modified_base (1)..(1): bicyclic nucleic acid (BNA)
  modified_base (2)..(2): bicyclic nucleic acid (BNA)
  modified_base (10)..(10): bicyclic nucleic acid (BNA)
  modified_base (11)..(11): bicyclic nucleic acid (BNA)
aguucugucca

SEQ ID NO: 11162 - RNA, 10 nt, Artificial Sequence
  source: /note="Description of Artificial Sequence: Synthetic oligonucleotide"
  source: /note="RNA"
  modified_base (1)..(1): bicyclic nucleic acid (BNA)
  modified_base (2)..(2): bicyclic nucleic acid (BNA)
  modified_base (9)..(9): bicyclic nucleic acid (BNA)
  modified_base (10)..(10): bicyclic nucleic acid (BNA)
aguucugucc

SEQ ID NO: 11163 - DNA, 9 bp, Artificial Sequence
  source: /note="Description of Artificial Sequence: Synthetic oligonucleotide"
  source: /note="Description of Combined DNA/RNA Molecule: Synthetic oligonucleotide"
  source: /note="DNA/RNA"
  modified_base (1)..(1): bicyclic nucleic acid (BNA)
  modified_base (2)..(2): bicyclic nucleic acid (BNA)
  modified_base (8)..(8): bicyclic nucleic acid (BNA)
  modified_base (9)..(9): bicyclic nucleic acid (BNA)
aguucugtc

SEQ ID NO: 11164 - DNA, 8 bp, Artificial Sequence
  source: /note="Description of Artificial Sequence: Synthetic oligonucleotide"
  source: /note="Description of Combined DNA/RNA Molecule: Synthetic oligonucleotide"
  source: /note="DNA/RNA"
  modified_base (1)..(1): bicyclic nucleic acid (BNA)
  modified_base (2)..(2): bicyclic nucleic acid (BNA)
  modified_base (7)..(7): bicyclic nucleic acid (BNA)
  modified_base (8)..(8): bicyclic nucleic acid (BNA)
aguucugt

SEQ ID NO: 11165 - DNA, 20 bp, Artificial Sequence
  source: /note="Description of Artificial Sequence: Synthetic oligonucleotide"
  source: /note="Description of Combined DNA/RNA Molecule: Synthetic oligonucleotide"
  source: /note="DNA/RNA"
  modified_base (1)..(1): bicyclic nucleic acid (BNA)
  modified_base (2)..(2): bicyclic nucleic acid (BNA)
  modified_base (19)..(19): bicyclic nucleic acid (BNA)
  modified_base (20)..(20): bicyclic nucleic acid (BNA)
aaguucuguccaagcccggt

SEQ ID NO: 11166 - RNA, 19 nt, Artificial Sequence
  source: /note="Description of Artificial Sequence: Synthetic oligonucleotide"
  source: /note="RNA"
  modified_base (1)..(1): bicyclic nucleic acid (BNA)
  modified_base (2)..(2): bicyclic nucleic acid (BNA)
  modified_base (18)..(18): bicyclic nucleic acid (BNA)
  modified_base (19)..(19): bicyclic nucleic acid (BNA)
aaguucuguccaagcccgg

SEQ ID NO: 11167 - RNA, 18 nt, Artificial Sequence
  source: /note="Description of Artificial Sequence: Synthetic oligonucleotide"
  source: /note="RNA"
  modified_base (1)..(1): bicyclic nucleic acid (BNA)
  modified_base (2)..(2): bicyclic nucleic acid (BNA)
  modified_base (17)..(17): bicyclic nucleic acid (BNA)
  modified_base (18)..(18): bicyclic nucleic acid (BNA)
aaguucuguccaagcccg

SEQ ID NO: 11168 - RNA, 17 nt, Artificial Sequence
  source: /note="Description of Artificial Sequence: Synthetic oligonucleotide"
  source: /note="RNA"
  modified_base (1)..(1): bicyclic nucleic acid (BNA)
  modified_base (2)..(2): bicyclic nucleic acid (BNA)
  modified_base (16)..(16): bicyclic nucleic acid (BNA)
  modified_base (17)..(17): bicyclic nucleic acid (BNA)
aaguucuguccaagccc

SEQ ID NO: 11169 - RNA, 16 nt, Artificial Sequence
  source: /note="Description of Artificial Sequence: Synthetic oligonucleotide"
  source: /note="RNA"
  modified_base (1)..(1): bicyclic nucleic acid (BNA)
  modified_base (2)..(2): bicyclic nucleic acid (BNA)
  modified_base (15)..(15): bicyclic nucleic acid (BNA)
  modified_base (16)..(16): bicyclic nucleic acid (BNA)
aaguucuguccaagcc

SEQ ID NO: 11170 - RNA, 15 nt, Artificial Sequence
  source: /note="Description of Artificial Sequence: Synthetic oligonucleotide"
  source: /note="RNA"
  modified_base (1)..(1): bicyclic nucleic acid (BNA)
  modified_base (2)..(2): bicyclic nucleic acid (BNA)
  modified_base (14)..(14): bicyclic nucleic acid (BNA)
  modified_base (15)..(15): bicyclic nucleic acid (BNA)
aaguucuguccaagc

SEQ ID NO: 11171 - RNA, 14 nt, Artificial Sequence
  source: /note="Description of Artificial Sequence: Synthetic oligonucleotide"
  source: /note="RNA"
  modified_base (1)..(1): bicyclic nucleic acid (BNA)
  modified_base (2)..(2): bicyclic nucleic acid (BNA)
  modified_base (13)..(13): bicyclic nucleic acid (BNA)
  modified_base (14)..(14): bicyclic nucleic acid (BNA)
aaguucuguccaag

SEQ ID NO: 11172 - RNA, 13 nt, Artificial Sequence
  source: /note="Description of Artificial Sequence: Synthetic oligonucleotide"
  source: /note="RNA"
  modified_base (1)..(1): bicyclic nucleic acid (BNA)
  modified_base (2)..(2): bicyclic nucleic acid (BNA)
  modified_base (12)..(12): bicyclic nucleic acid (BNA)
  modified_base (13)..(13): bicyclic nucleic acid (BNA)
aaguucuguccaa

SEQ ID NO: 11173 - RNA, 12 nt, Artificial Sequence
  source: /note="Description of Artificial Sequence: Synthetic oligonucleotide"
  source: /note="RNA"
  modified_base (1)..(1): bicyclic nucleic acid (BNA)
  modified_base (2)..(2): bicyclic nucleic acid (BNA)
  modified_base (11)..(11): bicyclic nucleic acid (BNA)
  modified_base (12)..(12): bicyclic nucleic acid (BNA)
aaguucugucca

SEQ ID NO: 11174 - RNA, 11 nt, Artificial Sequence
  source: /note="Description of Artificial Sequence: Synthetic oligonucleotide"
  source: /note="RNA"
  modified_base (1)..(1): bicyclic nucleic acid (BNA)
  modified_base (2)..(2): bicyclic nucleic acid (BNA)
  modified_base (10)..(10): bicyclic nucleic acid (BNA)
  modified_base (11)..(11): bicyclic nucleic acid (BNA)
aaguucugucc

SEQ ID NO: 11175 - DNA, 10 bp, Artificial Sequence
  source: /note="Description of Artificial Sequence: Synthetic oligonucleotide"
  source: /note="Description of Combined DNA/RNA Molecule: Synthetic oligonucleotide"
  source: /note="DNA/RNA"
  modified_base (1)..(1): bicyclic nucleic acid (BNA)
  modified_base (2)..(2): bicyclic nucleic acid (BNA)
  modified_base (9)..(9): bicyclic nucleic acid (BNA)
  modified_base (10)..(10): bicyclic nucleic acid (BNA)
aaguucugtc

SEQ ID NO: 11176 - DNA, 9 bp, Artificial Sequence
  source: /note="Description of Artificial Sequence: Synthetic oligonucleotide"
  source: /note="Description of Combined DNA/RNA Molecule: Synthetic oligonucleotide"
  source: /note="DNA/RNA"
  modified_base (1)..(1): bicyclic nucleic acid (BNA)
  modified_base (2)..(2): bicyclic nucleic acid (BNA)
  modified_base (8)..(8): bicyclic nucleic acid (BNA)
  modified_base (9)..(9): bicyclic nucleic acid (BNA)
aaguucugt

SEQ ID NO: 11177 - DNA, 8 bp, Artificial Sequence
  source: /note="Description of Artificial Sequence: Synthetic oligonucleotide"
  source: /note="Description of Combined DNA/RNA Molecule: Synthetic oligonucleotide"
  source: /note="DNA/RNA"
  modified_base (1)..(1): bicyclic nucleic acid (BNA)
  modified_base (2)..(2): bicyclic nucleic acid (BNA)
  modified_base (7)..(7): bicyclic nucleic acid (BNA)
  modified_base (8)..(8): bicyclic nucleic acid (BNA)
aaguuctg

SEQ ID NO: 11178 - DNA, 20 bp, Artificial Sequence
  source: /note="Description of Artificial Sequence: Synthetic oligonucleotide"
  source: /note="Description of Combined DNA/RNA Molecule: Synthetic oligonucleotide"
  source: /note="DNA/RNA"
  modified_base (1)..(1): bicyclic nucleic acid (BNA)
  modified_base (2)..(2): bicyclic nucleic acid (BNA)
  modified_base (19)..(19): bicyclic nucleic acid (BNA)
  modified_base (20)..(20): bicyclic nucleic acid (BNA)
taaguucuguccaagcccgg

SEQ ID NO: 11179 - DNA, 19 bp, Artificial Sequence
  source: /note="Description of Artificial Sequence: Synthetic oligonucleotide"
  source: /note="Description of Combined DNA/RNA Molecule: Synthetic oligonucleotide"
  source: /note="DNA/RNA"
  modified_base (1)..(1): bicyclic nucleic acid (BNA)
  modified_base (2)..(2): bicyclic nucleic acid (BNA)
  modified_base (18)..(18): bicyclic nucleic acid (BNA)
  modified_base (19)..(19): bicyclic nucleic acid (BNA)
taaguucuguccaagcccg

SEQ ID NO: 11180 - DNA, 18 bp, Artificial Sequence
  source: /note="Description of Artificial Sequence: Synthetic oligonucleotide"
  source: /note="Description of Combined DNA/RNA Molecule: Synthetic oligonucleotide"
  source: /note="DNA/RNA"
  modified_base (1)..(1): bicyclic nucleic acid (BNA)
  modified_base (2)..(2): bicyclic nucleic acid (BNA)
  modified_base (17)..(17): bicyclic nucleic acid (BNA)
  modified_base (18)..(18): bicyclic nucleic acid (BNA)
taaguucuguccaagccc

SEQ ID NO: 11181 - DNA, 17 bp, Artificial Sequence
  source: /note="Description of Artificial Sequence: Synthetic oligonucleotide"
  source: /note="Description of Combined DNA/RNA Molecule: Synthetic oligonucleotide"
  source: /note="DNA/RNA"
  modified_base (1)..(1): bicyclic nucleic acid (BNA)
  modified_base (2)..(2): bicyclic nucleic acid (BNA)
  modified_base (16)..(16): bicyclic nucleic acid (BNA)
  modified_base (17)..(17): bicyclic nucleic acid (BNA)
taaguucuguccaagcc

SEQ ID NO: 11182 - DNA, 16 bp, Artificial Sequence
  source: /note="Description of Artificial Sequence: Synthetic oligonucleotide"
  source: /note="Description of Combined DNA/RNA Molecule: Synthetic oligonucleotide"
  source: /note="DNA/RNA"
  modified_base (1)..(1): bicyclic nucleic acid (BNA)
  modified_base (2)..(2): bicyclic nucleic acid (BNA)
  modified_base (15)..(15): bicyclic nucleic acid (BNA)
  modified_base (16)..(16): bicyclic nucleic acid (BNA)
taaguucuguccaagc

SEQ ID NO: 11183 - DNA, 14 bp, Artificial Sequence
  source: /note="Description of Artificial Sequence: Synthetic oligonucleotide"
  source: /note="Description of Combined DNA/RNA Molecule: Synthetic oligonucleotide"
  source: /note="DNA/RNA"
  modified_base (1)..(1): bicyclic nucleic acid (BNA)
  modified_base (2)..(2): bicyclic nucleic acid (BNA)
  modified_base (13)..(13): bicyclic nucleic acid (BNA)
  modified_base (14)..(14): bicyclic nucleic acid (BNA)
taaguucuguccaa

SEQ ID NO: 11184 - DNA, 13 bp, Artificial Sequence
  source: /note="Description of Artificial Sequence: Synthetic oligonucleotide"
  source: /note="Description of Combined DNA/RNA Molecule: Synthetic oligonucleotide"
  source: /note="DNA/RNA"
  modified_base (1)..(1): bicyclic nucleic acid (BNA)
  modified_base (2)..(2): bicyclic nucleic acid (BNA)
  modified_base (12)..(12): bicyclic nucleic acid (BNA)
  modified_base (13)..(13): bicyclic nucleic acid (BNA)
taaguucugucca

SEQ ID NO: 11185 - DNA, 12 bp, Artificial Sequence
  source: /note="Description of Artificial Sequence: Synthetic oligonucleotide"
  source: /note="Description of Combined DNA/RNA Molecule: Synthetic oligonucleotide"
  source: /note="DNA/RNA"
  modified_base (1)..(1): bicyclic nucleic acid (BNA)
  modified_base (2)..(2): bicyclic nucleic acid (BNA)
  modified_base (11)..(11): bicyclic nucleic acid (BNA)
  modified_base (12)..(12): bicyclic nucleic acid (BNA)
taaguucugucc

SEQ ID NO: 11186 - DNA, 11 bp, Artificial Sequence
  source: /note="Description of Artificial Sequence: Synthetic oligonucleotide"
  source: /note="Description of Combined DNA/RNA Molecule: Synthetic oligonucleotide"
  source: /note="DNA/RNA"
  modified_base (1)..(1): bicyclic nucleic acid (BNA)
  modified_base (2)..(2): bicyclic nucleic acid (BNA)
  modified_base (10)..(10): bicyclic nucleic acid (BNA)
  modified_base (11)..(11): bicyclic nucleic acid (BNA)
taaguucugtc

SEQ ID NO: 11187 - DNA, 10 bp, Artificial Sequence
  source: /note="Description of Artificial Sequence: Synthetic oligonucleotide"
  source: /note="Description of Combined DNA/RNA Molecule: Synthetic oligonucleotide"
  source: /note="DNA/RNA"
  modified_base (1)..(1): bicyclic nucleic acid (BNA)
  modified_base (2)..(2): bicyclic nucleic acid (BNA)
  modified_base (9)..(9): bicyclic nucleic acid (BNA)
  modified_base (10)..(10): bicyclic nucleic acid (BNA)
taaguucugt

SEQ ID NO: 11188 - DNA, 9 bp, Artificial Sequence
  source: /note="Description of Artificial Sequence: Synthetic oligonucleotide"
  source: /note="Description of Combined DNA/RNA Molecule: Synthetic oligonucleotide"
  source: /note="DNA/RNA"
  modified_base (1)..(1): bicyclic nucleic acid (BNA)
  modified_base (2)..(2): bicyclic nucleic acid (BNA)
  modified_base (8)..(8): bicyclic nucleic acid (BNA)
  modified_base (9)..(9): bicyclic nucleic acid (BNA)
taaguuctg

SEQ ID NO: 11189 - DNA, 8 bp, Artificial Sequence
  source: /note="Description of Artificial Sequence: Synthetic oligonucleotide"
  source: /note="Description of Combined DNA/RNA Molecule: Synthetic oligonucleotide"
  source: /note="DNA/RNA"
  modified_base (1)..(1): bicyclic nucleic acid (BNA)
  modified_base (2)..(2): bicyclic nucleic acid (BNA)
  modified_base (7)..(7): bicyclic nucleic acid (BNA)
  modified_base (8)..(8): bicyclic nucleic acid (BNA)
taaguuct

SEQ ID NO: 11190 - DNA, 20 bp, Artificial Sequence
  source: /note="Description of Artificial Sequence: Synthetic oligonucleotide"
  source: /note="Description of Combined DNA/RNA Molecule: Synthetic oligonucleotide"
  source: /note="DNA/RNA"
  modified_base (1)..(1): bicyclic nucleic acid (BNA)
  modified_base (2)..(2): bicyclic nucleic acid (BNA)
  modified_base (19)..(19): bicyclic nucleic acid (BNA)
  modified_base (20)..(20): bicyclic nucleic acid (BNA)
gtaaguucuguccaagcccg

SEQ ID NO: 11191 - DNA, 19 bp, Artificial Sequence
  source: /note="Description of Artificial Sequence: Synthetic oligonucleotide"
  source: /note="Description of Combined DNA/RNA Molecule: Synthetic oligonucleotide"
  source: /note="DNA/RNA"
  modified_base (1)..(1): bicyclic nucleic acid (BNA)
  modified_base (2)..(2): bicyclic nucleic acid (BNA)
  modified_base (18)..(18): bicyclic nucleic acid (BNA)
  modified_base (19)..(19): bicyclic nucleic acid (BNA)
gtaaguucuguccaagccc

SEQ ID NO: 11192 - DNA, 17 bp, Artificial Sequence
  source: /note="Description of Artificial Sequence: Synthetic oligonucleotide"
  source: /note="Description of Combined DNA/RNA Molecule: Synthetic oligonucleotide"
  source: /note="DNA/RNA"
  modified_base (1)..(1): bicyclic nucleic acid (BNA)
  modified_base (2)..(2): bicyclic nucleic acid (BNA)
  modified_base (16)..(16): bicyclic nucleic acid (BNA)
  modified_base (17)..(17): bicyclic nucleic acid (BNA)
gtaaguucuguccaagc

SEQ ID NO: 11193 - DNA, 16 bp, Artificial Sequence
  source: /note="Description of Artificial Sequence: Synthetic oligonucleotide"
  source: /note="Description of Combined DNA/RNA Molecule: Synthetic oligonucleotide"
  source: /note="DNA/RNA"
  modified_base (1)..(1): bicyclic nucleic acid (BNA)
  modified_base (2)..(2): bicyclic nucleic acid (BNA)
  modified_base (15)..(15): bicyclic nucleic acid (BNA)
  modified_base (16)..(16): bicyclic nucleic acid (BNA)
gtaaguucuguccaag

SEQ ID NO: 11194 - DNA, 15 bp, Artificial Sequence
  source: /note="Description of Artificial Sequence: Synthetic oligonucleotide"
  source: /note="Description of Combined DNA/RNA Molecule: Synthetic oligonucleotide"
  source: /note="DNA/RNA"
  modified_base (1)..(1): bicyclic nucleic acid (BNA)
  modified_base (2)..(2): bicyclic nucleic acid (BNA)
  modified_base (14)..(14): bicyclic nucleic acid (BNA)
  modified_base (15)..(15): bicyclic nucleic acid (BNA)
gtaaguucuguccaa

SEQ ID NO: 11195 - DNA, 14 bp, Artificial Sequence
  source: /note="Description of Artificial Sequence: Synthetic oligonucleotide"
  source: /note="Description of Combined DNA/RNA Molecule: Synthetic oligonucleotide"
  source: /note="DNA/RNA"
  modified_base (1)..(1): bicyclic nucleic acid (BNA)
  modified_base (2)..(2): bicyclic nucleic acid (BNA)
  modified_base (13)..(13): bicyclic nucleic acid (BNA)
  modified_base (14)..(14): bicyclic nucleic acid (BNA)
gtaaguucugucca

SEQ ID NO: 11196 - DNA, 13 bp, Artificial Sequence
  source: /note="Description of Artificial Sequence: Synthetic oligonucleotide"
  source: /note="Description of Combined DNA/RNA Molecule: Synthetic oligonucleotide"
  source: /note="DNA/RNA"
  modified_base (1)..(1): bicyclic nucleic acid (BNA)
  modified_base (2)..(2): bicyclic nucleic acid (BNA)
  modified_base (12)..(12): bicyclic nucleic acid (BNA)
  modified_base (13)..(13): bicyclic nucleic acid (BNA)
gtaaguucugucc

SEQ ID NO: 11197 - DNA, 12 bp, Artificial Sequence
  source: /note="Description of Artificial Sequence: Synthetic oligonucleotide"
  source: /note="Description of Combined DNA/RNA Molecule: Synthetic oligonucleotide"
  source: /note="DNA/RNA"
  modified_base (1)..(1): bicyclic nucleic acid (BNA)
  modified_base (2)..(2): bicyclic nucleic acid (BNA)
  modified_base (11)..(11): bicyclic nucleic acid (BNA)
  modified_base (12)..(12): bicyclic nucleic acid (BNA)
gtaaguucugtc

SEQ ID NO: 11198 - DNA, 11 bp, Artificial Sequence
  source: /note="Description of Artificial Sequence: Synthetic oligonucleotide"
  source: /note="Description of Combined DNA/RNA Molecule: Synthetic oligonucleotide"
  source: /note="DNA/RNA"
  modified_base (1)..(1): bicyclic nucleic acid (BNA)
  modified_base (2)..(2): bicyclic nucleic acid (BNA)
  modified_base (10)..(10): bicyclic nucleic acid (BNA)
  modified_base (11)..(11): bicyclic nucleic acid (BNA)
gtaaguucugt

SEQ ID NO: 11199 - DNA, 10 bp, Artificial Sequence
  source: /note="Description of Artificial Sequence: Synthetic oligonucleotide"
  source: /note="Description of Combined DNA/RNA Molecule: Synthetic oligonucleotide"
  source: /note="DNA/RNA"
  modified_base (1)..(1): bicyclic nucleic acid (BNA)
  modified_base (2)..(2): bicyclic nucleic acid (BNA)
  modified_base (9)..(9): bicyclic nucleic acid (BNA)
  modified_base (10)..(10): bicyclic nucleic acid (BNA)
gtaaguuctg

SEQ ID NO: 11200 - DNA, 9 bp, Artificial Sequence
  source: /note="Description of Artificial Sequence: Synthetic oligonucleotide"
  source: /note="Description of Combined DNA/RNA Molecule: Synthetic oligonucleotide"
  source: /note="DNA/RNA"
  modified_base (1)..(1): bicyclic nucleic acid (BNA)
  modified_base (2)..(2): bicyclic nucleic acid (BNA)
  modified_base (8)..(8): bicyclic nucleic acid (BNA)
  modified_base (9)..(9): bicyclic nucleic acid (BNA)
gtaaguuct

SEQ ID NO: 11201 - DNA, 8 bp, Artificial Sequence
  source: /note="Description of Artificial Sequence: Synthetic oligonucleotide"
  source: /note="Description of Combined DNA/RNA Molecule: Synthetic oligonucleotide"
  source: /note="DNA/RNA"
  modified_base (1)..(1): bicyclic nucleic acid (BNA)
  modified_base (2)..(2): bicyclic nucleic acid (BNA)
  modified_base (7)..(7): bicyclic nucleic acid (BNA)
  modified_base (8)..(8): bicyclic nucleic acid (BNA)
gtaagutc

SEQ ID NO: 11202 - RNA, 20 nt, Artificial Sequence
  source: /note="Description of Artificial Sequence: Synthetic oligonucleotide"
  source: /note="RNA"
  modified_base (1)..(1): bicyclic nucleic acid (BNA)
  modified_base (2)..(2): bicyclic nucleic acid (BNA)
  modified_base (19)..(19): bicyclic nucleic acid (BNA)
  modified_base (20)..(20): bicyclic nucleic acid (BNA)
gguaaguucuguccaagccc

SEQ ID NO: 11203 - RNA, 19 nt, Artificial Sequence
  source: /note="Description of Artificial Sequence: Synthetic oligonucleotide"
  source: /note="RNA"
  modified_base (1)..(1): bicyclic nucleic acid (BNA)
  modified_base (2)..(2): bicyclic nucleic acid (BNA)
  modified_base (18)..(18): bicyclic nucleic acid (BNA)
  modified_base (19)..(19): bicyclic nucleic acid (BNA)
gguaaguucuguccaagcc

SEQ ID NO: 11204 - RNA, 17 nt, Artificial Sequence
  source: /note="Description of Artificial Sequence: Synthetic oligonucleotide"
  source: /note="RNA"
  modified_base (1)..(1): bicyclic nucleic acid (BNA)
  modified_base (2)..(2): bicyclic nucleic acid (BNA)
  modified_base (16)..(16): bicyclic nucleic acid (BNA)
  modified_base (17)..(17): bicyclic nucleic acid (BNA)
gguaaguucuguccaag

SEQ ID NO: 11205 - RNA, 16 nt, Artificial Sequence
  source: /note="Description of Artificial Sequence: Synthetic oligonucleotide"
  source: /note="RNA"
  modified_base (1)..(1): bicyclic nucleic acid (BNA)
  modified_base (2)..(2): bicyclic nucleic acid (BNA)
  modified_base (15)..(15): bicyclic nucleic acid (BNA)
  modified_base (16)..(16): bicyclic nucleic acid (BNA)
gguaaguucuguccaa

SEQ ID NO: 11206 - RNA, 15 nt, Artificial Sequence
  source: /note="Description of Artificial Sequence: Synthetic oligonucleotide"
  source: /note="RNA"
  modified_base (1)..(1): bicyclic nucleic acid (BNA)
  modified_base (2)..(2): bicyclic nucleic acid (BNA)
  modified_base (14)..(14): bicyclic nucleic acid (BNA)
  modified_base (15)..(15): bicyclic nucleic acid (BNA)
gguaaguucugucca

SEQ ID NO: 11207 - RNA, 14 nt, Artificial Sequence
  source: /note="Description of Artificial Sequence: Synthetic oligonucleotide"
  source: /note="RNA"
  modified_base (1)..(1): bicyclic nucleic acid (BNA)
  modified_base (2)..(2): bicyclic nucleic acid (BNA)
  modified_base (13)..(13): bicyclic nucleic acid (BNA)
  modified_base (14)..(14): bicyclic nucleic acid (BNA)
gguaaguucugucc

SEQ ID NO: 11208 - DNA, 13 bp, Artificial Sequence
  source: /note="Description of Artificial Sequence: Synthetic oligonucleotide"
  source: /note="Description of Combined DNA/RNA Molecule: Synthetic oligonucleotide"
  source: /note="DNA/RNA"
  modified_base (1)..(1): bicyclic nucleic acid (BNA)
  modified_base (2)..(2): bicyclic nucleic acid (BNA)
  modified_base (12)..(12): bicyclic nucleic acid (BNA)
  modified_base (13)..(13): bicyclic nucleic acid (BNA)
gguaaguucugtc

SEQ ID NO: 11209 - DNA, 12 bp, Artificial Sequence
  source: /note="Description of Artificial Sequence: Synthetic oligonucleotide"
  source: /note="Description of Combined DNA/RNA Molecule: Synthetic oligonucleotide"
  source: /note="DNA/RNA"
  modified_base (1)..(1): bicyclic nucleic acid (BNA)
  modified_base (2)..(2): bicyclic nucleic acid (BNA)
  modified_base (11)..(11): bicyclic nucleic acid (BNA)
  modified_base (12)..(12): bicyclic nucleic acid (BNA)
gguaaguucugt

SEQ ID NO: 11210 - DNA, 11 bp, Artificial Sequence
  source: /note="Description of Artificial Sequence: Synthetic oligonucleotide"
  source: /note="Description of Combined DNA/RNA Molecule: Synthetic oligonucleotide"
  source: /note="DNA/RNA"
  modified_base (1)..(1): bicyclic nucleic acid (BNA)
  modified_base (2)..(2): bicyclic nucleic acid (BNA)
  modified_base (10)..(10): bicyclic nucleic acid (BNA)
  modified_base (11)..(11): bicyclic nucleic acid (BNA)
gguaaguuctg

SEQ ID NO: 11211 - DNA, 10 bp, Artificial Sequence
  source: /note="Description of Artificial Sequence: Synthetic oligonucleotide"
  source: /note="Description of Combined DNA/RNA Molecule: Synthetic oligonucleotide"
  source: /note="DNA/RNA"
  modified_base (1)..(1): bicyclic nucleic acid (BNA)
  modified_base (2)..(2): bicyclic nucleic acid (BNA)
  modified_base (9)..(9): bicyclic nucleic acid (BNA)
  modified_base (10)..(10): bicyclic nucleic acid (BNA)
gguaaguuct

SEQ ID NO: 11212 - DNA, 9 bp, Artificial Sequence
  source: /note="Description of Artificial Sequence: Synthetic oligonucleotide"
  source: /note="Description of Combined DNA/RNA Molecule: Synthetic oligonucleotide"
  source: /note="DNA/RNA"
  modified_base (1)..(1): bicyclic nucleic acid (BNA)
  modified_base (2)..(2): bicyclic nucleic acid (BNA)
  modified_base (8)..(8): bicyclic nucleic acid (BNA)
  modified_base (9)..(9): bicyclic nucleic acid (BNA)
gguaagutc

SEQ ID NO: 11213 - DNA, 8 bp, Artificial Sequence
  source: /note="Description of Artificial Sequence: Synthetic oligonucleotide"
  source: /note="Description of Combined DNA/RNA Molecule: Synthetic oligonucleotide"
  source: /note="DNA/RNA"
  modified_base (1)..(1): bicyclic nucleic acid (BNA)
  modified_base (2)..(2): bicyclic nucleic acid (BNA)
  modified_base (7)..(7): bicyclic nucleic acid (BNA)
  modified_base (8)..(8): bicyclic nucleic acid (BNA)
gguaagtt

SEQ ID NO: 11214 - RNA, 20 nt, Artificial Sequence
  source: /note="Description of Artificial Sequence: Synthetic oligonucleotide"
  source: /note="RNA"
  modified_base (1)..(1): bicyclic nucleic acid (BNA)
  modified_base (2)..(2): bicyclic nucleic acid (BNA)
  modified_base (19)..(19): bicyclic nucleic acid (BNA)
  modified_base (20)..(20): bicyclic nucleic acid (BNA)
cgguaaguucuguccaagcc

SEQ ID NO: 11215 - RNA, 19 nt, Artificial Sequence
  source: /note="Description of Artificial Sequence: Synthetic oligonucleotide"
  source: /note="RNA"
  modified_base (1)..(1): bicyclic nucleic acid (BNA)
  modified_base (2)..(2): bicyclic nucleic acid (BNA)
  modified_base (18)..(18): bicyclic nucleic acid (BNA)
  modified_base (19)..(19): bicyclic nucleic acid (BNA)
cgguaaguucuguccaagc

SEQ ID NO: 11216 - RNA, 18 nt, Artificial Sequence
  source: /note="Description of Artificial Sequence: Synthetic oligonucleotide"
  source: /note="RNA"
  modified_base (1)..(1): bicyclic nucleic acid (BNA)
  modified_base (2)..(2): bicyclic nucleic acid (BNA)
  modified_base (17)..(17): bicyclic nucleic acid (BNA)
  modified_base (18)..(18): bicyclic nucleic acid (BNA)
cgguaaguucuguccaag

SEQ ID NO: 11217 - RNA, 17 nt, Artificial Sequence
  source: /note="Description of Artificial Sequence: Synthetic oligonucleotide"
  source: /note="RNA"
  modified_base (1)..(1): bicyclic nucleic acid (BNA)
  modified_base (2)..(2): bicyclic nucleic acid (BNA)
  modified_base (16)..(16): bicyclic nucleic acid (BNA)
  modified_base (17)..(17): bicyclic nucleic acid (BNA)
cgguaaguucuguccaa

SEQ ID NO: 11218 - RNA, 16 nt, Artificial Sequence
  source: /note="Description of Artificial Sequence: Synthetic oligonucleotide"
  source: /note="RNA"
  modified_base (1)..(1): bicyclic nucleic acid (BNA)
  modified_base (2)..(2): bicyclic nucleic acid (BNA)
  modified_base (15)..(15): bicyclic nucleic acid (BNA)
  modified_base (16)..(16): bicyclic nucleic acid (BNA)
cgguaaguucugucca

SEQ ID NO: 11219 - RNA, 15 nt, Artificial Sequence
  source: /note="Description of Artificial Sequence: Synthetic oligonucleotide"
  source: /note="RNA"
  modified_base (1)..(1): bicyclic nucleic acid (BNA)
  modified_base (2)..(2): bicyclic nucleic acid (BNA)
  modified_base (14)..(14): bicyclic nucleic acid (BNA)
  modified_base (15)..(15): bicyclic nucleic acid (BNA)
cgguaaguucugucc

SEQ ID NO: 11220 - DNA, 14 bp, Artificial Sequence
  source: /note="Description of Artificial Sequence: Synthetic oligonucleotide"
  source: /note="Description of Combined DNA/RNA Molecule: Synthetic oligonucleotide"
  source: /note="DNA/RNA"
  modified_base (1)..(1): bicyclic nucleic acid (BNA)
  modified_base (2)..(2): bicyclic nucleic acid (BNA)
  modified_base (13)..(13): bicyclic nucleic acid (BNA)
  modified_base (14)..(14): bicyclic nucleic acid (BNA)
cgguaaguucugtc

SEQ ID NO: 11221 - DNA, 13 bp, Artificial Sequence
  source: /note="Description of Artificial Sequence: Synthetic oligonucleotide"
  source: /note="Description of Combined DNA/RNA Molecule: Synthetic oligonucleotide"
  source: /note="DNA/RNA"
  modified_base (1)..(1): bicyclic nucleic acid (BNA)
  modified_base (2)..(2): bicyclic nucleic acid (BNA)
  modified_base (12)..(12): bicyclic nucleic acid (BNA)
  modified_base (13)..(13): bicyclic nucleic acid (BNA)
cgguaaguucugt

SEQ ID NO: 11222 - DNA, 12 bp, Artificial Sequence
  source: /note="Description of Artificial Sequence: Synthetic oligonucleotide"
  source: /note="Description of Combined DNA/RNA Molecule: Synthetic oligonucleotide"
  source: /note="DNA/RNA"
  modified_base (1)..(1): bicyclic nucleic acid (BNA)
  modified_base (2)..(2): bicyclic nucleic acid (BNA)
  modified_base (11)..(11): bicyclic nucleic acid (BNA)
  modified_base (12)..(12): bicyclic nucleic acid (BNA)
cgguaaguuctg

SEQ ID NO: 11223 - DNA, 11 bp, Artificial Sequence
  source: /note="Description of Artificial Sequence: Synthetic oligonucleotide"
  source: /note="Description of Combined DNA/RNA Molecule: Synthetic oligonucleotide"
  source: /note="DNA/RNA"
  modified_base (1)..(1): bicyclic nucleic acid (BNA)
  modified_base (2)..(2): bicyclic nucleic acid (BNA)
  modified_base (10)..(10): bicyclic nucleic acid (BNA)
  modified_base (11)..(11): bicyclic nucleic acid (BNA)
cgguaaguuct

SEQ ID NO: 11224 - DNA, 10 bp, Artificial Sequence
  source: /note="Description of Artificial Sequence: Synthetic oligonucleotide"
  source: /note="Description of Combined DNA/RNA Molecule: Synthetic oligonucleotide"
  source: /note="DNA/RNA"
  modified_base (1)..(1): bicyclic nucleic acid (BNA)
  modified_base (2)..(2): bicyclic nucleic acid (BNA)
  modified_base (9)..(9): bicyclic nucleic acid (BNA)
  modified_base (10)..(10): bicyclic nucleic acid (BNA)
cgguaagutc

SEQ ID NO: 11225 - DNA, 9 bp, Artificial Sequence
  source: /note="Description of Artificial Sequence: Synthetic oligonucleotide"
  source: /note="Description of Combined DNA/RNA Molecule: Synthetic oligonucleotide"
  source: /note="DNA/RNA"
  modified_base (1)..(1): bicyclic nucleic acid (BNA)
  modified_base (2)..(2): bicyclic nucleic acid (BNA)
  modified_base (8)..(8): bicyclic nucleic acid (BNA)
  modified_base (9)..(9): bicyclic nucleic acid (BNA)
cgguaagtt

SEQ ID NO: 11226 - DNA, 8 bp, Artificial Sequence
  source: /note="Description of Artificial Sequence: Synthetic oligonucleotide"
  source: /note="Description of Combined DNA/RNA Molecule: Synthetic oligonucleotide"
  source: /note="DNA/RNA"
  modified_base (1)..(1): bicyclic nucleic acid (BNA)
  modified_base (2)..(2): bicyclic nucleic acid (BNA)
  modified_base (7)..(7): bicyclic nucleic acid (BNA)
  modified_base (8)..(8): bicyclic nucleic acid (BNA)
cgguaagt

SEQ ID NO: 11227 - DNA, 20 bp, Artificial Sequence
  source: /note="Description of Artificial Sequence: Synthetic oligonucleotide"
  source: /note="Description of Combined DNA/RNA Molecule: Synthetic oligonucleotide"
  source: /note="DNA/RNA"
  modified_base (1)..(1): bicyclic nucleic acid (BNA)
  modified_base (2)..(2): bicyclic nucleic acid (BNA)
  modified_base (19)..(19): bicyclic nucleic acid (BNA)
  modified_base (20)..(20): bicyclic nucleic acid (BNA)
tcgguaaguucuguccaagc

SEQ ID NO: 11228 - DNA, 19 bp, Artificial Sequence
  source: /note="Description of Artificial Sequence: Synthetic oligonucleotide"
  source: /note="Description of Combined DNA/RNA Molecule: Synthetic oligonucleotide"
  source: /note="DNA/RNA"
  modified_base (1)..(1): bicyclic nucleic acid (BNA)
  modified_base (2)..(2): bicyclic nucleic acid (BNA)
  modified_base (18)..(18): bicyclic nucleic acid (BNA)
  modified_base (19)..(19): bicyclic nucleic acid (BNA)
tcgguaaguucuguccaag

SEQ ID NO: 11229 - DNA, 18 bp, Artificial Sequence
  source: /note="Description of Artificial Sequence: Synthetic oligonucleotide"
  source: /note="Description of Combined DNA/RNA Molecule: Synthetic oligonucleotide"
  source: /note="DNA/RNA"
  modified_base (1)..(1): bicyclic nucleic acid (BNA)
  modified_base (2)..(2): bicyclic nucleic acid (BNA)
  modified_base (17)..(17): bicyclic nucleic acid (BNA)
  modified_base (18)..(18): bicyclic nucleic acid (BNA)
tcgguaaguucuguccaa

SEQ ID NO: 11230 - DNA, 17 bp, Artificial Sequence
  source: /note="Description of Artificial Sequence: Synthetic oligonucleotide"
  source: /note="Description of Combined DNA/RNA Molecule: Synthetic oligonucleotide"
  source: /note="DNA/RNA"
  modified_base (1)..(1): bicyclic nucleic acid (BNA)
  modified_base (2)..(2): bicyclic nucleic acid (BNA)
  modified_base (16)..(16): bicyclic nucleic acid (BNA)
  modified_base (17)..(17): bicyclic nucleic acid (BNA)
tcgguaaguucugucca

SEQ ID NO: 11231 - DNA, 16 bp, Artificial Sequence
  source: /note="Description of Artificial Sequence: Synthetic oligonucleotide"
  source: /note="Description of Combined DNA/RNA Molecule: Synthetic oligonucleotide"
  source: /note="DNA/RNA"
  modified_base (1)..(1): bicyclic nucleic acid (BNA)
  modified_base (2)..(2): bicyclic nucleic acid (BNA)
  modified_base (15)..(15): bicyclic nucleic acid (BNA)
  modified_base (16)..(16): bicyclic nucleic acid (BNA)
tcgguaaguucugucc

SEQ ID NO: 11232 - DNA, 15 bp, Artificial Sequence
  source: /note="Description of Artificial Sequence: Synthetic oligonucleotide"
  source: /note="Description of Combined DNA/RNA Molecule: Synthetic oligonucleotide"
  source: /note="DNA/RNA"
  modified_base (1)..(1): bicyclic nucleic acid (BNA)
  modified_base (2)..(2): bicyclic nucleic acid (BNA)
  modified_base (14)..(14): bicyclic nucleic acid (BNA)
  modified_base (15)..(15): bicyclic nucleic acid (BNA)
tcgguaaguucugtc

SEQ ID NO: 11233 - DNA, 14 bp, Artificial Sequence
  source: /note="Description of Artificial Sequence: Synthetic oligonucleotide"
  source: /note="Description of Combined DNA/RNA Molecule: Synthetic oligonucleotide"
  source: /note="DNA/RNA"
  modified_base (1)..(1): bicyclic nucleic acid (BNA)
  modified_base (2)..(2): bicyclic nucleic acid (BNA)
  modified_base (13)..(13): bicyclic nucleic acid (BNA)
  modified_base (14)..(14): bicyclic nucleic acid (BNA)
tcgguaaguucugt

SEQ ID NO: 11234 - DNA, 13 bp, Artificial Sequence
  source: /note="Description of Artificial Sequence: Synthetic oligonucleotide"
  source: /note="Description of Combined DNA/RNA Molecule: Synthetic oligonucleotide"
  source: /note="DNA/RNA"
  modified_base (1)..(1): bicyclic nucleic acid (BNA)
  modified_base (2)..(2): bicyclic nucleic acid (BNA)
  modified_base (12)..(12): bicyclic nucleic acid (BNA)
  modified_base (13)..(13): bicyclic nucleic acid (BNA)
tcgguaaguuctg

SEQ ID NO: 11235 - DNA, 12 bp, Artificial Sequence
  source: /note="Description of Artificial Sequence: Synthetic oligonucleotide"
  source: /note="Description of Combined DNA/RNA Molecule: Synthetic oligonucleotide"
  source: /note="DNA/RNA"
  modified_base (1)..(1): bicyclic nucleic acid (BNA)
  modified_base (2)..(2): bicyclic nucleic acid (BNA)
  modified_base (11)..(11): bicyclic nucleic acid (BNA)
  modified_base (12)..(12): bicyclic nucleic acid (BNA)
tcgguaaguuct

SEQ ID NO: 11236 - DNA, 11 bp, Artificial Sequence
  source: /note="Description of Artificial Sequence: Synthetic oligonucleotide"
  source: /note="Description of Combined DNA/RNA Molecule: Synthetic oligonucleotide"
  source: /note="DNA/RNA"
  modified_base (1)..(1): bicyclic nucleic acid (BNA)
  modified_base (2)..(2): bicyclic nucleic acid (BNA)
  modified_base (10)..(10): bicyclic nucleic acid (BNA)
  modified_base (11)..(11): bicyclic nucleic acid (BNA)
tcgguaagutc

SEQ ID NO: 11237 - DNA, 10 bp, Artificial Sequence
  source: /note="Description of Artificial Sequence: Synthetic oligonucleotide"
  source: /note="Description of Combined DNA/RNA Molecule: Synthetic oligonucleotide"
  source: /note="DNA/RNA"
  modified_base (1)..(1): bicyclic nucleic acid (BNA)
  modified_base (2)..(2): bicyclic nucleic acid (BNA)
  modified_base (9)..(9): bicyclic nucleic acid (BNA)
  modified_base (10)..(10): bicyclic nucleic acid (BNA)
tcgguaagtt

SEQ ID NO: 11238 - DNA, 9 bp, Artificial Sequence
  source: /note="Description of Artificial Sequence: Synthetic oligonucleotide"
  source: /note="Description of Combined DNA/RNA Molecule: Synthetic oligonucleotide"
  source: /note="DNA/RNA"
  modified_base (1)..(1): bicyclic nucleic acid (BNA)
  modified_base (2)..(2): bicyclic nucleic acid (BNA)
  modified_base (8)..(8): bicyclic nucleic acid (BNA)
  modified_base (9)..(9): bicyclic nucleic acid (BNA)
tcgguaagt

SEQ ID NO: 11239 - DNA, 20 bp, Artificial Sequence
  source: /note="Description of Artificial Sequence: Synthetic oligonucleotide"
  source: /note="Description of Combined DNA/RNA Molecule: Synthetic oligonucleotide"
  source: /note="DNA/RNA"
  modified_base (1)..(1): bicyclic nucleic acid (BNA)
  modified_base (2)..(2): bicyclic nucleic acid (BNA)
  modified_base (19)..(19): bicyclic nucleic acid (BNA)
  modified_base (20)..(20): bicyclic nucleic acid (BNA)
gtcgguaaguucuguccaag

SEQ ID NO: 11240 - DNA, 19 bp, Artificial Sequence
  source: /note="Description of Artificial Sequence: Synthetic oligonucleotide"
  source: /note="Description of Combined DNA/RNA Molecule: Synthetic oligonucleotide"
  source: /note="DNA/RNA"
  modified_base (1)..(1): bicyclic nucleic acid (BNA)
  modified_base (2)..(2): bicyclic nucleic acid (BNA)
  modified_base (18)..(18): bicyclic nucleic acid (BNA)
  modified_base (19)..(19): bicyclic nucleic acid (BNA)
gtcgguaaguucuguccaa

SEQ ID NO: 11241 - DNA, 18 bp, Artificial Sequence
  source: /note="Description of Artificial Sequence: Synthetic oligonucleotide"
  source: /note="Description of Combined DNA/RNA Molecule: Synthetic oligonucleotide"
  source: /note="DNA/RNA"
  modified_base (1)..(1): bicyclic nucleic acid (BNA)
  modified_base (2)..(2): bicyclic nucleic acid (BNA)
  modified_base (17)..(17): bicyclic nucleic acid (BNA)
  modified_base (18)..(18): bicyclic nucleic acid (BNA)
gtcgguaaguucugucca

SEQ ID NO: 11242 - DNA, 17 bp, Artificial Sequence
  source: /note="Description of Artificial Sequence: Synthetic oligonucleotide"
  source: /note="Description of Combined DNA/RNA Molecule: Synthetic oligonucleotide"
  source: /note="DNA/RNA"
  modified_base (1)..(1): bicyclic nucleic acid (BNA)
  modified_base (2)..(2): bicyclic nucleic acid (BNA)
  modified_base (16)..(16): bicyclic nucleic acid (BNA)
  modified_base (17)..(17): bicyclic nucleic acid (BNA)
gtcgguaaguucugucc

SEQ ID NO: 11243 - DNA, 16 bp, Artificial Sequence
  source: /note="Description of Artificial Sequence: Synthetic oligonucleotide"
  source: /note="Description of Combined DNA/RNA Molecule: Synthetic oligonucleotide"
  source: /note="DNA/RNA"
  modified_base (1)..(1): bicyclic nucleic acid (BNA)
  modified_base (2)..(2): bicyclic nucleic acid (BNA)
  modified_base (15)..(15): bicyclic nucleic acid (BNA)
  modified_base (16)..(16): bicyclic nucleic acid (BNA)
gtcgguaaguucugtc

SEQ ID NO: 11244 - DNA, 15 bp, Artificial Sequence
  source: /note="Description of Artificial Sequence: Synthetic oligonucleotide"
  source: /note="Description of Combined DNA/RNA Molecule: Synthetic oligonucleotide"
  source: /note="DNA/RNA"
  modified_base (1)..(1): bicyclic nucleic acid (BNA)
  modified_base (2)..(2): bicyclic nucleic acid (BNA)
  modified_base (14)..(14): bicyclic nucleic acid (BNA)
  modified_base (15)..(15): bicyclic nucleic acid (BNA)
gtcgguaaguucugt

SEQ ID NO: 11245 - DNA, 14 bp, Artificial Sequence
  source: /note="Description of Artificial Sequence: Synthetic oligonucleotide"
  source: /note="Description of Combined DNA/RNA Molecule: Synthetic oligonucleotide"
  source: /note="DNA/RNA"
  modified_base (1)..(1): bicyclic nucleic acid (BNA)
  modified_base (2)..(2): bicyclic nucleic acid (BNA)
  modified_base (13)..(13): bicyclic nucleic acid (BNA)
  modified_base (14)..(14): bicyclic nucleic acid (BNA)
gtcgguaaguuctg

SEQ ID NO: 11246 - DNA, 13 bp, Artificial Sequence
  source: /note="Description of Artificial Sequence: Synthetic oligonucleotide"
  source: /note="Description of Combined DNA/RNA Molecule: Synthetic oligonucleotide"
  source: /note="DNA/RNA"
  modified_base (1)..(1): bicyclic nucleic acid (BNA)
  modified_base (2)..(2): bicyclic nucleic acid (BNA)
  modified_base (12)..(12): bicyclic nucleic acid (BNA)
  modified_base (13)..(13): bicyclic nucleic acid (BNA)
gtcgguaaguuct

SEQ ID NO: 11247 - DNA, 12 bp, Artificial Sequence
  source: /note="Description of Artificial Sequence: Synthetic oligonucleotide"
  source: /note="Description of Combined DNA/RNA Molecule: Synthetic oligonucleotide"
  source: /note="DNA/RNA"
  modified_base (1)..(1): bicyclic nucleic acid (BNA)
  modified_base (2)..(2): bicyclic nucleic acid (BNA)
  modified_base (11)..(11): bicyclic nucleic acid (BNA)
  modified_base (12)..(12): bicyclic nucleic acid (BNA)
gtcgguaagutc

SEQ ID NO: 11248 - DNA, 11 bp, Artificial Sequence
  source: /note="Description of Artificial Sequence: Synthetic oligonucleotide"
  source: /note="Description of Combined DNA/RNA Molecule: Synthetic oligonucleotide"
  source: /note="DNA/RNA"
  modified_base (1)..(1): bicyclic nucleic acid (BNA)
  modified_base (2)..(2): bicyclic nucleic acid (BNA)
  modified_base (10)..(10): bicyclic nucleic acid (BNA)
  modified_base (11)..(11): bicyclic nucleic acid (BNA)
gtcgguaagtt

SEQ ID NO: 11249 - DNA, 10 bp, Artificial Sequence
  source: /note="Description of Artificial Sequence: Synthetic oligonucleotide"
  source: /note="Description of Combined DNA/RNA Molecule: Synthetic oligonucleotide"
  source: /note="DNA/RNA"
  modified_base (1)..(1): bicyclic nucleic acid (BNA)
  modified_base (2)..(2): bicyclic nucleic acid (BNA)
  modified_base (9)..(9): bicyclic nucleic acid (BNA)
  modified_base (10)..(10): bicyclic nucleic acid (BNA)
gtcgguaagt

SEQ ID NO: 11250 - RNA, 20 nt, Artificial Sequence
  source: /note="Description of Artificial Sequence: Synthetic oligonucleotide"
  source: /note="RNA"
  modified_base (1)..(1): bicyclic nucleic acid (BNA)
  modified_base (2)..(2): bicyclic nucleic acid (BNA)
  modified_base (19)..(19): bicyclic nucleic acid (BNA)
  modified_base (20)..(20): bicyclic nucleic acid (BNA)
agucgguaaguucuguccaa

SEQ ID NO: 11251 - RNA, 19 nt, Artificial Sequence
  source: /note="Description of Artificial Sequence: Synthetic oligonucleotide"
  source: /note="RNA"
  modified_base (1)..(1): bicyclic nucleic acid (BNA)
  modified_base (2)..(2): bicyclic nucleic acid (BNA)
  modified_base (18)..(18): bicyclic nucleic acid (BNA)
  modified_base (19)..(19): bicyclic nucleic acid (BNA)
agucgguaaguucugucca

SEQ ID NO: 11252 - DNA, 17 bp, Artificial Sequence
  source: /note="Description of Artificial Sequence: Synthetic oligonucleotide"
  source: /note="Description of Combined DNA/RNA Molecule: Synthetic oligonucleotide"
  source: /note="DNA/RNA"
  modified_base (1)..(1): bicyclic nucleic acid (BNA)
  modified_base (2)..(2): bicyclic nucleic acid (BNA)
  modified_base (16)..(16): bicyclic nucleic acid (BNA)
  modified_base (17)..(17): bicyclic nucleic acid (BNA)
agucgguaaguucugtc

SEQ ID NO: 11253 - DNA, 16 bp, Artificial Sequence
  source: /note="Description of Artificial Sequence: Synthetic oligonucleotide"
  source: /note="Description of Combined DNA/RNA Molecule: Synthetic oligonucleotide"
  source: /note="DNA/RNA"
  modified_base (1)..(1): bicyclic nucleic acid (BNA)
  modified_base (2)..(2): bicyclic nucleic acid (BNA)
  modified_base (15)..(15): bicyclic nucleic acid (BNA)
  modified_base (16)..(16): bicyclic nucleic acid (BNA)
agucgguaaguucugt

SEQ ID NO: 11254 - DNA, 15 bp, Artificial Sequence
  source: /note="Description of Artificial Sequence: Synthetic oligonucleotide"
  source: /note="Description of Combined DNA/RNA Molecule: Synthetic oligonucleotide"
  source: /note="DNA/RNA"
  modified_base (1)..(1): bicyclic nucleic acid (BNA)
  modified_base (2)..(2): bicyclic nucleic acid (BNA)
  modified_base (14)..(14): bicyclic nucleic acid (BNA)
  modified_base (15)..(15): bicyclic nucleic acid (BNA)
agucgguaaguuctg

SEQ ID NO: 11255 - DNA, 14 bp, Artificial Sequence
  source: /note="Description of Artificial Sequence: Synthetic oligonucleotide"
  source: /note="Description of Combined DNA/RNA Molecule: Synthetic oligonucleotide"
  source: /note="DNA/RNA"
  modified_base (1)..(1): bicyclic nucleic acid (BNA)
  modified_base (2)..(2): bicyclic nucleic acid (BNA)
  modified_base (13)..(13): bicyclic nucleic acid (BNA)
  modified_base (14)..(14): bicyclic nucleic acid (BNA)
agucgguaaguuct

SEQ ID NO: 11256 - DNA, 13 bp, Artificial Sequence
  source: /note="Description of Artificial Sequence: Synthetic oligonucleotide"
  source: /note="Description of Combined DNA/RNA Molecule: Synthetic oligonucleotide"
  source: /note="DNA/RNA"
  modified_base (1)..(1): bicyclic nucleic acid (BNA)
  modified_base (2)..(2): bicyclic nucleic acid (BNA)
  modified_base (12)..(12): bicyclic nucleic acid (BNA)
  modified_base (13)..(13): bicyclic nucleic acid (BNA)
agucgguaagutc

SEQ ID NO: 11257 - DNA, 12 bp, Artificial Sequence
  source: /note="Description of Artificial Sequence: Synthetic oligonucleotide"
  source: /note="Description of Combined DNA/RNA Molecule: Synthetic oligonucleotide"
  source: /note="DNA/RNA"
  modified_base (1)..(1): bicyclic nucleic acid (BNA)
  modified_base (2)..(2): bicyclic nucleic acid (BNA)
  modified_base (11)..(11): bicyclic nucleic acid (BNA)
  modified_base (12)..(12): bicyclic nucleic acid (BNA)
agucgguaagtt

SEQ ID NO: 11258 - DNA, 11 bp, Artificial Sequence
  source: /note="Description of Artificial Sequence: Synthetic oligonucleotide"
  source: /note="Description of Combined DNA/RNA Molecule: Synthetic oligonucleotide"
  source: /note="DNA/RNA"
  modified_base (1)..(1): bicyclic nucleic acid (BNA)
  modified_base (2)..(2): bicyclic nucleic acid (BNA)
  modified_base (10)..(10): bicyclic nucleic acid (BNA)
  modified_base (11)..(11): bicyclic nucleic acid (BNA)
agucgguaagt

SEQ ID NO: 11259 - RNA, 20 nt, Artificial Sequence
  source: /note="Description of Artificial Sequence: Synthetic oligonucleotide"
  source: /note="RNA"
  modified_base (1)..(1): bicyclic nucleic acid (BNA)
  modified_base (2)..(2): bicyclic nucleic acid (BNA)
  modified_base (19)..(19): bicyclic nucleic acid (BNA)
  modified_base (20)..(20): bicyclic nucleic acid (BNA)
cagucgguaaguucugucca

SEQ ID NO: 11260 - RNA, 19 nt, Artificial Sequence
  source: /note="Description of Artificial Sequence: Synthetic oligonucleotide"
  source: /note="RNA"
  modified_base (1)..(1): bicyclic nucleic acid (BNA)
  modified_base (2)..(2): bicyclic nucleic acid (BNA)
  modified_base (18)..(18): bicyclic nucleic acid (BNA)
  modified_base (19)..(19): bicyclic nucleic acid (BNA)
cagucgguaaguucugucc

SEQ ID NO: 11261 - DNA, 18 bp, Artificial Sequence
  source: /note="Description of Artificial Sequence: Synthetic oligonucleotide"
  source: /note="Description of Combined DNA/RNA Molecule: Synthetic oligonucleotide"
  source: /note="DNA/RNA"
  modified_base (1)..(1): bicyclic nucleic acid (BNA)
  modified_base (2)..(2): bicyclic nucleic acid (BNA)
  modified_base (17)..(17): bicyclic nucleic acid (BNA)
  modified_base (18)..(18): bicyclic nucleic acid (BNA)
cagucgguaaguucugtc

SEQ ID NO: 11262 - DNA, 17 bp, Artificial Sequence
  source: /note="Description of Artificial Sequence: Synthetic oligonucleotide"
  source: /note="Description of Combined DNA/RNA Molecule: Synthetic oligonucleotide"
  source: /note="DNA/RNA"
  modified_base (1)..(1): bicyclic nucleic acid (BNA)
  modified_base (2)..(2): bicyclic nucleic acid (BNA)
  modified_base (16)..(16): bicyclic nucleic acid (BNA)
  modified_base (17)..(17): bicyclic nucleic acid (BNA)
cagucgguaaguucugt

SEQ ID NO: 11263 - DNA, 16 bp, Artificial Sequence
  source: /note="Description of Artificial Sequence: Synthetic oligonucleotide"
  source: /note="Description of Combined DNA/RNA Molecule: Synthetic oligonucleotide"
  source: /note="DNA/RNA"
  modified_base (1)..(1): bicyclic nucleic acid (BNA)
  modified_base (2)..(2): bicyclic nucleic acid (BNA)
  modified_base (15)..(15): bicyclic nucleic acid (BNA)
  modified_base (16)..(16): bicyclic nucleic acid (BNA)
cagucgguaaguuctg

SEQ ID NO: 11264 - DNA, 15 bp, Artificial Sequence
  source: /note="Description of Artificial Sequence: Synthetic oligonucleotide"
  source: /note="Description of Combined DNA/RNA Molecule: Synthetic oligonucleotide"
  source: /note="DNA/RNA"
  modified_base (1)..(1): bicyclic nucleic acid (BNA)
  modified_base (2)..(2): bicyclic nucleic acid (BNA)
  modified_base (14)..(14): bicyclic nucleic acid (BNA)
  modified_base (15)..(15): bicyclic nucleic acid (BNA)
cagucgguaaguuct

SEQ ID NO: 11265 - DNA, 14 bp, Artificial Sequence
  source: /note="Description of Artificial Sequence: Synthetic oligonucleotide"
  source: /note="Description of Combined DNA/RNA Molecule: Synthetic oligonucleotide"
  source: /note="DNA/RNA"
  modified_base (1)..(1): bicyclic nucleic acid (BNA)
  modified_base (2)..(2): bicyclic nucleic acid (BNA)
  modified_base (13)..(13): bicyclic nucleic acid (BNA)
  modified_base (14)..(14): bicyclic nucleic acid (BNA)
cagucgguaagutc

SEQ ID NO: 11266 - DNA, 13 bp, Artificial Sequence
  source: /note="Description of Artificial Sequence: Synthetic oligonucleotide"
  source: /note="Description of Combined DNA/RNA Molecule: Synthetic oligonucleotide"
  source: /note="DNA/RNA"
  modified_base (1)..(1): bicyclic nucleic acid (BNA)
  modified_base (2)..(2): bicyclic nucleic acid (BNA)
  modified_base (12)..(12): bicyclic nucleic acid (BNA)
  modified_base (13)..(13): bicyclic nucleic acid (BNA)
cagucgguaagtt

SEQ ID NO: 11267 - DNA, 12 bp, Artificial Sequence
  source: /note="Description of Artificial Sequence: Synthetic oligonucleotide"
  source: /note="Description of Combined DNA/RNA Molecule: Synthetic oligonucleotide"
  source: /note="DNA/RNA"
  modified_base (1)..(1): bicyclic nucleic acid (BNA)
  modified_base (2)..(2): bicyclic nucleic acid (BNA)
  modified_base (11)..(11): bicyclic nucleic acid (BNA)
  modified_base (12)..(12): bicyclic nucleic acid (BNA)
cagucgguaagt

SEQ ID NO: 11268 - RNA, 20 nt, Artificial Sequence
  source: /note="Description of Artificial Sequence: Synthetic oligonucleotide"
  source: /note="RNA"
  modified_base (1)..(1): bicyclic nucleic acid (BNA)
  modified_base (2)..(2): bicyclic nucleic acid (BNA)
  modified_base (19)..(19): bicyclic nucleic acid (BNA)
  modified_base (20)..(20): bicyclic nucleic acid (BNA)
ccagucgguaaguucugucc

SEQ ID NO: 11269 - DNA, 19 bp, Artificial Sequence
  source: /note="Description of Artificial Sequence: Synthetic oligonucleotide"
  source: /note="Description of Combined DNA/RNA Molecule: Synthetic oligonucleotide"
  source: /note="DNA/RNA"
  modified_base (1)..(1): bicyclic nucleic acid (BNA)
  modified_base (2)..(2): bicyclic nucleic acid (BNA)
  modified_base (18)..(18): bicyclic nucleic acid (BNA)
  modified_base (19)..(19): bicyclic nucleic acid (BNA)
ccagucgguaaguucugtc

SEQ ID NO: 11270 - DNA, 18 bp, Artificial Sequence
  source: /note="Description of Artificial Sequence: Synthetic oligonucleotide"
  source: /note="Description of Combined DNA/RNA Molecule: Synthetic oligonucleotide"
  source: /note="DNA/RNA"
  modified_base (1)..(1): bicyclic nucleic acid (BNA)
  modified_base (2)..(2): bicyclic nucleic acid (BNA)
  modified_base (17)..(17): bicyclic nucleic acid (BNA)
  modified_base (18)..(18): bicyclic nucleic acid (BNA)
ccagucgguaaguucugt

SEQ ID NO: 11271 - DNA, 17 bp, Artificial Sequence
  source: /note="Description of Artificial Sequence: Synthetic oligonucleotide"
  source: /note="Description of Combined DNA/RNA Molecule: Synthetic oligonucleotide"
  source: /note="DNA/RNA"
  modified_base (1)..(1): bicyclic nucleic acid (BNA)
  modified_base (2)..(2): bicyclic nucleic acid (BNA)
  modified_base (16)..(16): bicyclic nucleic acid (BNA)
  modified_base (17)..(17): bicyclic nucleic acid (BNA)
ccagucgguaaguuctg

SEQ ID NO: 11272 - DNA, 16 bp, Artificial Sequence
  source: /note="Description of Artificial Sequence: Synthetic oligonucleotide"
  source: /note="Description of Combined DNA/RNA Molecule: Synthetic oligonucleotide"
  source: /note="DNA/RNA"
  modified_base (1)..(1): bicyclic nucleic acid (BNA)
  modified_base (2)..(2): bicyclic nucleic acid (BNA)
  modified_base (15)..(15): bicyclic nucleic acid (BNA)
  modified_base (16)..(16): bicyclic nucleic acid (BNA)
ccagucgguaaguuct

SEQ ID NO: 11273 - DNA, 15 bp, Artificial Sequence
  source: /note="Description of Artificial Sequence: Synthetic oligonucleotide"
  source: /note="Description of Combined DNA/RNA Molecule: Synthetic oligonucleotide"
  source: /note="DNA/RNA"
  modified_base (1)..(1): bicyclic nucleic acid (BNA)
  modified_base (2)..(2): bicyclic nucleic acid (BNA)
  modified_base (14)..(14): bicyclic nucleic acid (BNA)
  modified_base (15)..(15): bicyclic nucleic acid (BNA)
ccagucgguaagutc

SEQ ID NO: 11274 - DNA, 14 bp, Artificial Sequence
  source: /note="Description of Artificial Sequence: Synthetic oligonucleotide"
  source: /note="Description of Combined DNA/RNA Molecule: Synthetic oligonucleotide"
  source: /note="DNA/RNA"
  modified_base (1)..(1): bicyclic nucleic acid (BNA)
  modified_base (2)..(2): bicyclic nucleic acid (BNA)
  modified_base (13)..(13): bicyclic nucleic acid (BNA)
  modified_base (14)..(14): bicyclic nucleic acid (BNA)
ccagucgguaagtt

SEQ ID NO: 11275 - DNA, 13 bp, Artificial Sequence
  source: /note="Description of Artificial Sequence: Synthetic oligonucleotide"
  source: /note="Description of Combined DNA/RNA Molecule: Synthetic oligonucleotide"
  source: /note="DNA/RNA"
  modified_base (1)..(1): bicyclic nucleic acid (BNA)
  modified_base (2)..(2): bicyclic nucleic acid (BNA)
  modified_base (12)..(12): bicyclic nucleic acid (BNA)
  modified_base (13)..(13): bicyclic nucleic acid (BNA)
ccagucgguaagt

SEQ ID NO: 11276 - DNA, 20 bp, Artificial Sequence
  source: /note="Description of Artificial Sequence: Synthetic oligonucleotide"
  source: /note="Description of Combined DNA/RNA Molecule: Synthetic oligonucleotide"
  source: /note="DNA/RNA"
  modified_base (1)..(1): bicyclic nucleic acid (BNA)
  modified_base (2)..(2): bicyclic nucleic acid (BNA)
  modified_base (19)..(19): bicyclic nucleic acid (BNA)
  modified_base (20)..(20): bicyclic nucleic acid (BNA)
gccagucgguaaguucugtc

SEQ ID NO: 11277 - DNA, 19 bp, Artificial Sequence
  source: /note="Description of Artificial Sequence: Synthetic oligonucleotide"
  source: /note="Description of Combined DNA/RNA Molecule: Synthetic oligonucleotide"
  source: /note="DNA/RNA"
  modified_base (1)..(1): bicyclic nucleic acid (BNA)
  modified_base (2)..(2): bicyclic nucleic acid (BNA)
  modified_base (18)..(18): bicyclic nucleic acid (BNA)
  modified_base (19)..(19): bicyclic nucleic acid (BNA)
gccagucgguaaguucugt

SEQ ID NO: 11278 - DNA, 18 bp, Artificial Sequence
  source: /note="Description of Artificial Sequence: Synthetic oligonucleotide"
  source: /note="Description of Combined DNA/RNA Molecule: Synthetic oligonucleotide"
  source: /note="DNA/RNA"
  modified_base (1)..(1): bicyclic nucleic acid (BNA)
  modified_base (2)..(2): bicyclic nucleic acid (BNA)
  modified_base (17)..(17): bicyclic nucleic acid (BNA)
  modified_base (18)..(18): bicyclic nucleic acid (BNA)
gccagucgguaaguuctg

SEQ ID NO: 11279 - DNA, 17 bp, Artificial Sequence
  source: /note="Description of Artificial Sequence: Synthetic oligonucleotide"
  source: /note="Description of Combined DNA/RNA Molecule: Synthetic oligonucleotide"
  source: /note="DNA/RNA"
  modified_base (1)..(1): bicyclic nucleic acid (BNA)
  modified_base (2)..(2): bicyclic nucleic acid (BNA)
  modified_base (16)..(16): bicyclic nucleic acid (BNA)
  modified_base (17)..(17): bicyclic nucleic acid (BNA)
gccagucgguaaguuct

SEQ ID NO: 11280 - DNA, 16 bp, Artificial Sequence
  source: /note="Description of Artificial Sequence: Synthetic oligonucleotide"
  source: /note="Description of Combined DNA/RNA Molecule: Synthetic oligonucleotide"
  source: /note="DNA/RNA"
  modified_base (1)..(1): bicyclic nucleic acid (BNA)
  modified_base (2)..(2): bicyclic nucleic acid (BNA)
  modified_base (15)..(15): bicyclic nucleic acid (BNA)
  modified_base (16)..(16): bicyclic nucleic acid (BNA)
gccagucgguaagutc

SEQ ID NO: 11281 - DNA, 15 bp, Artificial Sequence
  source: /note="Description of Artificial Sequence: Synthetic oligonucleotide"
  source: /note="Description of Combined DNA/RNA Molecule: Synthetic oligonucleotide"
  source: /note="DNA/RNA"
  modified_base (1)..(1): bicyclic nucleic acid (BNA)
  modified_base (2)..(2): bicyclic nucleic acid (BNA)
  modified_base (14)..(14): bicyclic nucleic acid (BNA)
  modified_base (15)..(15): bicyclic nucleic acid (BNA)
gccagucgguaagtt

SEQ ID NO: 11282 - DNA, 14 bp, Artificial Sequence
  source: /note="Description of Artificial Sequence: Synthetic oligonucleotide"
  source: /note="Description of Combined DNA/RNA Molecule: Synthetic oligonucleotide"
  source: /note="DNA/RNA"
  modified_base (1)..(1): bicyclic nucleic acid (BNA)
  modified_base (2)..(2): bicyclic nucleic acid (BNA)
  modified_base (13)..(13): bicyclic nucleic acid (BNA)
  modified_base (14)..(14): bicyclic nucleic acid (BNA)
gccagucgguaagt

SEQ ID NO: 11283 - DNA, 20 bp, Artificial Sequence
  source: /note="Description of Artificial Sequence: Synthetic oligonucleotide"
  source: /note="Description of Combined DNA/RNA Molecule: Synthetic oligonucleotide"
  source: /note="DNA/RNA"
  modified_base (1)..(1): bicyclic nucleic acid (BNA)
  modified_base (2)..(2): bicyclic nucleic acid (BNA)
  modified_base (19)..(19): bicyclic nucleic acid (BNA)
  modified_base (20)..(20): bicyclic nucleic acid (BNA)
tcaaggaagauggcauuuct

SEQ ID NO: 11284 - DNA, 22 bp, Artificial Sequence
  source: /note="Description of Artificial Sequence: Synthetic oligonucleotide"
  source: /note="Description of Combined DNA/RNA Molecule: Synthetic oligonucleotide"
  source: /note="DNA/RNA"
  modified_base (1)..(1): bicyclic nucleic acid (BNA)
  modified_base (2)..(2): bicyclic nucleic acid (BNA)
  modified_base (21)..(21): bicyclic nucleic acid (BNA)
  modified_base (22)..(22): bicyclic nucleic acid (BNA)
tcaaggaagauggcauuucuag

SEQ ID NO: 11285 - DNA, 16 bp, Artificial Sequence
  source: /note="Description of Artificial Sequence: Synthetic oligonucleotide"
  source: /note="Description of Combined DNA/RNA Molecule: Synthetic oligonucleotide"
  source: /note="DNA/RNA"
  modified_base (1)..(1): bicyclic nucleic acid (BNA)
  modified_base (2)..(2): bicyclic nucleic acid (BNA)
  modified_base (15)..(15): bicyclic nucleic acid (BNA)
  modified_base (16)..(16): bicyclic nucleic acid (BNA)
tcaaggaagauggcat

SEQ ID NO: 11286 - DNA, 15 bp, Artificial Sequence
  source: /note="Description of Artificial Sequence: Synthetic oligonucleotide"
  source: /note="Description of Combined DNA/RNA Molecule: Synthetic oligonucleotide"
  source: /note="DNA/RNA"
  modified_base (1)..(1): bicyclic nucleic acid (BNA)
  modified_base (2)..(2): bicyclic nucleic acid (BNA)
  modified_base (14)..(14): bicyclic nucleic acid (BNA)
  modified_base (15)..(15): bicyclic nucleic acid (BNA)
gaagauggcauuuct

SEQ ID NO: 11287 - DNA, 21 bp, Artificial Sequence
  source: /note="Description of Artificial Sequence: Synthetic oligonucleotide"
  source: /note="Description of Combined DNA/RNA Molecule: Synthetic oligonucleotide"
  source: /note="DNA/RNA"
  modified_base (1)..(1): bicyclic nucleic acid (BNA)
  modified_base (2)..(2): bicyclic nucleic acid (BNA)
  modified_base (20)..(20): bicyclic nucleic acid (BNA)
  modified_base (21)..(21): bicyclic nucleic acid (BNA)
tcaaggaagauggcauuucta

SEQ ID NO: 11288 - DNA, 19 bp, Artificial Sequence
  source: /note="Description of Artificial Sequence: Synthetic oligonucleotide"
  source: /note="Description of Combined DNA/RNA Molecule: Synthetic oligonucleotide"
  source: /note="DNA/RNA"
  modified_base (1)..(1): bicyclic nucleic acid (BNA)
  modified_base (2)..(2): bicyclic nucleic acid (BNA)
  modified_base (18)..(18): bicyclic nucleic acid (BNA)
  modified_base (19)..(19): bicyclic nucleic acid (BNA)
tcaaggaagauggcauutc

SEQ ID NO: 11289 - DNA, 18 bp, Artificial Sequence
  source: /note="Description of Artificial Sequence: Synthetic oligonucleotide"
  source: /note="Description of Combined DNA/RNA Molecule: Synthetic oligonucleotide"
  source: /note="DNA/RNA"
  modified_base (1)..(1): bicyclic nucleic acid (BNA)
  modified_base (2)..(2): bicyclic nucleic acid (BNA)
  modified_base (17)..(17): bicyclic nucleic acid (BNA)
  modified_base (18)..(18): bicyclic nucleic acid (BNA)
tcaaggaagauggcautt

SEQ ID NO: 11290 - DNA, 17 bp, Artificial Sequence
  source: /note="Description of Artificial Sequence: Synthetic oligonucleotide"
  source: /note="Description of Combined DNA/RNA Molecule: Synthetic oligonucleotide"
  source: /note="DNA/RNA"
  modified_base (1)..(1): bicyclic nucleic acid (BNA)
  modified_base (2)..(2): bicyclic nucleic acid (BNA)
  modified_base (16)..(16): bicyclic nucleic acid (BNA)
  modified_base (17)..(17): bicyclic nucleic acid (BNA)
tcaaggaagauggcatt

SEQ ID NO: 11291 - DNA, 15 bp, Artificial Sequence
  source: /note="Description of Artificial Sequence: Synthetic oligonucleotide"
  source: /note="Description of Combined DNA/RNA Molecule: Synthetic oligonucleotide"
  source: /note="DNA/RNA"
  modified_base (1)..(1): bicyclic nucleic acid (BNA)
  modified_base (2)..(2): bicyclic nucleic acid (BNA)
  modified_base (14)..(14): bicyclic nucleic acid (BNA)
  modified_base (15)..(15): bicyclic nucleic acid (BNA)
tcaaggaagauggca

SEQ ID NO: 11292 - DNA, 14 bp, Artificial Sequence
  source: /note="Description of Artificial Sequence: Synthetic oligonucleotide"
  source: /note="Description of Combined DNA/RNA Molecule: Synthetic oligonucleotide"
  source: /note="DNA/RNA"
  modified_base (1)..(1): bicyclic nucleic acid (BNA)
  modified_base (2)..(2): bicyclic nucleic acid (BNA)
  modified_base (13)..(13): bicyclic nucleic acid (BNA)
  modified_base (14)..(14): bicyclic nucleic acid (BNA)
tcaaggaagauggc

SEQ ID NO: 11293 - DNA, 13 bp, Artificial Sequence
  source: /note="Description of Artificial Sequence: Synthetic oligonucleotide"
  source: /note="Description of Combined DNA/RNA Molecule: Synthetic oligonucleotide"
  source: /note="DNA/RNA"
  modified_base (1)..(1): bicyclic nucleic acid (BNA)
  modified_base (2)..(2): bicyclic nucleic acid (BNA)
  modified_base (12)..(12): bicyclic nucleic acid (BNA)
  modified_base (13)..(13): bicyclic nucleic acid (BNA)
tcaaggaagaugg

SEQ ID NO: 11294 - DNA, 12 bp, Artificial Sequence
  source: /note="Description of Artificial Sequence: Synthetic oligonucleotide"
  source: /note="DNA/RNA"
  modified_base (1)..(1): bicyclic nucleic acid (BNA)
  modified_base (2)..(2): bicyclic nucleic acid (BNA)
  modified_base (11)..(11): bicyclic nucleic acid (BNA)
  modified_base (12)..(12): bicyclic nucleic acid (BNA)
tcaaggaagatg

SEQ ID NO: 11295 - DNA, 11 bp, Artificial Sequence
  source: /note="Description of Artificial Sequence: Synthetic oligonucleotide"
  source: /note="DNA/RNA"
  modified_base (1)..(1): bicyclic nucleic acid (BNA)
  modified_base (2)..(2): bicyclic nucleic acid (BNA)
  modified_base (10)..(10): bicyclic nucleic acid (BNA)
  modified_base (11)..(11): bicyclic nucleic acid (BNA)
tcaaggaagat

SEQ ID NO: 11296 - DNA, 10 bp, Artificial Sequence
  source: /note="Description of Artificial Sequence: Synthetic oligonucleotide"
  source: /note="DNA/RNA"
  modified_base (1)..(1): bicyclic nucleic acid (BNA)
  modified_base (2)..(2): bicyclic nucleic acid (BNA)
  modified_base (9)..(9): bicyclic nucleic acid (BNA)
  modified_base (10)..(10): bicyclic nucleic acid (BNA)
tcaaggaaga

SEQ ID NO: 11297 - DNA, 9 bp, Artificial Sequence
  source: /note="Description of Artificial Sequence: Synthetic oligonucleotide"
  source: /note="DNA/RNA"
  modified_base (1)..(1): bicyclic nucleic acid (BNA)
  modified_base (2)..(2): bicyclic nucleic acid (BNA)
  modified_base (8)..(8): bicyclic nucleic acid (BNA)
  modified_base (9)..(9): bicyclic nucleic acid (BNA)
tcaaggaag

SEQ ID NO: 11298 - RNA, 21 nt, Artificial Sequence
  source: /note="Description of Artificial Sequence: Synthetic oligonucleotide"
  source: /note="RNA"
  modified_base (1)..(1): bicyclic nucleic acid (BNA)
  modified_base (2)..(2): bicyclic nucleic acid (BNA)
  modified_base (20)..(20): bicyclic nucleic acid (BNA)
  modified_base (21)..(21): bicyclic nucleic acid (BNA)
caaggaagauggcauuucuag

SEQ ID NO: 11299 - DNA, 20 bp, Artificial Sequence
  source: /note="Description of Artificial Sequence: Synthetic oligonucleotide"
  source: /note="Description of Combined DNA/RNA Molecule: Synthetic oligonucleotide"
  source: /note="DNA/RNA"
  modified_base (1)..(1): bicyclic nucleic acid (BNA)
  modified_base (2)..(2): bicyclic nucleic acid (BNA)
  modified_base (19)..(19): bicyclic nucleic acid (BNA)
  modified_base (20)..(20): bicyclic nucleic acid (BNA)
caaggaagauggcauuucta

SEQ ID NO: 11300 - DNA, 19 bp, Artificial Sequence
  source: /note="Description of Artificial Sequence: Synthetic oligonucleotide"
  source: /note="Description of Combined DNA/RNA Molecule: Synthetic oligonucleotide"
  source: /note="DNA/RNA"
  modified_base (1)..(1): bicyclic nucleic acid (BNA)
  modified_base (2)..(2): bicyclic nucleic acid (BNA)
  modified_base (18)..(18): bicyclic nucleic acid (BNA)
  modified_base (19)..(19): bicyclic nucleic acid (BNA)
caaggaagauggcauuuct

SEQ ID NO: 11301 - DNA, 18 bp, Artificial Sequence
  source: /note="Description of Artificial Sequence: Synthetic oligonucleotide"
  source: /note="Description of Combined DNA/RNA Molecule: Synthetic oligonucleotide"
  source: /note="DNA/RNA"
  modified_base (1)..(1): bicyclic nucleic acid (BNA)
  modified_base (2)..(2): bicyclic nucleic acid (BNA)
  modified_base (17)..(17): bicyclic nucleic acid (BNA)
  modified_base (18)..(18): bicyclic nucleic acid (BNA)
caaggaagauggcauutc

SEQ ID NO: 11302 - DNA, 17 bp, Artificial Sequence
  source: /note="Description of Artificial Sequence: Synthetic oligonucleotide"
  source: /note="Description of Combined DNA/RNA Molecule: Synthetic oligonucleotide"
  source: /note="DNA/RNA"
  modified_base (1)..(1): bicyclic nucleic acid (BNA)
  modified_base (2)..(2): bicyclic nucleic acid (BNA)
  modified_base (16)..(16): bicyclic nucleic acid (BNA)
  modified_base (17)..(17): bicyclic nucleic acid (BNA)
caaggaagauggcautt

SEQ ID NO: 11303 - DNA, 16 bp, Artificial Sequence
  source: /note="Description of Artificial Sequence: Synthetic oligonucleotide"
  source: /note="Description of Combined DNA/RNA Molecule: Synthetic oligonucleotide"
  source: /note="DNA/RNA"
  modified_base (1)..(1): bicyclic nucleic acid (BNA)
  modified_base (2)..(2): bicyclic nucleic acid (BNA)
  modified_base (15)..(15): bicyclic nucleic acid (BNA)
  modified_base (16)..(16): bicyclic nucleic acid (BNA)
caaggaagauggcatt

SEQ ID NO: 11304 - DNA, 15 bp, Artificial Sequence
  source: /note="Description of Artificial Sequence: Synthetic oligonucleotide"
  source: /note="Description of Combined DNA/RNA Molecule: Synthetic oligonucleotide"
  source: /note="DNA/RNA"
  modified_base (1)..(1): bicyclic nucleic acid (BNA)
  modified_base (2)..(2): bicyclic nucleic acid (BNA)
  modified_base (14)..(14): bicyclic nucleic acid (BNA)
  modified_base (15)..(15): bicyclic nucleic acid (BNA)
caaggaagauggcat

SEQ ID NO: 11305 - RNA, 14 nt, Artificial Sequence
  source: /note="Description of Artificial Sequence: Synthetic oligonucleotide"
  source: /note="RNA"
  modified_base (1)..(1): bicyclic nucleic acid (BNA)
  modified_base (2)..(2): bicyclic nucleic acid (BNA)
  modified_base (13)..(13): bicyclic nucleic acid (BNA)
  modified_base (14)..(14): bicyclic nucleic acid (BNA)
caaggaagauggca

SEQ ID NO: 11306 - RNA, 13 nt, Artificial Sequence
  source: /note="Description of Artificial Sequence: Synthetic oligonucleotide"
  source: /note="RNA"
  modified_base (1)..(1): bicyclic nucleic acid (BNA)
  modified_base (2)..(2): bicyclic nucleic acid (BNA)
  modified_base (12)..(12): bicyclic nucleic acid (BNA)
  modified_base (13)..(13): bicyclic nucleic acid (BNA)
caaggaagauggc

SEQ ID NO: 11307 - RNA, 12 nt, Artificial Sequence
  source: /note="Description of Artificial Sequence: Synthetic oligonucleotide"
  source: /note="RNA"
  modified_base (1)..(1): bicyclic nucleic acid (BNA)
  modified_base (2)..(2): bicyclic nucleic acid (BNA)
  modified_base (11)..(11): bicyclic nucleic acid (BNA)
  modified_base (12)..(12): bicyclic nucleic acid (BNA)
caaggaagaugg

SEQ ID NO: 11308 - DNA, 11 bp, Artificial Sequence
  source: /note="Description of Artificial Sequence: Synthetic oligonucleotide"
  source: /note="DNA/RNA"
  modified_base (1)..(1): bicyclic nucleic acid (BNA)
  modified_base (2)..(2): bicyclic nucleic acid (BNA)
  modified_base (10)..(10): bicyclic nucleic acid (BNA)
  modified_base (11)..(11): bicyclic nucleic acid (BNA)
caaggaagatg

SEQ ID NO: 11309 - DNA, 10 bp, Artificial Sequence
  source: /note="Description of Artificial Sequence: Synthetic oligonucleotide"
  source: /note="DNA/RNA"
  modified_base (1)..(1): bicyclic nucleic acid (BNA)
  modified_base (2)..(2): bicyclic nucleic acid (BNA)
  modified_base (9)..(9): bicyclic nucleic acid (BNA)
  modified_base (10)..(10): bicyclic nucleic acid (BNA)
caaggaagat

SEQ ID NO: 11310 - RNA, 9 nt, Artificial Sequence
  source: /note="Description of Artificial Sequence: Synthetic oligonucleotide"
  source: /note="RNA/Antisense Oligonucleotide"
  modified_base (1)..(1): bicyclic nucleic acid (BNA)
  modified_base (2)..(2): bicyclic nucleic acid (BNA)
  modified_base (8)..(8): bicyclic nucleic acid (BNA)
  modified_base (9)..(9): bicyclic nucleic acid (BNA)
caaggaaga

SEQ ID NO: 11311 - RNA, 8 nt, Artificial Sequence
  source: /note="Description of Artificial Sequence: Synthetic oligonucleotide"
  source: /note="RNA/Antisense Oligonucleotide"
  modified_base (1)..(1): bicyclic nucleic acid (BNA)
  modified_base (2)..(2): bicyclic nucleic acid (BNA)
  modified_base (7)..(7): bicyclic nucleic acid (BNA)
  modified_base (8)..(8): bicyclic nucleic acid (BNA)
caaggaag

SEQ ID NO: 11312 - RNA, 20 nt, Artificial Sequence
  source: /note="Description of Artificial Sequence: Synthetic oligonucleotide"
  source: /note="RNA"
  modified_base (1)..(1): bicyclic nucleic acid (BNA)
  modified_base (2)..(2): bicyclic nucleic acid (BNA)
  modified_base (19)..(19): bicyclic nucleic acid (BNA)
  modified_base (20)..(20): bicyclic nucleic acid (BNA)
aaggaagauggcauuucuag

SEQ ID NO: 11313 - DNA, 19 bp, Artificial Sequence
  source: /note="Description of Artificial Sequence: Synthetic oligonucleotide"
  source: /note="Description of Combined DNA/RNA Molecule: Synthetic oligonucleotide"
  source: /note="DNA/RNA"
  modified_base (1)..(1): bicyclic nucleic acid (BNA)
  modified_base (2)..(2): bicyclic nucleic acid (BNA)
  modified_base (18)..(18): bicyclic nucleic acid (BNA)
  modified_base (19)..(19): bicyclic nucleic acid (BNA)
aaggaagauggcauuucta

SEQ ID NO: 11314 - DNA, 18 bp, Artificial Sequence
  source: /note="Description of Artificial Sequence: Synthetic oligonucleotide"
  source: /note="Description of Combined DNA/RNA Molecule: Synthetic oligonucleotide"
  source: /note="DNA/RNA"
  modified_base (1)..(1): bicyclic nucleic acid (BNA)
  modified_base (2)..(2): bicyclic nucleic acid (BNA)
  modified_base (17)..(17): bicyclic nucleic acid (BNA)
  modified_base (18)..(18): bicyclic nucleic acid (BNA)
aaggaagauggcauuuct

SEQ ID NO: 11315 - DNA, 17 bp, Artificial Sequence
  source: /note="Description of Artificial Sequence: Synthetic oligonucleotide"
  source: /note="Description of Combined DNA/RNA Molecule: Synthetic oligonucleotide"
  source: /note="DNA/RNA"
  modified_base (1)..(1): bicyclic nucleic acid (BNA)
  modified_base (2)..(2): bicyclic nucleic acid (BNA)
  modified_base (16)..(16): bicyclic nucleic acid (BNA)
  modified_base (17)..(17): bicyclic nucleic acid (BNA)
aaggaagauggcauutc

SEQ ID NO: 11316 - DNA, 16 bp, Artificial Sequence
  source: /note="Description of Artificial Sequence: Synthetic oligonucleotide"
  source: /note="Description of Combined DNA/RNA Molecule: Synthetic oligonucleotide"
  source: /note="DNA/RNA"
  modified_base (1)..(1): bicyclic nucleic acid (BNA)
  modified_base (2)..(2): bicyclic nucleic acid (BNA)
  modified_base (15)..(15): bicyclic nucleic acid (BNA)
  modified_base (16)..(16): bicyclic nucleic acid (BNA)
aaggaagauggcautt

SEQ ID NO: 11317 - DNA, 15 bp, Artificial Sequence
  source: /note="Description of Artificial Sequence: Synthetic oligonucleotide"
  source: /note="Description of Combined DNA/RNA Molecule: Synthetic oligonucleotide"
  source: /note="DNA/RNA"
  modified_base (1)..(1): bicyclic nucleic acid (BNA)
  modified_base (2)..(2): bicyclic nucleic acid (BNA)
  modified_base (14)..(14): bicyclic nucleic acid (BNA)
  modified_base (15)..(15): bicyclic nucleic acid (BNA)
aaggaagauggcatt

SEQ ID NO: 11318 - DNA, 14 bp, Artificial Sequence
  source: /note="Description of Artificial Sequence: Synthetic oligonucleotide"
  source: /note="Description of Combined DNA/RNA Molecule: Synthetic oligonucleotide"
  source: /note="DNA/RNA"
  modified_base (1)..(1): bicyclic nucleic acid (BNA)
  modified_base (2)..(2): bicyclic nucleic acid (BNA)
  modified_base (13)..(13): bicyclic nucleic acid (BNA)
  modified_base (14)..(14): bicyclic nucleic acid (BNA)
aaggaagauggcat

SEQ ID NO: 11319 - RNA, 13 nt, Artificial Sequence
  source: /note="Description of Artificial Sequence: Synthetic oligonucleotide"
  source: /note="RNA"
  modified_base (1)..(1): bicyclic nucleic acid (BNA)
  modified_base (2)..(2): bicyclic nucleic acid (BNA)
  modified_base (12)..(12): bicyclic nucleic acid (BNA)
  modified_base (13)..(13): bicyclic nucleic acid (BNA)
aaggaagauggca

SEQ ID NO: 11320 - RNA, 12 nt, Artificial Sequence
  source: /note="Description of Artificial Sequence: Synthetic oligonucleotide"
  source: /note="RNA"
  modified_base (1)..(1): bicyclic nucleic acid (BNA)
  modified_base (2)..(2): bicyclic nucleic acid (BNA)
  modified_base (11)..(11): bicyclic nucleic acid (BNA)
  modified_base (12)..(12): bicyclic nucleic acid (BNA)
aaggaagauggc

SEQ ID NO: 11321 - RNA, 11 nt, Artificial Sequence
  source: /note="Description of Artificial Sequence: Synthetic oligonucleotide"
  source: /note="RNA"
  modified_base (1)..(1): bicyclic nucleic acid (BNA)
  modified_base (2)..(2): bicyclic nucleic acid (BNA)
  modified_base (10)..(10): bicyclic nucleic acid (BNA)
  modified_base (11)..(11): bicyclic nucleic acid (BNA)
aaggaagaugg

SEQ ID NO: 11322 - DNA, 10 bp, Artificial Sequence
  source: /note="Description of Artificial Sequence: Synthetic oligonucleotide"
  source: /note="DNA/RNA"
  modified_base (1)..(1): bicyclic nucleic acid (BNA)
  modified_base (2)..(2): bicyclic nucleic acid (BNA)
  modified_base (9)..(9): bicyclic nucleic acid (BNA)
  modified_base (10)..(10): bicyclic nucleic acid (BNA)
aaggaagatg

SEQ ID NO: 11323 - DNA, 9 bp, Artificial Sequence
  source: /note="Description of Artificial Sequence: Synthetic oligonucleotide"
  source: /note="DNA/RNA"
  modified_base (1)..(1): bicyclic nucleic acid (BNA)
  modified_base (2)..(2): bicyclic nucleic acid (BNA)
  modified_base (8)..(8): bicyclic nucleic acid (BNA)
  modified_base (9)..(9): bicyclic nucleic acid (BNA)
aaggaagat

SEQ ID NO: 11324 - RNA, 8 nt, Artificial Sequence
  source: /note="Description of Artificial Sequence: Synthetic oligonucleotide"
  source: /note="RNA/Antisense Oligonucleotide"
  modified_base (1)..(1): bicyclic nucleic acid (BNA)
  modified_base (2)..(2): bicyclic nucleic acid (BNA)
  modified_base (7)..(7): bicyclic nucleic acid (BNA)
  modified_base (8)..(8): bicyclic nucleic acid (BNA)
aaggaaga

SEQ ID NO: 11325 - RNA, 19 nt, Artificial Sequence
  source: /note="Description of Artificial Sequence: Synthetic oligonucleotide"
  source: /note="RNA"
  modified_base (1)..(1): bicyclic nucleic acid (BNA)
  modified_base (2)..(2): bicyclic nucleic acid (BNA)
  modified_base (18)..(18): bicyclic nucleic acid (BNA)
  modified_base (19)..(19): bicyclic nucleic acid (BNA)
aggaagauggcauuucuag

SEQ ID NO: 11326 - DNA, 18 bp, Artificial Sequence
  source: /note="Description of Artificial Sequence: Synthetic oligonucleotide"
  source: /note="Description of Combined DNA/RNA Molecule: Synthetic oligonucleotide"
  source: /note="DNA/RNA"
  modified_base (1)..(1): bicyclic nucleic acid (BNA)
  modified_base (2)..(2): bicyclic nucleic acid (BNA)
  modified_base (17)..(17): bicyclic nucleic acid (BNA)
  modified_base (18)..(18): bicyclic nucleic acid (BNA)
aggaagauggcauuucta

SEQ ID NO: 11327 - DNA, 17 bp, Artificial Sequence
  source: /note="Description of Artificial Sequence: Synthetic oligonucleotide"
  source: /note="Description of Combined DNA/RNA Molecule: Synthetic oligonucleotide"
  source: /note="DNA/RNA"
  modified_base (1)..(1): bicyclic nucleic acid (BNA)
  modified_base (2)..(2): bicyclic nucleic acid (BNA)
  modified_base (16)..(16): bicyclic nucleic acid (BNA)
  modified_base (17)..(17): bicyclic nucleic acid (BNA)
aggaagauggcauuuct

SEQ ID NO: 11328 - DNA, 16 bp, Artificial Sequence
  source: /note="Description of Artificial Sequence: Synthetic oligonucleotide"
  source: /note="Description of Combined DNA/RNA Molecule: Synthetic oligonucleotide"
  source: /note="DNA/RNA"
  modified_base (1)..(1): bicyclic nucleic acid (BNA)
  modified_base (2)..(2): bicyclic nucleic acid (BNA)
  modified_base (15)..(15): bicyclic nucleic acid (BNA)
  modified_base (16)..(16): bicyclic nucleic acid (BNA)
aggaagauggcauutc

SEQ ID NO: 11329 - DNA, 15 bp, Artificial Sequence
  source: /note="Description of Artificial Sequence: Synthetic oligonucleotide"
  source: /note="Description of Combined DNA/RNA Molecule: Synthetic oligonucleotide"
  source: /note="DNA/RNA"
  modified_base (1)..(1): bicyclic nucleic acid (BNA)
  modified_base (2)..(2): bicyclic nucleic acid (BNA)
  modified_base (14)..(14): bicyclic nucleic acid (BNA)
  modified_base (15)..(15): bicyclic nucleic acid (BNA)
aggaagauggcautt

SEQ ID NO: 11330 - DNA, 14 bp, Artificial Sequence
  source: /note="Description of Artificial Sequence: Synthetic oligonucleotide"
  source: /note="Description of Combined DNA/RNA Molecule: Synthetic oligonucleotide"
  source: /note="DNA/RNA"
  modified_base (1)..(1): bicyclic nucleic acid (BNA)
  modified_base (2)..(2): bicyclic nucleic acid (BNA)
  modified_base (13)..(13): bicyclic nucleic acid (BNA)
  modified_base (14)..(14): bicyclic nucleic acid (BNA)
aggaagauggcatt

SEQ ID NO: 11331 - DNA, 13 bp, Artificial Sequence
  source: /note="Description of Artificial Sequence: Synthetic oligonucleotide"
  source: /note="Description of Combined DNA/RNA Molecule: Synthetic oligonucleotide"
  source: /note="DNA/RNA"
  modified_base (1)..(1): bicyclic nucleic acid (BNA)
  modified_base (2)..(2): bicyclic nucleic acid (BNA)
  modified_base (12)..(12): bicyclic nucleic acid (BNA)
  modified_base (13)..(13): bicyclic nucleic acid (BNA)
aggaagauggcat

SEQ ID NO: 11332 - RNA, 12 nt, Artificial Sequence
  source: /note="Description of Artificial Sequence: Synthetic oligonucleotide"
  source: /note="RNA"
  modified_base (1)..(1): bicyclic nucleic acid (BNA)
  modified_base (2)..(2): bicyclic nucleic acid (BNA)
  modified_base (11)..(11): bicyclic nucleic acid (BNA)
  modified_base (12)..(12): bicyclic nucleic acid (BNA)
aggaagauggca

SEQ ID NO: 11333 - RNA, 10 nt, Artificial Sequence
  source: /note="Description of Artificial Sequence: Synthetic oligonucleotide"
  source: /note="RNA"
  modified_base (1)..(1): bicyclic nucleic acid (BNA)
  modified_base (2)..(2): bicyclic nucleic acid (BNA)
  modified_base (9)..(9): bicyclic nucleic acid (BNA)
  modified_base (10)..(10): bicyclic nucleic acid (BNA)
aggaagaugg

SEQ ID NO: 11334 - DNA, 9 bp, Artificial Sequence
  source: /note="Description of Artificial Sequence: Synthetic oligonucleotide"
  source: /note="DNA/RNA"
  modified_base (1)..(1): bicyclic nucleic acid (BNA)
  modified_base (2)..(2): bicyclic nucleic acid (BNA)
  modified_base (8)..(8): bicyclic nucleic acid (BNA)
  modified_base (9)..(9): bicyclic nucleic acid (BNA)
aggaagatg

SEQ ID NO: 11335 - DNA, 8 bp, Artificial Sequence
  source: /note="Description of Artificial Sequence: Synthetic oligonucleotide"
  source: /note="DNA/RNA"
  modified_base (1)..(1): bicyclic nucleic acid (BNA)
  modified_base (2)..(2): bicyclic nucleic acid (BNA)
  modified_base (7)..(7): bicyclic nucleic acid (BNA)
  modified_base (8)..(8): bicyclic nucleic acid (BNA)
aggaagat

SEQ ID NO: 11336 - RNA, 18 nt, Artificial Sequence
  source: /note="Description of Artificial Sequence: Synthetic oligonucleotide"
  source: /note="RNA"
  modified_base (1)..(1): bicyclic nucleic acid (BNA)
  modified_base (2)..(2): bicyclic nucleic acid (BNA)
  modified_base (17)..(17): bicyclic nucleic acid (BNA)
  modified_base (18)..(18): bicyclic nucleic acid (BNA)
ggaagauggcauuucuag

SEQ ID NO: 11337 - DNA, 17 bp, Artificial Sequence
  source: /note="Description of Artificial Sequence: Synthetic oligonucleotide"
  source: /note="Description of Combined DNA/RNA Molecule: Synthetic oligonucleotide"
  source: /note="DNA/RNA"
  modified_base (1)..(1): bicyclic nucleic acid (BNA)
  modified_base (2)..(2): bicyclic nucleic acid (BNA)
  modified_base (16)..(16): bicyclic nucleic acid (BNA)
  modified_base (17)..(17): bicyclic nucleic acid (BNA)
ggaagauggcauuucta

SEQ ID NO: 11338 - DNA, 16 bp, Artificial Sequence
  source: /note="Description of Artificial Sequence: Synthetic oligonucleotide"
  source: /note="Description of Combined DNA/RNA Molecule: Synthetic oligonucleotide"
  source: /note="DNA/RNA"
  modified_base (1)..(1): bicyclic nucleic acid (BNA)
  modified_base (2)..(2): bicyclic nucleic acid (BNA)
  modified_base (15)..(15): bicyclic nucleic acid (BNA)
  modified_base (16)..(16): bicyclic nucleic acid (BNA)
ggaagauggcauuuct

SEQ ID NO: 11339 - DNA, 15 bp, Artificial Sequence
  source: /note="Description of Artificial Sequence: Synthetic oligonucleotide"
  source: /note="Description of Combined DNA/RNA Molecule: Synthetic oligonucleotide"
  source: /note="DNA/RNA"
  modified_base (1)..(1): bicyclic nucleic acid (BNA)
  modified_base (2)..(2): bicyclic nucleic acid (BNA)
  modified_base (14)..(14): bicyclic nucleic acid (BNA)
  modified_base (15)..(15): bicyclic nucleic acid (BNA)
ggaagauggcauutc

SEQ ID NO: 11340 - DNA, 14 bp, Artificial Sequence
  source: /note="Description of Artificial Sequence: Synthetic oligonucleotide"
  source: /note="Description of Combined DNA/RNA Molecule: Synthetic oligonucleotide"
  source: /note="DNA/RNA"
  modified_base (1)..(1): bicyclic nucleic acid (BNA)
  modified_base (2)..(2): bicyclic nucleic acid (BNA)
  modified_base (13)..(13): bicyclic nucleic acid (BNA)
  modified_base (14)..(14): bicyclic nucleic acid (BNA)
ggaagauggcautt

SEQ ID NO: 11341 - DNA, 13 bp, Artificial Sequence
  source: /note="Description of Artificial Sequence: Synthetic oligonucleotide"
  source: /note="Description of Combined DNA/RNA Molecule: Synthetic oligonucleotide"
  source: /note="DNA/RNA"
  modified_base (1)..(1): bicyclic nucleic acid (BNA)
  modified_base (2)..(2): bicyclic nucleic acid (BNA)
  modified_base (12)..(12): bicyclic nucleic acid (BNA)
  modified_base (13)..(13): bicyclic nucleic acid (BNA)
ggaagauggcatt

SEQ ID NO: 11342 - DNA, 12 bp, Artificial Sequence
  source: /note="Description of Artificial Sequence: Synthetic oligonucleotide"
  source: /note="Description of Combined DNA/RNA Molecule: Synthetic oligonucleotide"
  source: /note="DNA/RNA"
  modified_base (1)..(1): bicyclic nucleic acid (BNA)
  modified_base (2)..(2): bicyclic nucleic acid (BNA)
  modified_base (11)..(11): bicyclic nucleic acid (BNA)
  modified_base (12)..(12): bicyclic nucleic acid (BNA)
ggaagauggcat

SEQ ID NO: 11343 - RNA, 11 nt, Artificial Sequence
  source: /note="Description of Artificial Sequence: Synthetic oligonucleotide"
  source: /note="RNA"
  modified_base (1)..(1): bicyclic nucleic acid (BNA)
  modified_base (2)..(2): bicyclic nucleic acid (BNA)
  modified_base (10)..(10): bicyclic nucleic acid (BNA)
  modified_base (11)..(11): bicyclic nucleic acid (BNA)
ggaagauggca

SEQ ID NO: 11344 - RNA, 10 nt, Artificial Sequence
  source: /note="Description of Artificial Sequence: Synthetic oligonucleotide"
  source: /note="RNA"
  modified_base (1)..(1): bicyclic nucleic acid (BNA)
  modified_base (2)..(2): bicyclic nucleic acid (BNA)
  modified_base (9)..(9): bicyclic nucleic acid (BNA)
  modified_base (10)..(10): bicyclic nucleic acid (BNA)
ggaagauggc

SEQ ID NO: 11345 - DNA, 8 bp, Artificial Sequence
  source: /note="Description of Artificial Sequence: Synthetic oligonucleotide"
  source: /note="DNA/RNA"
  modified_base (1)..(1): bicyclic nucleic acid (BNA)
  modified_base (2)..(2): bicyclic nucleic acid (BNA)
  modified_base (7)..(7): bicyclic nucleic acid (BNA)
  modified_base (8)..(8): bicyclic nucleic acid (BNA)
ggaagatg

SEQ ID NO: 11346 - RNA, 17 nt, Artificial Sequence
  source: /note="Description of Artificial Sequence: Synthetic oligonucleotide"
  source: /note="RNA"
  modified_base (1)..(1): bicyclic nucleic acid (BNA)
  modified_base (2)..(2): bicyclic nucleic acid (BNA)
  modified_base (16)..(16): bicyclic nucleic acid (BNA)
  modified_base (17)..(17): bicyclic nucleic acid (BNA)
gaagauggcauuucuag

SEQ ID NO: 11347 - DNA, 16 bp, Artificial Sequence
  source: /note="Description of Artificial Sequence: Synthetic oligonucleotide"
  source: /note="Description of Combined DNA/RNA Molecule: Synthetic oligonucleotide"
  source: /note="DNA/RNA"
  modified_base (1)..(1): bicyclic nucleic acid (BNA)
  modified_base (2)..(2): bicyclic nucleic acid (BNA)
  modified_base (15)..(15): bicyclic nucleic acid (BNA)
  modified_base (16)..(16): bicyclic nucleic acid (BNA)
gaagauggcauuucta

SEQ ID NO: 11348 - DNA, 14 bp, Artificial Sequence
  source: /note="Description of Artificial Sequence: Synthetic oligonucleotide"
  source: /note="Description of Combined DNA/RNA Molecule: Synthetic oligonucleotide"
  source: /note="DNA/RNA"
  modified_base (1)..(1): bicyclic nucleic acid (BNA)
  modified_base (2)..(2): bicyclic nucleic acid (BNA)
  modified_base (13)..(13): bicyclic nucleic acid (BNA)
  modified_base (14)..(14): bicyclic nucleic acid (BNA)
gaagauggcauutc

SEQ ID NO: 11349 - DNA, 13 bp, Artificial Sequence
  source: /note="Description of Artificial Sequence: Synthetic oligonucleotide"
  source: /note="Description of Combined DNA/RNA Molecule: Synthetic oligonucleotide"
  source: /note="DNA/RNA"
  modified_base (1)..(1): bicyclic nucleic acid (BNA)
  modified_base (2)..(2): bicyclic nucleic acid (BNA)
  modified_base (12)..(12): bicyclic nucleic acid (BNA)
  modified_base (13)..(13): bicyclic nucleic acid (BNA)
gaagauggcautt

SEQ ID NO: 11350 - DNA, 12 bp, Artificial Sequence
  source: /note="Description of Artificial Sequence: Synthetic oligonucleotide"
  source: /note="Description of Combined DNA/RNA Molecule: Synthetic oligonucleotide"
  source: /note="DNA/RNA"
  modified_base (1)..(1): bicyclic nucleic acid (BNA)
  modified_base (2)..(2): bicyclic nucleic acid (BNA)
  modified_base (11)..(11): bicyclic nucleic acid (BNA)
  modified_base (12)..(12): bicyclic nucleic acid (BNA)
gaagauggcatt

SEQ ID NO: 11351 - DNA, 11 bp, Artificial Sequence
  source: /note="Description of Artificial Sequence: Synthetic oligonucleotide"
  source: /note="Description of Combined DNA/RNA Molecule: Synthetic oligonucleotide"
  source: /note="DNA/RNA"
  modified_base (1)..(1): bicyclic nucleic acid (BNA)
  modified_base (2)..(2): bicyclic nucleic acid (BNA)
  modified_base (10)..(10): bicyclic nucleic acid (BNA)
  modified_base (11)..(11): bicyclic nucleic acid (BNA)
gaagauggcat

SEQ ID NO: 11352 - RNA, 10 nt, Artificial Sequence
  source: /note="Description of Artificial Sequence: Synthetic oligonucleotide"
  source: /note="RNA"
  modified_base (1)..(1): bicyclic nucleic acid (BNA)
  modified_base (2)..(2): bicyclic nucleic acid (BNA)
  modified_base (9)..(9): bicyclic nucleic acid (BNA)
  modified_base (10)..(10): bicyclic nucleic acid (BNA)
gaagauggca

SEQ ID NO: 11353 - RNA, 9 nt, Artificial Sequence
  source: /note="Description of Artificial Sequence: Synthetic oligonucleotide"
  source: /note="RNA"
  modified_base (1)..(1): bicyclic nucleic acid (BNA)
  modified_base (2)..(2): bicyclic nucleic acid (BNA)
  modified_base (8)..(8): bicyclic nucleic acid (BNA)
  modified_base (9)..(9): bicyclic nucleic acid (BNA)
gaagauggc

SEQ ID NO: 11354 - RNA, 8 nt, Artificial Sequence
  source: /note="Description of Artificial Sequence: Synthetic oligonucleotide"
  source: /note="RNA"
  modified_base (1)..(1): bicyclic nucleic acid (BNA)
  modified_base (2)..(2): bicyclic nucleic acid (BNA)
  modified_base (7)..(7): bicyclic nucleic acid (BNA)
  modified_base (8)..(8): bicyclic nucleic acid (BNA)
gaagaugg

SEQ ID NO: 11355 - RNA, 16 nt, Artificial Sequence
  source: /note="Description of Artificial Sequence: Synthetic oligonucleotide"
  source: /note="RNA"
  modified_base (1)..(1): bicyclic nucleic acid (BNA)
  modified_base (2)..(2): bicyclic nucleic acid (BNA)
  modified_base (15)..(15): bicyclic nucleic acid (BNA)
  modified_base (16)..(16): bicyclic nucleic acid (BNA)
aagauggcauuucuag

SEQ ID NO: 11356 - DNA, 15 bp, Artificial Sequence
  source: /note="Description of Artificial Sequence: Synthetic oligonucleotide"
  source: /note="Description of Combined DNA/RNA Molecule: Synthetic oligonucleotide"
  source: /note="DNA/RNA"
  modified_base (1)..(1): bicyclic nucleic acid (BNA)
  modified_base (2)..(2): bicyclic nucleic acid (BNA)
  modified_base (14)..(14): bicyclic nucleic acid (BNA)
  modified_base (15)..(15): bicyclic nucleic acid (BNA)
aagauggcauuucta

SEQ ID NO: 11357 - DNA, 14 bp, Artificial Sequence
  source: /note="Description of Artificial Sequence: Synthetic oligonucleotide"
  source: /note="Description of Combined DNA/RNA Molecule: Synthetic oligonucleotide"
  source: /note="DNA/RNA"
  modified_base (1)..(1): bicyclic nucleic acid (BNA)
  modified_base (2)..(2): bicyclic nucleic acid (BNA)
  modified_base (13)..(13): bicyclic nucleic acid (BNA)
  modified_base (14)..(14): bicyclic nucleic acid (BNA)
aagauggcauuuct

SEQ ID NO: 11358 - DNA, 13 bp, Artificial Sequence
  source: /note="Description of Artificial Sequence: Synthetic oligonucleotide"
  source: /note="Description of Combined DNA/RNA Molecule: Synthetic oligonucleotide"
  source: /note="DNA/RNA"
  modified_base (1)..(1): bicyclic nucleic acid (BNA)
  modified_base (2)..(2): bicyclic nucleic acid (BNA)
  modified_base (12)..(12): bicyclic nucleic acid (BNA)
  modified_base (13)..(13): bicyclic nucleic acid (BNA)
aagauggcauutc

SEQ ID NO: 11359 - DNA, 12 bp, Artificial Sequence
  source: /note="Description of Artificial Sequence: Synthetic oligonucleotide"
  source: /note="Description of Combined DNA/RNA Molecule: Synthetic oligonucleotide"
  source: /note="DNA/RNA"
  modified_base (1)..(1): bicyclic nucleic acid (BNA)
  modified_base (2)..(2): bicyclic nucleic acid (BNA)
  modified_base (11)..(11): bicyclic nucleic acid (BNA)
  modified_base (12)..(12): bicyclic nucleic acid (BNA)
aagauggcautt

SEQ ID NO: 11360 - DNA, 11 bp, Artificial Sequence
  source: /note="Description of Artificial Sequence: Synthetic oligonucleotide"
  source: /note="Description of Combined DNA/RNA Molecule: Synthetic oligonucleotide"
  source: /note="DNA/RNA"
  modified_base (1)..(1): bicyclic nucleic acid (BNA)
  modified_base (2)..(2): bicyclic nucleic acid (BNA)
  modified_base (10)..(10): bicyclic nucleic acid (BNA)
  modified_base (11)..(11): bicyclic nucleic acid (BNA)
aagauggcatt

SEQ ID NO: 11361 - DNA, 10 bp, Artificial Sequence
  source: /note="Description of Artificial Sequence: Synthetic oligonucleotide"
  source: /note="Description of Combined DNA/RNA Molecule: Synthetic oligonucleotide"
  source: /note="DNA/RNA"
  modified_base (1)..(1): bicyclic nucleic acid (BNA)
  modified_base (2)..(2): bicyclic nucleic acid (BNA)
  modified_base (9)..(9): bicyclic nucleic acid (BNA)
  modified_base (10)..(10): bicyclic nucleic acid (BNA)
aagauggcat

SEQ ID NO: 11362 - RNA, 9 nt, Artificial Sequence
  source: /note="Description of Artificial Sequence: Synthetic oligonucleotide"
  source: /note="RNA"
  modified_base (1)..(1): bicyclic nucleic acid (BNA)
  modified_base (2)..(2): bicyclic nucleic acid (BNA)
  modified_base (8)..(8): bicyclic nucleic acid (BNA)
  modified_base (9)..(9): bicyclic nucleic acid (BNA)
aagauggca

SEQ ID NO: 11363 - RNA, 8 nt, Artificial Sequence
  source: /note="Description of Artificial Sequence: Synthetic oligonucleotide"
  source: /note="RNA"
  modified_base (1)..(1): bicyclic nucleic acid (BNA)
  modified_base (2)..(2): bicyclic nucleic acid (BNA)
  modified_base (7)..(7): bicyclic nucleic acid (BNA)
  modified_base (8)..(8): bicyclic nucleic acid (BNA)
aagauggc

SEQ ID NO: 11364 - RNA, 15 nt, Artificial Sequence
  source: /note="Description of Artificial Sequence: Synthetic oligonucleotide"
  source: /note="RNA"
  modified_base (1)..(1): bicyclic nucleic acid (BNA)
  modified_base (2)..(2): bicyclic nucleic acid (BNA)
  modified_base (14)..(14): bicyclic nucleic acid (BNA)
  modified_base (15)..(15): bicyclic nucleic acid (BNA)
agauggcauuucuag

SEQ ID NO: 11365 - DNA, 14 bp, Artificial Sequence
  source: /note="Description of Artificial Sequence: Synthetic oligonucleotide"
  source: /note="Description of Combined DNA/RNA Molecule: Synthetic oligonucleotide"
  source: /note="DNA/RNA"
  modified_base (1)..(1): bicyclic nucleic acid (BNA)
  modified_base (2)..(2): bicyclic nucleic acid (BNA)
  modified_base (13)..(13): bicyclic nucleic acid (BNA)
  modified_base (14)..(14): bicyclic nucleic acid (BNA)
agauggcauuucta

SEQ ID NO: 11366 - DNA, 13 bp, Artificial Sequence
  source: /note="Description of Artificial Sequence: Synthetic oligonucleotide"
  source: /note="Description of Combined DNA/RNA Molecule: Synthetic oligonucleotide"
  source: /note="DNA/RNA"
  modified_base (1)..(1): bicyclic nucleic acid (BNA)
  modified_base (2)..(2): bicyclic nucleic acid (BNA)
  modified_base (12)..(12): bicyclic nucleic acid (BNA)
  modified_base (13)..(13): bicyclic nucleic acid (BNA)
agauggcauuuct

SEQ ID NO: 11367 - DNA, 12 bp, Artificial Sequence
  source: /note="Description of Artificial Sequence: Synthetic oligonucleotide"
  source: /note="Description of Combined DNA/RNA Molecule: Synthetic oligonucleotide"
  source: /note="DNA/RNA"
  modified_base (1)..(1): bicyclic nucleic acid (BNA)
  modified_base (2)..(2): bicyclic nucleic acid (BNA)
  modified_base (11)..(11): bicyclic nucleic acid (BNA)
  modified_base (12)..(12): bicyclic nucleic acid (BNA)
agauggcauutc

SEQ ID NO: 11368 - DNA, 11 bp, Artificial Sequence
  source: /note="Description of Artificial Sequence: Synthetic oligonucleotide"
  source: /note="Description of Combined DNA/RNA Molecule: Synthetic oligonucleotide"
  source: /note="DNA/RNA"
  modified_base (1)..(1): bicyclic nucleic acid (BNA)
  modified_base (2)..(2): bicyclic nucleic acid (BNA)
  modified_base (10)..(10): bicyclic nucleic acid (BNA)
  modified_base (11)..(11): bicyclic nucleic acid (BNA)
agauggcautt

SEQ ID NO: 11369 - DNA, 10 bp, Artificial Sequence
  source: /note="Description of Artificial Sequence: Synthetic oligonucleotide"
  source: /note="Description of Combined DNA/RNA Molecule: Synthetic oligonucleotide"
  source: /note="DNA/RNA"
  modified_base (1)..(1): bicyclic nucleic acid (BNA)
  modified_base (2)..(2): bicyclic nucleic acid (BNA)
  modified_base (9)..(9): bicyclic nucleic acid (BNA)
  modified_base (10)..(10): bicyclic nucleic acid (BNA)
agauggcatt

SEQ ID NO: 11370 - DNA, 9 bp, Artificial Sequence
  source: /note="Description of Artificial Sequence: Synthetic oligonucleotide"
  source: /note="Description of Combined DNA/RNA Molecule: Synthetic oligonucleotide"
  source: /note="DNA/RNA"
  modified_base (1)..(1): bicyclic nucleic acid (BNA)
  modified_base (2)..(2): bicyclic nucleic acid (BNA)
  modified_base (8)..(8): bicyclic nucleic acid (BNA)
  modified_base (9)..(9): bicyclic nucleic acid (BNA)
agauggcat

SEQ ID NO: 11371 - RNA, 8 nt, Artificial Sequence
  source: /note="Description of Artificial Sequence: Synthetic oligonucleotide"
  source: /note="RNA"
  modified_base (1)..(1): bicyclic nucleic acid (BNA)
  modified_base (2)..(2): bicyclic nucleic acid (BNA)
  modified_base (7)..(7): bicyclic nucleic acid (BNA)
  modified_base (8)..(8): bicyclic nucleic acid (BNA)
agauggca

SEQ ID NO: 11372 - DNA, 30 bp, Artificial Sequence; identical to SEQ ID NO: 8204
  source: /note="Description of Artificial Sequence: Synthetic oligonucleotide"
  source: /note="Description of Combined DNA/RNA Molecule: Synthetic oligonucleotide"
  source: /note="DNA/RNA"
  modified_base (1)..(1): bicyclic nucleic acid (BNA)
  modified_base (2)..(2): bicyclic nucleic acid (BNA)
  modified_base (29)..(29): bicyclic nucleic acid (BNA)
  modified_base (30)..(30): bicyclic nucleic acid (BNA)

SEQ ID NO: 11373 - DNA, 29 bp, Artificial Sequence
  source: /note="Description of Artificial Sequence: Synthetic oligonucleotide"
  source: /note="Description of Combined DNA/RNA Molecule: Synthetic oligonucleotide"
  source: /note="DNA/RNA"
  modified_base (1)..(1): bicyclic nucleic acid (BNA)
  modified_base (2)..(2): bicyclic nucleic acid (BNA)
  modified_base (28)..(28): bicyclic nucleic acid (BNA)
  modified_base (29)..(29): bicyclic nucleic acid (BNA)
ctccaacaucaaggaagauggcauuucta

SEQ ID NO: 11374 - DNA, 28 bp, Artificial Sequence
  source: /note="Description of Artificial Sequence: Synthetic oligonucleotide"
  source: /note="Description of Combined DNA/RNA Molecule: Synthetic oligonucleotide"
  source: /note="DNA/RNA"
  modified_base (1)..(1): bicyclic nucleic acid (BNA)
  modified_base (2)..(2): bicyclic nucleic acid (BNA)
  modified_base (27)..(27): bicyclic nucleic acid (BNA)
  modified_base (28)..(28): bicyclic nucleic acid (BNA)
ctccaacaucaaggaagauggcauuuct

SEQ ID NO: 11375 - DNA, 27 bp, Artificial Sequence
  source: /note="Description of Artificial Sequence: Synthetic oligonucleotide"
  source: /note="Description of Combined DNA/RNA Molecule: Synthetic oligonucleotide"
  source: /note="DNA/RNA"
  modified_base (1)..(1): bicyclic nucleic acid (BNA)
  modified_base (2)..(2): bicyclic nucleic acid (BNA)
  modified_base (26)..(26): bicyclic nucleic acid (BNA)
  modified_base (27)..(27): bicyclic nucleic acid (BNA)
ctccaacaucaaggaagauggcauutc

SEQ ID NO: 11376 - DNA, 26 bp, Artificial Sequence
  source: /note="Description of Artificial Sequence: Synthetic oligonucleotide"
  source: /note="Description of Combined DNA/RNA Molecule: Synthetic oligonucleotide"
  source: /note="DNA/RNA"
  modified_base (1)..(1): bicyclic nucleic acid (BNA)
  modified_base (2)..(2): bicyclic nucleic acid (BNA)
  modified_base (25)..(25): bicyclic nucleic acid (BNA)
  modified_base (26)..(26): bicyclic nucleic acid (BNA)
ctccaacaucaaggaagauggcautt

SEQ ID NO: 11377 - DNA, 25 bp, Artificial Sequence
  source: /note="Description of Artificial Sequence: Synthetic oligonucleotide"
  source: /note="Description of Combined DNA/RNA Molecule: Synthetic oligonucleotide"
  source: /note="DNA/RNA"
  modified_base (1)..(1): bicyclic nucleic acid (BNA)
  modified_base (2)..(2): bicyclic nucleic acid (BNA)
  modified_base (24)..(24): bicyclic nucleic acid (BNA)
  modified_base (25)..(25): bicyclic nucleic acid (BNA)
ctccaacaucaaggaagauggcatt

SEQ ID NO: 11378 - DNA, 24 bp, Artificial Sequence
  source: /note="Description of Artificial Sequence: Synthetic oligonucleotide"
  source: /note="Description of Combined DNA/RNA Molecule: Synthetic oligonucleotide"
  source: /note="DNA/RNA"
  modified_base (1)..(1): bicyclic nucleic acid (BNA)
  modified_base (2)..(2): bicyclic nucleic acid (BNA)
  modified_base (23)..(23): bicyclic nucleic acid (BNA)
  modified_base (24)..(24): bicyclic nucleic acid (BNA)
ctccaacaucaaggaagauggcat

SEQ ID NO: 11379 - DNA, 23 bp, Artificial Sequence
  source: /note="Description of Artificial Sequence: Synthetic oligonucleotide"
  source: /note="Description of Combined DNA/RNA Molecule: Synthetic oligonucleotide"
  source: /note="DNA/RNA"
  modified_base (1)..(1): bicyclic nucleic acid (BNA)
  modified_base (2)..(2): bicyclic nucleic acid (BNA)
  modified_base (22)..(22): bicyclic nucleic acid (BNA)
  modified_base (23)..(23): bicyclic nucleic acid (BNA)
ctccaacaucaaggaagauggca

SEQ ID NO: 11380 - DNA, 22 bp, Artificial Sequence
  source: /note="Description of Artificial Sequence: Synthetic oligonucleotide"
  source: /note="Description of Combined DNA/RNA Molecule: Synthetic oligonucleotide"
  source: /note="DNA/RNA"
  modified_base (1)..(1): bicyclic nucleic acid (BNA)
  modified_base (2)..(2): bicyclic nucleic acid (BNA)
  modified_base (21)..(21): bicyclic nucleic acid (BNA)
  modified_base (22)..(22): bicyclic nucleic acid (BNA)
ctccaacaucaaggaagauggc

SEQ ID NO: 11381 - DNA, 21 bp, Artificial Sequence
  source: /note="Description of Artificial Sequence: Synthetic oligonucleotide"
  source: /note="Description of Combined DNA/RNA Molecule: Synthetic oligonucleotide"
  source: /note="DNA/RNA"
  modified_base (1)..(1): bicyclic nucleic acid (BNA)
  modified_base (2)..(2): bicyclic nucleic acid (BNA)
  modified_base (20)..(20): bicyclic nucleic acid (BNA)
  modified_base (21)..(21): bicyclic nucleic acid (BNA)
ctccaacaucaaggaagaugg

SEQ ID NO: 11382 - DNA, 20 bp, Artificial Sequence
  source: /note="Description of Artificial Sequence: Synthetic oligonucleotide"
  source: /note="Description of Combined DNA/RNA Molecule: Synthetic oligonucleotide"
  source: /note="DNA/RNA"
  modified_base (1)..(1): bicyclic nucleic acid (BNA)
  modified_base (2)..(2): bicyclic nucleic acid (BNA)
  modified_base (19)..(19): bicyclic nucleic acid (BNA)
  modified_base (20)..(20): bicyclic nucleic acid (BNA)
ctccaacaucaaggaagatg

SEQ ID NO: 11383 - DNA, 19 bp, Artificial Sequence
  source: /note="Description of Artificial Sequence: Synthetic oligonucleotide"
  source: /note="Description of Combined DNA/RNA Molecule: Synthetic oligonucleotide"
  source: /note="DNA/RNA"
  modified_base (1)..(1): bicyclic nucleic acid (BNA)
  modified_base (2)..(2): bicyclic nucleic acid (BNA)
  modified_base (18)..(18): bicyclic nucleic acid (BNA)
  modified_base (19)..(19): bicyclic nucleic acid (BNA)
ctccaacaucaaggaagat

SEQ ID NO: 11384 - DNA, 18 bp, Artificial Sequence
  source: /note="Description of Artificial Sequence: Synthetic oligonucleotide"
  source: /note="Description of Combined DNA/RNA Molecule: Synthetic oligonucleotide"
  source: /note="DNA/RNA"
  modified_base (1)..(1): bicyclic nucleic acid (BNA)
  modified_base (2)..(2): bicyclic nucleic acid (BNA)
  modified_base (17)..(17): bicyclic nucleic acid (BNA)
  modified_base (18)..(18): bicyclic nucleic acid (BNA)
ctccaacaucaaggaaga

SEQ ID NO: 11385 - DNA, 17 bp, Artificial Sequence
  source: /note="Description of Artificial Sequence: Synthetic oligonucleotide"
  source: /note="Description of Combined DNA/RNA Molecule: Synthetic oligonucleotide"
  source: /note="DNA/RNA"
  modified_base (1)..(1): bicyclic nucleic acid (BNA)
  modified_base (2)..(2): bicyclic nucleic acid (BNA)
  modified_base (16)..(16): bicyclic nucleic acid (BNA)
  modified_base (17)..(17): bicyclic nucleic acid (BNA)
ctccaacaucaaggaag

SEQ ID NO: 11386 - DNA, 29 bp, Artificial Sequence
  source: /note="Description of Artificial Sequence: Synthetic oligonucleotide"
  source: /note="Description of Combined DNA/RNA Molecule: Synthetic oligonucleotide"
  source: /note="DNA/RNA"
  modified_base (1)..(1): bicyclic nucleic acid (BNA)
  modified_base (2)..(2): bicyclic nucleic acid (BNA)
  modified_base (28)..(28): bicyclic nucleic acid (BNA)
  modified_base (29)..(29): bicyclic nucleic acid (BNA)
tccaacaucaaggaagauggcauuucuag

SEQ ID NO: 11387 - DNA, 28 bp, Artificial Sequence
  source: /note="Description of Artificial Sequence: Synthetic oligonucleotide"
  source: /note="Description of Combined DNA/RNA Molecule: Synthetic oligonucleotide"
  source: /note="DNA/RNA"
  modified_base (1)..(1): bicyclic nucleic acid (BNA)
  modified_base (2)..(2): bicyclic nucleic acid (BNA)
  modified_base (27)..(27): bicyclic nucleic acid (BNA)
  modified_base (28)..(28): bicyclic nucleic acid (BNA)
tccaacaucaaggaagauggcauuucta

SEQ ID NO: 11388 - DNA, 27 bp, Artificial Sequence
  source: /note="Description of Artificial Sequence: Synthetic oligonucleotide"
  source: /note="Description of Combined DNA/RNA Molecule: Synthetic oligonucleotide"
  source: /note="DNA/RNA"
  modified_base (1)..(1): bicyclic nucleic acid (BNA)
  modified_base (2)..(2): bicyclic nucleic acid (BNA)
  modified_base (26)..(26): bicyclic nucleic acid (BNA)
  modified_base (27)..(27): bicyclic nucleic acid (BNA)
tccaacaucaaggaagauggcauuuct

SEQ ID NO: 11389 - DNA, 26 bp, Artificial Sequence
  source: /note="Description of Artificial Sequence: Synthetic oligonucleotide"
  source: /note="Description of Combined DNA/RNA Molecule: Synthetic oligonucleotide"
  source: /note="DNA/RNA"
  modified_base (1)..(1): bicyclic nucleic acid (BNA)
  modified_base (2)..(2): bicyclic nucleic acid (BNA)
  modified_base (25)..(25): bicyclic nucleic acid (BNA)
  modified_base (26)..(26): bicyclic nucleic acid (BNA)
tccaacaucaaggaagauggcauutc

SEQ ID NO: 11390 - DNA, 25 bp, Artificial Sequence
  source: /note="Description of Artificial Sequence: Synthetic oligonucleotide"
  source: /note="Description of Combined DNA/RNA Molecule: Synthetic oligonucleotide"
  source: /note="DNA/RNA"
  modified_base (1)..(1): bicyclic nucleic acid (BNA)
  modified_base (2)..(2): bicyclic nucleic acid (BNA)
  modified_base (24)..(24): bicyclic nucleic acid (BNA)
  modified_base (25)..(25): bicyclic nucleic acid (BNA)
tccaacaucaaggaagauggcautt

SEQ ID NO: 11391 - DNA, 24 bp, Artificial Sequence
  source: /note="Description of Artificial Sequence: Synthetic oligonucleotide"
  source: /note="Description of Combined DNA/RNA Molecule: Synthetic oligonucleotide"
  source: /note="DNA/RNA"
  modified_base (1)..(1): bicyclic nucleic acid (BNA)
  modified_base (2)..(2): bicyclic nucleic acid (BNA)
  modified_base (23)..(23): bicyclic nucleic acid (BNA)
  modified_base (24)..(24): bicyclic nucleic acid (BNA)
tccaacaucaaggaagauggcatt

SEQ ID NO: 11392 - DNA, 23 bp, Artificial Sequence
  source: /note="Description of Artificial Sequence: Synthetic oligonucleotide"
  source: /note="Description of Combined DNA/RNA Molecule: Synthetic oligonucleotide"
  source: /note="DNA/RNA"
  modified_base (1)..(1): bicyclic nucleic acid (BNA)
  modified_base (2)..(2): bicyclic nucleic acid (BNA)
  modified_base (22)..(22): bicyclic nucleic acid (BNA)
  modified_base (23)..(23): bicyclic nucleic acid (BNA)
tccaacaucaaggaagauggcat

SEQ ID NO: 11393 - DNA, 22 bp, Artificial Sequence
  source: /note="Description of Artificial Sequence: Synthetic oligonucleotide"
  source: /note="Description of Combined DNA/RNA Molecule: Synthetic oligonucleotide"
  source: /note="DNA/RNA"
  modified_base (1)..(1): bicyclic nucleic acid (BNA)
  modified_base (2)..(2): bicyclic nucleic acid (BNA)
  modified_base (21)..(21): bicyclic nucleic acid (BNA)
  modified_base (22)..(22): bicyclic nucleic acid (BNA)
tccaacaucaaggaagauggca

SEQ ID NO: 11394 - DNA, 21 bp, Artificial Sequence
  source: /note="Description of Artificial Sequence: Synthetic oligonucleotide"
  source: /note="Description of Combined DNA/RNA Molecule: Synthetic oligonucleotide"
  source: /note="DNA/RNA"
  modified_base (1)..(1): bicyclic nucleic acid (BNA)
  modified_base (2)..(2): bicyclic nucleic acid (BNA)
  modified_base (20)..(20): bicyclic nucleic acid (BNA)
  modified_base (21)..(21): bicyclic nucleic acid (BNA)
tccaacaucaaggaagauggc

SEQ ID NO: 11395 - DNA, 20 bp, Artificial Sequence
  source: /note="Description of Artificial Sequence: Synthetic oligonucleotide"
  source: /note="Description of Combined DNA/RNA Molecule: Synthetic oligonucleotide"
  source: /note="DNA/RNA"
  modified_base (1)..(1): bicyclic nucleic acid (BNA)
  modified_base (2)..(2): bicyclic nucleic acid (BNA)
  modified_base (19)..(19): bicyclic nucleic acid (BNA)
  modified_base (20)..(20): bicyclic nucleic acid (BNA)
tccaacaucaaggaagaugg

SEQ ID NO: 11396 - DNA, 19 bp, Artificial Sequence
  source: /note="Description of Artificial Sequence: Synthetic oligonucleotide"
  source: /note="Description of Combined DNA/RNA Molecule: Synthetic oligonucleotide"
  source: /note="DNA/RNA"
  modified_base (1)..(1): bicyclic nucleic acid (BNA)
  modified_base (2)..(2): bicyclic nucleic acid (BNA)
  modified_base (18)..(18): bicyclic nucleic acid (BNA)
  modified_base (19)..(19): bicyclic nucleic acid (BNA)
tccaacaucaaggaagatg

SEQ ID NO: 11397 - DNA, 18 bp, Artificial Sequence
  source: /note="Description of Artificial Sequence: Synthetic oligonucleotide"
  source: /note="Description of Combined DNA/RNA Molecule: Synthetic oligonucleotide"
  source: /note="DNA/RNA"
  modified_base (1)..(1): bicyclic nucleic acid (BNA)
  modified_base (2)..(2): bicyclic nucleic acid (BNA)
  modified_base (17)..(17): bicyclic nucleic acid (BNA)
  modified_base (18)..(18): bicyclic nucleic acid (BNA)
tccaacaucaaggaagat

SEQ ID NO: 11398 - DNA, 17 bp, Artificial Sequence
  source: /note="Description of Artificial Sequence: Synthetic oligonucleotide"
  source: /note="Description of Combined DNA/RNA Molecule: Synthetic oligonucleotide"
  source: /note="DNA/RNA"
  modified_base (1)..(1): bicyclic nucleic acid (BNA)
  modified_base (2)..(2): bicyclic nucleic acid (BNA)
  modified_base (16)..(16): bicyclic nucleic acid (BNA)
  modified_base (17)..(17): bicyclic nucleic acid (BNA)
tccaacaucaaggaaga

SEQ ID NO: 11399 - DNA, 16 bp, Artificial Sequence
  source: /note="Description of Artificial Sequence: Synthetic oligonucleotide"
  source: /note="Description of Combined DNA/RNA Molecule: Synthetic oligonucleotide"
  source: /note="DNA/RNA"
  modified_base (1)..(1): bicyclic nucleic acid (BNA)
  modified_base (2)..(2): bicyclic nucleic acid (BNA)
  modified_base (15)..(15): bicyclic nucleic acid (BNA)
  modified_base (16)..(16): bicyclic nucleic acid (BNA)
tccaacaucaaggaag

SEQ ID NO: 11400 - RNA, 28 nt, Artificial Sequence
  source: /note="Description of Artificial Sequence: Synthetic oligonucleotide"
  source: /note="RNA"
  modified_base (1)..(1): bicyclic nucleic acid (BNA)
  modified_base (2)..(2): bicyclic nucleic acid (BNA)
  modified_base (27)..(27): bicyclic nucleic acid (BNA)
  modified_base (28)..(28): bicyclic nucleic acid (BNA)
ccaacaucaaggaagauggcauuucuag

SEQ ID NO: 11401 - DNA, 27 bp, Artificial Sequence
  source: /note="Description of Artificial Sequence: Synthetic oligonucleotide"
  source: /note="Description of Combined DNA/RNA Molecule: Synthetic oligonucleotide"
  source: /note="DNA/RNA"
  modified_base (1)..(1): bicyclic nucleic acid (BNA)
  modified_base (2)..(2): bicyclic nucleic acid (BNA)
  modified_base (26)..(26): bicyclic nucleic acid (BNA)
  modified_base (27)..(27): bicyclic nucleic acid (BNA)
ccaacaucaaggaagauggcauuucta

SEQ ID NO: 11402 - DNA, 26 bp, Artificial Sequence
  source: /note="Description of Artificial Sequence: Synthetic oligonucleotide"
  source: /note="Description of Combined DNA/RNA Molecule: Synthetic oligonucleotide"
  source: /note="DNA/RNA"
  modified_base (1)..(1): bicyclic nucleic acid (BNA)
  modified_base (2)..(2): bicyclic nucleic acid (BNA)
  modified_base (25)..(25): bicyclic nucleic acid (BNA)
  modified_base (26)..(26): bicyclic nucleic acid (BNA)
ccaacaucaaggaagauggcauuuct

SEQ ID NO: 11403 - DNA, 25 bp, Artificial Sequence
  source: /note="Description of Artificial Sequence: Synthetic oligonucleotide"
  source: /note="Description of Combined DNA/RNA Molecule: Synthetic oligonucleotide"
  source: /note="DNA/RNA"
  modified_base (1)..(1): bicyclic nucleic acid (BNA)
  modified_base (2)..(2): bicyclic nucleic acid (BNA)
  modified_base (24)..(24): bicyclic nucleic acid (BNA)
  modified_base (25)..(25): bicyclic nucleic acid (BNA)
ccaacaucaaggaagauggcauutc

SEQ ID NO: 11404 - DNA, 24 bp, Artificial Sequence
  source: /note="Description of Artificial Sequence: Synthetic oligonucleotide"
  source: /note="Description of Combined DNA/RNA Molecule: Synthetic oligonucleotide"
  source: /note="DNA/RNA"
  modified_base (1)..(1): bicyclic nucleic acid (BNA)
  modified_base (2)..(2): bicyclic nucleic acid (BNA)
  modified_base (23)..(23): bicyclic nucleic acid (BNA)
  modified_base (24)..(24): bicyclic nucleic acid (BNA)
ccaacaucaaggaagauggcautt

SEQ ID NO: 11405 - DNA, 23 bp, Artificial Sequence
  source: /note="Description of Artificial Sequence: Synthetic oligonucleotide"
  source: /note="Description of Combined DNA/RNA Molecule: Synthetic oligonucleotide"
  source: /note="DNA/RNA"
  modified_base (1)..(1): bicyclic nucleic acid (BNA)
  modified_base (2)..(2): bicyclic nucleic acid (BNA)
  modified_base (22)..(22): bicyclic nucleic acid (BNA)
  modified_base (23)..(23): bicyclic nucleic acid (BNA)
ccaacaucaaggaagauggcatt

SEQ ID NO: 11406 - DNA, 22 bp, Artificial Sequence
  source: /note="Description of Artificial Sequence: Synthetic oligonucleotide"
  source: /note="Description of Combined DNA/RNA Molecule: Synthetic oligonucleotide"
  source: /note="DNA/RNA"
  modified_base (1)..(1): bicyclic nucleic acid (BNA)
  modified_base (2)..(2): bicyclic nucleic acid (BNA)
  modified_base (21)..(21): bicyclic nucleic acid (BNA)
  modified_base (22)..(22): bicyclic nucleic acid (BNA)
ccaacaucaaggaagauggcat

SEQ ID NO: 11407 - RNA, 21 nt, Artificial Sequence
  source: /note="Description of Artificial Sequence: Synthetic oligonucleotide"
  source: /note="RNA"
  modified_base (1)..(1): bicyclic nucleic acid (BNA)
  modified_base (2)..(2): bicyclic nucleic acid (BNA)
  modified_base (20)..(20): bicyclic nucleic acid (BNA)
  modified_base (21)..(21): bicyclic nucleic acid (BNA)
ccaacaucaaggaagauggca

SEQ ID NO: 11408 - RNA, 20 nt, Artificial Sequence
  source: /note="Description of Artificial Sequence: Synthetic oligonucleotide"
  source: /note="RNA"
  modified_base (1)..(1): bicyclic nucleic acid (BNA)
  modified_base (2)..(2): bicyclic nucleic acid (BNA)
  modified_base (19)..(19): bicyclic nucleic acid (BNA)
  modified_base (20)..(20): bicyclic nucleic acid (BNA)
ccaacaucaaggaagauggc

SEQ ID NO: 11409 - RNA, 19 nt, Artificial Sequence
  source: /note="Description of Artificial Sequence: Synthetic oligonucleotide"
  source: /note="RNA"
  modified_base (1)..(1): bicyclic nucleic acid (BNA)
  modified_base (2)..(2): bicyclic nucleic acid (BNA)
  modified_base (18)..(18): bicyclic nucleic acid (BNA)
  modified_base (19)..(19): bicyclic nucleic acid (BNA)
ccaacaucaaggaagaugg

SEQ ID NO: 11410 - DNA, 18 bp, Artificial Sequence
  source: /note="Description of Artificial Sequence: Synthetic oligonucleotide"
  source: /note="Description of Combined DNA/RNA Molecule: Synthetic oligonucleotide"
  source: /note="DNA/RNA"
  modified_base (1)..(1): bicyclic nucleic acid (BNA)
  modified_base (2)..(2): bicyclic nucleic acid (BNA)
  modified_base (17)..(17): bicyclic nucleic acid (BNA)
  modified_base (18)..(18): bicyclic nucleic acid (BNA)
ccaacaucaaggaagatg

SEQ ID NO: 11411 - DNA, 17 bp, Artificial Sequence
  source: /note="Description of Artificial Sequence: Synthetic oligonucleotide"
  source: /note="Description of Combined DNA/RNA Molecule: Synthetic oligonucleotide"
  source: /note="DNA/RNA"
  modified_base (1)..(1): bicyclic nucleic acid (BNA)
  modified_base (2)..(2): bicyclic nucleic acid (BNA)
  modified_base (16)..(16): bicyclic nucleic acid (BNA)
  modified_base (17)..(17): bicyclic nucleic acid (BNA)
ccaacaucaaggaagat

SEQ ID NO: 11412 - RNA, 16 nt, Artificial Sequence
  source: /note="Description of Artificial Sequence: Synthetic oligonucleotide"
  source: /note="RNA"
  modified_base (1)..(1): bicyclic nucleic acid (BNA)
  modified_base (2)..(2): bicyclic nucleic acid (BNA)
  modified_base (15)..(15): bicyclic nucleic acid (BNA)
  modified_base (16)..(16): bicyclic nucleic acid (BNA)
ccaacaucaaggaaga

SEQ ID NO: 11413 - RNA, 15 nt, Artificial Sequence
  source: /note="Description of Artificial Sequence: Synthetic oligonucleotide"
  source: /note="RNA"
  modified_base (1)..(1): bicyclic nucleic acid (BNA)
  modified_base (2)..(2): bicyclic nucleic acid (BNA)
  modified_base (14)..(14): bicyclic nucleic acid (BNA)
  modified_base (15)..(15): bicyclic nucleic acid (BNA)
ccaacaucaaggaag

SEQ ID NO: 11414 - RNA, 27 nt, Artificial Sequence
  source: /note="Description of Artificial Sequence: Synthetic oligonucleotide"
  source: /note="RNA"
  modified_base (1)..(1): bicyclic nucleic acid (BNA)
  modified_base (2)..(2): bicyclic nucleic acid (BNA)
  modified_base (26)..(26): bicyclic nucleic acid (BNA)
  modified_base (27)..(27): bicyclic nucleic acid (BNA)
caacaucaaggaagauggcauuucuag

SEQ ID NO: 11415 - DNA, 26 bp, Artificial Sequence
  source: /note="Description of Artificial Sequence: Synthetic oligonucleotide"
  source: /note="Description of Combined DNA/RNA Molecule: Synthetic oligonucleotide"
  source: /note="DNA/RNA"
  modified_base (1)..(1): bicyclic nucleic acid (BNA)
  modified_base (2)..(2): bicyclic nucleic acid (BNA)
  modified_base (25)..(25): bicyclic nucleic acid (BNA)
  modified_base (26)..(26): bicyclic nucleic acid (BNA)
caacaucaaggaagauggcauuucta

SEQ ID NO: 11416 - DNA, 25 bp, Artificial Sequence
  source: /note="Description of Artificial Sequence: Synthetic oligonucleotide"
  source: /note="Description of Combined DNA/RNA Molecule: Synthetic oligonucleotide"
  source: /note="DNA/RNA"
  modified_base (1)..(1): bicyclic nucleic acid (BNA)
  modified_base (2)..(2): bicyclic nucleic acid (BNA)
  modified_base (24)..(24): bicyclic nucleic acid (BNA)
  modified_base (25)..(25): bicyclic nucleic acid (BNA)
caacaucaaggaagauggcauuuct

SEQ ID NO: 11417 - DNA, 24 bp, Artificial Sequence
  source: /note="Description of Artificial Sequence: Synthetic oligonucleotide"
  source: /note="Description of Combined DNA/RNA Molecule: Synthetic oligonucleotide"
  source: /note="DNA/RNA"
  modified_base (1)..(1): bicyclic nucleic acid (BNA)
  modified_base (2)..(2): bicyclic nucleic acid (BNA)
  modified_base (23)..(23): bicyclic nucleic acid (BNA)
  modified_base (24)..(24): bicyclic nucleic acid (BNA)
caacaucaaggaagauggcauutc

SEQ ID NO: 11418 - DNA, 23 bp, Artificial Sequence
  source: /note="Description of Artificial Sequence: Synthetic oligonucleotide"
  source: /note="Description of Combined DNA/RNA Molecule: Synthetic oligonucleotide"
  source: /note="DNA/RNA"
  modified_base (1)..(1): bicyclic nucleic acid (BNA)
  modified_base (2)..(2): bicyclic nucleic acid (BNA)
  modified_base (22)..(22): bicyclic nucleic acid (BNA)
  modified_base (23)..(23): bicyclic nucleic acid (BNA)
caacaucaaggaagauggcautt

SEQ ID NO: 11419 - DNA, 22 bp, Artificial Sequence
  source: /note="Description of Artificial Sequence: Synthetic oligonucleotide"
  source: /note="Description of Combined DNA/RNA Molecule: Synthetic oligonucleotide"
  source: /note="DNA/RNA"
  modified_base (1)..(1): bicyclic nucleic acid (BNA)
  modified_base (2)..(2): bicyclic nucleic acid (BNA)
  modified_base (21)..(21): bicyclic nucleic acid (BNA)
  modified_base (22)..(22): bicyclic nucleic acid (BNA)
caacaucaaggaagauggcatt

SEQ ID NO: 11420 - DNA, 21 bp, Artificial Sequence
  source: /note="Description of Artificial Sequence: Synthetic oligonucleotide"
  source: /note="Description of Combined DNA/RNA Molecule: Synthetic oligonucleotide"
  source: /note="DNA/RNA"
  modified_base (1)..(1): bicyclic nucleic acid (BNA)
  modified_base (2)..(2): bicyclic nucleic acid (BNA)
  modified_base (20)..(20): bicyclic nucleic acid (BNA)
  modified_base (21)..(21): bicyclic nucleic acid (BNA)
caacaucaaggaagauggcat

SEQ ID NO: 11421 - RNA, 20 nt, Artificial Sequence
  source: /note="Description of Artificial Sequence: Synthetic oligonucleotide"
  source: /note="RNA"
  modified_base (1)..(1): bicyclic nucleic acid (BNA)
  modified_base (2)..(2): bicyclic nucleic acid (BNA)
  modified_base (19)..(19): bicyclic nucleic acid (BNA)
  modified_base (20)..(20): bicyclic nucleic acid (BNA)
caacaucaaggaagauggca

SEQ ID NO: 11422 - RNA, 19 nt, Artificial Sequence
  source: /note="Description of Artificial Sequence: Synthetic oligonucleotide"
  source: /note="RNA"
  modified_base (1)..(1): bicyclic nucleic acid (BNA)
  modified_base (2)..(2): bicyclic nucleic acid (BNA)
  modified_base (18)..(18): bicyclic nucleic acid (BNA)
  modified_base (19)..(19): bicyclic nucleic acid (BNA)
caacaucaaggaagauggc

SEQ ID NO: 11423 - RNA, 18 nt, Artificial Sequence
  source: /note="Description of Artificial Sequence: Synthetic oligonucleotide"
  source: /note="RNA"
  modified_base (1)..(1): bicyclic nucleic acid (BNA)
  modified_base (2)..(2): bicyclic nucleic acid (BNA)
  modified_base (17)..(17): bicyclic nucleic acid (BNA)
  modified_base (18)..(18): bicyclic nucleic acid (BNA)
caacaucaaggaagaugg

SEQ ID NO: 11424 - DNA, 17 bp, Artificial Sequence
  source: /note="Description of Artificial Sequence: Synthetic oligonucleotide"
  source: /note="Description of Combined DNA/RNA Molecule: Synthetic oligonucleotide"
  source: /note="DNA/RNA"
  modified_base (1)..(1): bicyclic nucleic acid (BNA)
  modified_base (2)..(2): bicyclic nucleic acid (BNA)
  modified_base (16)..(16): bicyclic nucleic acid (BNA)
  modified_base (17)..(17): bicyclic nucleic acid (BNA)
caacaucaaggaagatg

SEQ ID NO: 11425 - DNA, 16 bp, Artificial Sequence
  source: /note="Description of Artificial Sequence: Synthetic oligonucleotide"
  source: /note="Description of Combined DNA/RNA Molecule: Synthetic oligonucleotide"
  source: /note="DNA/RNA"
  modified_base (1)..(1): bicyclic nucleic acid (BNA)
  modified_base (2)..(2): bicyclic nucleic acid (BNA)
  modified_base (15)..(15): bicyclic nucleic acid (BNA)
  modified_base (16)..(16): bicyclic nucleic acid (BNA)
caacaucaaggaagat

SEQ ID NO: 11426 - RNA, 15 nt, Artificial Sequence
  source: /note="Description of Artificial Sequence: Synthetic oligonucleotide"
  source: /note="RNA"
  modified_base (1)..(1): bicyclic nucleic acid (BNA)
  modified_base (2)..(2): bicyclic nucleic acid (BNA)
  modified_base (14)..(14): bicyclic nucleic acid (BNA)
  modified_base (15)..(15): bicyclic nucleic acid (BNA)
caacaucaaggaaga

SEQ ID NO: 11427 - RNA, 14 nt, Artificial Sequence
  source: /note="Description of Artificial Sequence: Synthetic oligonucleotide"
  source: /note="RNA"
  modified_base (1)..(1): bicyclic nucleic acid (BNA)
  modified_base (2)..(2): bicyclic nucleic acid (BNA)
  modified_base (13)..(13): bicyclic nucleic acid (BNA)
  modified_base (14)..(14): bicyclic nucleic acid (BNA)
caacaucaaggaag

SEQ ID NO: 11428 - RNA, 26 nt, Artificial Sequence
  source: /note="Description of Artificial Sequence: Synthetic oligonucleotide"
  source: /note="RNA"
  modified_base (1)..(1): bicyclic nucleic acid (BNA)
  modified_base (2)..(2): bicyclic nucleic acid (BNA)
  modified_base (25)..(25): bicyclic nucleic acid (BNA)
  modified_base (26)..(26): bicyclic nucleic acid (BNA)
aacaucaaggaagauggcauuucuag

SEQ ID NO: 11429 - DNA, 25 bp, Artificial Sequence
  source: /note="Description of Artificial Sequence: Synthetic oligonucleotide"
  source: /note="Description of Combined DNA/RNA Molecule: Synthetic oligonucleotide"
  source: /note="DNA/RNA"
  modified_base (1)..(1): bicyclic nucleic acid (BNA)
  modified_base (2)..(2): bicyclic nucleic acid (BNA)
  modified_base (24)..(24): bicyclic nucleic acid (BNA)
  modified_base (25)..(25): bicyclic nucleic acid (BNA)
aacaucaaggaagauggcauuucta

SEQ ID NO: 11430 - DNA, 24 bp, Artificial Sequence
  source: /note="Description of Artificial Sequence: Synthetic oligonucleotide"
  source: /note="Description of Combined DNA/RNA Molecule: Synthetic oligonucleotide"
  source: /note="DNA/RNA"
  modified_base (1)..(1): bicyclic nucleic acid (BNA)
  modified_base (2)..(2): bicyclic nucleic acid (BNA)
  modified_base (23)..(23): bicyclic nucleic acid (BNA)
  modified_base (24)..(24): bicyclic nucleic acid (BNA)
aacaucaaggaagauggcauuuct

SEQ ID NO: 11431 - DNA, 23 bp, Artificial Sequence
  source: /note="Description of Artificial Sequence: Synthetic oligonucleotide"
  source: /note="Description of Combined DNA/RNA Molecule: Synthetic oligonucleotide"
  source: /note="DNA/RNA"
  modified_base (1)..(1): bicyclic nucleic acid (BNA)
  modified_base (2)..(2): bicyclic nucleic acid (BNA)
  modified_base (22)..(22): bicyclic nucleic acid (BNA)
  modified_base (23)..(23): bicyclic nucleic acid (BNA)
aacaucaaggaagauggcauutc

SEQ ID NO: 11432 - DNA, 22 bp, Artificial Sequence
  source: /note="Description of Artificial Sequence: Synthetic oligonucleotide"
  source: /note="Description of Combined DNA/RNA Molecule: Synthetic oligonucleotide"
  source: /note="DNA/RNA"
  modified_base (1)..(1): bicyclic nucleic acid (BNA)
  modified_base (2)..(2): bicyclic nucleic acid (BNA)
  modified_base (21)..(21): bicyclic nucleic acid (BNA)
  modified_base (22)..(22): bicyclic nucleic acid (BNA)
aacaucaaggaagauggcautt

SEQ ID NO: 11433 - DNA, 21 bp, Artificial Sequence
  source: /note="Description of Artificial Sequence: Synthetic oligonucleotide"
  source: /note="Description of Combined DNA/RNA Molecule: Synthetic oligonucleotide"
  source: /note="DNA/RNA"
  modified_base (1)..(1): bicyclic nucleic acid (BNA)
  modified_base (2)..(2): bicyclic nucleic acid (BNA)
  modified_base (20)..(20): bicyclic nucleic acid (BNA)
  modified_base (21)..(21): bicyclic nucleic acid (BNA)
aacaucaaggaagauggcatt

SEQ ID NO: 11434 - DNA, 20 bp, Artificial Sequence
  source: /note="Description of Artificial Sequence: Synthetic oligonucleotide"
  source: /note="Description of Combined DNA/RNA Molecule: Synthetic oligonucleotide"
  source: /note="DNA/RNA"
  modified_base (1)..(1): bicyclic nucleic acid (BNA)
  modified_base (2)..(2): bicyclic nucleic acid (BNA)
  modified_base (19)..(19): bicyclic nucleic acid (BNA)
  modified_base (20)..(20): bicyclic nucleic acid (BNA)
aacaucaaggaagauggcat

SEQ ID NO: 11435 - RNA, 19 nt, Artificial Sequence
  source: /note="Description of Artificial Sequence: Synthetic oligonucleotide"
  source: /note="RNA"
  modified_base (1)..(1): bicyclic nucleic acid (BNA)
  modified_base (2)..(2): bicyclic nucleic acid (BNA)
  modified_base (18)..(18): bicyclic nucleic acid (BNA)
  modified_base (19)..(19): bicyclic nucleic acid (BNA)
aacaucaaggaagauggca

SEQ ID NO: 11436 - RNA, 18 nt, Artificial Sequence
  source: /note="Description of Artificial Sequence: Synthetic oligonucleotide"
  source: /note="RNA"
  modified_base (1)..(1): bicyclic nucleic acid (BNA)
  modified_base (2)..(2): bicyclic nucleic acid (BNA)
  modified_base (17)..(17): bicyclic nucleic acid (BNA)
  modified_base (18)..(18): bicyclic nucleic acid (BNA)
aacaucaaggaagauggc

SEQ ID NO: 11437 - RNA, 17 nt, Artificial Sequence
  source: /note="Description of Artificial Sequence: Synthetic oligonucleotide"
  source: /note="RNA"
  modified_base (1)..(1): bicyclic nucleic acid (BNA)
  modified_base (2)..(2): bicyclic nucleic acid (BNA)
  modified_base (16)..(16): bicyclic nucleic acid (BNA)
  modified_base (17)..(17): bicyclic nucleic acid (BNA)
aacaucaaggaagaugg

SEQ ID NO: 11438 - DNA, 16 bp, Artificial Sequence
  source: /note="Description of Artificial Sequence: Synthetic oligonucleotide"
  source: /note="Description of Combined DNA/RNA Molecule: Synthetic oligonucleotide"
  source: /note="DNA/RNA"
  modified_base (1)..(1): bicyclic nucleic acid (BNA)
  modified_base (2)..(2): bicyclic nucleic acid (BNA)
  modified_base (15)..(15): bicyclic nucleic acid (BNA)
  modified_base (16)..(16): bicyclic nucleic acid (BNA)
aacaucaaggaagatg

SEQ ID NO: 11439 - DNA, 15 bp, Artificial Sequence
  source: /note="Description of Artificial Sequence: Synthetic oligonucleotide"
  source: /note="Description of Combined DNA/RNA Molecule: Synthetic oligonucleotide"
  source: /note="DNA/RNA"
  modified_base (1)..(1): bicyclic nucleic acid (BNA)
  modified_base (2)..(2): bicyclic nucleic acid (BNA)
  modified_base (14)..(14): bicyclic nucleic acid (BNA)
  modified_base (15)..(15): bicyclic nucleic acid (BNA)
aacaucaaggaagat

SEQ ID NO: 11440 - RNA, 14 nt, Artificial Sequence
  source: /note="Description of Artificial Sequence: Synthetic oligonucleotide"
  source: /note="RNA"
  modified_base (1)..(1): bicyclic nucleic acid (BNA)
  modified_base (2)..(2): bicyclic nucleic acid (BNA)
  modified_base (13)..(13): bicyclic nucleic acid (BNA)
  modified_base (14)..(14): bicyclic nucleic acid (BNA)
aacaucaaggaaga

SEQ ID NO: 11441 - RNA, 13 nt, Artificial Sequence
  source: /note="Description of Artificial Sequence: Synthetic oligonucleotide"
  source: /note="RNA"
  modified_base (1)..(1): bicyclic nucleic acid (BNA)
  modified_base (2)..(2): bicyclic nucleic acid (BNA)
  modified_base (12)..(12): bicyclic nucleic acid (BNA)
  modified_base (13)..(13): bicyclic nucleic acid (BNA)
aacaucaaggaag

SEQ ID NO: 11442 - RNA, 25 nt, Artificial Sequence
  source: /note="Description of Artificial Sequence: Synthetic oligonucleotide"
  source: /note="RNA"
  modified_base (1)..(1): bicyclic nucleic acid (BNA)
  modified_base (2)..(2): bicyclic nucleic acid (BNA)
  modified_base (24)..(24): bicyclic nucleic acid (BNA)
  modified_base (25)..(25): bicyclic nucleic acid (BNA)
acaucaaggaagauggcauuucuag

SEQ ID NO: 11443 - DNA, 24 bp, Artificial Sequence
  source: /note="Description of Artificial Sequence: Synthetic oligonucleotide"
  source: /note="Description of Combined DNA/RNA Molecule: Synthetic oligonucleotide"
  source: /note="DNA/RNA"
  modified_base (1)..(1): bicyclic nucleic acid (BNA)
  modified_base (2)..(2): bicyclic nucleic acid (BNA)
  modified_base (23)..(23): bicyclic nucleic acid (BNA)
  modified_base (24)..(24): bicyclic nucleic acid (BNA)
acaucaaggaagauggcauuucta

SEQ ID NO: 11444 - DNA, 23 bp, Artificial Sequence
  source: /note="Description of Artificial Sequence: Synthetic oligonucleotide"
  source: /note="Description of Combined DNA/RNA Molecule: Synthetic oligonucleotide"
  source: /note="DNA/RNA"
  modified_base (1)..(1): bicyclic nucleic acid (BNA)
  modified_base (2)..(2): bicyclic nucleic acid (BNA)
  modified_base (22)..(22): bicyclic nucleic acid (BNA)
  modified_base (23)..(23): bicyclic nucleic acid (BNA)
acaucaaggaagauggcauuuct

SEQ ID NO: 11445 - DNA, 22 bp, Artificial Sequence
  source: /note="Description of Artificial Sequence: Synthetic oligonucleotide"
  source: /note="Description of Combined DNA/RNA Molecule: Synthetic oligonucleotide"
  source: /note="DNA/RNA"
  modified_base (1)..(1): bicyclic nucleic acid (BNA)
  modified_base (2)..(2): bicyclic nucleic acid (BNA)
  modified_base (21)..(21): bicyclic nucleic acid (BNA)
  modified_base (22)..(22): bicyclic nucleic acid (BNA)
acaucaaggaagauggcauutc

SEQ ID NO: 11446 - DNA, 21 bp, Artificial Sequence
  source: /note="Description of Artificial Sequence: Synthetic oligonucleotide"
  source: /note="Description of Combined DNA/RNA Molecule: Synthetic oligonucleotide"
  source: /note="DNA/RNA"
  modified_base (1)..(1): bicyclic nucleic acid (BNA)
  modified_base (2)..(2): bicyclic nucleic acid (BNA)
  modified_base (20)..(20): bicyclic nucleic acid (BNA)
  modified_base (21)..(21): bicyclic nucleic acid (BNA)
acaucaaggaagauggcautt

SEQ ID NO: 11447 - DNA, 20 bp, Artificial Sequence
  source: /note="Description of Artificial Sequence: Synthetic oligonucleotide"
  source: /note="Description of Combined DNA/RNA Molecule: Synthetic oligonucleotide"
  source: /note="DNA/RNA"
  modified_base (1)..(1): bicyclic nucleic acid (BNA)
  modified_base (2)..(2): bicyclic nucleic acid (BNA)
  modified_base (19)..(19): bicyclic nucleic acid (BNA)
  modified_base (20)..(20): bicyclic nucleic acid (BNA)
acaucaaggaagauggcatt

SEQ ID NO: 11448 - DNA, 19 bp, Artificial Sequence
  source: /note="Description of Artificial Sequence: Synthetic oligonucleotide"
  source: /note="Description of Combined DNA/RNA Molecule: Synthetic oligonucleotide"
  source: /note="DNA/RNA"
  modified_base (1)..(1): bicyclic nucleic acid (BNA)
  modified_base (2)..(2): bicyclic nucleic acid (BNA)
  modified_base (18)..(18): bicyclic nucleic acid (BNA)
  modified_base (19)..(19): bicyclic nucleic acid (BNA)
acaucaaggaagauggcat

SEQ ID NO: 11449 - RNA, 18 nt, Artificial Sequence
  source: /note="Description of Artificial Sequence: Synthetic oligonucleotide"
  source: /note="RNA"
  modified_base (1)..(1): bicyclic nucleic acid (BNA)
  modified_base (2)..(2): bicyclic nucleic acid (BNA)
  modified_base (17)..(17): bicyclic nucleic acid (BNA)
  modified_base (18)..(18): bicyclic nucleic acid (BNA)
acaucaaggaagauggca

SEQ ID NO: 11450 - RNA, 17 nt, Artificial Sequence
  source: /note="Description of Artificial Sequence: Synthetic oligonucleotide"
  source: /note="RNA"
  modified_base (1)..(1): bicyclic nucleic acid (BNA)
  modified_base (2)..(2): bicyclic nucleic acid (BNA)
  modified_base (16)..(16): bicyclic nucleic acid (BNA)
  modified_base (17)..(17): bicyclic nucleic acid (BNA)
acaucaaggaagauggc

SEQ ID NO: 11451 - RNA, 16 nt, Artificial Sequence
  source: /note="Description of Artificial Sequence: Synthetic oligonucleotide"
  source: /note="RNA"
  modified_base (1)..(1): bicyclic nucleic acid (BNA)
  modified_base (2)..(2): bicyclic nucleic acid (BNA)
  modified_base (15)..(15): bicyclic nucleic acid (BNA)
  modified_base (16)..(16): bicyclic nucleic acid (BNA)
acaucaaggaagaugg

SEQ ID NO: 11452 - DNA, 15 bp, Artificial Sequence
  source: /note="Description of Artificial Sequence: Synthetic oligonucleotide"
  source: /note="Description of Combined DNA/RNA Molecule: Synthetic oligonucleotide"
  source: /note="DNA/RNA"
  modified_base (1)..(1): bicyclic nucleic acid (BNA)
  modified_base (2)..(2): bicyclic nucleic acid (BNA)
  modified_base (14)..(14): bicyclic nucleic acid (BNA)
  modified_base (15)..(15): bicyclic nucleic acid (BNA)
acaucaaggaagatg

SEQ ID NO: 11453 - DNA, 14 bp, Artificial Sequence
  source: /note="Description of Artificial Sequence: Synthetic oligonucleotide"
  source: /note="Description of Combined DNA/RNA Molecule: Synthetic oligonucleotide"
  source: /note="DNA/RNA"
  modified_base (1)..(1): bicyclic nucleic acid (BNA)
  modified_base (2)..(2): bicyclic nucleic acid (BNA)
  modified_base (13)..(13): bicyclic nucleic acid (BNA)
  modified_base (14)..(14): bicyclic nucleic acid (BNA)
acaucaaggaagat

SEQ ID NO: 11454 - RNA, 13 nt, Artificial Sequence
  source: /note="Description of Artificial Sequence: Synthetic oligonucleotide"
  source: /note="RNA"
  modified_base (1)..(1): bicyclic nucleic acid (BNA)
  modified_base (2)..(2): bicyclic nucleic acid (BNA)
  modified_base (12)..(12): bicyclic nucleic acid (BNA)
  modified_base (13)..(13): bicyclic nucleic acid (BNA)
acaucaaggaaga

SEQ ID NO: 11455 - RNA, 12 nt, Artificial Sequence
  source: /note="Description of Artificial Sequence: Synthetic oligonucleotide"
  source: /note="RNA"
  modified_base (1)..(1): bicyclic nucleic acid (BNA)
  modified_base (2)..(2): bicyclic nucleic acid (BNA)
  modified_base (11)..(11): bicyclic nucleic acid (BNA)
  modified_base (12)..(12): bicyclic nucleic acid (BNA)
acaucaaggaag

SEQ ID NO: 11456 - RNA, 24 nt, Artificial Sequence
  source: /note="Description of Artificial Sequence: Synthetic oligonucleotide"
  source: /note="RNA"
  modified_base (1)..(1): bicyclic nucleic acid (BNA)
  modified_base (2)..(2): bicyclic nucleic acid (BNA)
  modified_base (23)..(23): bicyclic nucleic acid (BNA)
  modified_base (24)..(24): bicyclic nucleic acid (BNA)
caucaaggaagauggcauuucuag

SEQ ID NO: 11457 - DNA, 23 bp, Artificial Sequence
  source: /note="Description of Artificial Sequence: Synthetic oligonucleotide"
  source: /note="Description of Combined DNA/RNA Molecule: Synthetic oligonucleotide"
  source: /note="DNA/RNA"
  modified_base (1)..(1): bicyclic nucleic acid (BNA)
  modified_base (2)..(2): bicyclic nucleic acid (BNA)
  modified_base (22)..(22): bicyclic nucleic acid (BNA)
  modified_base (23)..(23): bicyclic nucleic acid (BNA)
caucaaggaagauggcauuucta

SEQ ID NO: 11458 - DNA, 22 bp, Artificial Sequence
  source: /note="Description of Artificial Sequence: Synthetic oligonucleotide"
  source: /note="Description of Combined DNA/RNA Molecule: Synthetic oligonucleotide"
  source: /note="DNA/RNA"
  modified_base (1)..(1): bicyclic nucleic acid (BNA)
  modified_base (2)..(2): bicyclic nucleic acid (BNA)
  modified_base (21)..(21): bicyclic nucleic acid (BNA)
  modified_base (22)..(22): bicyclic nucleic acid (BNA)
caucaaggaagauggcauuuct

SEQ ID NO: 11459 - DNA, 21 bp, Artificial Sequence
  source: /note="Description of Artificial Sequence: Synthetic oligonucleotide"
  source: /note="Description of Combined DNA/RNA Molecule: Synthetic oligonucleotide"
  source: /note="DNA/RNA"
  modified_base (1)..(1): bicyclic nucleic acid (BNA)
  modified_base (2)..(2): bicyclic nucleic acid (BNA)
  modified_base (20)..(20): bicyclic nucleic acid (BNA)
  modified_base (21)..(21): bicyclic nucleic acid (BNA)
caucaaggaagauggcauutc

SEQ ID NO: 11460 - DNA, 20 bp, Artificial Sequence
  source: /note="Description of Artificial Sequence: Synthetic oligonucleotide"
  source: /note="Description of Combined DNA/RNA Molecule: Synthetic oligonucleotide"
  source: /note="DNA/RNA"
  modified_base (1)..(1): bicyclic nucleic acid (BNA)
  modified_base (2)..(2): bicyclic nucleic acid (BNA)
  modified_base (19)..(19): bicyclic nucleic acid (BNA)
  modified_base (20)..(20): bicyclic nucleic acid (BNA)
caucaaggaagauggcautt

SEQ ID NO: 11461 - DNA, 19 bp, Artificial Sequence
  source: /note="Description of Artificial Sequence: Synthetic oligonucleotide"
  source: /note="Description of Combined DNA/RNA Molecule: Synthetic oligonucleotide"
  source: /note="DNA/RNA"
  modified_base (1)..(1): bicyclic nucleic acid (BNA)
  modified_base (2)..(2): bicyclic nucleic acid (BNA)
  modified_base (18)..(18): bicyclic nucleic acid (BNA)
  modified_base (19)..(19): bicyclic nucleic acid (BNA)
caucaaggaagauggcatt

SEQ ID NO: 11462 - DNA, 18 bp, Artificial Sequence
  source: /note="Description of Artificial Sequence: Synthetic oligonucleotide"
  source: /note="Description of Combined DNA/RNA Molecule: Synthetic oligonucleotide"
  source: /note="DNA/RNA"
  modified_base (1)..(1): bicyclic nucleic acid (BNA)
  modified_base (2)..(2): bicyclic nucleic acid (BNA)
  modified_base (17)..(17): bicyclic nucleic acid (BNA)
  modified_base (18)..(18): bicyclic nucleic acid (BNA)
caucaaggaagauggcat

SEQ ID NO: 11463 - RNA, 17 nt, Artificial Sequence
  source: /note="Description of Artificial Sequence: Synthetic oligonucleotide"
  source: /note="RNA"
  modified_base (1)..(1): bicyclic nucleic acid (BNA)
  modified_base (2)..(2): bicyclic nucleic acid (BNA)
  modified_base (16)..(16): bicyclic nucleic acid (BNA)
  modified_base (17)..(17): bicyclic nucleic acid (BNA)
caucaaggaagauggca

SEQ ID NO: 11464 - RNA, 16 nt, Artificial Sequence
  source: /note="Description of Artificial Sequence: Synthetic oligonucleotide"
  source: /note="RNA"
  modified_base (1)..(1): bicyclic nucleic acid (BNA)
  modified_base (2)..(2): bicyclic nucleic acid (BNA)
  modified_base (15)..(15): bicyclic nucleic acid (BNA)
  modified_base (16)..(16): bicyclic nucleic acid (BNA)
caucaaggaagauggc

SEQ ID NO: 11465 - RNA, 15 nt, Artificial Sequence
  source: /note="Description of Artificial Sequence: Synthetic oligonucleotide"
  source: /note="RNA"
  modified_base (1)..(1): bicyclic nucleic acid (BNA)
  modified_base (2)..(2): bicyclic nucleic acid (BNA)
  modified_base (14)..(14): bicyclic nucleic acid (BNA)
  modified_base (15)..(15): bicyclic nucleic acid (BNA)
caucaaggaagaugg

SEQ ID NO: 11466 - DNA, 14 bp, Artificial Sequence
  source: /note="Description of Artificial Sequence: Synthetic oligonucleotide"
  source: /note="Description of Combined DNA/RNA Molecule: Synthetic oligonucleotide"
  source: /note="DNA/RNA"
  modified_base (1)..(1): bicyclic nucleic acid (BNA)
  modified_base (2)..(2): bicyclic nucleic acid (BNA)
  modified_base (13)..(13): bicyclic nucleic acid (BNA)
  modified_base (14)..(14): bicyclic nucleic acid (BNA)
caucaaggaagatg

SEQ ID NO: 11467 - DNA, 13 bp, Artificial Sequence
  source: /note="Description of Artificial Sequence: Synthetic oligonucleotide"
  source: /note="Description of Combined DNA/RNA Molecule: Synthetic oligonucleotide"
  source: /note="DNA/RNA"
  modified_base (1)..(1): bicyclic nucleic acid (BNA)
  modified_base (2)..(2): bicyclic nucleic acid (BNA)
  modified_base (12)..(12): bicyclic nucleic acid (BNA)
  modified_base (13)..(13): bicyclic nucleic acid (BNA)
caucaaggaagat

SEQ ID NO: 11468 - RNA, 12 nt, Artificial Sequence
  source: /note="Description of Artificial Sequence: Synthetic oligonucleotide"
  source: /note="RNA"
  modified_base (1)..(1): bicyclic nucleic acid (BNA)
  modified_base (2)..(2): bicyclic nucleic acid (BNA)
  modified_base (11)..(11): bicyclic nucleic acid (BNA)
  modified_base (12)..(12): bicyclic nucleic acid (BNA)
caucaaggaaga

SEQ ID NO: 11469 - RNA, 11 nt, Artificial Sequence
  source: /note="Description of Artificial Sequence: Synthetic oligonucleotide"
  source: /note="RNA"
  modified_base (1)..(1): bicyclic nucleic acid (BNA)
  modified_base (2)..(2): bicyclic nucleic acid (BNA)
  modified_base (10)..(10): bicyclic nucleic acid (BNA)
  modified_base (11)..(11): bicyclic nucleic acid (BNA)
caucaaggaag

SEQ ID NO: 11470 - DNA, 23 bp, Artificial Sequence
  source: /note="Description of Artificial Sequence: Synthetic oligonucleotide"
  source: /note="Description of Combined DNA/RNA Molecule: Synthetic oligonucleotide"
  source: /note="DNA/RNA"
  modified_base (1)..(1): bicyclic nucleic acid (BNA)
  modified_base (2)..(2): bicyclic nucleic acid (BNA)
  modified_base (22)..(22): bicyclic nucleic acid (BNA)
  modified_base (23)..(23): bicyclic nucleic acid (BNA)
atcaaggaagauggcauuucuag

SEQ ID NO: 11471 - DNA, 22 bp, Artificial Sequence
  source: /note="Description of Artificial Sequence: Synthetic oligonucleotide"
  source: /note="Description of Combined DNA/RNA Molecule: Synthetic oligonucleotide"
  source: /note="DNA/RNA"
  modified_base (1)..(1): bicyclic nucleic acid (BNA)
  modified_base (2)..(2): bicyclic nucleic acid (BNA)
  modified_base (21)..(21): bicyclic nucleic acid (BNA)
  modified_base (22)..(22): bicyclic nucleic acid (BNA)
atcaaggaagauggcauuucta

SEQ ID NO: 11472 - DNA, 21 bp, Artificial Sequence
  source: /note="Description of Artificial Sequence: Synthetic oligonucleotide"
  source: /note="Description of Combined DNA/RNA Molecule: Synthetic oligonucleotide"
  source: /note="DNA/RNA"
  modified_base (1)..(1): bicyclic nucleic acid (BNA)
  modified_base (2)..(2): bicyclic nucleic acid (BNA)
  modified_base (20)..(20): bicyclic nucleic acid (BNA)
  modified_base (21)..(21): bicyclic nucleic acid (BNA)
atcaaggaagauggcauuuct

SEQ ID NO: 11473 - DNA, 20 bp, Artificial Sequence
  source: /note="Description of Artificial Sequence: Synthetic oligonucleotide"
  source: /note="Description of Combined DNA/RNA Molecule: Synthetic oligonucleotide"
  source: /note="DNA/RNA"
  modified_base (1)..(1): bicyclic nucleic acid (BNA)
  modified_base (2)..(2): bicyclic nucleic acid (BNA)
  modified_base (19)..(19): bicyclic nucleic acid (BNA)
  modified_base (20)..(20): bicyclic nucleic acid (BNA)
atcaaggaagauggcauutc

SEQ ID NO: 11474 - DNA, 19 bp, Artificial Sequence
  source: /note="Description of Artificial Sequence: Synthetic oligonucleotide"
  source: /note="Description of Combined DNA/RNA Molecule: Synthetic oligonucleotide"
  source: /note="DNA/RNA"
  modified_base (1)..(1): bicyclic nucleic acid (BNA)
  modified_base (2)..(2): bicyclic nucleic acid (BNA)
  modified_base (18)..(18): bicyclic nucleic acid (BNA)
  modified_base (19)..(19): bicyclic nucleic acid (BNA)
atcaaggaagauggcautt

SEQ ID NO: 11475 - DNA, 18 bp, Artificial Sequence
  source: /note="Description of Artificial Sequence: Synthetic oligonucleotide"
  source: /note="Description of Combined DNA/RNA Molecule: Synthetic oligonucleotide"
  source: /note="DNA/RNA"
  modified_base (1)..(1): bicyclic nucleic acid (BNA)
  modified_base (2)..(2): bicyclic nucleic acid (BNA)
  modified_base (17)..(17): bicyclic nucleic acid (BNA)
  modified_base (18)..(18): bicyclic nucleic acid (BNA)
atcaaggaagauggcatt

SEQ ID NO: 11476 - DNA, 17 bp, Artificial Sequence
  source: /note="Description of Artificial Sequence: Synthetic oligonucleotide"
  source: /note="Description of Combined DNA/RNA Molecule: Synthetic oligonucleotide"
  source: /note="DNA/RNA"
  modified_base (1)..(1): bicyclic nucleic acid (BNA)
  modified_base (2)..(2): bicyclic nucleic acid (BNA)
  modified_base (16)..(16): bicyclic nucleic acid (BNA)
  modified_base (17)..(17): bicyclic nucleic acid (BNA)
atcaaggaagauggcat

SEQ ID NO: 11477 - DNA, 16 bp, Artificial Sequence
  source: /note="Description of Artificial Sequence: Synthetic oligonucleotide"
  source: /note="Description of Combined DNA/RNA Molecule: Synthetic oligonucleotide"
  source: /note="DNA/RNA"
  modified_base (1)..(1): bicyclic nucleic acid (BNA)
  modified_base (2)..(2): bicyclic nucleic acid (BNA)
  modified_base (15)..(15): bicyclic nucleic acid (BNA)
  modified_base (16)..(16): bicyclic nucleic acid (BNA)
atcaaggaagauggca

SEQ ID NO: 11478 - DNA, 15 bp, Artificial Sequence
  source: /note="Description of Artificial Sequence: Synthetic oligonucleotide"
  source: /note="Description of Combined DNA/RNA Molecule: Synthetic oligonucleotide"
  source: /note="DNA/RNA"
  modified_base (1)..(1): bicyclic nucleic acid (BNA)
  modified_base (2)..(2): bicyclic nucleic acid (BNA)
  modified_base (14)..(14): bicyclic nucleic acid (BNA)
  modified_base (15)..(15): bicyclic nucleic acid (BNA)
atcaaggaagauggc

SEQ ID NO: 11479 - DNA, 14 bp, Artificial Sequence
  source: /note="Description of Artificial Sequence: Synthetic oligonucleotide"
  source: /note="Description of Combined DNA/RNA Molecule: Synthetic oligonucleotide"
  source: /note="DNA/RNA"
  modified_base (1)..(1): bicyclic nucleic acid (BNA)
  modified_base (2)..(2): bicyclic nucleic acid (BNA)
  modified_base (13)..(13): bicyclic nucleic acid (BNA)
  modified_base (14)..(14): bicyclic nucleic acid (BNA)
atcaaggaagaugg

SEQ ID NO: 11480 - DNA, 13 bp, Artificial Sequence
  source: /note="Description of Artificial Sequence: Synthetic oligonucleotide"
  source: /note="DNA/RNA"
  modified_base (1)..(1): bicyclic nucleic acid (BNA)
  modified_base (2)..(2): bicyclic nucleic acid (BNA)
  modified_base (12)..(12): bicyclic nucleic acid (BNA)
  modified_base (13)..(13): bicyclic nucleic acid (BNA)
atcaaggaagatg

SEQ ID NO: 11481 - DNA, 12 bp, Artificial Sequence
  source: /note="Description of Artificial Sequence: Synthetic oligonucleotide"
  source: /note="DNA/RNA"
  modified_base (1)..(1): bicyclic nucleic acid (BNA)
  modified_base (2)..(2): bicyclic nucleic acid (BNA)
  modified_base (11)..(11): bicyclic nucleic acid (BNA)
  modified_base (12)..(12): bicyclic nucleic acid (BNA)
atcaaggaagat

SEQ ID NO: 11482 - DNA, 11 bp, Artificial Sequence
  source: /note="Description of Artificial Sequence: Synthetic oligonucleotide"
  source: /note="DNA/RNA"
  modified_base (1)..(1): bicyclic nucleic acid (BNA)
  modified_base (2)..(2): bicyclic nucleic acid (BNA)
  modified_base (10)..(10): bicyclic nucleic acid (BNA)
  modified_base (11)..(11): bicyclic nucleic acid (BNA)
atcaaggaaga

SEQ ID NO: 11483 - DNA, 10 bp, Artificial Sequence
  source: /note="Description of Artificial Sequence: Synthetic oligonucleotide"
  source: /note="DNA/RNA"
  modified_base (1)..(1): bicyclic nucleic acid (BNA)
  modified_base (2)..(2): bicyclic nucleic acid (BNA)
  modified_base (9)..(9): bicyclic nucleic acid (BNA)
  modified_base (10)..(10): bicyclic nucleic acid (BNA)
atcaaggaag

SEQ ID NO: 11484 - DNA, 23 bp, Artificial Sequence
  source: /note="Description of Artificial Sequence: Synthetic oligonucleotide"
  source: /note="Description of Combined DNA/RNA Molecule: Synthetic oligonucleotide"
  source: /note="DNA/RNA"
  modified_base (1)..(1): bicyclic nucleic acid (BNA)
  modified_base (2)..(2): bicyclic nucleic acid (BNA)
  modified_base (22)..(22): bicyclic nucleic acid (BNA)
  modified_base (23)..(23): bicyclic nucleic acid (BNA)
ccagagcagguaccuccaacatc

SEQ ID NO: 11485 - RNA, 18 nt, Artificial Sequence
  source: /note="Description of Artificial Sequence: Synthetic oligonucleotide"
  source: /note="RNA"
  modified_base (1)..(1): bicyclic nucleic acid (BNA)
  modified_base (2)..(2): bicyclic nucleic acid (BNA)
  modified_base (17)..(17): bicyclic nucleic acid (BNA)
  modified_base (18)..(18): bicyclic nucleic acid (BNA)
ccagagcagguaccucca

SEQ ID NO: 11486 - DNA, 23 bp, Artificial Sequence
  source: /note="Description of Artificial Sequence: Synthetic oligonucleotide"
  source: /note="Description of Combined DNA/RNA Molecule: Synthetic oligonucleotide"
  source: /note="DNA/RNA"
  modified_base (1)..(1): bicyclic nucleic acid (BNA)
  modified_base (2)..(2): bicyclic nucleic acid (BNA)
  modified_base (22)..(22): bicyclic nucleic acid (BNA)
  modified_base (23)..(23): bicyclic nucleic acid (BNA)
ccucugugauuuuauaacuugat

SEQ ID NO: 11487 - DNA, 17 bp, Artificial Sequence
  source: /note="Description of Artificial Sequence: Synthetic oligonucleotide"
  source: /note="Description of Combined DNA/RNA Molecule: Synthetic oligonucleotide"
  source: /note="DNA/RNA"
  modified_base (1)..(1): bicyclic nucleic acid (BNA)
  modified_base (2)..(2): bicyclic nucleic acid (BNA)
  modified_base (16)..(16): bicyclic nucleic acid (BNA)
  modified_base (17)..(17): bicyclic nucleic acid (BNA)
tcacccaccaucaccct

SEQ ID NO: 11488 - DNA, 20 bp, Artificial Sequence
  source: /note="Description of Artificial Sequence: Synthetic oligonucleotide"
  source: /note="Description of Combined DNA/RNA Molecule: Synthetic oligonucleotide"
  source: /note="DNA/RNA"
  modified_base (1)..(1): bicyclic nucleic acid (BNA)
  modified_base (2)..(2): bicyclic nucleic acid (BNA)
  modified_base (19)..(19): bicyclic nucleic acid (BNA)
  modified_base (20)..(20): bicyclic nucleic acid (BNA)
tgauauccucaaggucaccc

SEQ ID NO: 11489 - DNA, 22 bp, Artificial Sequence
  source: /note="Description of Artificial Sequence: Synthetic oligonucleotide"
  source: /note="Description of Combined DNA/RNA Molecule: Synthetic oligonucleotide"
  source: /note="DNA/RNA"
  modified_base (1)..(1): bicyclic nucleic acid (BNA)
  modified_base (2)..(2): bicyclic nucleic acid (BNA)
  modified_base (21)..(21): bicyclic nucleic acid (BNA)
  modified_base (22)..(22): bicyclic nucleic acid (BNA)
ctgcuugaugaucaucucgutg

SEQ ID NO: 11490 - DNA, 18 bp, Artificial Sequence
  source: /note="Description of Artificial Sequence: Synthetic oligonucleotide"
  source: /note="Description of Combined DNA/RNA Molecule: Synthetic oligonucleotide"
  source: /note="DNA/RNA"
  modified_base (1)..(1): bicyclic nucleic acid (BNA)
  modified_base (2)..(2): bicyclic nucleic acid (BNA)
  modified_base (17)..(17): bicyclic nucleic acid (BNA)
  modified_base (18)..(18): bicyclic nucleic acid (BNA)
ctgcuugaugaucauctc

SEQ ID NO: 11491 - DNA, 19 bp, Artificial Sequence
  source: /note="Description of Artificial Sequence: Synthetic oligonucleotide"
  source: /note="Description of Combined DNA/RNA Molecule: Synthetic oligonucleotide"
  source: /note="DNA/RNA"
  modified_base (1)..(1): bicyclic nucleic acid (BNA)
  modified_base (2)..(2): bicyclic nucleic acid (BNA)
  modified_base (18)..(18): bicyclic nucleic acid (BNA)
  modified_base (19)..(19): bicyclic nucleic acid (BNA)
gtuuccuuaguaaccacag

SEQ ID NO: 11492 - DNA, 17 bp, Artificial Sequence
  source: /note="Description of Artificial Sequence: Synthetic oligonucleotide"
  source: /note="Description of Combined DNA/RNA Molecule: Synthetic oligonucleotide"
  source: /note="DNA/RNA"
  modified_base (1)..(1): bicyclic nucleic acid (BNA)
  modified_base (2)..(2): bicyclic nucleic acid (BNA)
  modified_base (16)..(16): bicyclic nucleic acid (BNA)
  modified_base (17)..(17): bicyclic nucleic acid (BNA)
gtuuccuuaguaaccac

SEQ ID NO: 11493 - DNA, 20 bp, Artificial Sequence
  source: /note="Description of Artificial Sequence: Synthetic oligonucleotide"
  source: /note="Description of Combined DNA/RNA Molecule: Synthetic oligonucleotide"
  source: /note="DNA/RNA"
  source: /note="5' tri-ethylene glycol (TEG)"
  modified_base (1)..(1): bicyclic nucleic acid (BNA)
  modified_base (2)..(2): bicyclic nucleic acid (BNA)
  modified_base (19)..(19): bicyclic nucleic acid (BNA)
  modified_base (20)..(20): bicyclic nucleic acid (BNA)
tcaaggaagauggcauuuct

SEQ ID NO: 11494 - DNA, 22 bp, Artificial Sequence
  source: /note="Description of Artificial Sequence: Synthetic oligonucleotide"
  source: /note="Description of Combined DNA/RNA Molecule: Synthetic oligonucleotide"
  source: /note="DNA/RNA"
  source: /note="5' tri-ethylene glycol (TEG)"
  modified_base (1)..(1): bicyclic nucleic acid (BNA)
  modified_base (2)..(2): bicyclic nucleic acid (BNA)
  modified_base (21)..(21): bicyclic nucleic acid (BNA)
  modified_base (22)..(22): bicyclic nucleic acid (BNA)
tcaaggaagauggcauuucuag

SEQ ID NO: 11495 - RNA, 18 nt, Artificial Sequence
  source: /note="Description of Artificial Sequence: Synthetic oligonucleotide"
  source: /note="RNA"
  source: /note="5' tri-ethylene glycol (TEG)"
  modified_base (1)..(1): bicyclic nucleic acid (BNA)
  modified_base (2)..(2): bicyclic nucleic acid (BNA)
  modified_base (17)..(17): bicyclic nucleic acid (BNA)
  modified_base (18)..(18): bicyclic nucleic acid (BNA)
gguaaguucuguccaagc

SEQ ID NO: 11496 - DNA, 18 bp, Artificial Sequence
  source: /note="Description of Artificial Sequence: Synthetic oligonucleotide"
  source: /note="Description of Combined DNA/RNA Molecule: Synthetic oligonucleotide"
  source: /note="DNA/RNA"
  source: /note="5' tri-ethylene glycol (TEG)"
  modified_base (1)..(1): bicyclic nucleic acid (BNA)
  modified_base (2)..(2): bicyclic nucleic acid (BNA)
  modified_base (17)..(17): bicyclic nucleic acid (BNA)
  modified_base (18)..(18): bicyclic nucleic acid (BNA)
gtaaguucuguccaagcc

SEQ ID NO: 11497 - RNA, 18 nt, Artificial Sequence
  source: /note="Description of Artificial Sequence: Synthetic oligonucleotide"
  source: /note="RNA"
  source: /note="5' tri-ethylene glycol (TEG)"
  modified_base (1)..(1): bicyclic nucleic acid (BNA)
  modified_base (2)..(2): bicyclic nucleic acid (BNA)
  modified_base (17)..(17): bicyclic nucleic acid (BNA)
  modified_base (18)..(18): bicyclic nucleic acid (BNA)
agucgguaaguucugucc

SEQ ID NO: 11498 - DNA, 18 bp, Artificial Sequence
  source: /note="Description of Artificial Sequence: Synthetic oligonucleotide"
  source: /note="Description of Combined DNA/RNA Molecule: Synthetic oligonucleotide"
  source: /note="DNA/RNA"
  source: /note="5' tri-ethylene glycol (TEG)"
  modified_base (1)..(1): bicyclic nucleic acid (BNA)
  modified_base (2)..(2): bicyclic nucleic acid (BNA)
  modified_base (17)..(17): bicyclic nucleic acid (BNA)
  modified_base (18)..(18): bicyclic nucleic acid (BNA)
ctguccaagcccgguuga

SEQ ID NO: 11499 - DNA, 15 bp, Artificial Sequence
  source: /note="Description of Artificial Sequence: Synthetic oligonucleotide"
  source: /note="Description of Combined DNA/RNA Molecule: Synthetic oligonucleotide"
  source: /note="DNA/RNA"
  source: /note="5' tri-ethylene glycol (TEG)"
  modified_base (1)..(1): bicyclic nucleic acid (BNA)
  modified_base (2)..(2): bicyclic nucleic acid (BNA)
  modified_base (14)..(14): bicyclic nucleic acid (BNA)
  modified_base (15)..(15): bicyclic nucleic acid (BNA)
taaguucuguccaag

SEQ ID NO: 11500 - DNA, 20 bp, Artificial Sequence
  source: /note="Description of Artificial Sequence: Synthetic oligonucleotide"
  source: /note="Description of Combined DNA/RNA Molecule: Synthetic oligonucleotide"
  source: /note="DNA/RNA"
  source: /note="5' tri-ethylene glycol (TEG)"
  modified_base (1)..(1): bicyclic nucleic acid (BNA)
  modified_base (2)..(2): bicyclic nucleic acid (BNA)
  modified_base (19)..(19): bicyclic nucleic acid (BNA)
  modified_base (20)..(20): bicyclic nucleic acid (BNA)
ttcuguccaagcccgguuga

SEQ ID NO: 11501 - DNA, 19 bp, Artificial Sequence
  source: /note="Description of Artificial Sequence: Synthetic oligonucleotide"
  source: /note="Description of Combined DNA/RNA Molecule: Synthetic oligonucleotide"
  source: /note="DNA/RNA"
  source: /note="5' tri-ethylene glycol (TEG)"
  modified_base (1)..(1): bicyclic nucleic acid (BNA)
  modified_base (2)..(2): bicyclic nucleic acid (BNA)
  modified_base (18)..(18): bicyclic nucleic acid (BNA)
  modified_base (19)..(19): bicyclic nucleic acid (BNA)
ttcuguccaagcccggutg

SEQ ID NO: 11502 - DNA, 18 bp, Artificial Sequence
  source: /note="Description of Artificial Sequence: Synthetic oligonucleotide"
  source: /note="Description of Combined DNA/RNA Molecule: Synthetic oligonucleotide"
  source: /note="DNA/RNA"
  source: /note="5' tri-ethylene glycol (TEG)"
  modified_base (1)..(1): bicyclic nucleic acid (BNA)
  modified_base (2)..(2): bicyclic nucleic acid (BNA)
  modified_base (17)..(17): bicyclic nucleic acid (BNA)
  modified_base (18)..(18): bicyclic nucleic acid (BNA)
ttcuguccaagcccggtt

SEQ ID NO: 11503 - DNA, 17 bp, Artificial Sequence
  source: /note="Description of Artificial Sequence: Synthetic oligonucleotide"
  source: /note="Description of Combined DNA/RNA Molecule: Synthetic oligonucleotide"
  source: /note="DNA/RNA"
  source: /note="5' tri-ethylene glycol (TEG)"
  modified_base (1)..(1): bicyclic nucleic acid (BNA)
  modified_base (2)..(2): bicyclic nucleic acid (BNA)
  modified_base (16)..(16): bicyclic nucleic acid (BNA)
  modified_base (17)..(17): bicyclic nucleic acid (BNA)
ttcuguccaagcccggt

SEQ ID NO: 11504 - DNA, 16 bp, Artificial Sequence
  source: /note="Description of Artificial Sequence: Synthetic oligonucleotide"
  source: /note="Description of Combined DNA/RNA Molecule: Synthetic oligonucleotide"
  source: /note="DNA/RNA"
  source: /note="5' tri-ethylene glycol (TEG)"
  modified_base (1)..(1): bicyclic nucleic acid (BNA)
  modified_base (2)..(2): bicyclic nucleic acid (BNA)
  modified_base (15)..(15): bicyclic nucleic acid (BNA)
  modified_base (16)..(16): bicyclic nucleic acid (BNA)
ttcuguccaagcccgg

SEQ ID NO: 11505 - DNA, 15 bp, Artificial Sequence
  source: /note="Description of Artificial Sequence: Synthetic oligonucleotide"
  source: /note="Description of Combined DNA/RNA Molecule: Synthetic oligonucleotide"
  source: /note="DNA/RNA"
  source: /note="5' tri-ethylene glycol (TEG)"
  modified_base (1)..(1): bicyclic nucleic acid (BNA)
  modified_base (2)..(2): bicyclic nucleic acid (BNA)
  modified_base (14)..(14): bicyclic nucleic acid (BNA)
  modified_base (15)..(15): bicyclic nucleic acid (BNA)
ttcuguccaagcccg

SEQ ID NO: 11506 - DNA, 14 bp, Artificial Sequence
  source: /note="Description of Artificial Sequence: Synthetic oligonucleotide"
  source: /note="Description of Combined DNA/RNA Molecule: Synthetic oligonucleotide"
  source: /note="DNA/RNA"
  source: /note="5' tri-ethylene glycol (TEG)"
  modified_base (1)..(1): bicyclic nucleic acid (BNA)
  modified_base (2)..(2): bicyclic nucleic acid (BNA)
  modified_base (13)..(13): bicyclic nucleic acid (BNA)
  modified_base (14)..(14): bicyclic nucleic acid (BNA)
ttcuguccaagccc

SEQ ID NO: 11507 - DNA, 13 bp, Artificial Sequence
  source: /note="Description of Artificial Sequence: Synthetic oligonucleotide"
  source: /note="Description of Combined DNA/RNA Molecule: Synthetic oligonucleotide"
  source: /note="DNA/RNA"
  source: /note="5' tri-ethylene glycol (TEG)"
  modified_base (1)..(1): bicyclic nucleic acid (BNA)
  modified_base (2)..(2): bicyclic nucleic acid (BNA)
  modified_base (12)..(12): bicyclic nucleic acid (BNA)
  modified_base (13)..(13): bicyclic nucleic acid (BNA)
ttcuguccaagcc

SEQ ID NO: 11508 - DNA, 12 bp, Artificial Sequence
  source: /note="Description of Artificial Sequence: Synthetic oligonucleotide"
  source: /note="Description of Combined DNA/RNA Molecule: Synthetic oligonucleotide"
  source: /note="DNA/RNA"
  source: /note="5' tri-ethylene glycol (TEG)"
  modified_base (1)..(1): bicyclic nucleic acid (BNA)
  modified_base (2)..(2): bicyclic nucleic acid (BNA)
  modified_base (11)..(11): bicyclic nucleic acid (BNA)
  modified_base (12)..(12): bicyclic nucleic acid (BNA)
ttcuguccaagc

SEQ ID NO: 11509 - DNA, 11 bp, Artificial Sequence
  source: /note="Description of Artificial Sequence: Synthetic oligonucleotide"
  source: /note="Description of Combined DNA/RNA Molecule: Synthetic oligonucleotide"
  source: /note="DNA/RNA"
  source: /note="5' tri-ethylene glycol (TEG)"
  modified_base (1)..(1): bicyclic nucleic acid (BNA)
  modified_base (2)..(2): bicyclic nucleic acid (BNA)
  modified_base (10)..(10): bicyclic nucleic acid (BNA)
  modified_base (11)..(11): bicyclic nucleic acid (BNA)
ttcuguccaag

SEQ ID NO: 11510 - DNA, 10 bp, Artificial Sequence
  source: /note="Description of Artificial Sequence: Synthetic oligonucleotide"
  source: /note="Description of Combined DNA/RNA Molecule: Synthetic oligonucleotide"
  source: /note="DNA/RNA"
  source: /note="5' tri-ethylene glycol (TEG)"
  modified_base (1)..(1): bicyclic nucleic acid (BNA)
  modified_base (2)..(2): bicyclic nucleic acid (BNA)
  modified_base (9)..(9): bicyclic nucleic acid (BNA)
  modified_base (10)..(10): bicyclic nucleic acid (BNA)
ttcuguccaa

SEQ ID NO: 11511 - DNA, 9 bp, Artificial Sequence
  source: /note="Description of Artificial Sequence: Synthetic oligonucleotide"
  source: /note="Description of Combined DNA/RNA Molecule: Synthetic oligonucleotide"
  source: /note="DNA/RNA"
  source: /note="5' tri-ethylene glycol (TEG)"
  modified_base (1)..(1): bicyclic nucleic acid (BNA)
  modified_base (2)..(2): bicyclic nucleic acid (BNA)
  modified_base (8)..(8): bicyclic nucleic acid (BNA)
  modified_base (9)..(9): bicyclic nucleic acid (BNA)
ttcugucca

SEQ ID NO: 11512 - DNA, 8 bp, Artificial Sequence
  source: /note="Description of Artificial Sequence: Synthetic oligonucleotide"
  source: /note="Description of Combined DNA/RNA Molecule: Synthetic oligonucleotide"
  source: /note="DNA/RNA"
  source: /note="5' tri-ethylene glycol (TEG)"
  modified_base (1)..(1): bicyclic nucleic acid (BNA)
  modified_base (2)..(2): bicyclic nucleic acid (BNA)
  modified_base (7)..(7): bicyclic nucleic acid (BNA)
  modified_base (8)..(8): bicyclic nucleic acid (BNA)
ttcugucc

SEQ ID NO: 11513 - DNA, 19 bp, Artificial Sequence
  source: /note="Description of Artificial Sequence: Synthetic oligonucleotide"
  source: /note="Description of Combined DNA/RNA Molecule: Synthetic oligonucleotide"
  source: /note="DNA/RNA"
  source: /note="5' tri-ethylene glycol (TEG)"
  modified_base (1)..(1): bicyclic nucleic acid (BNA)
  modified_base (2)..(2): bicyclic nucleic acid (BNA)
  modified_base (18)..(18): bicyclic nucleic acid (BNA)
  modified_base (19)..(19): bicyclic nucleic acid (BNA)
tcuguccaagcccgguuga

SEQ ID NO: 11514 - DNA, 18 bp, Artificial Sequence
  source: /note="Description of Artificial Sequence: Synthetic oligonucleotide"
  source: /note="Description of Combined DNA/RNA Molecule: Synthetic oligonucleotide"
  source: /note="DNA/RNA"
  source: /note="5' tri-ethylene glycol (TEG)"
  modified_base (1)..(1): bicyclic nucleic acid (BNA)
  modified_base (2)..(2): bicyclic nucleic acid (BNA)
  modified_base (17)..(17): bicyclic nucleic acid (BNA)
  modified_base (18)..(18): bicyclic nucleic acid (BNA)
tcuguccaagcccggutg

SEQ ID NO: 11515 - DNA, 17 bp, Artificial Sequence
  source: /note="Description of Artificial Sequence: Synthetic oligonucleotide"
  source: /note="Description of Combined DNA/RNA Molecule: Synthetic oligonucleotide"
  source: /note="DNA/RNA"
  source: /note="5' tri-ethylene glycol (TEG)"
  modified_base (1)..(1): bicyclic nucleic acid (BNA)
  modified_base (2)..(2): bicyclic nucleic acid (BNA)
  modified_base (16)..(16): bicyclic nucleic acid (BNA)
  modified_base (17)..(17): bicyclic nucleic acid (BNA)
tcuguccaagcccggtt

SEQ ID NO: 11516 - DNA, 16 bp, Artificial Sequence
  source: /note="Description of Artificial Sequence: Synthetic oligonucleotide"
  source: /note="Description of Combined DNA/RNA Molecule: Synthetic oligonucleotide"
  source: /note="DNA/RNA"
  source: /note="5' tri-ethylene glycol (TEG)"
  modified_base (1)..(1): bicyclic nucleic acid (BNA)
  modified_base (2)..(2): bicyclic nucleic acid (BNA)
  modified_base (15)..(15): bicyclic nucleic acid (BNA)
  modified_base (16)..(16): bicyclic nucleic acid (BNA)
tcuguccaagcccggt

SEQ ID NO: 11517 - DNA, 15 bp, Artificial Sequence
  source: /note="Description of Artificial Sequence: Synthetic oligonucleotide"
  source: /note="Description of Combined DNA/RNA Molecule: Synthetic oligonucleotide"
  source: /note="DNA/RNA"
  source: /note="5' tri-ethylene glycol (TEG)"
  modified_base (1)..(1): bicyclic nucleic acid (BNA)
  modified_base (2)..(2): bicyclic nucleic acid (BNA)
  modified_base (14)..(14): bicyclic nucleic acid (BNA)
  modified_base (15)..(15): bicyclic nucleic acid (BNA)
tcuguccaagcccgg

SEQ ID NO: 11518 - DNA, 14 bp, Artificial Sequence
  source: /note="Description of Artificial Sequence: Synthetic oligonucleotide"
  source: /note="Description of Combined DNA/RNA Molecule: Synthetic oligonucleotide"
  source: /note="DNA/RNA"
  source: /note="5' tri-ethylene glycol (TEG)"
  modified_base (1)..(1): bicyclic nucleic acid (BNA)
  modified_base (2)..(2): bicyclic nucleic acid (BNA)
  modified_base (13)..(13): bicyclic nucleic acid (BNA)
  modified_base (14)..(14): bicyclic nucleic acid (BNA)
tcuguccaagcccg

SEQ ID NO: 11519 - DNA, 13 bp, Artificial Sequence
  source: /note="Description of Artificial Sequence: Synthetic oligonucleotide"
  source: /note="Description of Combined DNA/RNA Molecule: Synthetic oligonucleotide"
  source: /note="DNA/RNA"
  source: /note="5' tri-ethylene glycol (TEG)"
  modified_base (1)..(1): bicyclic nucleic acid (BNA)
  modified_base (2)..(2): bicyclic nucleic acid (BNA)
  modified_base (12)..(12): bicyclic nucleic acid (BNA)
  modified_base (13)..(13): bicyclic nucleic acid (BNA)
tcuguccaagccc

SEQ ID NO: 11520 - DNA, 12 bp, Artificial Sequence
  source: /note="Description of Artificial Sequence: Synthetic oligonucleotide"
  source: /note="Description of Combined DNA/RNA Molecule: Synthetic oligonucleotide"
  source: /note="DNA/RNA"
  source: /note="5' tri-ethylene glycol (TEG)"
  modified_base (1)..(1): bicyclic nucleic acid (BNA)
  modified_base (2)..(2): bicyclic nucleic acid (BNA)
  modified_base (11)..(11): bicyclic nucleic acid (BNA)
  modified_base (12)..(12): bicyclic nucleic acid (BNA)
tcuguccaagcc

SEQ ID NO: 11521 - DNA, 11 bp, Artificial Sequence
  source: /note="Description of Artificial Sequence: Synthetic oligonucleotide"
  source: /note="Description of Combined DNA/RNA Molecule: Synthetic oligonucleotide"
  source: /note="DNA/RNA"
  source: /note="5' tri-ethylene glycol (TEG)"
  modified_base (1)..(1): bicyclic nucleic acid (BNA)
  modified_base (2)..(2): bicyclic nucleic acid (BNA)
  modified_base (10)..(10): bicyclic nucleic acid (BNA)
  modified_base (11)..(11): bicyclic nucleic acid (BNA)
tcuguccaagc

SEQ ID NO: 11522 - DNA, 10 bp, Artificial Sequence
  source: /note="Description of Artificial Sequence: Synthetic oligonucleotide"
  source: /note="Description of Combined DNA/RNA Molecule: Synthetic oligonucleotide"
  source: /note="DNA/RNA"
  source: /note="5' tri-ethylene glycol (TEG)"
  modified_base (1)..(1): bicyclic nucleic acid (BNA)
  modified_base (2)..(2): bicyclic nucleic acid (BNA)
  modified_base (9)..(9): bicyclic nucleic acid (BNA)
  modified_base (10)..(10): bicyclic nucleic acid (BNA)
tcuguccaag

SEQ ID NO: 11523 - DNA, 9 bp, Artificial Sequence
  source: /note="Description of Artificial Sequence: Synthetic oligonucleotide"
  source: /note="Description of Combined DNA/RNA Molecule: Synthetic oligonucleotide"
  source: /note="DNA/RNA"
  source: /note="5' tri-ethylene glycol (TEG)"
  modified_base (1)..(1): bicyclic nucleic acid (BNA)
  modified_base (2)..(2): bicyclic nucleic acid (BNA)
  modified_base (8)..(8): bicyclic nucleic acid (BNA)
  modified_base (9)..(9): bicyclic nucleic acid (BNA)
tcuguccaa

SEQ ID NO: 11524 - DNA, 8 bp, Artificial Sequence
  source: /note="Description of Artificial Sequence: Synthetic oligonucleotide"
  source: /note="Description of Combined DNA/RNA Molecule: Synthetic oligonucleotide"
  source: /note="DNA/RNA"
  source: /note="5' tri-ethylene glycol (TEG)"
  modified_base (1)..(1): bicyclic nucleic acid (BNA)
  modified_base (2)..(2): bicyclic nucleic acid (BNA)
  modified_base (7)..(7): bicyclic nucleic acid (BNA)
  modified_base (8)..(8): bicyclic nucleic acid (BNA)
tcugucca

SEQ ID NO: 11525 - DNA, 17 bp, Artificial Sequence
  source: /note="Description of Artificial Sequence: Synthetic oligonucleotide"
  source: /note="Description of Combined DNA/RNA Molecule: Synthetic oligonucleotide"
  source: /note="DNA/RNA"
  source: /note="5' tri-ethylene glycol (TEG)"
  modified_base (1)..(1): bicyclic nucleic acid (BNA)
  modified_base (2)..(2): bicyclic nucleic acid (BNA)
  modified_base (16)..(16): bicyclic nucleic acid (BNA)
  modified_base (17)..(17): bicyclic nucleic acid (BNA)
ctguccaagcccggutg

SEQ ID NO: 11526 - DNA, 16 bp, Artificial Sequence
  source: /note="Description of Artificial Sequence: Synthetic oligonucleotide"
  source: /note="Description of Combined DNA/RNA Molecule: Synthetic oligonucleotide"
  source: /note="DNA/RNA"
  source: /note="5' tri-ethylene glycol (TEG)"
  modified_base (1)..(1): bicyclic nucleic acid (BNA)
  modified_base (2)..(2): bicyclic nucleic acid (BNA)
  modified_base (15)..(15): bicyclic nucleic acid (BNA)
  modified_base (16)..(16): bicyclic nucleic acid (BNA)
ctguccaagcccggtt

SEQ ID NO: 11527 - DNA, 15 bp, Artificial Sequence
  source: /note="Description of Artificial Sequence: Synthetic oligonucleotide"
  source: /note="Description of Combined DNA/RNA Molecule: Synthetic oligonucleotide"
  source: /note="DNA/RNA"
  source: /note="5' tri-ethylene glycol (TEG)"
  modified_base (1)..(1): bicyclic nucleic acid (BNA)
  modified_base (2)..(2): bicyclic nucleic acid (BNA)
  modified_base (14)..(14): bicyclic nucleic acid (BNA)
  modified_base (15)..(15): bicyclic nucleic acid (BNA)
ctguccaagcccggt

SEQ ID NO: 11528 - DNA, 14 bp, Artificial Sequence
  source: /note="Description of Artificial Sequence: Synthetic oligonucleotide"
  source: /note="Description of Combined DNA/RNA Molecule: Synthetic oligonucleotide"
  source: /note="DNA/RNA"
  source: /note="5' tri-ethylene glycol (TEG)"
  modified_base (1)..(1): bicyclic nucleic acid (BNA)
  modified_base (2)..(2): bicyclic nucleic acid (BNA)
  modified_base (13)..(13): bicyclic nucleic acid (BNA)
  modified_base (14)..(14): bicyclic nucleic acid (BNA)
ctguccaagcccgg

SEQ ID NO: 11529 - DNA, 13 bp, Artificial Sequence
  source: /note="Description of Artificial Sequence: Synthetic oligonucleotide"
  source: /note="Description of Combined DNA/RNA Molecule: Synthetic oligonucleotide"
  source: /note="DNA/RNA"
  source: /note="5' tri-ethylene glycol (TEG)"
  modified_base (1)..(1): bicyclic nucleic acid (BNA)
  modified_base (2)..(2): bicyclic nucleic acid (BNA)
  modified_base (12)..(12): bicyclic nucleic acid (BNA)
  modified_base (13)..(13): bicyclic nucleic acid (BNA)
ctguccaagcccg

SEQ ID NO: 11530 - DNA, 12 bp, Artificial Sequence
  source: /note="Description of Artificial Sequence: Synthetic oligonucleotide"
  source: /note="Description of Combined DNA/RNA Molecule: Synthetic oligonucleotide"
  source: /note="DNA/RNA"
  source: /note="5' tri-ethylene glycol (TEG)"
  modified_base (1)..(1): bicyclic nucleic acid (BNA)
  modified_base (2)..(2): bicyclic nucleic acid (BNA)
  modified_base (11)..(11): bicyclic nucleic acid (BNA)
  modified_base (12)..(12): bicyclic nucleic acid (BNA)
ctguccaagccc

SEQ ID NO: 11531 - DNA, 11 bp, Artificial Sequence
  source: /note="Description of Artificial Sequence: Synthetic oligonucleotide"
  source: /note="Description of Combined DNA/RNA Molecule: Synthetic oligonucleotide"
  source: /note="DNA/RNA"
  source: /note="5' tri-ethylene glycol (TEG)"
  modified_base (1)..(1): bicyclic nucleic acid (BNA)
  modified_base (2)..(2): bicyclic nucleic acid (BNA)
  modified_base (10)..(10): bicyclic nucleic acid (BNA)
  modified_base (11)..(11): bicyclic nucleic acid (BNA)
ctguccaagcc

SEQ ID NO: 11532 - DNA, 10 bp, Artificial Sequence
  source: /note="Description of Artificial Sequence: Synthetic oligonucleotide"
  source: /note="Description of Combined DNA/RNA Molecule: Synthetic oligonucleotide"
  source: /note="DNA/RNA"
  source: /note="5' tri-ethylene glycol (TEG)"
  modified_base (1)..(1): bicyclic nucleic acid (BNA)
  modified_base (2)..(2): bicyclic nucleic acid (BNA)
  modified_base (9)..(9): bicyclic nucleic acid (BNA)
  modified_base (10)..(10): bicyclic nucleic acid (BNA)
ctguccaagc

SEQ ID NO: 11533 - DNA, 9 bp, Artificial Sequence
  source: /note="Description of Artificial Sequence: Synthetic oligonucleotide"
  source: /note="Description of Combined DNA/RNA Molecule: Synthetic oligonucleotide"
  source: /note="DNA/RNA"
  source: /note="5' tri-ethylene glycol (TEG)"
  modified_base (1)..(1): bicyclic nucleic acid (BNA)
  modified_base (2)..(2): bicyclic nucleic acid (BNA)
  modified_base (8)..(8): bicyclic nucleic acid (BNA)
  modified_base (9)..(9): bicyclic nucleic acid (BNA)
ctguccaag

SEQ ID NO: 11534 - DNA, 8 bp, Artificial Sequence
  source: /note="Description of Artificial Sequence: Synthetic oligonucleotide"
  source: /note="Description of Combined DNA/RNA Molecule: Synthetic oligonucleotide"
  source: /note="DNA/RNA"
  source: /note="5' tri-ethylene glycol (TEG)"
  modified_base (1)..(1): bicyclic nucleic acid (BNA)
  modified_base (2)..(2): bicyclic nucleic acid (BNA)
  modified_base (7)..(7): bicyclic nucleic acid (BNA)
  modified_base (8)..(8): bicyclic nucleic acid (BNA)
ctguccaa

SEQ ID NO: 11535 - DNA, 20 bp, Artificial Sequence
  source: /note="Description of Artificial Sequence: Synthetic oligonucleotide"
  source: /note="Description of Combined DNA/RNA Molecule: Synthetic oligonucleotide"
  source: /note="DNA/RNA"
  source: /note="5' tri-ethylene glycol (TEG)"
  modified_base (1)..(1): bicyclic nucleic acid (BNA)
  modified_base (2)..(2): bicyclic nucleic acid (BNA)
  modified_base (19)..(19): bicyclic nucleic acid (BNA)
  modified_base (20)..(20): bicyclic nucleic acid (BNA)
gtucuguccaagcccggutg

SEQ ID NO: 11536 - DNA, 19 bp, Artificial Sequence
  source: /note="Description of Artificial Sequence: Synthetic oligonucleotide"
  source: /note="Description of Combined DNA/RNA Molecule: Synthetic oligonucleotide"
  source: /note="DNA/RNA"
  source: /note="5' tri-ethylene glycol (TEG)"
  modified_base (1)..(1): bicyclic nucleic acid (BNA)
  modified_base (2)..(2): bicyclic nucleic acid (BNA)
  modified_base (18)..(18): bicyclic nucleic acid (BNA)
  modified_base (19)..(19): bicyclic nucleic acid (BNA)
gtucuguccaagcccggtt

SEQ ID NO: 11537 - DNA, 18 bp, Artificial Sequence
  source: /note="Description of Artificial Sequence: Synthetic oligonucleotide"
  source: /note="Description of Combined DNA/RNA Molecule: Synthetic oligonucleotide"
  source: /note="DNA/RNA"
  source: /note="5' tri-ethylene glycol (TEG)"
  modified_base (1)..(1): bicyclic nucleic acid (BNA)
  modified_base (2)..(2): bicyclic nucleic acid (BNA)
  modified_base (17)..(17): bicyclic nucleic acid (BNA)
  modified_base (18)..(18): bicyclic nucleic acid (BNA)
gtucuguccaagcccggt

SEQ ID NO: 11538 - DNA, 17 bp, Artificial Sequence
  source: /note="Description of Artificial Sequence: Synthetic oligonucleotide"
  source: /note="Description of Combined DNA/RNA Molecule: Synthetic oligonucleotide"
  source: /note="DNA/RNA"
  source: /note="5' tri-ethylene glycol (TEG)"
  modified_base (1)..(1): bicyclic nucleic acid (BNA)
  modified_base (2)..(2): bicyclic nucleic acid (BNA)
  modified_base (16)..(16): bicyclic nucleic acid (BNA)
  modified_base (17)..(17): bicyclic nucleic acid (BNA)
gtucuguccaagcccgg

SEQ ID NO: 11539 - DNA, 16 bp, Artificial Sequence
  source: /note="Description of Artificial Sequence: Synthetic oligonucleotide"
  source: /note="Description of Combined DNA/RNA Molecule: Synthetic oligonucleotide"
  source: /note="DNA/RNA"
  source: /note="5' tri-ethylene glycol (TEG)"
  modified_base (1)..(1): bicyclic nucleic acid (BNA)
  modified_base (2)..(2): bicyclic nucleic acid (BNA)
  modified_base (15)..(15): bicyclic nucleic acid (BNA)
  modified_base (16)..(16): bicyclic nucleic acid (BNA)
gtucuguccaagcccg

SEQ ID NO: 11540 - DNA, 15 bp, Artificial Sequence
  source: /note="Description of Artificial Sequence: Synthetic oligonucleotide"
  source: /note="Description of Combined DNA/RNA Molecule: Synthetic oligonucleotide"
  source: /note="DNA/RNA"
  source: /note="5' tri-ethylene glycol (TEG)"
  modified_base (1)..(1): bicyclic nucleic acid (BNA)
  modified_base (2)..(2): bicyclic nucleic acid (BNA)
  modified_base (14)..(14): bicyclic nucleic acid (BNA)
  modified_base (15)..(15): bicyclic nucleic acid (BNA)
gtucuguccaagccc

SEQ ID NO: 11541 - DNA, 14 bp, Artificial Sequence
  source: /note="Description of Artificial Sequence: Synthetic oligonucleotide"
  source: /note="Description of Combined DNA/RNA Molecule: Synthetic oligonucleotide"
  source: /note="DNA/RNA"
  source: /note="5' tri-ethylene glycol (TEG)"
  modified_base (1)..(1): bicyclic nucleic acid (BNA)
  modified_base (2)..(2): bicyclic nucleic acid (BNA)
  modified_base (13)..(13): bicyclic nucleic acid (BNA)
  modified_base (14)..(14): bicyclic nucleic acid (BNA)
gtucuguccaagcc

SEQ ID NO: 11542 - DNA, 13 bp, Artificial Sequence
  source: /note="Description of Artificial Sequence: Synthetic oligonucleotide"
  source: /note="Description of Combined DNA/RNA Molecule: Synthetic oligonucleotide"
  source: /note="DNA/RNA"
  source: /note="5' tri-ethylene glycol (TEG)"
  modified_base (1)..(1): bicyclic nucleic acid (BNA)
  modified_base (2)..(2): bicyclic nucleic acid (BNA)
  modified_base (12)..(12): bicyclic nucleic acid (BNA)
  modified_base (13)..(13): bicyclic nucleic acid (BNA)
gtucuguccaagc

SEQ ID NO: 11543 - DNA, 12 bp, Artificial Sequence
  source: /note="Description of Artificial Sequence: Synthetic oligonucleotide"
  source: /note="Description of Combined DNA/RNA Molecule: Synthetic oligonucleotide"
  source: /note="DNA/RNA"
  source: /note="5' tri-ethylene glycol (TEG)"
  modified_base (1)..(1): bicyclic nucleic acid (BNA)
  modified_base (2)..(2): bicyclic nucleic acid (BNA)
  modified_base (11)..(11): bicyclic nucleic acid (BNA)
  modified_base (12)..(12): bicyclic nucleic acid (BNA)
gtucuguccaag

SEQ ID NO: 11544 - DNA, 11 bp, Artificial Sequence
  source: /note="Description of Artificial Sequence: Synthetic oligonucleotide"
  source: /note="Description of Combined DNA/RNA Molecule: Synthetic oligonucleotide"
  source: /note="DNA/RNA"
  source: /note="5' tri-ethylene glycol (TEG)"
  modified_base (1)..(1): bicyclic nucleic acid (BNA)
  modified_base (2)..(2): bicyclic nucleic acid (BNA)
  modified_base (10)..(10): bicyclic nucleic acid (BNA)
  modified_base (11)..(11): bicyclic nucleic acid (BNA)
gtucuguccaa

SEQ ID NO: 11545 - DNA, 10 bp, Artificial Sequence
  source: /note="Description of Artificial Sequence: Synthetic oligonucleotide"
  source: /note="Description of Combined DNA/RNA Molecule: Synthetic oligonucleotide"
  source: /note="DNA/RNA"
  source: /note="5' tri-ethylene glycol (TEG)"
  modified_base (1)..(1): bicyclic nucleic acid (BNA)
  modified_base (2)..(2): bicyclic nucleic acid (BNA)
  modified_base (9)..(9): bicyclic nucleic acid (BNA)
  modified_base (10)..(10): bicyclic nucleic acid (BNA)
gtucugucca

SEQ ID NO: 11546 - DNA, 9 bp, Artificial Sequence
  source: /note="Description of Artificial Sequence: Synthetic oligonucleotide"
  source: /note="Description of Combined DNA/RNA Molecule: Synthetic oligonucleotide"
  source: /note="DNA/RNA"
  source: /note="5' tri-ethylene glycol (TEG)"
  modified_base (1)..(1): bicyclic nucleic acid (BNA)
  modified_base (2)..(2): bicyclic nucleic acid (BNA)
  modified_base (8)..(8): bicyclic nucleic acid (BNA)
  modified_base (9)..(9): bicyclic nucleic acid (BNA)
gtucugucc

SEQ ID NO: 11547 - DNA, 8 bp, Artificial Sequence
  source: /note="Description of Artificial Sequence: Synthetic oligonucleotide"
  source: /note="Description of Combined DNA/RNA Molecule: Synthetic oligonucleotide"
  source: /note="DNA/RNA"
  source: /note="5' tri-ethylene glycol (TEG)"
  modified_base (1)..(1): bicyclic nucleic acid (BNA)
  modified_base (2)..(2): bicyclic nucleic acid (BNA)
  modified_base (7)..(7): bicyclic nucleic acid (BNA)
  modified_base (8)..(8): bicyclic nucleic acid (BNA)
gtucugtc

SEQ ID NO: 11548 - DNA, 20 bp, Artificial Sequence
  source: /note="Description of Artificial Sequence: Synthetic oligonucleotide"
  source: /note="Description of Combined DNA/RNA Molecule: Synthetic oligonucleotide"
  source: /note="DNA/RNA"
  source: /note="5' tri-ethylene glycol (TEG)"
  modified_base (1)..(1): bicyclic nucleic acid (BNA)
  modified_base (2)..(2): bicyclic nucleic acid (BNA)
  modified_base (19)..(19): bicyclic nucleic acid (BNA)
  modified_base (20)..(20): bicyclic nucleic acid (BNA)
aguucuguccaagcccggtt

SEQ ID NO: 11549 - DNA, 19 bp, Artificial Sequence
  source: /note="Description of Artificial Sequence: Synthetic oligonucleotide"
  source: /note="Description of Combined DNA/RNA Molecule: Synthetic oligonucleotide"
  source: /note="DNA/RNA"
  source: /note="5' tri-ethylene glycol (TEG)"
  modified_base (1)..(1): bicyclic nucleic acid (BNA)
  modified_base (2)..(2): bicyclic nucleic acid (BNA)
  modified_base (18)..(18): bicyclic nucleic acid (BNA)
  modified_base (19)..(19): bicyclic nucleic acid (BNA)
aguucuguccaagcccggt

SEQ ID NO: 11550 - RNA, 18 nt, Artificial Sequence
  source: /note="Description of Artificial Sequence: Synthetic oligonucleotide"
  source: /note="RNA"
  source: /note="5' tri-ethylene glycol (TEG)"
  modified_base (1)..(1): bicyclic nucleic acid (BNA)
  modified_base (2)..(2): bicyclic nucleic acid (BNA)
  modified_base (17)..(17): bicyclic nucleic acid (BNA)
  modified_base (18)..(18): bicyclic nucleic acid (BNA)
aguucuguccaagcccgg

SEQ ID NO: 11551 - RNA, 17 nt, Artificial Sequence
  source: /note="Description of Artificial Sequence: Synthetic oligonucleotide"
  source: /note="RNA"
  source: /note="5' tri-ethylene glycol (TEG)"
  modified_base (1)..(1): bicyclic nucleic acid (BNA)
  modified_base (2)..(2): bicyclic nucleic acid (BNA)
  modified_base (16)..(16): bicyclic nucleic acid (BNA)
  modified_base (17)..(17): bicyclic nucleic acid (BNA)
aguucuguccaagcccg

SEQ ID NO: 11552 - RNA, 16 nt, Artificial Sequence
  source: /note="Description of Artificial Sequence: Synthetic oligonucleotide"
  source: /note="RNA"
  source: /note="5' tri-ethylene glycol (TEG)"
  modified_base (1)..(1): bicyclic nucleic acid (BNA)
  modified_base (2)..(2): bicyclic nucleic acid (BNA)
  modified_base (15)..(15): bicyclic nucleic acid (BNA)
  modified_base (16)..(16): bicyclic nucleic acid (BNA)
aguucuguccaagccc

SEQ ID NO: 11553 - RNA, 15 nt, Artificial Sequence
  source: /note="Description of Artificial Sequence: Synthetic oligonucleotide"
  source: /note="RNA"
  source: /note="5' tri-ethylene glycol (TEG)"
  modified_base (1)..(1): bicyclic nucleic acid (BNA)
  modified_base (2)..(2): bicyclic nucleic acid (BNA)
  modified_base (14)..(14): bicyclic nucleic acid (BNA)
  modified_base (15)..(15): bicyclic nucleic acid (BNA)
aguucuguccaagcc

SEQ ID NO: 11554 - RNA, 14 nt, Artificial Sequence
  source: /note="Description of Artificial Sequence: Synthetic oligonucleotide"
  source: /note="RNA"
  source: /note="5' tri-ethylene glycol (TEG)"
  modified_base (1)..(1): bicyclic nucleic acid (BNA)
  modified_base (2)..(2): bicyclic nucleic acid (BNA)
  modified_base (13)..(13): bicyclic nucleic acid (BNA)
  modified_base (14)..(14): bicyclic nucleic acid (BNA)
aguucuguccaagc

SEQ ID NO: 11555 - RNA, 13 nt, Artificial Sequence
  source: /note="Description of Artificial Sequence: Synthetic oligonucleotide"
  source: /note="RNA"
  source: /note="5' tri-ethylene glycol (TEG)"
  modified_base (1)..(1): bicyclic nucleic acid (BNA)
  modified_base (2)..(2): bicyclic nucleic acid (BNA)
  modified_base (12)..(12): bicyclic nucleic acid (BNA)
  modified_base (13)..(13): bicyclic nucleic acid (BNA)
aguucuguccaag

SEQ ID NO: 11556 - RNA, 12 nt, Artificial Sequence
  source: /note="Description of Artificial Sequence: Synthetic oligonucleotide"
  source: /note="RNA"
  source: /note="5' tri-ethylene glycol (TEG)"
  modified_base (1)..(1): bicyclic nucleic acid (BNA)
  modified_base (2)..(2): bicyclic nucleic acid (BNA)
  modified_base (11)..(11): bicyclic nucleic acid (BNA)
  modified_base (12)..(12): bicyclic nucleic acid (BNA)
aguucuguccaa

SEQ ID NO: 11557 - RNA, 11 nt, Artificial Sequence
  source: /note="Description of Artificial Sequence: Synthetic oligonucleotide"
  source: /note="RNA"
  source: /note="5' tri-ethylene glycol (TEG)"
  modified_base (1)..(1): bicyclic nucleic acid (BNA)
  modified_base (2)..(2): bicyclic nucleic acid (BNA)
  modified_base (10)..(10): bicyclic nucleic acid (BNA)
  modified_base (11)..(11): bicyclic nucleic acid (BNA)
aguucugucca

SEQ ID NO: 11558 - RNA, 10 nt, Artificial Sequence
  source: /note="Description of Artificial Sequence: Synthetic oligonucleotide"
  source: /note="RNA"
  source: /note="5' tri-ethylene glycol (TEG)"
  modified_base (1)..(1): bicyclic nucleic acid (BNA)
  modified_base (2)..(2): bicyclic nucleic acid (BNA)
  modified_base (9)..(9): bicyclic nucleic acid (BNA)
  modified_base (10)..(10): bicyclic nucleic acid (BNA)
aguucugucc

SEQ ID NO: 11559 - DNA, 9 bp, Artificial Sequence
  source: /note="Description of Artificial Sequence: Synthetic oligonucleotide"
  source: /note="Description of Combined DNA/RNA Molecule: Synthetic oligonucleotide"
  source: /note="DNA/RNA"
  source: /note="5' tri-ethylene glycol (TEG)"
  modified_base (1)..(1): bicyclic nucleic acid (BNA)
  modified_base (2)..(2): bicyclic nucleic acid (BNA)
  modified_base (8)..(8): bicyclic nucleic acid (BNA)
  modified_base (9)..(9): bicyclic nucleic acid (BNA)
aguucugtc

SEQ ID NO: 11560 - DNA, 8 bp, Artificial Sequence
  source: /note="Description of Artificial Sequence: Synthetic oligonucleotide"
  source: /note="Description of Combined DNA/RNA Molecule: Synthetic oligonucleotide"
  source: /note="DNA/RNA"
  source: /note="5' tri-ethylene glycol (TEG)"
  modified_base (1)..(1): bicyclic nucleic acid (BNA)
  modified_base (2)..(2): bicyclic nucleic acid (BNA)
  modified_base (7)..(7): bicyclic nucleic acid (BNA)
  modified_base (8)..(8): bicyclic nucleic acid (BNA)
aguucugt

SEQ ID NO: 11561 - DNA, 20 bp, Artificial Sequence
  source: /note="Description of Artificial Sequence: Synthetic oligonucleotide"
  source: /note="Description of Combined DNA/RNA Molecule: Synthetic oligonucleotide"
  source: /note="DNA/RNA"
  source: /note="5' tri-ethylene glycol (TEG)"
  modified_base (1)..(1): bicyclic nucleic acid (BNA)
  modified_base (2)..(2): bicyclic nucleic acid (BNA)
  modified_base (19)..(19): bicyclic nucleic acid (BNA)
  modified_base (20)..(20): bicyclic nucleic acid (BNA)
aaguucuguccaagcccggt

SEQ ID NO: 11562 - RNA, 19 nt, Artificial Sequence
  source: /note="Description of Artificial Sequence: Synthetic oligonucleotide"
  source: /note="RNA"
  source: /note="5' tri-ethylene glycol (TEG)"
  modified_base (1)..(1): bicyclic nucleic acid (BNA)
  modified_base (2)..(2): bicyclic nucleic acid (BNA)
  modified_base (18)..(18): bicyclic nucleic acid (BNA)
  modified_base (19)..(19): bicyclic nucleic acid (BNA)
aaguucuguccaagcccgg

SEQ ID NO: 11563 - RNA, 18 nt, Artificial Sequence
  source: /note="Description of Artificial Sequence: Synthetic oligonucleotide"
  source: /note="RNA"
  source: /note="5' tri-ethylene glycol (TEG)"
  modified_base (1)..(1): bicyclic nucleic acid (BNA)
  modified_base (2)..(2): bicyclic nucleic acid (BNA)
  modified_base (17)..(17): bicyclic nucleic acid (BNA)
  modified_base (18)..(18): bicyclic nucleic acid (BNA)
aaguucuguccaagcccg

SEQ ID NO: 11564 - RNA, 17 nt, Artificial Sequence
  source: /note="Description of Artificial Sequence: Synthetic oligonucleotide"
  source: /note="RNA"
  source: /note="5' tri-ethylene glycol (TEG)"
  modified_base (1)..(1): bicyclic nucleic acid (BNA)
  modified_base (2)..(2): bicyclic nucleic acid (BNA)
  modified_base (16)..(16): bicyclic nucleic acid (BNA)
  modified_base (17)..(17): bicyclic nucleic acid (BNA)
aaguucuguccaagccc

SEQ ID NO: 11565 - RNA, 16 nt, Artificial Sequence
  source: /note="Description of Artificial Sequence: Synthetic oligonucleotide"
  source: /note="RNA"
  source: /note="5' tri-ethylene glycol (TEG)"
  modified_base (1)..(1): bicyclic nucleic acid (BNA)
  modified_base (2)..(2): bicyclic nucleic acid (BNA)
  modified_base (15)..(15): bicyclic nucleic acid (BNA)
  modified_base (16)..(16): bicyclic nucleic acid (BNA)
aaguucuguccaagcc

SEQ ID NO: 11566 - RNA, 15 nt, Artificial Sequence
  source: /note="Description of Artificial Sequence: Synthetic oligonucleotide"
  source: /note="RNA"
  source: /note="5' tri-ethylene glycol (TEG)"
  modified_base (1)..(1): bicyclic nucleic acid (BNA)
  modified_base (2)..(2): bicyclic nucleic acid (BNA)
  modified_base (14)..(14): bicyclic nucleic acid (BNA)
  modified_base (15)..(15): bicyclic nucleic acid (BNA)
aaguucuguccaagc

SEQ ID NO: 11567 - RNA, 14 nt, Artificial Sequence
  source: /note="Description of Artificial Sequence: Synthetic oligonucleotide"
  source: /note="RNA"
  source: /note="5' tri-ethylene glycol (TEG)"
  modified_base (1)..(1): bicyclic nucleic acid (BNA)
  modified_base (2)..(2): bicyclic nucleic acid (BNA)
  modified_base (13)..(13): bicyclic nucleic acid (BNA)
  modified_base (14)..(14): bicyclic nucleic acid (BNA)
aaguucuguccaag

SEQ ID NO: 11568 - RNA, 13 nt, Artificial Sequence
  source: /note="Description of Artificial Sequence: Synthetic oligonucleotide"
  source: /note="RNA"
  source: /note="5' tri-ethylene glycol (TEG)"
  modified_base (1)..(1): bicyclic nucleic acid (BNA)
  modified_base (2)..(2): bicyclic nucleic acid (BNA)
  modified_base (12)..(12): bicyclic nucleic acid (BNA)
  modified_base (13)..(13): bicyclic nucleic acid (BNA)
aaguucuguccaa

SEQ ID NO: 11569 - RNA, 12 nt, Artificial Sequence
  source: /note="Description of Artificial Sequence: Synthetic oligonucleotide"
  source: /note="RNA"
  source: /note="5' tri-ethylene glycol (TEG)"
  modified_base (1)..(1): bicyclic nucleic acid (BNA)
  modified_base (2)..(2): bicyclic nucleic acid (BNA)
  modified_base (11)..(11): bicyclic nucleic acid (BNA)
  modified_base (12)..(12): bicyclic nucleic acid (BNA)
aaguucugucca

SEQ ID NO: 11570 - RNA, 11 nt, Artificial Sequence
  source: /note="Description of Artificial Sequence: Synthetic oligonucleotide"
  source: /note="RNA"
  source: /note="5' tri-ethylene glycol (TEG)"
  modified_base (1)..(1): bicyclic nucleic acid (BNA)
  modified_base (2)..(2): bicyclic nucleic acid (BNA)
  modified_base (10)..(10): bicyclic nucleic acid (BNA)
  modified_base (11)..(11): bicyclic nucleic acid (BNA)
aaguucugucc

SEQ ID NO: 11571 - DNA, 10 bp, Artificial Sequence
  source: /note="Description of Artificial Sequence: Synthetic oligonucleotide"
  source: /note="Description of Combined DNA/RNA Molecule: Synthetic oligonucleotide"
  source: /note="DNA/RNA"
  source: /note="5' tri-ethylene glycol (TEG)"
  modified_base (1)..(1): bicyclic nucleic acid (BNA)
  modified_base (2)..(2): bicyclic nucleic acid (BNA)
  modified_base (9)..(9): bicyclic nucleic acid (BNA)
  modified_base (10)..(10): bicyclic nucleic acid (BNA)
aaguucugtc

SEQ ID NO: 11572 - DNA, 9 bp, Artificial Sequence
  source: /note="Description of Artificial Sequence: Synthetic oligonucleotide"
  source: /note="Description of Combined DNA/RNA Molecule: Synthetic oligonucleotide"
  source: /note="DNA/RNA"
  source: /note="5' tri-ethylene glycol (TEG)"
  modified_base (1)..(1): bicyclic nucleic acid (BNA)
  modified_base (2)..(2): bicyclic nucleic acid (BNA)
  modified_base (8)..(8): bicyclic nucleic acid (BNA)
  modified_base (9)..(9): bicyclic nucleic acid (BNA)
aaguucugt

SEQ ID NO: 11573 - DNA, 8 bp, Artificial Sequence
  source: /note="Description of Artificial Sequence: Synthetic oligonucleotide"
  source: /note="Description of Combined DNA/RNA Molecule: Synthetic oligonucleotide"
  source: /note="DNA/RNA"
  source: /note="5' tri-ethylene glycol (TEG)"
  modified_base (1)..(1): bicyclic nucleic acid (BNA)
  modified_base (2)..(2): bicyclic nucleic acid (BNA)
  modified_base (7)..(7): bicyclic nucleic acid (BNA)
  modified_base (8)..(8): bicyclic nucleic acid (BNA)
aaguuctg

SEQ ID NO: 11574 - DNA, 20 bp, Artificial Sequence
  source: /note="Description of Artificial Sequence: Synthetic oligonucleotide"
  source: /note="Description of Combined DNA/RNA Molecule: Synthetic oligonucleotide"
  source: /note="DNA/RNA"
  source: /note="5' tri-ethylene glycol (TEG)"
  modified_base (1)..(1): bicyclic nucleic acid (BNA)
  modified_base (2)..(2): bicyclic nucleic acid (BNA)
  modified_base (19)..(19): bicyclic nucleic acid (BNA)
  modified_base (20)..(20): bicyclic nucleic acid (BNA)
taaguucuguccaagcccgg

SEQ ID NO: 11575 - DNA, 19 bp, Artificial Sequence
  source: /note="Description of Artificial Sequence: Synthetic oligonucleotide"
  source: /note="Description of Combined DNA/RNA Molecule: Synthetic oligonucleotide"
  source: /note="DNA/RNA"
  source: /note="5' tri-ethylene glycol (TEG)"
  modified_base (1)..(1): bicyclic nucleic acid (BNA)
  modified_base (2)..(2): bicyclic nucleic acid (BNA)
  modified_base (18)..(18): bicyclic nucleic acid (BNA)
  modified_base (19)..(19): bicyclic nucleic acid (BNA)
taaguucuguccaagcccg

SEQ ID NO: 11576 - DNA, 18 bp, Artificial Sequence
  source: /note="Description of Artificial Sequence: Synthetic oligonucleotide"
  source: /note="Description of Combined DNA/RNA Molecule: Synthetic oligonucleotide"
  source: /note="DNA/RNA"
  source: /note="5' tri-ethylene glycol (TEG)"
  modified_base (1)..(1): bicyclic nucleic acid (BNA)
  modified_base (2)..(2): bicyclic nucleic acid (BNA)
  modified_base (17)..(17): bicyclic nucleic acid (BNA)
  modified_base (18)..(18): bicyclic nucleic acid (BNA)
taaguucuguccaagccc

SEQ ID NO: 11577 - DNA, 17 bp, Artificial Sequence
  source: /note="Description of Artificial Sequence: Synthetic oligonucleotide"
  source: /note="Description of Combined DNA/RNA Molecule: Synthetic oligonucleotide"
  source: /note="DNA/RNA"
  source: /note="5' tri-ethylene glycol (TEG)"
  modified_base (1)..(1): bicyclic nucleic acid (BNA)
  modified_base (2)..(2): bicyclic nucleic acid (BNA)
  modified_base (16)..(16): bicyclic nucleic acid (BNA)
  modified_base (17)..(17): bicyclic nucleic acid (BNA)
taaguucuguccaagcc

SEQ ID NO: 11578 - DNA, 16 bp, Artificial Sequence
  source: /note="Description of Artificial Sequence: Synthetic oligonucleotide"
  source: /note="Description of Combined DNA/RNA Molecule: Synthetic oligonucleotide"
  source: /note="DNA/RNA"
  source: /note="5' tri-ethylene glycol (TEG)"
  modified_base (1)..(1): bicyclic nucleic acid (BNA)
  modified_base (2)..(2): bicyclic nucleic acid (BNA)
  modified_base (15)..(15): bicyclic nucleic acid (BNA)
  modified_base (16)..(16): bicyclic nucleic acid (BNA)
taaguucuguccaagc

SEQ ID NO: 11579 - DNA, 14 bp, Artificial Sequence
  source: /note="Description of Artificial Sequence: Synthetic oligonucleotide"
  source: /note="Description of Combined DNA/RNA Molecule: Synthetic oligonucleotide"
  source: /note="DNA/RNA"
  source: /note="5' tri-ethylene glycol (TEG)"
  modified_base (1)..(1): bicyclic nucleic acid (BNA)
  modified_base (2)..(2): bicyclic nucleic acid (BNA)
  modified_base (13)..(13): bicyclic nucleic acid (BNA)
  modified_base (14)..(14): bicyclic nucleic acid (BNA)
taaguucuguccaa

SEQ ID NO: 11580 - DNA, 13 bp, Artificial Sequence
  source: /note="Description of Artificial Sequence: Synthetic oligonucleotide"
  source: /note="Description of Combined DNA/RNA Molecule: Synthetic oligonucleotide"
  source: /note="DNA/RNA"
  source: /note="5' tri-ethylene glycol (TEG)"
  modified_base (1)..(1): bicyclic nucleic acid (BNA)
  modified_base (2)..(2): bicyclic nucleic acid (BNA)
  modified_base (12)..(12): bicyclic nucleic acid (BNA)
  modified_base (13)..(13): bicyclic nucleic acid (BNA)
taaguucugucca

SEQ ID NO: 11581 - DNA, 12 bp, Artificial Sequence
  source: /note="Description of Artificial Sequence: Synthetic oligonucleotide"
  source: /note="Description of Combined DNA/RNA Molecule: Synthetic oligonucleotide"
  source: /note="DNA/RNA"
  source: /note="5' tri-ethylene glycol (TEG)"
  modified_base (1)..(1): bicyclic nucleic acid (BNA)
  modified_base (2)..(2): bicyclic nucleic acid (BNA)
  modified_base (11)..(11): bicyclic nucleic acid (BNA)
  modified_base (12)..(12): bicyclic nucleic acid (BNA)
taaguucugucc

SEQ ID NO: 11582 - DNA, 11 bp, Artificial Sequence
  source: /note="Description of Artificial Sequence: Synthetic oligonucleotide"
  source: /note="Description of Combined DNA/RNA Molecule: Synthetic oligonucleotide"
  source: /note="DNA/RNA"
  source: /note="5' tri-ethylene glycol (TEG)"
  modified_base (1)..(1): bicyclic nucleic acid (BNA)
  modified_base (2)..(2): bicyclic nucleic acid (BNA)
  modified_base (10)..(10): bicyclic nucleic acid (BNA)
  modified_base (11)..(11): bicyclic nucleic acid (BNA)
taaguucugtc

SEQ ID NO: 11583 - DNA, 10 bp, Artificial Sequence
  source: /note="Description of Artificial Sequence: Synthetic oligonucleotide"
  source: /note="Description of Combined DNA/RNA Molecule: Synthetic oligonucleotide"
  source: /note="DNA/RNA"
  source: /note="5' tri-ethylene glycol (TEG)"
  modified_base (1)..(1): bicyclic nucleic acid (BNA)
  modified_base (2)..(2): bicyclic nucleic acid (BNA)
  modified_base (9)..(9): bicyclic nucleic acid (BNA)
  modified_base (10)..(10): bicyclic nucleic acid (BNA)
taaguucugt

SEQ ID NO: 11584 - DNA, 9 bp, Artificial Sequence
  source: /note="Description of Artificial Sequence: Synthetic oligonucleotide"
  source: /note="Description of Combined DNA/RNA Molecule: Synthetic oligonucleotide"
  source: /note="DNA/RNA"
  source: /note="5' tri-ethylene glycol (TEG)"
  modified_base (1)..(1): bicyclic nucleic acid (BNA)
  modified_base (2)..(2): bicyclic nucleic acid (BNA)
  modified_base (8)..(8): bicyclic nucleic acid (BNA)
  modified_base (9)..(9): bicyclic nucleic acid (BNA)
taaguuctg

SEQ ID NO: 11585 - DNA, 8 bp, Artificial Sequence
  source: /note="Description of Artificial Sequence: Synthetic oligonucleotide"
  source: /note="Description of Combined DNA/RNA Molecule: Synthetic oligonucleotide"
  source: /note="DNA/RNA"
  source: /note="5' tri-ethylene glycol (TEG)"
  modified_base (1)..(1): bicyclic nucleic acid (BNA)
  modified_base (2)..(2): bicyclic nucleic acid (BNA)
  modified_base (7)..(7): bicyclic nucleic acid (BNA)
  modified_base (8)..(8): bicyclic nucleic acid (BNA)
taaguuct

SEQ ID NO: 11586 - DNA, 20 bp, Artificial Sequence
  source: /note="Description of Artificial Sequence: Synthetic oligonucleotide"
  source: /note="Description of Combined DNA/RNA Molecule: Synthetic oligonucleotide"
  source: /note="DNA/RNA"
  source: /note="5' tri-ethylene glycol (TEG)"
  modified_base (1)..(1): bicyclic nucleic acid (BNA)
  modified_base (2)..(2): bicyclic nucleic acid (BNA)
  modified_base (19)..(19): bicyclic nucleic acid (BNA)
  modified_base (20)..(20): bicyclic nucleic acid (BNA)
gtaaguucuguccaagcccg

SEQ ID NO: 11587 - DNA, 19 bp, Artificial Sequence
  source: /note="Description of Artificial Sequence: Synthetic oligonucleotide"
  source: /note="Description of Combined DNA/RNA Molecule: Synthetic oligonucleotide"
  source: /note="DNA/RNA"
  source: /note="5' tri-ethylene glycol (TEG)"
  modified_base (1)..(1): bicyclic nucleic acid (BNA)
  modified_base (2)..(2): bicyclic nucleic acid (BNA)
  modified_base (18)..(18): bicyclic nucleic acid (BNA)
  modified_base (19)..(19): bicyclic nucleic acid (BNA)
gtaaguucuguccaagccc

SEQ ID NO: 11588 - DNA, 17 bp, Artificial Sequence
  source: /note="Description of Artificial Sequence: Synthetic oligonucleotide"
  source: /note="Description of Combined DNA/RNA Molecule: Synthetic oligonucleotide"
  source: /note="DNA/RNA"
  source: /note="5' tri-ethylene glycol (TEG)"
  modified_base (1)..(1): bicyclic nucleic acid (BNA)
  modified_base (2)..(2): bicyclic nucleic acid (BNA)
  modified_base (16)..(16): bicyclic nucleic acid (BNA)
  modified_base (17)..(17): bicyclic nucleic acid (BNA)
gtaaguucuguccaagc

SEQ ID NO: 11589 - DNA, 16 bp, Artificial Sequence
  source: /note="Description of Artificial Sequence: Synthetic oligonucleotide"
  source: /note="Description of Combined DNA/RNA Molecule: Synthetic oligonucleotide"
  source: /note="DNA/RNA"
  source: /note="5' tri-ethylene glycol (TEG)"
  modified_base (1)..(1): bicyclic nucleic acid (BNA)
  modified_base (2)..(2): bicyclic nucleic acid (BNA)
  modified_base (15)..(15): bicyclic nucleic acid (BNA)
  modified_base (16)..(16): bicyclic nucleic acid (BNA)
gtaaguucuguccaag

SEQ ID NO: 11590 - DNA, 15 bp, Artificial Sequence
  source: /note="Description of Artificial Sequence: Synthetic oligonucleotide"
  source: /note="Description of Combined DNA/RNA Molecule: Synthetic oligonucleotide"
  source: /note="DNA/RNA"
  source: /note="5' tri-ethylene glycol (TEG)"
  modified_base (1)..(1): bicyclic nucleic acid (BNA)
  modified_base (2)..(2): bicyclic nucleic acid (BNA)
  modified_base (14)..(14): bicyclic nucleic acid (BNA)
  modified_base (15)..(15): bicyclic nucleic acid (BNA)
gtaaguucuguccaa

SEQ ID NO: 11591 - DNA, 14 bp, Artificial Sequence
  source: /note="Description of Artificial Sequence: Synthetic oligonucleotide"
  source: /note="Description of Combined DNA/RNA Molecule: Synthetic oligonucleotide"
  source: /note="DNA/RNA"
  source: /note="5' tri-ethylene glycol (TEG)"
  modified_base (1)..(1): bicyclic nucleic acid (BNA)
  modified_base (2)..(2): bicyclic nucleic acid (BNA)
  modified_base (13)..(13): bicyclic nucleic acid (BNA)
  modified_base (14)..(14): bicyclic nucleic acid (BNA)
gtaaguucugucca

SEQ ID NO: 11592 - DNA, 13 bp, Artificial Sequence
  source: /note="Description of Artificial Sequence: Synthetic oligonucleotide"
  source: /note="Description of Combined DNA/RNA Molecule: Synthetic oligonucleotide"
  source: /note="DNA/RNA"
  source: /note="5' tri-ethylene glycol (TEG)"
  modified_base (1)..(1): bicyclic nucleic acid (BNA)
  modified_base (2)..(2): bicyclic nucleic acid (BNA)
  modified_base (12)..(12): bicyclic nucleic acid (BNA)
  modified_base (13)..(13): bicyclic nucleic acid (BNA)
gtaaguucugucc

SEQ ID NO: 11593 - DNA, 12 bp, Artificial Sequence
  source: /note="Description of Artificial Sequence: Synthetic oligonucleotide"
  source: /note="Description of Combined DNA/RNA Molecule: Synthetic oligonucleotide"
  source: /note="DNA/RNA"
  source: /note="5' tri-ethylene glycol (TEG)"
  modified_base (1)..(1): bicyclic nucleic acid (BNA)
  modified_base (2)..(2): bicyclic nucleic acid (BNA)
  modified_base (11)..(11): bicyclic nucleic acid (BNA)
  modified_base (12)..(12): bicyclic nucleic acid (BNA)
gtaaguucugtc

SEQ ID NO: 11594 - DNA, 11 bp, Artificial Sequence
  source: /note="Description of Artificial Sequence: Synthetic oligonucleotide"
  source: /note="Description of Combined DNA/RNA Molecule: Synthetic oligonucleotide"
  source: /note="DNA/RNA"
  source: /note="5' tri-ethylene glycol (TEG)"
  modified_base (1)..(1): bicyclic nucleic acid (BNA)
  modified_base (2)..(2): bicyclic nucleic acid (BNA)
  modified_base (10)..(10): bicyclic nucleic acid (BNA)
  modified_base (11)..(11): bicyclic nucleic acid (BNA)
gtaaguucugt

SEQ ID NO: 11595 - DNA, 10 bp, Artificial Sequence
  source: /note="Description of Artificial Sequence: Synthetic oligonucleotide"
  source: /note="Description of Combined DNA/RNA Molecule: Synthetic oligonucleotide"
  source: /note="DNA/RNA"
  source: /note="5' tri-ethylene glycol (TEG)"
  modified_base (1)..(1): bicyclic nucleic acid (BNA)
  modified_base (2)..(2): bicyclic nucleic acid (BNA)
  modified_base (9)..(9): bicyclic nucleic acid (BNA)
  modified_base (10)..(10): bicyclic nucleic acid (BNA)
gtaaguuctg

SEQ ID NO: 11596 - DNA, 9 bp, Artificial Sequence
  source: /note="Description of Artificial Sequence: Synthetic oligonucleotide"
  source: /note="Description of Combined DNA/RNA Molecule: Synthetic oligonucleotide"
  source: /note="DNA/RNA"
  source: /note="5' tri-ethylene glycol (TEG)"
  modified_base (1)..(1): bicyclic nucleic acid (BNA)
  modified_base (2)..(2): bicyclic nucleic acid (BNA)
  modified_base (8)..(8): bicyclic nucleic acid (BNA)
  modified_base (9)..(9): bicyclic nucleic acid (BNA)
gtaaguuct

SEQ ID NO: 11597 - DNA, 8 bp, Artificial Sequence
  source: /note="Description of Artificial Sequence: Synthetic oligonucleotide"
  source: /note="Description of Combined DNA/RNA Molecule: Synthetic oligonucleotide"
  source: /note="DNA/RNA"
  source: /note="5' tri-ethylene glycol (TEG)"
  modified_base (1)..(1): bicyclic nucleic acid (BNA)
  modified_base (2)..(2): bicyclic nucleic acid (BNA)
  modified_base (7)..(7): bicyclic nucleic acid (BNA)
  modified_base (8)..(8): bicyclic nucleic acid (BNA)
gtaagutc

SEQ ID NO: 11598 - RNA, 20 nt, Artificial Sequence
  source: /note="Description of Artificial Sequence: Synthetic oligonucleotide"
  source: /note="RNA"
  source: /note="5' tri-ethylene glycol (TEG)"
  modified_base (1)..(1): bicyclic nucleic acid (BNA)
  modified_base (2)..(2): bicyclic nucleic acid (BNA)
  modified_base (19)..(19): bicyclic nucleic acid (BNA)
  modified_base (20)..(20): bicyclic nucleic acid (BNA)
gguaaguucuguccaagccc

SEQ ID NO: 11599 - RNA, 19 nt, Artificial Sequence
  source: /note="Description of Artificial Sequence: Synthetic oligonucleotide"
  source: /note="RNA"
  source: /note="5' tri-ethylene glycol (TEG)"
  modified_base (1)..(1): bicyclic nucleic acid (BNA)
  modified_base (2)..(2): bicyclic nucleic acid (BNA)
  modified_base (18)..(18): bicyclic nucleic acid (BNA)
  modified_base (19)..(19): bicyclic nucleic acid (BNA)
gguaaguucuguccaagcc

SEQ ID NO: 11600 - RNA, 17 nt, Artificial Sequence
  source: /note="Description of Artificial Sequence: Synthetic oligonucleotide"
  source: /note="RNA"
  source: /note="5' tri-ethylene glycol (TEG)"
  modified_base (1)..(1): bicyclic nucleic acid (BNA)
  modified_base (2)..(2): bicyclic nucleic acid (BNA)
  modified_base (16)..(16): bicyclic nucleic acid (BNA)
  modified_base (17)..(17): bicyclic nucleic acid (BNA)
gguaaguucuguccaag

SEQ ID NO: 11601 - RNA, 16 nt, Artificial Sequence
  source: /note="Description of Artificial Sequence: Synthetic oligonucleotide"
  source: /note="RNA"
  source: /note="5' tri-ethylene glycol (TEG)"
  modified_base (1)..(1): bicyclic nucleic acid (BNA)
  modified_base (2)..(2): bicyclic nucleic acid (BNA)
  modified_base (15)..(15): bicyclic nucleic acid (BNA)
  modified_base (16)..(16): bicyclic nucleic acid (BNA)
gguaaguucuguccaa

SEQ ID NO: 11602 - RNA, 15 nt, Artificial Sequence
  source: /note="Description of Artificial Sequence: Synthetic oligonucleotide"
  source: /note="RNA"
  source: /note="5' tri-ethylene glycol (TEG)"
  modified_base (1)..(1): bicyclic nucleic acid (BNA)
  modified_base (2)..(2): bicyclic nucleic acid (BNA)
  modified_base (14)..(14): bicyclic nucleic acid (BNA)
  modified_base (15)..(15): bicyclic nucleic acid (BNA)
gguaaguucugucca

SEQ ID NO: 11603 - RNA, 14 nt, Artificial Sequence
  source: /note="Description of Artificial Sequence: Synthetic oligonucleotide"
  source: /note="RNA"
  source: /note="5' tri-ethylene glycol (TEG)"
  modified_base (1)..(1): bicyclic nucleic acid (BNA)
  modified_base (2)..(2): bicyclic nucleic acid (BNA)
  modified_base (13)..(13): bicyclic nucleic acid (BNA)
  modified_base (14)..(14): bicyclic nucleic acid (BNA)
gguaaguucugucc

SEQ ID NO: 11604 - DNA, 13 bp, Artificial Sequence
  source: /note="Description of Artificial Sequence: Synthetic oligonucleotide"
  source: /note="Description of Combined DNA/RNA Molecule: Synthetic oligonucleotide"
  source: /note="DNA/RNA"
  source: /note="5' tri-ethylene glycol (TEG)"
  modified_base (1)..(1): bicyclic nucleic acid (BNA)
  modified_base (2)..(2): bicyclic nucleic acid (BNA)
  modified_base (12)..(12): bicyclic nucleic acid (BNA)
  modified_base (13)..(13): bicyclic nucleic acid (BNA)
gguaaguucugtc

SEQ ID NO: 11605 - DNA, 12 bp, Artificial Sequence
  source: /note="Description of Artificial Sequence: Synthetic oligonucleotide"
  source: /note="Description of Combined DNA/RNA Molecule: Synthetic oligonucleotide"
  source: /note="DNA/RNA"
  source: /note="5' tri-ethylene glycol (TEG)"
  modified_base (1)..(1): bicyclic nucleic acid (BNA)
  modified_base (2)..(2): bicyclic nucleic acid (BNA)
  modified_base (11)..(11): bicyclic nucleic acid (BNA)
  modified_base (12)..(12): bicyclic nucleic acid (BNA)
gguaaguucugt

SEQ ID NO: 11606 - DNA, 11 bp, Artificial Sequence
  source: /note="Description of Artificial Sequence: Synthetic oligonucleotide"
  source: /note="Description of Combined DNA/RNA Molecule: Synthetic oligonucleotide"
  source: /note="DNA/RNA"
  source: /note="5' tri-ethylene glycol (TEG)"
  modified_base (1)..(1): bicyclic nucleic acid (BNA)
  modified_base (2)..(2): bicyclic nucleic acid (BNA)
  modified_base (10)..(10): bicyclic nucleic acid (BNA)
  modified_base (11)..(11): bicyclic nucleic acid (BNA)
gguaaguuctg

SEQ ID NO: 11607 - DNA, 10 bp, Artificial Sequence
  source: /note="Description of Artificial Sequence: Synthetic oligonucleotide"
  source: /note="Description of Combined DNA/RNA Molecule: Synthetic oligonucleotide"
  source: /note="DNA/RNA"
  source: /note="5' tri-ethylene glycol (TEG)"
  modified_base (1)..(1): bicyclic nucleic acid (BNA)
  modified_base (2)..(2): bicyclic nucleic acid (BNA)
  modified_base (9)..(9): bicyclic nucleic acid (BNA)
  modified_base (10)..(10): bicyclic nucleic acid (BNA)
gguaaguuct

SEQ ID NO: 11608 - DNA, 9 bp, Artificial Sequence
  source: /note="Description of Artificial Sequence: Synthetic oligonucleotide"
  source: /note="Description of Combined DNA/RNA Molecule: Synthetic oligonucleotide"
  source: /note="DNA/RNA"
  source: /note="5' tri-ethylene glycol (TEG)"
  modified_base (1)..(1): bicyclic nucleic acid (BNA)
  modified_base (2)..(2): bicyclic nucleic acid (BNA)
  modified_base (8)..(8): bicyclic nucleic acid (BNA)
  modified_base (9)..(9): bicyclic nucleic acid (BNA)
gguaagutc

SEQ ID NO: 11609 - DNA, 8 bp, Artificial Sequence
  source: /note="Description of Artificial Sequence: Synthetic oligonucleotide"
  source: /note="Description of Combined DNA/RNA Molecule: Synthetic oligonucleotide"
  source: /note="DNA/RNA"
  source: /note="5' tri-ethylene glycol (TEG)"
  modified_base (1)..(1): bicyclic nucleic acid (BNA)
  modified_base (2)..(2): bicyclic nucleic acid (BNA)
  modified_base (7)..(7): bicyclic nucleic acid (BNA)
  modified_base (8)..(8): bicyclic nucleic acid (BNA)
gguaagtt

SEQ ID NO: 11610 - RNA, 20 nt, Artificial Sequence
  source: /note="Description of Artificial Sequence: Synthetic oligonucleotide"
  source: /note="RNA"
  source: /note="5' tri-ethylene glycol (TEG)"
  modified_base (1)..(1): bicyclic nucleic acid (BNA)
  modified_base (2)..(2): bicyclic nucleic acid (BNA)
  modified_base (19)..(19): bicyclic nucleic acid (BNA)
  modified_base (20)..(20): bicyclic nucleic acid (BNA)
cgguaaguucuguccaagcc

SEQ ID NO: 11611 - RNA, 19 nt, Artificial Sequence
  source: /note="Description of Artificial Sequence: Synthetic oligonucleotide"
  source: /note="RNA"
  source: /note="5' tri-ethylene glycol (TEG)"
  modified_base (1)..(1): bicyclic nucleic acid (BNA)
  modified_base (2)..(2): bicyclic nucleic acid (BNA)
  modified_base (18)..(18): bicyclic nucleic acid (BNA)
  modified_base (19)..(19): bicyclic nucleic acid (BNA)
cgguaaguucuguccaagc

SEQ ID NO: 11612 - RNA, 18 nt, Artificial Sequence
  source: /note="Description of Artificial Sequence: Synthetic oligonucleotide"
  source: /note="RNA"
  source: /note="5' tri-ethylene glycol (TEG)"
  modified_base (1)..(1): bicyclic nucleic acid (BNA)
  modified_base (2)..(2): bicyclic nucleic acid (BNA)
  modified_base (17)..(17): bicyclic nucleic acid (BNA)
  modified_base (18)..(18): bicyclic nucleic acid (BNA)
cgguaaguucuguccaag

SEQ ID NO: 11613 - RNA, 17 nt, Artificial Sequence
  source: /note="Description of Artificial Sequence: Synthetic oligonucleotide"
  source: /note="RNA"
  source: /note="5' tri-ethylene glycol (TEG)"
  modified_base (1)..(1): bicyclic nucleic acid (BNA)
  modified_base (2)..(2): bicyclic nucleic acid (BNA)
  modified_base (16)..(16): bicyclic nucleic acid (BNA)
  modified_base (17)..(17): bicyclic nucleic acid (BNA)
cgguaaguucuguccaa

SEQ ID NO: 11614 - RNA, 16 nt, Artificial Sequence
  source: /note="Description of Artificial Sequence: Synthetic oligonucleotide"
  source: /note="RNA"
  source: /note="5' tri-ethylene glycol (TEG)"
  modified_base (1)..(1): bicyclic nucleic acid (BNA)
  modified_base (2)..(2): bicyclic nucleic acid (BNA)
  modified_base (15)..(15): bicyclic nucleic acid (BNA)
  modified_base (16)..(16): bicyclic nucleic acid (BNA)
cgguaaguucugucca

SEQ ID NO: 11615 - RNA, 15 nt, Artificial Sequence
  source: /note="Description of Artificial Sequence: Synthetic oligonucleotide"
  source: /note="RNA"
  source: /note="5' tri-ethylene glycol (TEG)"
  modified_base (1)..(1): bicyclic nucleic acid (BNA)
  modified_base (2)..(2): bicyclic nucleic acid (BNA)
  modified_base (14)..(14): bicyclic nucleic acid (BNA)
  modified_base (15)..(15): bicyclic nucleic acid (BNA)
cgguaaguucugucc

SEQ ID NO: 11616 - DNA, 14 bp, Artificial Sequence
  source: /note="Description of Artificial Sequence: Synthetic oligonucleotide"
  source: /note="Description of Combined DNA/RNA Molecule: Synthetic oligonucleotide"
  source: /note="DNA/RNA"
  source: /note="5' tri-ethylene glycol (TEG)"
  modified_base (1)..(1): bicyclic nucleic acid (BNA)
  modified_base (2)..(2): bicyclic nucleic acid (BNA)
  modified_base (13)..(13): bicyclic nucleic acid (BNA)
  modified_base (14)..(14): bicyclic nucleic acid (BNA)
cgguaaguucugtc

SEQ ID NO: 11617 - DNA, 13 bp, Artificial Sequence
  source: /note="Description of Artificial Sequence: Synthetic oligonucleotide"
  source: /note="Description of Combined DNA/RNA Molecule: Synthetic oligonucleotide"
  source: /note="DNA/RNA"
  source: /note="5' tri-ethylene glycol (TEG)"
  modified_base (1)..(1): bicyclic nucleic acid (BNA)
  modified_base (2)..(2): bicyclic nucleic acid (BNA)
  modified_base (12)..(12): bicyclic nucleic acid (BNA)
  modified_base (13)..(13): bicyclic nucleic acid (BNA)
cgguaaguucugt

SEQ ID NO: 11618 - DNA, 12 bp, Artificial Sequence
  source: /note="Description of Artificial Sequence: Synthetic oligonucleotide"
  source: /note="Description of Combined DNA/RNA Molecule: Synthetic oligonucleotide"
  source: /note="DNA/RNA"
  source: /note="5' tri-ethylene glycol (TEG)"
  modified_base (1)..(1): bicyclic nucleic acid (BNA)
  modified_base (2)..(2): bicyclic nucleic acid (BNA)
  modified_base (11)..(11): bicyclic nucleic acid (BNA)
  modified_base (12)..(12): bicyclic nucleic acid (BNA)
cgguaaguuctg

SEQ ID NO: 11619 - DNA, 11 bp, Artificial Sequence
  source: /note="Description of Artificial Sequence: Synthetic oligonucleotide"
  source: /note="Description of Combined DNA/RNA Molecule: Synthetic oligonucleotide"
  source: /note="DNA/RNA"
  source: /note="5' tri-ethylene glycol (TEG)"
  modified_base (1)..(1): bicyclic nucleic acid (BNA)
  modified_base (2)..(2): bicyclic nucleic acid (BNA)
  modified_base (10)..(10): bicyclic nucleic acid (BNA)
  modified_base (11)..(11): bicyclic nucleic acid (BNA)
cgguaaguuct

SEQ ID NO: 11620 - DNA, 10 bp, Artificial Sequence
  source: /note="Description of Artificial Sequence: Synthetic oligonucleotide"
  source: /note="Description of Combined DNA/RNA Molecule: Synthetic oligonucleotide"
  source: /note="DNA/RNA"
  source: /note="5' tri-ethylene glycol (TEG)"
  modified_base (1)..(1): bicyclic nucleic acid (BNA)
  modified_base (2)..(2): bicyclic nucleic acid (BNA)
  modified_base (9)..(9): bicyclic nucleic acid (BNA)
  modified_base (10)..(10): bicyclic nucleic acid (BNA)
cgguaagutc

SEQ ID NO: 11621 - DNA, 9 bp, Artificial Sequence
  source: /note="Description of Artificial Sequence: Synthetic oligonucleotide"
  source: /note="Description of Combined DNA/RNA Molecule: Synthetic oligonucleotide"
  source: /note="DNA/RNA"
  source: /note="5' tri-ethylene glycol (TEG)"
  modified_base (1)..(1): bicyclic nucleic acid (BNA)
  modified_base (2)..(2): bicyclic nucleic acid (BNA)
  modified_base (8)..(8): bicyclic nucleic acid (BNA)
  modified_base (9)..(9): bicyclic nucleic acid (BNA)
cgguaagtt

SEQ ID NO: 11622 - DNA, 8 bp, Artificial Sequence
  source: /note="Description of Artificial Sequence: Synthetic oligonucleotide"
  source: /note="Description of Combined DNA/RNA Molecule: Synthetic oligonucleotide"
  source: /note="DNA/RNA"
  source: /note="5' tri-ethylene glycol (TEG)"
  modified_base (1)..(1): bicyclic nucleic acid (BNA)
  modified_base (2)..(2): bicyclic nucleic acid (BNA)
  modified_base (7)..(7): bicyclic nucleic acid (BNA)
  modified_base (8)..(8): bicyclic nucleic acid (BNA)
cgguaagt

SEQ ID NO: 11623 - DNA, 20 bp, Artificial Sequence
  source: /note="Description of Artificial Sequence: Synthetic oligonucleotide"
  source: /note="Description of Combined DNA/RNA Molecule: Synthetic oligonucleotide"
  source: /note="DNA/RNA"
  source: /note="5' tri-ethylene glycol (TEG)"
  modified_base (1)..(1): bicyclic nucleic acid (BNA)
  modified_base (2)..(2): bicyclic nucleic acid (BNA)
  modified_base (19)..(19): bicyclic nucleic acid (BNA)
  modified_base (20)..(20): bicyclic nucleic acid (BNA)
tcgguaaguucuguccaagc

SEQ ID NO: 11624 - DNA, 19 bp, Artificial Sequence
  source: /note="Description of Artificial Sequence: Synthetic oligonucleotide"
  source: /note="Description of Combined DNA/RNA Molecule: Synthetic oligonucleotide"
  source: /note="DNA/RNA"
  source: /note="5' tri-ethylene glycol (TEG)"
  modified_base (1)..(1): bicyclic nucleic acid (BNA)
  modified_base (2)..(2): bicyclic nucleic acid (BNA)
  modified_base (18)..(18): bicyclic nucleic acid (BNA)
  modified_base (19)..(19): bicyclic nucleic acid (BNA)
tcgguaaguucuguccaag

SEQ ID NO: 11625 - DNA, 18 bp, Artificial Sequence
  source: /note="Description of Artificial Sequence: Synthetic oligonucleotide"
  source: /note="Description of Combined DNA/RNA Molecule: Synthetic oligonucleotide"
  source: /note="DNA/RNA"
  source: /note="5' tri-ethylene glycol (TEG)"
  modified_base (1)..(1): bicyclic nucleic acid (BNA)
  modified_base (2)..(2): bicyclic nucleic acid (BNA)
  modified_base (17)..(17): bicyclic nucleic acid (BNA)
  modified_base (18)..(18): bicyclic nucleic acid (BNA)
tcgguaaguucuguccaa

SEQ ID NO: 11626 - DNA, 17 bp, Artificial Sequence
  source: /note="Description of Artificial Sequence: Synthetic oligonucleotide"
  source: /note="Description of Combined DNA/RNA Molecule: Synthetic oligonucleotide"
  source: /note="DNA/RNA"
  source: /note="5' tri-ethylene glycol (TEG)"
  modified_base (1)..(1): bicyclic nucleic acid (BNA)
  modified_base (2)..(2): bicyclic nucleic acid (BNA)
  modified_base (16)..(16): bicyclic nucleic acid (BNA)
  modified_base (17)..(17): bicyclic nucleic acid (BNA)
tcgguaaguucugucca

SEQ ID NO: 11627 - DNA, 16 bp, Artificial Sequence
  source: /note="Description of Artificial Sequence: Synthetic oligonucleotide"
  source: /note="Description of Combined DNA/RNA Molecule: Synthetic oligonucleotide"
  source: /note="DNA/RNA"
  source: /note="5' tri-ethylene glycol (TEG)"
  modified_base (1)..(1): bicyclic nucleic acid (BNA)
  modified_base (2)..(2): bicyclic nucleic acid (BNA)
  modified_base (15)..(15): bicyclic nucleic acid (BNA)
  modified_base (16)..(16): bicyclic nucleic acid (BNA)
tcgguaaguucugucc

SEQ ID NO: 11628 - DNA, 15 bp, Artificial Sequence
  source: /note="Description of Artificial Sequence: Synthetic oligonucleotide"
  source: /note="Description of Combined DNA/RNA Molecule: Synthetic oligonucleotide"
  source: /note="DNA/RNA"
  source: /note="5' tri-ethylene glycol (TEG)"
  modified_base (1)..(1): bicyclic nucleic acid (BNA)
  modified_base (2)..(2): bicyclic nucleic acid (BNA)
  modified_base (14)..(14): bicyclic nucleic acid (BNA)
  modified_base (15)..(15): bicyclic nucleic acid (BNA)
tcgguaaguucugtc

SEQ ID NO: 11629 - DNA, 14 bp, Artificial Sequence
  source: /note="Description of Artificial Sequence: Synthetic oligonucleotide"
  source: /note="Description of Combined DNA/RNA Molecule: Synthetic oligonucleotide"
  source: /note="DNA/RNA"
  source: /note="5' tri-ethylene glycol (TEG)"
  modified_base (1)..(1): bicyclic nucleic acid (BNA)
  modified_base (2)..(2): bicyclic nucleic acid (BNA)
  modified_base (13)..(13): bicyclic nucleic acid (BNA)
  modified_base (14)..(14): bicyclic nucleic acid (BNA)
tcgguaaguucugt

SEQ ID NO: 11630 - DNA, 13 bp, Artificial Sequence
  source: /note="Description of Artificial Sequence: Synthetic oligonucleotide"
  source: /note="Description of Combined DNA/RNA Molecule: Synthetic oligonucleotide"
  source: /note="DNA/RNA"
  source: /note="5' tri-ethylene glycol (TEG)"
  modified_base (1)..(1): bicyclic nucleic acid (BNA)
  modified_base (2)..(2): bicyclic nucleic acid (BNA)
  modified_base (12)..(12): bicyclic nucleic acid (BNA)
  modified_base (13)..(13): bicyclic nucleic acid (BNA)
tcgguaaguuctg

SEQ ID NO: 11631 - DNA, 12 bp, Artificial Sequence
  source: /note="Description of Artificial Sequence: Synthetic oligonucleotide"
  source: /note="Description of Combined DNA/RNA Molecule: Synthetic oligonucleotide"
  source: /note="DNA/RNA"
  source: /note="5' tri-ethylene glycol (TEG)"
  modified_base (1)..(1): bicyclic nucleic acid (BNA)
  modified_base (2)..(2): bicyclic nucleic acid (BNA)
  modified_base (11)..(11): bicyclic nucleic acid (BNA)
  modified_base (12)..(12): bicyclic nucleic acid (BNA)
tcgguaaguuct

SEQ ID NO: 11632 - DNA, 11 bp, Artificial Sequence
  source: /note="Description of Artificial Sequence: Synthetic oligonucleotide"
  source: /note="Description of Combined DNA/RNA Molecule: Synthetic oligonucleotide"
  source: /note="DNA/RNA"
  source: /note="5' tri-ethylene glycol (TEG)"
  modified_base (1)..(1): bicyclic nucleic acid (BNA)
  modified_base (2)..(2): bicyclic nucleic acid (BNA)
  modified_base (10)..(10): bicyclic nucleic acid (BNA)
  modified_base (11)..(11): bicyclic nucleic acid (BNA)
tcgguaagutc

SEQ ID NO: 11633 - DNA, 10 bp, Artificial Sequence
  source: /note="Description of Artificial Sequence: Synthetic oligonucleotide"
  source: /note="Description of Combined DNA/RNA Molecule: Synthetic oligonucleotide"
  source: /note="DNA/RNA"
  source: /note="5' tri-ethylene glycol (TEG)"
  modified_base (1)..(1): bicyclic nucleic acid (BNA)
  modified_base (2)..(2): bicyclic nucleic acid (BNA)
  modified_base (9)..(9): bicyclic nucleic acid (BNA)
  modified_base (10)..(10): bicyclic nucleic acid (BNA)
tcgguaagtt

SEQ ID NO: 11634 - DNA, 9 bp, Artificial Sequence
  source: /note="Description of Artificial Sequence: Synthetic oligonucleotide"
  source: /note="Description of Combined DNA/RNA Molecule: Synthetic oligonucleotide"
  source: /note="DNA/RNA"
  source: /note="5' tri-ethylene glycol (TEG)"
  modified_base (1)..(1): bicyclic nucleic acid (BNA)
  modified_base (2)..(2): bicyclic nucleic acid (BNA)
  modified_base (8)..(8): bicyclic nucleic acid (BNA)
  modified_base (9)..(9): bicyclic nucleic acid (BNA)
tcgguaagt

SEQ ID NO: 11635 - DNA, 20 bp, Artificial Sequence
  source: /note="Description of Artificial Sequence: Synthetic oligonucleotide"
  source: /note="Description of Combined DNA/RNA Molecule: Synthetic oligonucleotide"
  source: /note="DNA/RNA"
  source: /note="5' tri-ethylene glycol (TEG)"
  modified_base (1)..(1): bicyclic nucleic acid (BNA)
  modified_base (2)..(2): bicyclic nucleic acid (BNA)
  modified_base (19)..(19): bicyclic nucleic acid (BNA)
  modified_base (20)..(20): bicyclic nucleic acid (BNA)
gtcgguaaguucuguccaag

SEQ ID NO: 11636 - DNA, 19 bp, Artificial Sequence
  source: /note="Description of Artificial Sequence: Synthetic oligonucleotide"
  source: /note="Description of Combined DNA/RNA Molecule: Synthetic oligonucleotide"
  source: /note="DNA/RNA"
  source: /note="5' tri-ethylene glycol (TEG)"
  modified_base (1)..(1): bicyclic nucleic acid (BNA)
  modified_base (2)..(2): bicyclic nucleic acid (BNA)
  modified_base (18)..(18): bicyclic nucleic acid (BNA)
  modified_base (19)..(19): bicyclic nucleic acid (BNA)
gtcgguaaguucuguccaa

SEQ ID NO: 11637 - DNA, 18 bp, Artificial Sequence
  source: /note="Description of Artificial Sequence: Synthetic oligonucleotide"
  source: /note="Description of Combined DNA/RNA Molecule: Synthetic oligonucleotide"
  source: /note="DNA/RNA"
  source: /note="5' tri-ethylene glycol (TEG)"
  modified_base (1)..(1): bicyclic nucleic acid (BNA)
  modified_base (2)..(2): bicyclic nucleic acid (BNA)
  modified_base (17)..(17): bicyclic nucleic acid (BNA)
  modified_base (18)..(18): bicyclic nucleic acid (BNA)
gtcgguaaguucugucca

SEQ ID NO: 11638 - DNA, 17 bp, Artificial Sequence
  source: /note="Description of Artificial Sequence: Synthetic oligonucleotide"
  source: /note="Description of Combined DNA/RNA Molecule: Synthetic oligonucleotide"
  source: /note="DNA/RNA"
  source: /note="5' tri-ethylene glycol (TEG)"
  modified_base (1)..(1): bicyclic nucleic acid (BNA)
  modified_base (2)..(2): bicyclic nucleic acid (BNA)
  modified_base (16)..(16): bicyclic nucleic acid (BNA)
  modified_base (17)..(17): bicyclic nucleic acid (BNA)
gtcgguaaguucugucc

SEQ ID NO: 11639 - DNA, 16 bp, Artificial Sequence
  source: /note="Description of Artificial Sequence: Synthetic oligonucleotide"
  source: /note="Description of Combined DNA/RNA Molecule: Synthetic oligonucleotide"
  source: /note="DNA/RNA"
  source: /note="5' tri-ethylene glycol (TEG)"
  modified_base (1)..(1): bicyclic nucleic acid (BNA)
  modified_base (2)..(2): bicyclic nucleic acid (BNA)
  modified_base (15)..(15): bicyclic nucleic acid (BNA)
  modified_base (16)..(16): bicyclic nucleic acid (BNA)
gtcgguaaguucugtc

SEQ ID NO: 11640 - DNA, 15 bp, Artificial Sequence
  source: /note="Description of Artificial Sequence: Synthetic oligonucleotide"
  source: /note="Description of Combined DNA/RNA Molecule: Synthetic oligonucleotide"
  source: /note="DNA/RNA"
  source: /note="5' tri-ethylene glycol (TEG)"
  modified_base (1)..(1): bicyclic nucleic acid (BNA)
  modified_base (2)..(2): bicyclic nucleic acid (BNA)
  modified_base (14)..(14): bicyclic nucleic acid (BNA)
  modified_base (15)..(15): bicyclic nucleic acid (BNA)
gtcgguaaguucugt

SEQ ID NO: 11641 - DNA, 14 bp, Artificial Sequence
  source: /note="Description of Artificial Sequence: Synthetic oligonucleotide"
  source: /note="Description of Combined DNA/RNA Molecule: Synthetic oligonucleotide"
  source: /note="DNA/RNA"
  source: /note="5' tri-ethylene glycol (TEG)"
  modified_base (1)..(1): bicyclic nucleic acid (BNA)
  modified_base (2)..(2): bicyclic nucleic acid (BNA)
  modified_base (13)..(13): bicyclic nucleic acid (BNA)
  modified_base (14)..(14): bicyclic nucleic acid (BNA)
gtcgguaaguuctg

SEQ ID NO: 11642 - DNA, 13 bp, Artificial Sequence
  source: /note="Description of Artificial Sequence: Synthetic oligonucleotide"
  source: /note="Description of Combined DNA/RNA Molecule: Synthetic oligonucleotide"
  source: /note="DNA/RNA"
  source: /note="5' tri-ethylene glycol (TEG)"
  modified_base (1)..(1): bicyclic nucleic acid (BNA)
  modified_base (2)..(2): bicyclic nucleic acid (BNA)
  modified_base (12)..(12): bicyclic nucleic acid (BNA)
  modified_base (13)..(13): bicyclic nucleic acid (BNA)
gtcgguaaguuct

SEQ ID NO: 11643 - DNA, 12 bp, Artificial Sequence
  source: /note="Description of Artificial Sequence: Synthetic oligonucleotide"
  source: /note="Description of Combined DNA/RNA Molecule: Synthetic oligonucleotide"
  source: /note="DNA/RNA"
  source: /note="5' tri-ethylene glycol (TEG)"
  modified_base (1)..(1): bicyclic nucleic acid (BNA)
  modified_base (2)..(2): bicyclic nucleic acid (BNA)
  modified_base (11)..(11): bicyclic nucleic acid (BNA)
  modified_base (12)..(12): bicyclic nucleic acid (BNA)
gtcgguaagutc

SEQ ID NO: 11644 - DNA, 11 bp, Artificial Sequence
  source: /note="Description of Artificial Sequence: Synthetic oligonucleotide"
  source: /note="Description of Combined DNA/RNA Molecule: Synthetic oligonucleotide"
  source: /note="DNA/RNA"
  source: /note="5' tri-ethylene glycol (TEG)"
  modified_base (1)..(1): bicyclic nucleic acid (BNA)
  modified_base (2)..(2): bicyclic nucleic acid (BNA)
  modified_base (10)..(10): bicyclic nucleic acid (BNA)
  modified_base (11)..(11): bicyclic nucleic acid (BNA)
gtcgguaagtt

SEQ ID NO: 11645 - DNA, 10 bp, Artificial Sequence
  source: /note="Description of Artificial Sequence: Synthetic oligonucleotide"
  source: /note="Description of Combined DNA/RNA Molecule: Synthetic oligonucleotide"
  source: /note="DNA/RNA"
  source: /note="5' tri-ethylene glycol (TEG)"
  modified_base (1)..(1): bicyclic nucleic acid (BNA)
  modified_base (2)..(2): bicyclic nucleic acid (BNA)
  modified_base (9)..(9): bicyclic nucleic acid (BNA)
  modified_base (10)..(10): bicyclic nucleic acid (BNA)
gtcgguaagt

SEQ ID NO: 11646 - RNA, 20 nt, Artificial Sequence
  source: /note="Description of Artificial Sequence: Synthetic oligonucleotide"
  source: /note="RNA"
  source: /note="5' tri-ethylene glycol (TEG)"
  modified_base (1)..(1): bicyclic nucleic acid (BNA)
  modified_base (2)..(2): bicyclic nucleic acid (BNA)
  modified_base (19)..(19): bicyclic nucleic acid (BNA)
  modified_base (20)..(20): bicyclic nucleic acid (BNA)
agucgguaaguucuguccaa

SEQ ID NO: 11647 - RNA, 19 nt, Artificial Sequence
  source: /note="Description of Artificial Sequence: Synthetic oligonucleotide"
  source: /note="RNA"
  source: /note="5' tri-ethylene glycol (TEG)"
  modified_base (1)..(1): bicyclic nucleic acid (BNA)
  modified_base (2)..(2): bicyclic nucleic acid (BNA)
  modified_base (18)..(18): bicyclic nucleic acid (BNA)
  modified_base (19)..(19): bicyclic nucleic acid (BNA)
agucgguaaguucugucca

SEQ ID NO: 11648 - DNA, 17 bp, Artificial Sequence
  source: /note="Description of Artificial Sequence: Synthetic oligonucleotide"
  source: /note="Description of Combined DNA/RNA Molecule: Synthetic oligonucleotide"
  source: /note="DNA/RNA"
  source: /note="5' tri-ethylene glycol (TEG)"
  modified_base (1)..(1): bicyclic nucleic acid (BNA)
  modified_base (2)..(2): bicyclic nucleic acid (BNA)
  modified_base (16)..(16): bicyclic nucleic acid (BNA)
  modified_base (17)..(17): bicyclic nucleic acid (BNA)
agucgguaaguucugtc

SEQ ID NO: 11649 - DNA, 16 bp, Artificial Sequence
  source: /note="Description of Artificial Sequence: Synthetic oligonucleotide"
  source: /note="Description of Combined DNA/RNA Molecule: Synthetic oligonucleotide"
  source: /note="DNA/RNA"
  source: /note="5' tri-ethylene glycol (TEG)"
  modified_base (1)..(1): bicyclic nucleic acid (BNA)
  modified_base (2)..(2): bicyclic nucleic acid (BNA)
  modified_base (15)..(15): bicyclic nucleic acid (BNA)
  modified_base (16)..(16): bicyclic nucleic acid (BNA)
agucgguaaguucugt

SEQ ID NO: 11650 - DNA, 15 bp, Artificial Sequence
  source: /note="Description of Artificial Sequence: Synthetic oligonucleotide"
  source: /note="Description of Combined DNA/RNA Molecule: Synthetic oligonucleotide"
  source: /note="DNA/RNA"
  source: /note="5' tri-ethylene glycol (TEG)"
  modified_base (1)..(1): bicyclic nucleic acid (BNA)
  modified_base (2)..(2): bicyclic nucleic acid (BNA)
  modified_base (14)..(14): bicyclic nucleic acid (BNA)
  modified_base (15)..(15): bicyclic nucleic acid (BNA)
agucgguaaguuctg

SEQ ID NO: 11651 - DNA, 14 bp, Artificial Sequence
  source: /note="Description of Artificial Sequence: Synthetic oligonucleotide"
  source: /note="Description of Combined DNA/RNA Molecule: Synthetic oligonucleotide"
  source: /note="DNA/RNA"
  source: /note="5' tri-ethylene glycol (TEG)"
  modified_base (1)..(1): bicyclic nucleic acid (BNA)
  modified_base (2)..(2): bicyclic nucleic acid (BNA)
  modified_base (13)..(13): bicyclic nucleic acid (BNA)
  modified_base (14)..(14): bicyclic nucleic acid (BNA)
agucgguaaguuct

SEQ ID NO: 11652 - DNA, 13 bp, Artificial Sequence
  source: /note="Description of Artificial Sequence: Synthetic oligonucleotide"
  source: /note="Description of Combined DNA/RNA Molecule: Synthetic oligonucleotide"
  source: /note="DNA/RNA"
  source: /note="5' tri-ethylene glycol (TEG)"
  modified_base (1)..(1): bicyclic nucleic acid (BNA)
  modified_base (2)..(2): bicyclic nucleic acid (BNA)
  modified_base (12)..(12): bicyclic nucleic acid (BNA)
  modified_base (13)..(13): bicyclic nucleic acid (BNA)
agucgguaagutc

SEQ ID NO: 11653 - DNA, 12 bp, Artificial Sequence
  source: /note="Description of Artificial Sequence: Synthetic oligonucleotide"
  source: /note="Description of Combined DNA/RNA Molecule: Synthetic oligonucleotide"
  source: /note="DNA/RNA"
  source: /note="5' tri-ethylene glycol (TEG)"
  modified_base (1)..(1): bicyclic nucleic acid (BNA)
  modified_base (2)..(2): bicyclic nucleic acid (BNA)
  modified_base (11)..(11): bicyclic nucleic acid (BNA)
  modified_base (12)..(12): bicyclic nucleic acid (BNA)
agucgguaagtt

SEQ ID NO: 11654 - DNA, 11 bp, Artificial Sequence
  source: /note="Description of Artificial Sequence: Synthetic oligonucleotide"
  source: /note="Description of Combined DNA/RNA Molecule: Synthetic oligonucleotide"
  source: /note="DNA/RNA"
  source: /note="5' tri-ethylene glycol (TEG)"
  modified_base (1)..(1): bicyclic nucleic acid (BNA)
  modified_base (2)..(2): bicyclic nucleic acid (BNA)
  modified_base (10)..(10): bicyclic nucleic acid (BNA)
  modified_base (11)..(11): bicyclic nucleic acid (BNA)
agucgguaagt

SEQ ID NO: 11655 - RNA, 20 nt, Artificial Sequence
  source: /note="Description of Artificial Sequence: Synthetic oligonucleotide"
  source: /note="RNA"
  source: /note="5' tri-ethylene glycol (TEG)"
  modified_base (1)..(1): bicyclic nucleic acid (BNA)
  modified_base (2)..(2): bicyclic nucleic acid (BNA)
  modified_base (19)..(19): bicyclic nucleic acid (BNA)
  modified_base (20)..(20): bicyclic nucleic acid (BNA)
cagucgguaaguucugucca

SEQ ID NO: 11656 - RNA, 19 nt, Artificial Sequence
  source: /note="Description of Artificial Sequence: Synthetic oligonucleotide"
  source: /note="RNA"
  source: /note="5' tri-ethylene glycol (TEG)"
  modified_base (1)..(1): bicyclic nucleic acid (BNA)
  modified_base (2)..(2): bicyclic nucleic acid (BNA)
  modified_base (18)..(18): bicyclic nucleic acid (BNA)
  modified_base (19)..(19): bicyclic nucleic acid (BNA)
cagucgguaaguucugucc

SEQ ID NO: 11657 - DNA, 18 bp, Artificial Sequence
  source: /note="Description of Artificial Sequence: Synthetic oligonucleotide"
  source: /note="Description of Combined DNA/RNA Molecule: Synthetic oligonucleotide"
  source: /note="DNA/RNA"
  source: /note="5' tri-ethylene glycol (TEG)"
  modified_base (1)..(1): bicyclic nucleic acid (BNA)
  modified_base (2)..(2): bicyclic nucleic acid (BNA)
  modified_base (17)..(17): bicyclic nucleic acid (BNA)
  modified_base (18)..(18): bicyclic nucleic acid (BNA)
cagucgguaaguucugtc

SEQ ID NO: 11658 - DNA, 17 bp, Artificial Sequence
  source: /note="Description of Artificial Sequence: Synthetic oligonucleotide"
  source: /note="Description of Combined DNA/RNA Molecule: Synthetic oligonucleotide"
  source: /note="DNA/RNA"
  source: /note="5' tri-ethylene glycol (TEG)"
  modified_base (1)..(1): bicyclic nucleic acid (BNA)
  modified_base (2)..(2): bicyclic nucleic acid (BNA)
  modified_base (16)..(16): bicyclic nucleic acid (BNA)
  modified_base (17)..(17): bicyclic nucleic acid (BNA)
cagucgguaaguucugt

SEQ ID NO: 11659 - DNA, 16 bp, Artificial Sequence
  source: /note="Description of Artificial Sequence: Synthetic oligonucleotide"
  source: /note="Description of Combined DNA/RNA Molecule: Synthetic oligonucleotide"
  source: /note="DNA/RNA"
  source: /note="5' tri-ethylene glycol (TEG)"
  modified_base (1)..(1): bicyclic nucleic acid (BNA)
  modified_base (2)..(2): bicyclic nucleic acid (BNA)
  modified_base (15)..(15): bicyclic nucleic acid (BNA)
  modified_base (16)..(16): bicyclic nucleic acid (BNA)
cagucgguaaguuctg

SEQ ID NO: 11660 - DNA, 15 bp, Artificial Sequence
  source: /note="Description of Artificial Sequence: Synthetic oligonucleotide"
  source: /note="Description of Combined DNA/RNA Molecule: Synthetic oligonucleotide"
  source: /note="DNA/RNA"
  source: /note="5' tri-ethylene glycol (TEG)"
  modified_base (1)..(1): bicyclic nucleic acid (BNA)
  modified_base (2)..(2): bicyclic nucleic acid (BNA)
  modified_base (14)..(14): bicyclic nucleic acid (BNA)
  modified_base (15)..(15): bicyclic nucleic acid (BNA)
cagucgguaaguuct

SEQ ID NO: 11661 - DNA, 14 bp, Artificial Sequence
  source: /note="Description of Artificial Sequence: Synthetic oligonucleotide"
  source: /note="Description of Combined DNA/RNA Molecule: Synthetic oligonucleotide"
  source: /note="DNA/RNA"
  source: /note="5' tri-ethylene glycol (TEG)"
  modified_base (1)..(1): bicyclic nucleic acid (BNA)
  modified_base (2)..(2): bicyclic nucleic acid (BNA)
  modified_base (13)..(13): bicyclic nucleic acid (BNA)
  modified_base (14)..(14): bicyclic nucleic acid (BNA)
cagucgguaagutc

SEQ ID NO: 11662 - DNA, 13 bp, Artificial Sequence
  source: /note="Description of Artificial Sequence: Synthetic oligonucleotide"
  source: /note="Description of Combined DNA/RNA Molecule: Synthetic oligonucleotide"
  source: /note="DNA/RNA"
  source: /note="5' tri-ethylene glycol (TEG)"
  modified_base (1)..(1): bicyclic nucleic acid (BNA)
  modified_base (2)..(2): bicyclic nucleic acid (BNA)
  modified_base (12)..(12): bicyclic nucleic acid (BNA)
  modified_base (13)..(13): bicyclic nucleic acid (BNA)
cagucgguaagtt

SEQ ID NO: 11663 - DNA, 12 bp, Artificial Sequence
  source: /note="Description of Artificial Sequence: Synthetic oligonucleotide"
  source: /note="Description of Combined DNA/RNA Molecule: Synthetic oligonucleotide"
  source: /note="DNA/RNA"
  source: /note="5' tri-ethylene glycol (TEG)"
  modified_base (1)..(1): bicyclic nucleic acid (BNA)
  modified_base (2)..(2): bicyclic nucleic acid (BNA)
  modified_base (11)..(11): bicyclic nucleic acid (BNA)
  modified_base (12)..(12): bicyclic nucleic acid (BNA)
cagucgguaagt

SEQ ID NO: 11664 - RNA, 20 nt, Artificial Sequence
  source: /note="Description of Artificial Sequence: Synthetic oligonucleotide"
  source: /note="RNA"
  source: /note="5' tri-ethylene glycol (TEG)"
  modified_base (1)..(1): bicyclic nucleic acid (BNA)
  modified_base (2)..(2): bicyclic nucleic acid (BNA)
  modified_base (19)..(19): bicyclic nucleic acid (BNA)
  modified_base (20)..(20): bicyclic nucleic acid (BNA)
ccagucgguaaguucugucc

SEQ ID NO: 11665 - DNA, 19 bp, Artificial Sequence
  source: /note="Description of Artificial Sequence: Synthetic oligonucleotide"
  source: /note="Description of Combined DNA/RNA Molecule: Synthetic oligonucleotide"
  source: /note="DNA/RNA"
  source: /note="5' tri-ethylene glycol (TEG)"
  modified_base (1)..(1): bicyclic nucleic acid (BNA)
  modified_base (2)..(2): bicyclic nucleic acid (BNA)
  modified_base (18)..(18): bicyclic nucleic acid (BNA)
  modified_base (19)..(19): bicyclic nucleic acid (BNA)
ccagucgguaaguucugtc

SEQ ID NO: 11666 - DNA, 18 bp, Artificial Sequence
  source: /note="Description of Artificial Sequence: Synthetic oligonucleotide"
  source: /note="Description of Combined DNA/RNA Molecule: Synthetic oligonucleotide"
  source: /note="DNA/RNA"
  source: /note="5' tri-ethylene glycol (TEG)"
  modified_base (1)..(1): bicyclic nucleic acid (BNA)
  modified_base (2)..(2): bicyclic nucleic acid (BNA)
  modified_base (17)..(17): bicyclic nucleic acid (BNA)
  modified_base (18)..(18): bicyclic nucleic acid (BNA)
ccagucgguaaguucugt

SEQ ID NO: 11667 - DNA, 17 bp, Artificial Sequence
  source: /note="Description of Artificial Sequence: Synthetic oligonucleotide"
  source: /note="Description of Combined DNA/RNA Molecule: Synthetic oligonucleotide"
  source: /note="DNA/RNA"
  source: /note="5' tri-ethylene glycol (TEG)"
  modified_base (1)..(1): bicyclic nucleic acid (BNA)
  modified_base (2)..(2): bicyclic nucleic acid (BNA)
  modified_base (16)..(16): bicyclic nucleic acid (BNA)
  modified_base (17)..(17): bicyclic nucleic acid (BNA)
ccagucgguaaguuctg

SEQ ID NO: 11668 - DNA, 16 bp, Artificial Sequence
  source: /note="Description of Artificial Sequence: Synthetic oligonucleotide"
  source: /note="Description of Combined DNA/RNA Molecule: Synthetic oligonucleotide"
  source: /note="DNA/RNA"
  source: /note="5' tri-ethylene glycol (TEG)"
  modified_base (1)..(1): bicyclic nucleic acid (BNA)
  modified_base (2)..(2): bicyclic nucleic acid (BNA)
  modified_base (15)..(15): bicyclic nucleic acid (BNA)
  modified_base (16)..(16): bicyclic nucleic acid (BNA)
ccagucgguaaguuct

SEQ ID NO: 11669 - DNA, 15 bp, Artificial Sequence
  source: /note="Description of Artificial Sequence: Synthetic oligonucleotide"
  source: /note="Description of Combined DNA/RNA Molecule: Synthetic oligonucleotide"
  source: /note="DNA/RNA"
  source: /note="5' tri-ethylene glycol (TEG)"
  modified_base (1)..(1): bicyclic nucleic acid (BNA)
  modified_base (2)..(2): bicyclic nucleic acid (BNA)
  modified_base (14)..(14): bicyclic nucleic acid (BNA)
  modified_base (15)..(15): bicyclic nucleic acid (BNA)
ccagucgguaagutc

SEQ ID NO: 11670 - DNA, 14 bp, Artificial Sequence
  source: /note="Description of Artificial Sequence: Synthetic oligonucleotide"
  source: /note="Description of Combined DNA/RNA Molecule: Synthetic oligonucleotide"
  source: /note="DNA/RNA"
  source: /note="5' tri-ethylene glycol (TEG)"
  modified_base (1)..(1): bicyclic nucleic acid (BNA)
  modified_base (2)..(2): bicyclic nucleic acid (BNA)
  modified_base (13)..(13): bicyclic nucleic acid (BNA)
  modified_base (14)..(14): bicyclic nucleic acid (BNA)
ccagucgguaagtt

SEQ ID NO: 11671 - DNA, 13 bp, Artificial Sequence
  source: /note="Description of Artificial Sequence: Synthetic oligonucleotide"
  source: /note="Description of Combined DNA/RNA Molecule: Synthetic oligonucleotide"
  source: /note="DNA/RNA"
  source: /note="5' tri-ethylene glycol (TEG)"
  modified_base (1)..(1): bicyclic nucleic acid (BNA)
  modified_base (2)..(2): bicyclic nucleic acid (BNA)
  modified_base (12)..(12): bicyclic nucleic acid (BNA)
  modified_base (13)..(13): bicyclic nucleic acid (BNA)
ccagucgguaagt

SEQ ID NO: 11672 - DNA, 20 bp, Artificial Sequence
  source: /note="Description of Artificial Sequence: Synthetic oligonucleotide"
  source: /note="Description of Combined DNA/RNA Molecule: Synthetic oligonucleotide"
  source: /note="DNA/RNA"
  source: /note="5' tri-ethylene glycol (TEG)"
  modified_base (1)..(1): bicyclic nucleic acid (BNA)
  modified_base (2)..(2): bicyclic nucleic acid (BNA)
  modified_base (19)..(19): bicyclic nucleic acid (BNA)
  modified_base (20)..(20): bicyclic nucleic acid (BNA)
gccagucgguaaguucugtc

SEQ ID NO: 11673 - DNA, 19 bp, Artificial Sequence
  source: /note="Description of Artificial Sequence: Synthetic oligonucleotide"
  source: /note="Description of Combined DNA/RNA Molecule: Synthetic oligonucleotide"
  source: /note="DNA/RNA"
  source: /note="5' tri-ethylene glycol (TEG)"
  modified_base (1)..(1): bicyclic nucleic acid (BNA)
  modified_base (2)..(2): bicyclic nucleic acid (BNA)
  modified_base (18)..(18): bicyclic nucleic acid (BNA)
  modified_base (19)..(19): bicyclic nucleic acid (BNA)
gccagucgguaaguucugt

SEQ ID NO: 11674 - DNA, 18 bp, Artificial Sequence
  source: /note="Description of Artificial Sequence: Synthetic oligonucleotide"
  source: /note="Description of Combined DNA/RNA Molecule: Synthetic oligonucleotide"
  source: /note="DNA/RNA"
  source: /note="5' tri-ethylene glycol (TEG)"
  modified_base (1)..(1): bicyclic nucleic acid (BNA)
  modified_base (2)..(2): bicyclic nucleic acid (BNA)
  modified_base (17)..(17): bicyclic nucleic acid (BNA)
  modified_base (18)..(18): bicyclic nucleic acid (BNA)
gccagucgguaaguuctg

SEQ ID NO: 11675 - DNA, 17 bp, Artificial Sequence
  source: /note="Description of Artificial Sequence: Synthetic oligonucleotide"
  source: /note="Description of Combined DNA/RNA Molecule: Synthetic oligonucleotide"
  source: /note="DNA/RNA"
  source: /note="5' tri-ethylene glycol (TEG)"
  modified_base (1)..(1): bicyclic nucleic acid (BNA)
  modified_base (2)..(2): bicyclic nucleic acid (BNA)
  modified_base (16)..(16): bicyclic nucleic acid (BNA)
  modified_base (17)..(17): bicyclic nucleic acid (BNA)
gccagucgguaaguuct

SEQ ID NO: 11676 - DNA, 16 bp, Artificial Sequence
  source: /note="Description of Artificial Sequence: Synthetic oligonucleotide"
  source: /note="Description of Combined DNA/RNA Molecule: Synthetic oligonucleotide"
  source: /note="DNA/RNA"
  source: /note="5' tri-ethylene glycol (TEG)"
  modified_base (1)..(1): bicyclic nucleic acid (BNA)
  modified_base (2)..(2): bicyclic nucleic acid (BNA)
  modified_base (15)..(15): bicyclic nucleic acid (BNA)
  modified_base (16)..(16): bicyclic nucleic acid (BNA)
gccagucgguaagutc

SEQ ID NO: 11677 - DNA, 15 bp, Artificial Sequence
  source: /note="Description of Artificial Sequence: Synthetic oligonucleotide"
  source: /note="Description of Combined DNA/RNA Molecule: Synthetic oligonucleotide"
  source: /note="DNA/RNA"
  source: /note="5' tri-ethylene glycol (TEG)"
  modified_base (1)..(1): bicyclic nucleic acid (BNA)
  modified_base (2)..(2): bicyclic nucleic acid (BNA)
  modified_base (14)..(14): bicyclic nucleic acid (BNA)
  modified_base (15)..(15): bicyclic nucleic acid (BNA)
gccagucgguaagtt

SEQ ID NO: 11678 - DNA, 14 bp, Artificial Sequence
  source: /note="Description of Artificial Sequence: Synthetic oligonucleotide"
  source: /note="Description of Combined DNA/RNA Molecule: Synthetic oligonucleotide"
  source: /note="DNA/RNA"
  source: /note="5' tri-ethylene glycol (TEG)"
  modified_base (1)..(1): bicyclic nucleic acid (BNA)
  modified_base (2)..(2): bicyclic nucleic acid (BNA)
  modified_base (13)..(13): bicyclic nucleic acid (BNA)
  modified_base (14)..(14): bicyclic nucleic acid (BNA)
gccagucgguaagt

SEQ ID NO: 11679 - DNA, 20 bp, Artificial Sequence
  source: /note="Description of Artificial Sequence: Synthetic oligonucleotide"
  source: /note="Description of Combined DNA/RNA Molecule: Synthetic oligonucleotide"
  source: /note="DNA/RNA"
  source: /note="5' tri-ethylene glycol (TEG)"
  modified_base (1)..(1): bicyclic nucleic acid (BNA)
  modified_base (2)..(2): bicyclic nucleic acid (BNA)
  modified_base (19)..(19): bicyclic nucleic acid (BNA)
  modified_base (20)..(20): bicyclic nucleic acid (BNA)
tcaaggaagauggcauuuct

SEQ ID NO: 11680 - DNA, 22 bp, Artificial Sequence
  source: /note="Description of Artificial Sequence: Synthetic oligonucleotide"
  source: /note="Description of Combined DNA/RNA Molecule: Synthetic oligonucleotide"
  source: /note="DNA/RNA"
  source: /note="5' tri-ethylene glycol (TEG)"
  modified_base (1)..(1): bicyclic nucleic acid (BNA)
  modified_base (2)..(2): bicyclic nucleic acid (BNA)
  modified_base (21)..(21): bicyclic nucleic acid (BNA)
  modified_base (22)..(22): bicyclic nucleic acid (BNA)
tcaaggaagauggcauuucuag

SEQ ID NO: 11681 - DNA, 16 bp, Artificial Sequence
  source: /note="Description of Artificial Sequence: Synthetic oligonucleotide"
  source: /note="Description of Combined DNA/RNA Molecule: Synthetic oligonucleotide"
  source: /note="DNA/RNA"
  source: /note="5' tri-ethylene glycol (TEG)"
  modified_base (1)..(1): bicyclic nucleic acid (BNA)
  modified_base (2)..(2): bicyclic nucleic acid (BNA)
  modified_base (15)..(15): bicyclic nucleic acid (BNA)
  modified_base (16)..(16): bicyclic nucleic acid (BNA)
tcaaggaagauggcat

SEQ ID NO: 11682 - DNA, 15 bp, Artificial Sequence
  source: /note="Description of Artificial Sequence: Synthetic oligonucleotide"
  source: /note="Description of Combined DNA/RNA Molecule: Synthetic oligonucleotide"
  source: /note="DNA/RNA"
  source: /note="5' tri-ethylene glycol (TEG)"
  modified_base (1)..(1): bicyclic nucleic acid (BNA)
  modified_base (2)..(2): bicyclic nucleic acid (BNA)
  modified_base (14)..(14): bicyclic nucleic acid (BNA)
  modified_base (15)..(15): bicyclic nucleic acid (BNA)
gaagauggcauuuct

SEQ ID NO: 11683 - DNA, 21 bp, Artificial Sequence
  source: /note="Description of Artificial Sequence: Synthetic oligonucleotide"
  source: /note="Description of Combined DNA/RNA Molecule: Synthetic oligonucleotide"
  source: /note="DNA/RNA"
  source: /note="5' tri-ethylene glycol (TEG)"
  modified_base (1)..(1): bicyclic nucleic acid (BNA)
  modified_base (2)..(2): bicyclic nucleic acid (BNA)
  modified_base (20)..(20): bicyclic nucleic acid (BNA)
  modified_base (21)..(21): bicyclic nucleic acid (BNA)
tcaaggaagauggcauuucta

SEQ ID NO: 11684 - DNA, 19 bp, Artificial Sequence
  source: /note="Description of Artificial Sequence: Synthetic oligonucleotide"
  source: /note="Description of Combined DNA/RNA Molecule: Synthetic oligonucleotide"
  source: /note="DNA/RNA"
  source: /note="5' tri-ethylene glycol (TEG)"
  modified_base (1)..(1): bicyclic nucleic acid (BNA)
  modified_base (2)..(2): bicyclic nucleic acid (BNA)
  modified_base (18)..(18): bicyclic nucleic acid (BNA)
  modified_base (19)..(19): bicyclic nucleic acid (BNA)
tcaaggaagauggcauutc

SEQ ID NO: 11685 - DNA, 18 bp, Artificial Sequence
  source: /note="Description of Artificial Sequence: Synthetic oligonucleotide"
  source: /note="Description of Combined DNA/RNA Molecule: Synthetic oligonucleotide"
  source: /note="DNA/RNA"
  source: /note="5' tri-ethylene glycol (TEG)"
  modified_base (1)..(1): bicyclic nucleic acid (BNA)
  modified_base (2)..(2): bicyclic nucleic acid (BNA)
  modified_base (17)..(17): bicyclic nucleic acid (BNA)
  modified_base (18)..(18): bicyclic nucleic acid (BNA)
tcaaggaagauggcautt

SEQ ID NO: 11686 - DNA, 17 bp, Artificial Sequence
  source: /note="Description of Artificial Sequence: Synthetic oligonucleotide"
  source: /note="Description of Combined DNA/RNA Molecule: Synthetic oligonucleotide"
  source: /note="DNA/RNA"
  source: /note="5' tri-ethylene glycol (TEG)"
  modified_base (1)..(1): bicyclic nucleic acid (BNA)
  modified_base (2)..(2): bicyclic nucleic acid (BNA)
  modified_base (16)..(16): bicyclic nucleic acid (BNA)
  modified_base (17)..(17): bicyclic nucleic acid (BNA)
tcaaggaagauggcatt

SEQ ID NO: 11687 - DNA, 15 bp, Artificial Sequence
  source: /note="Description of Artificial Sequence: Synthetic oligonucleotide"
  source: /note="Description of Combined DNA/RNA Molecule: Synthetic oligonucleotide"
  source: /note="DNA/RNA"
  source: /note="5' tri-ethylene glycol (TEG)"
  modified_base (1)..(1): bicyclic nucleic acid (BNA)
  modified_base (2)..(2): bicyclic nucleic acid (BNA)
  modified_base (14)..(14): bicyclic nucleic acid (BNA)
  modified_base (15)..(15): bicyclic nucleic acid (BNA)
tcaaggaagauggca

SEQ ID NO: 11688 - DNA, 14 bp, Artificial Sequence
  source: /note="Description of Artificial Sequence: Synthetic oligonucleotide"
  source: /note="Description of Combined DNA/RNA Molecule: Synthetic oligonucleotide"
  source: /note="DNA/RNA"
  source: /note="5' tri-ethylene glycol (TEG)"
  modified_base (1)..(1): bicyclic nucleic acid (BNA)
  modified_base (2)..(2): bicyclic nucleic acid (BNA)
  modified_base (13)..(13): bicyclic nucleic acid (BNA)
  modified_base (14)..(14): bicyclic nucleic acid (BNA)
tcaaggaagauggc

SEQ ID NO: 11689 - DNA, 13 bp, Artificial Sequence
  source: /note="Description of Artificial Sequence: Synthetic oligonucleotide"
  source: /note="Description of Combined DNA/RNA Molecule: Synthetic oligonucleotide"
  source: /note="DNA/RNA"
  source: /note="5' tri-ethylene glycol (TEG)"
  modified_base (1)..(1): bicyclic nucleic acid (BNA)
  modified_base (2)..(2): bicyclic nucleic acid (BNA)
  modified_base (12)..(12): bicyclic nucleic acid (BNA)
  modified_base (13)..(13): bicyclic nucleic acid (BNA)
tcaaggaagaugg

SEQ ID NO: 11690 - DNA, 12 bp, Artificial Sequence
  source: /note="Description of Artificial Sequence: Synthetic oligonucleotide"
  source: /note="DNA/RNA"
  source: /note="5' tri-ethylene glycol (TEG)"
  modified_base (1)..(1): bicyclic nucleic acid (BNA)
  modified_base (2)..(2): bicyclic nucleic acid (BNA)
  modified_base (11)..(11): bicyclic nucleic acid (BNA)
  modified_base (12)..(12): bicyclic nucleic acid (BNA)
tcaaggaagatg

SEQ ID NO: 11691 - DNA, 11 bp, Artificial Sequence
  source: /note="Description of Artificial Sequence: Synthetic oligonucleotide"
  source: /note="DNA/RNA"
  source: /note="5' tri-ethylene glycol (TEG)"
  modified_base (1)..(1): bicyclic nucleic acid (BNA)
  modified_base (2)..(2): bicyclic nucleic acid (BNA)
  modified_base (10)..(10): bicyclic nucleic acid (BNA)
  modified_base (11)..(11): bicyclic nucleic acid (BNA)
tcaaggaagat

SEQ ID NO: 11692 - DNA, 10 bp, Artificial Sequence
  source: /note="Description of Artificial Sequence: Synthetic oligonucleotide"
  source: /note="DNA/RNA"
  source: /note="5' tri-ethylene glycol (TEG)"
  modified_base (1)..(1): bicyclic nucleic acid (BNA)
  modified_base (2)..(2): bicyclic nucleic acid (BNA)
  modified_base (9)..(9): bicyclic nucleic acid (BNA)
  modified_base (10)..(10): bicyclic nucleic acid (BNA)
tcaaggaaga

SEQ ID NO: 11693 - DNA, 9 bp, Artificial Sequence
  source: /note="Description of Artificial Sequence: Synthetic oligonucleotide"
  source: /note="DNA/RNA"
  source: /note="5' tri-ethylene glycol (TEG)"
  modified_base (1)..(1): bicyclic nucleic acid (BNA)
  modified_base (2)..(2): bicyclic nucleic acid (BNA)
  modified_base (8)..(8): bicyclic nucleic acid (BNA)
  modified_base (9)..(9): bicyclic nucleic acid (BNA)
tcaaggaag

SEQ ID NO: 11694 - RNA, 21 nt, Artificial Sequence
  source: /note="Description of Artificial Sequence: Synthetic oligonucleotide"
  source: /note="RNA"
  source: /note="5' tri-ethylene glycol (TEG)"
  modified_base (1)..(1): bicyclic nucleic acid (BNA)
  modified_base (2)..(2): bicyclic nucleic acid (BNA)
  modified_base (20)..(20): bicyclic nucleic acid (BNA)
  modified_base (21)..(21): bicyclic nucleic acid (BNA)
caaggaagauggcauuucuag

SEQ ID NO: 11695 - DNA, 20 bp, Artificial Sequence
  source: /note="Description of Artificial Sequence: Synthetic oligonucleotide"
  source: /note="Description of Combined DNA/RNA Molecule: Synthetic oligonucleotide"
  source: /note="DNA/RNA"
  source: /note="5' tri-ethylene glycol (TEG)"
  modified_base (1)..(1): bicyclic nucleic acid (BNA)
  modified_base (2)..(2): bicyclic nucleic acid (BNA)
  modified_base (19)..(19): bicyclic nucleic acid (BNA)
  modified_base (20)..(20): bicyclic nucleic acid (BNA)
caaggaagauggcauuucta

SEQ ID NO: 11696 - DNA, 19 bp, Artificial Sequence
  source: /note="Description of Artificial Sequence: Synthetic oligonucleotide"
  source: /note="Description of Combined DNA/RNA Molecule: Synthetic oligonucleotide"
  source: /note="DNA/RNA"
  source: /note="5' tri-ethylene glycol (TEG)"
  modified_base (1)..(1): bicyclic nucleic acid (BNA)
  modified_base (2)..(2): bicyclic nucleic acid (BNA)
  modified_base (18)..(18): bicyclic nucleic acid (BNA)
  modified_base (19)..(19): bicyclic nucleic acid (BNA)
caaggaagauggcauuuct

SEQ ID NO: 11697 - DNA, 18 bp, Artificial Sequence
  source: /note="Description of Artificial Sequence: Synthetic oligonucleotide"
  source: /note="Description of Combined DNA/RNA Molecule: Synthetic oligonucleotide"
  source: /note="DNA/RNA"
  source: /note="5' tri-ethylene glycol (TEG)"
  modified_base (1)..(1): bicyclic nucleic acid (BNA)
  modified_base (2)..(2): bicyclic nucleic acid (BNA)
  modified_base (17)..(17): bicyclic nucleic acid (BNA)
  modified_base (18)..(18): bicyclic nucleic acid (BNA)
caaggaagauggcauutc

SEQ ID NO: 11698 - DNA, 17 bp, Artificial Sequence
  source: /note="Description of Artificial Sequence: Synthetic oligonucleotide"
  source: /note="Description of Combined DNA/RNA Molecule: Synthetic oligonucleotide"
  source: /note="DNA/RNA"
  source: /note="5' tri-ethylene glycol (TEG)"
  modified_base (1)..(1): bicyclic nucleic acid (BNA)
  modified_base (2)..(2): bicyclic nucleic acid (BNA)
  modified_base (16)..(16): bicyclic nucleic acid (BNA)
  modified_base (17)..(17): bicyclic nucleic acid (BNA)
caaggaagauggcautt

SEQ ID NO: 11699 - DNA, 16 bp, Artificial Sequence
  source: /note="Description of Artificial Sequence: Synthetic oligonucleotide"
  source: /note="Description of Combined DNA/RNA Molecule: Synthetic oligonucleotide"
  source: /note="DNA/RNA"
  source: /note="5' tri-ethylene glycol (TEG)"
  modified_base (1)..(1): bicyclic nucleic acid (BNA)
  modified_base (2)..(2): bicyclic nucleic acid (BNA)
  modified_base (15)..(15): bicyclic nucleic acid (BNA)
  modified_base (16)..(16): bicyclic nucleic acid (BNA)
caaggaagauggcatt

SEQ ID NO: 11700 - DNA, 15 bp, Artificial Sequence
  source: /note="Description of Artificial Sequence: Synthetic oligonucleotide"
  source: /note="Description of Combined DNA/RNA Molecule: Synthetic oligonucleotide"
  source: /note="DNA/RNA"
  source: /note="5' tri-ethylene glycol (TEG)"
  modified_base (1)..(1): bicyclic nucleic acid (BNA)
  modified_base (2)..(2): bicyclic nucleic acid (BNA)
  modified_base (14)..(14): bicyclic nucleic acid (BNA)
  modified_base (15)..(15): bicyclic nucleic acid (BNA)
caaggaagauggcat

SEQ ID NO: 11701 - RNA, 14 nt, Artificial Sequence
  source: /note="Description of Artificial Sequence: Synthetic oligonucleotide"
  source: /note="RNA"
  source: /note="5' tri-ethylene glycol (TEG)"
  modified_base (1)..(1): bicyclic nucleic acid (BNA)
  modified_base (2)..(2): bicyclic nucleic acid (BNA)
  modified_base (13)..(13): bicyclic nucleic acid (BNA)
  modified_base (14)..(14): bicyclic nucleic acid (BNA)
caaggaagauggca

SEQ ID NO: 11702 - RNA, 13 nt, Artificial Sequence
  source: /note="Description of Artificial Sequence: Synthetic oligonucleotide"
  source: /note="RNA"
  source: /note="5' tri-ethylene glycol (TEG)"
  modified_base (1)..(1): bicyclic nucleic acid (BNA)
  modified_base (2)..(2): bicyclic nucleic acid (BNA)
  modified_base (12)..(12): bicyclic nucleic acid (BNA)
  modified_base (13)..(13): bicyclic nucleic acid (BNA)
caaggaagauggc

SEQ ID NO: 11703 - RNA, 12 nt, Artificial Sequence
  source: /note="Description of Artificial Sequence: Synthetic oligonucleotide"
  source: /note="RNA"
  source: /note="5' tri-ethylene glycol (TEG)"
  modified_base (1)..(1): bicyclic nucleic acid (BNA)
  modified_base (2)..(2): bicyclic nucleic acid (BNA)
  modified_base (11)..(11): bicyclic nucleic acid (BNA)
  modified_base (12)..(12): bicyclic nucleic acid (BNA)
caaggaagaugg

SEQ ID NO: 11704 - DNA, 11 bp, Artificial Sequence
  source: /note="Description of Artificial Sequence: Synthetic oligonucleotide"
  source: /note="DNA/RNA"
  source: /note="5' tri-ethylene glycol (TEG)"
  modified_base (1)..(1): bicyclic nucleic acid (BNA)
  modified_base (2)..(2): bicyclic nucleic acid (BNA)
  modified_base (10)..(10): bicyclic nucleic acid (BNA)
  modified_base (11)..(11): bicyclic nucleic acid (BNA)
caaggaagatg

SEQ ID NO: 11705 - DNA, 10 bp, Artificial Sequence
  source: /note="Description of Artificial Sequence: Synthetic oligonucleotide"
  source: /note="DNA/RNA"
  source: /note="5' tri-ethylene glycol (TEG)"
  modified_base (1)..(1): bicyclic nucleic acid (BNA)
  modified_base (2)..(2): bicyclic nucleic acid (BNA)
  modified_base (9)..(9): bicyclic nucleic acid (BNA)
  modified_base (10)..(10): bicyclic nucleic acid (BNA)
caaggaagat

SEQ ID NO: 11706 - RNA, 9 nt, Artificial Sequence
  source: /note="Description of Artificial Sequence: Synthetic oligonucleotide"
  source: /note="RNA/Antisense Oligonucleotide"
  source: /note="5' tri-ethylene glycol (TEG)"
  modified_base (1)..(1): bicyclic nucleic acid (BNA)
  modified_base (2)..(2): bicyclic nucleic acid (BNA)
  modified_base (8)..(8): bicyclic nucleic acid (BNA)
  modified_base (9)..(9): bicyclic nucleic acid (BNA)
caaggaaga

SEQ ID NO: 11707 - RNA, 8 nt, Artificial Sequence
  source: /note="Description of Artificial Sequence: Synthetic oligonucleotide"
  source: /note="RNA/Antisense Oligonucleotide"
  source: /note="5' tri-ethylene glycol (TEG)"
  modified_base (1)..(1): bicyclic nucleic acid (BNA)
  modified_base (2)..(2): bicyclic nucleic acid (BNA)
  modified_base (7)..(7): bicyclic nucleic acid (BNA)
  modified_base (8)..(8): bicyclic nucleic acid (BNA)
caaggaag

SEQ ID NO: 11708 - RNA, 20 nt, Artificial Sequence
  source: /note="Description of Artificial Sequence: Synthetic oligonucleotide"
  source: /note="RNA"
  source: /note="5' tri-ethylene glycol (TEG)"
  modified_base (1)..(1): bicyclic nucleic acid (BNA)
  modified_base (2)..(2): bicyclic nucleic acid (BNA)
  modified_base (19)..(19): bicyclic nucleic acid (BNA)
  modified_base (20)..(20): bicyclic nucleic acid (BNA)
aaggaagauggcauuucuag

SEQ ID NO: 11709 - DNA, 19 bp, Artificial Sequence
  source: /note="Description of Artificial Sequence: Synthetic oligonucleotide"
  source: /note="Description of Combined DNA/RNA Molecule: Synthetic oligonucleotide"
  source: /note="DNA/RNA"
  source: /note="5' tri-ethylene glycol (TEG)"
  modified_base (1)..(1): bicyclic nucleic acid (BNA)
  modified_base (2)..(2): bicyclic nucleic acid (BNA)
  modified_base (18)..(18): bicyclic nucleic acid (BNA)
  modified_base (19)..(19): bicyclic nucleic acid (BNA)
aaggaagauggcauuucta

SEQ ID NO: 11710 - DNA, 18 bp, Artificial Sequence
  source: /note="Description of Artificial Sequence: Synthetic oligonucleotide"
  source: /note="Description of Combined DNA/RNA Molecule: Synthetic oligonucleotide"
  source: /note="DNA/RNA"
  source: /note="5' tri-ethylene glycol (TEG)"
  modified_base (1)..(1): bicyclic nucleic acid (BNA)
  modified_base (2)..(2): bicyclic nucleic acid (BNA)
  modified_base (17)..(17): bicyclic nucleic acid (BNA)
  modified_base (18)..(18): bicyclic nucleic acid (BNA)
aaggaagauggcauuuct

SEQ ID NO: 11711 - DNA, 17 bp, Artificial Sequence
  source: /note="Description of Artificial Sequence: Synthetic oligonucleotide"
  source: /note="Description of Combined DNA/RNA Molecule: Synthetic oligonucleotide"
  source: /note="DNA/RNA"
  source: /note="5' tri-ethylene glycol (TEG)"
  modified_base (1)..(1): bicyclic nucleic acid (BNA)
  modified_base (2)..(2): bicyclic nucleic acid (BNA)
  modified_base (16)..(16): bicyclic nucleic acid (BNA)
  modified_base (17)..(17): bicyclic nucleic acid (BNA)
aaggaagauggcauutc

SEQ ID NO: 11712 - DNA, 16 bp, Artificial Sequence
  source: /note="Description of Artificial Sequence: Synthetic oligonucleotide"
  source: /note="Description of Combined DNA/RNA Molecule: Synthetic oligonucleotide"
  source: /note="DNA/RNA"
  source: /note="5' tri-ethylene glycol (TEG)"
  modified_base (1)..(1): bicyclic nucleic acid (BNA)
  modified_base (2)..(2): bicyclic nucleic acid (BNA)
  modified_base (15)..(15): bicyclic nucleic acid (BNA)
  modified_base (16)..(16): bicyclic nucleic acid (BNA)
aaggaagauggcautt

SEQ ID NO: 11713 - DNA, 15 bp, Artificial Sequence
  source: /note="Description of Artificial Sequence: Synthetic oligonucleotide"
  source: /note="Description of Combined DNA/RNA Molecule: Synthetic oligonucleotide"
  source: /note="DNA/RNA"
  source: /note="5' tri-ethylene glycol (TEG)"
  modified_base (1)..(1): bicyclic nucleic acid (BNA)
  modified_base (2)..(2): bicyclic nucleic acid (BNA)
  modified_base (14)..(14): bicyclic nucleic acid (BNA)
  modified_base (15)..(15): bicyclic nucleic acid (BNA)
aaggaagauggcatt

SEQ ID NO: 11714 - DNA, 14 bp, Artificial Sequence
  source: /note="Description of Artificial Sequence: Synthetic oligonucleotide"
  source: /note="Description of Combined DNA/RNA Molecule: Synthetic oligonucleotide"
  source: /note="DNA/RNA"
  source: /note="5' tri-ethylene glycol (TEG)"
  modified_base (1)..(1): bicyclic nucleic acid (BNA)
  modified_base (2)..(2): bicyclic nucleic acid (BNA)
  modified_base (13)..(13): bicyclic nucleic acid (BNA)
  modified_base (14)..(14): bicyclic nucleic acid (BNA)
aaggaagauggcat

SEQ ID NO: 11715 - RNA, 13 nt, Artificial Sequence
  source: /note="Description of Artificial Sequence: Synthetic oligonucleotide"
  source: /note="RNA"
  source: /note="5' tri-ethylene glycol (TEG)"
  modified_base (1)..(1): bicyclic nucleic acid (BNA)
  modified_base (2)..(2): bicyclic nucleic acid (BNA)
  modified_base (12)..(12): bicyclic nucleic acid (BNA)
  modified_base (13)..(13): bicyclic nucleic acid (BNA)
aaggaagauggca

SEQ ID NO: 11716 - RNA, 12 nt, Artificial Sequence
  source: /note="Description of Artificial Sequence: Synthetic oligonucleotide"
  source: /note="RNA"
  source: /note="5' tri-ethylene glycol (TEG)"
  modified_base (1)..(1): bicyclic nucleic acid (BNA)
  modified_base (2)..(2): bicyclic nucleic acid (BNA)
  modified_base (11)..(11): bicyclic nucleic acid (BNA)
  modified_base (12)..(12): bicyclic nucleic acid (BNA)
aaggaagauggc

SEQ ID NO: 11717 - RNA, 11 nt, Artificial Sequence
  source: /note="Description of Artificial Sequence: Synthetic oligonucleotide"
  source: /note="RNA"
  source: /note="5' tri-ethylene glycol (TEG)"
  modified_base (1)..(1): bicyclic nucleic acid (BNA)
  modified_base (2)..(2): bicyclic nucleic acid (BNA)
  modified_base (10)..(10): bicyclic nucleic acid (BNA)
  modified_base (11)..(11): bicyclic nucleic acid (BNA)
aaggaagaugg

SEQ ID NO: 11718 - DNA, 10 bp, Artificial Sequence
  source: /note="Description of Artificial Sequence: Synthetic oligonucleotide"
  source: /note="DNA/RNA"
  source: /note="5' tri-ethylene glycol (TEG)"
  modified_base (1)..(1): bicyclic nucleic acid (BNA)
  modified_base (2)..(2): bicyclic nucleic acid (BNA)
  modified_base (9)..(9): bicyclic nucleic acid (BNA)
  modified_base (10)..(10): bicyclic nucleic acid (BNA)
aaggaagatg

SEQ ID NO: 11719 - DNA, 9 bp, Artificial Sequence
  source: /note="Description of Artificial Sequence: Synthetic oligonucleotide"
  source: /note="DNA/RNA"
  source: /note="5' tri-ethylene glycol (TEG)"
  modified_base (1)..(1): bicyclic nucleic acid (BNA)
  modified_base (2)..(2): bicyclic nucleic acid (BNA)
  modified_base (8)..(8): bicyclic nucleic acid (BNA)
  modified_base (9)..(9): bicyclic nucleic acid (BNA)
aaggaagat

SEQ ID NO: 11720 - RNA, 8 nt, Artificial Sequence
  source: /note="Description of Artificial Sequence: Synthetic oligonucleotide"
  source: /note="RNA/Antisense Oligonucleotide"
  source: /note="5' tri-ethylene glycol (TEG)"
  modified_base (1)..(1): bicyclic nucleic acid (BNA)
  modified_base (2)..(2): bicyclic nucleic acid (BNA)
  modified_base (7)..(7): bicyclic nucleic acid (BNA)
  modified_base (8)..(8): bicyclic nucleic acid (BNA)
aaggaaga

SEQ ID NO: 11721 - RNA, 19 nt, Artificial Sequence
  source: /note="Description of Artificial Sequence: Synthetic oligonucleotide"
  source: /note="RNA"
  source: /note="5' tri-ethylene glycol (TEG)"
  modified_base (1)..(1): bicyclic nucleic acid (BNA)
  modified_base (2)..(2): bicyclic nucleic acid (BNA)
  modified_base (18)..(18): bicyclic nucleic acid (BNA)
  modified_base (19)..(19): bicyclic nucleic acid (BNA)
aggaagauggcauuucuag

SEQ ID NO: 11722 - DNA, 18 bp, Artificial Sequence
  source: /note="Description of Artificial Sequence: Synthetic oligonucleotide"
  source: /note="Description of Combined DNA/RNA Molecule: Synthetic oligonucleotide"
  source: /note="DNA/RNA"
  source: /note="5' tri-ethylene glycol (TEG)"
  modified_base (1)..(1): bicyclic nucleic acid (BNA)
  modified_base (2)..(2): bicyclic nucleic acid (BNA)
  modified_base (17)..(17): bicyclic nucleic acid (BNA)
  modified_base (18)..(18): bicyclic nucleic acid (BNA)
aggaagauggcauuucta

SEQ ID NO: 11723 - DNA, 17 bp, Artificial Sequence
  source: /note="Description of Artificial Sequence: Synthetic oligonucleotide"
  source: /note="Description of Combined DNA/RNA Molecule: Synthetic oligonucleotide"
  source: /note="DNA/RNA"
  source: /note="5' tri-ethylene glycol (TEG)"
  modified_base (1)..(1): bicyclic nucleic acid (BNA)
  modified_base (2)..(2): bicyclic nucleic acid (BNA)
  modified_base (16)..(16): bicyclic nucleic acid (BNA)
  modified_base (17)..(17): bicyclic nucleic acid (BNA)
aggaagauggcauuuct

SEQ ID NO: 11724 - DNA, 16 bp, Artificial Sequence
  source: /note="Description of Artificial Sequence: Synthetic oligonucleotide"
  source: /note="Description of Combined DNA/RNA Molecule: Synthetic oligonucleotide"
  source: /note="DNA/RNA"
  source: /note="5' tri-ethylene glycol (TEG)"
  modified_base (1)..(1): bicyclic nucleic acid (BNA)
  modified_base (2)..(2): bicyclic nucleic acid (BNA)
  modified_base (15)..(15): bicyclic nucleic acid (BNA)
  modified_base (16)..(16): bicyclic nucleic acid (BNA)
aggaagauggcauutc

SEQ ID NO: 11725 - DNA, 15 bp, Artificial Sequence
  source: /note="Description of Artificial Sequence: Synthetic oligonucleotide"
  source: /note="Description of Combined DNA/RNA Molecule: Synthetic oligonucleotide"
  source: /note="DNA/RNA"
  source: /note="5' tri-ethylene glycol (TEG)"
  modified_base (1)..(1): bicyclic nucleic acid (BNA)
  modified_base (2)..(2): bicyclic nucleic acid (BNA)
  modified_base (14)..(14): bicyclic nucleic acid (BNA)
  modified_base (15)..(15): bicyclic nucleic acid (BNA)
aggaagauggcautt

SEQ ID NO: 11726 - DNA, 14 bp, Artificial Sequence
  source: /note="Description of Artificial Sequence: Synthetic oligonucleotide"
  source: /note="Description of Combined DNA/RNA Molecule: Synthetic oligonucleotide"
  source: /note="DNA/RNA"
  source: /note="5' tri-ethylene glycol (TEG)"
  modified_base (1)..(1): bicyclic nucleic acid (BNA)
  modified_base (2)..(2): bicyclic nucleic acid (BNA)
  modified_base (13)..(13): bicyclic nucleic acid (BNA)
  modified_base (14)..(14): bicyclic nucleic acid (BNA)
aggaagauggcatt

SEQ ID NO: 11727 - DNA, 13 bp, Artificial Sequence
  source: /note="Description of Artificial Sequence: Synthetic oligonucleotide"
  source: /note="Description of Combined DNA/RNA Molecule: Synthetic oligonucleotide"
  source: /note="DNA/RNA"
  source: /note="5' tri-ethylene glycol (TEG)"
  modified_base (1)..(1): bicyclic nucleic acid (BNA)
  modified_base (2)..(2): bicyclic nucleic acid (BNA)
  modified_base (12)..(12): bicyclic nucleic acid (BNA)
  modified_base (13)..(13): bicyclic nucleic acid (BNA)
aggaagauggcat

SEQ ID NO: 11728 - RNA, 12 nt, Artificial Sequence
  source: /note="Description of Artificial Sequence: Synthetic oligonucleotide"
  source: /note="RNA"
  source: /note="5' tri-ethylene glycol (TEG)"
  modified_base (1)..(1): bicyclic nucleic acid (BNA)
  modified_base (2)..(2): bicyclic nucleic acid (BNA)
  modified_base (11)..(11): bicyclic nucleic acid (BNA)
  modified_base (12)..(12): bicyclic nucleic acid (BNA)
aggaagauggca

SEQ ID NO: 11729 - RNA, 10 nt, Artificial Sequence
  source: /note="Description of Artificial Sequence: Synthetic oligonucleotide"
  source: /note="RNA"
  source: /note="5' tri-ethylene glycol (TEG)"
  modified_base (1)..(1): bicyclic nucleic acid (BNA)
  modified_base (2)..(2): bicyclic nucleic acid (BNA)
  modified_base (9)..(9): bicyclic nucleic acid (BNA)
  modified_base (10)..(10): bicyclic nucleic acid (BNA)
aggaagaugg

SEQ ID NO: 11730 - DNA, 9 bp, Artificial Sequence
  source: /note="Description of Artificial Sequence: Synthetic oligonucleotide"
  source: /note="DNA/RNA"
  source: /note="5' tri-ethylene glycol (TEG)"
  modified_base (1)..(1): bicyclic nucleic acid (BNA)
  modified_base (2)..(2): bicyclic nucleic acid (BNA)
  modified_base (8)..(8): bicyclic nucleic acid (BNA)
  modified_base (9)..(9): bicyclic nucleic acid (BNA)
aggaagatg

SEQ ID NO: 11731 - DNA, 8 bp, Artificial Sequence
  source: /note="Description of Artificial Sequence: Synthetic oligonucleotide"
  source: /note="DNA/RNA"
  source: /note="5' tri-ethylene glycol (TEG)"
  modified_base (1)..(1): bicyclic nucleic acid (BNA)
  modified_base (2)..(2): bicyclic nucleic acid (BNA)
  modified_base (7)..(7): bicyclic nucleic acid (BNA)
  modified_base (8)..(8): bicyclic nucleic acid (BNA)
aggaagat

SEQ ID NO: 11732 - RNA, 18 nt, Artificial Sequence
  source: /note="Description of Artificial Sequence: Synthetic oligonucleotide"
  source: /note="RNA"
  source: /note="5' tri-ethylene glycol (TEG)"
  modified_base (1)..(1): bicyclic nucleic acid (BNA)
  modified_base (2)..(2): bicyclic nucleic acid (BNA)
  modified_base (17)..(17): bicyclic nucleic acid (BNA)
  modified_base (18)..(18): bicyclic nucleic acid (BNA)
ggaagauggcauuucuag

SEQ ID NO: 11733 - DNA, 17 bp, Artificial Sequence
  source: /note="Description of Artificial Sequence: Synthetic oligonucleotide"
  source: /note="Description of Combined DNA/RNA Molecule: Synthetic oligonucleotide"
  source: /note="DNA/RNA"
  source: /note="5' tri-ethylene glycol (TEG)"
  modified_base (1)..(1): bicyclic nucleic acid (BNA)
  modified_base (2)..(2): bicyclic nucleic acid (BNA)
  modified_base (16)..(16): bicyclic nucleic acid (BNA)
  modified_base (17)..(17): bicyclic nucleic acid (BNA)
ggaagauggcauuucta

SEQ ID NO: 11734 - DNA, 16 bp, Artificial Sequence
  source: /note="Description of Artificial Sequence: Synthetic oligonucleotide"
  source: /note="Description of Combined DNA/RNA Molecule: Synthetic oligonucleotide"
  source: /note="DNA/RNA"
  source: /note="5' tri-ethylene glycol (TEG)"
  modified_base (1)..(1): bicyclic nucleic acid (BNA)
  modified_base (2)..(2): bicyclic nucleic acid (BNA)
  modified_base (15)..(15): bicyclic nucleic acid (BNA)
  modified_base (16)..(16): bicyclic nucleic acid (BNA)
ggaagauggcauuuct

SEQ ID NO: 11735 - DNA, 15 bp, Artificial Sequence
  source: /note="Description of Artificial Sequence: Synthetic oligonucleotide"
  source: /note="Description of Combined DNA/RNA Molecule: Synthetic oligonucleotide"
  source: /note="DNA/RNA"
  source: /note="5' tri-ethylene glycol (TEG)"
  modified_base (1)..(1): bicyclic nucleic acid (BNA)
  modified_base (2)..(2): bicyclic nucleic acid (BNA)
  modified_base (14)..(14): bicyclic nucleic acid (BNA)
  modified_base (15)..(15): bicyclic nucleic acid (BNA)
ggaagauggcauutc

SEQ ID NO: 11736 - DNA, 14 bp, Artificial Sequence
  source: /note="Description of Artificial Sequence: Synthetic oligonucleotide"
  source: /note="Description of Combined DNA/RNA Molecule: Synthetic oligonucleotide"
  source: /note="DNA/RNA"
  source: /note="5' tri-ethylene glycol (TEG)"
  modified_base (1)..(1): bicyclic nucleic acid (BNA)
  modified_base (2)..(2): bicyclic nucleic acid (BNA)
  modified_base (13)..(13): bicyclic nucleic acid (BNA)
  modified_base (14)..(14): bicyclic nucleic acid (BNA)
ggaagauggcautt

SEQ ID NO: 11737 - DNA, 13 bp, Artificial Sequence
  source: /note="Description of Artificial Sequence: Synthetic oligonucleotide"
  source: /note="Description of Combined DNA/RNA Molecule: Synthetic oligonucleotide"
  source: /note="DNA/RNA"
  source: /note="5' tri-ethylene glycol (TEG)"
  modified_base (1)..(1): bicyclic nucleic acid (BNA)
  modified_base (2)..(2): bicyclic nucleic acid (BNA)
  modified_base (12)..(12): bicyclic nucleic acid (BNA)
  modified_base (13)..(13): bicyclic nucleic acid (BNA)
ggaagauggcatt

SEQ ID NO: 11738 - DNA, 12 bp, Artificial Sequence
  source: /note="Description of Artificial Sequence: Synthetic oligonucleotide"
  source: /note="Description of Combined DNA/RNA Molecule: Synthetic oligonucleotide"
  source: /note="DNA/RNA"
  source: /note="5' tri-ethylene glycol (TEG)"
  modified_base (1)..(1): bicyclic nucleic acid (BNA)
  modified_base (2)..(2): bicyclic nucleic acid (BNA)
  modified_base (11)..(11): bicyclic nucleic acid (BNA)
  modified_base (12)..(12): bicyclic nucleic acid (BNA)
ggaagauggcat

SEQ ID NO: 11739 - RNA, 11 nt, Artificial Sequence
  source: /note="Description of Artificial Sequence: Synthetic oligonucleotide"
  source: /note="RNA"
  source: /note="5' tri-ethylene glycol (TEG)"
  modified_base (1)..(1): bicyclic nucleic acid (BNA)
  modified_base (2)..(2): bicyclic nucleic acid (BNA)
  modified_base (10)..(10): bicyclic nucleic acid (BNA)
  modified_base (11)..(11): bicyclic nucleic acid (BNA)
ggaagauggca

SEQ ID NO: 11740 - RNA, 10 nt, Artificial Sequence
  source: /note="Description of Artificial Sequence: Synthetic oligonucleotide"
  source: /note="RNA"
  source: /note="5' tri-ethylene glycol (TEG)"
  modified_base (1)..(1): bicyclic nucleic acid (BNA)
  modified_base (2)..(2): bicyclic nucleic acid (BNA)
  modified_base (9)..(9): bicyclic nucleic acid (BNA)
  modified_base (10)..(10): bicyclic nucleic acid (BNA)
ggaagauggc

SEQ ID NO: 11741 - DNA, 8 bp, Artificial Sequence
  source: /note="Description of Artificial Sequence: Synthetic oligonucleotide"
  source: /note="DNA/RNA"
  source: /note="5' tri-ethylene glycol (TEG)"
  modified_base (1)..(1): bicyclic nucleic acid (BNA)
  modified_base (2)..(2): bicyclic nucleic acid (BNA)
  modified_base (7)..(7): bicyclic nucleic acid (BNA)
  modified_base (8)..(8): bicyclic nucleic acid (BNA)
ggaagatg

SEQ ID NO: 11742 - RNA, 17 nt, Artificial Sequence
  source: /note="Description of Artificial Sequence: Synthetic oligonucleotide"
  source: /note="RNA"
  source: /note="5' tri-ethylene glycol (TEG)"
  modified_base (1)..(1): bicyclic nucleic acid (BNA)
  modified_base (2)..(2): bicyclic nucleic acid (BNA)
  modified_base (16)..(16): bicyclic nucleic acid (BNA)
  modified_base (17)..(17): bicyclic nucleic acid (BNA)
gaagauggcauuucuag

SEQ ID NO: 11743 - DNA, 16 bp, Artificial Sequence
  source: /note="Description of Artificial Sequence: Synthetic oligonucleotide"
  source: /note="Description of Combined DNA/RNA Molecule: Synthetic oligonucleotide"
  source: /note="DNA/RNA"
  source: /note="5' tri-ethylene glycol (TEG)"
  modified_base (1)..(1): bicyclic nucleic acid (BNA)
  modified_base (2)..(2): bicyclic nucleic acid (BNA)
  modified_base (15)..(15): bicyclic nucleic acid (BNA)
  modified_base (16)..(16): bicyclic nucleic acid (BNA)
gaagauggcauuucta

SEQ ID NO: 11744 - DNA, 14 bp, Artificial Sequence
  source: /note="Description of Artificial Sequence: Synthetic oligonucleotide"
  source: /note="Description of Combined DNA/RNA Molecule: Synthetic oligonucleotide"
  source: /note="DNA/RNA"
  source: /note="5' tri-ethylene glycol (TEG)"
  modified_base (1)..(1): bicyclic nucleic acid (BNA)
  modified_base (2)..(2): bicyclic nucleic acid (BNA)
  modified_base (13)..(13): bicyclic nucleic acid (BNA)
  modified_base (14)..(14): bicyclic nucleic acid (BNA)
gaagauggcauutc

SEQ ID NO: 11745 - DNA, 13 bp, Artificial Sequence
  source: /note="Description of Artificial Sequence: Synthetic oligonucleotide"
  source: /note="Description of Combined DNA/RNA Molecule: Synthetic oligonucleotide"
  source: /note="DNA/RNA"
  source: /note="5' tri-ethylene glycol (TEG)"
  modified_base (1)..(1): bicyclic nucleic acid (BNA)
  modified_base (2)..(2): bicyclic nucleic acid (BNA)
  modified_base (12)..(12): bicyclic nucleic acid (BNA)
  modified_base (13)..(13): bicyclic nucleic acid (BNA)
gaagauggcautt

SEQ ID NO: 11746 - DNA, 12 bp, Artificial Sequence
  source: /note="Description of Artificial Sequence: Synthetic oligonucleotide"
  source: /note="Description of Combined DNA/RNA Molecule: Synthetic oligonucleotide"
  source: /note="DNA/RNA"
  source: /note="5' tri-ethylene glycol (TEG)"
  modified_base (1)..(1): bicyclic nucleic acid (BNA)
  modified_base (2)..(2): bicyclic nucleic acid (BNA)
  modified_base (11)..(11): bicyclic nucleic acid (BNA)
  modified_base (12)..(12): bicyclic nucleic acid (BNA)
gaagauggcatt

SEQ ID NO: 11747 - DNA, 11 bp, Artificial Sequence
  source: /note="Description of Artificial Sequence: Synthetic oligonucleotide"
  source: /note="Description of Combined DNA/RNA Molecule: Synthetic oligonucleotide"
  source: /note="DNA/RNA"
  source: /note="5' tri-ethylene glycol (TEG)"
  modified_base (1)..(1): bicyclic nucleic acid (BNA)
  modified_base (2)..(2): bicyclic nucleic acid (BNA)
  modified_base (10)..(10): bicyclic nucleic acid (BNA)
  modified_base (11)..(11): bicyclic nucleic acid (BNA)
gaagauggcat

SEQ ID NO: 11748 - RNA, 10 nt, Artificial Sequence
  source: /note="Description of Artificial Sequence: Synthetic oligonucleotide"
  source: /note="RNA"
  source: /note="5' tri-ethylene glycol (TEG)"
  modified_base (1)..(1): bicyclic nucleic acid (BNA)
  modified_base (2)..(2): bicyclic nucleic acid (BNA)
  modified_base (9)..(9): bicyclic nucleic acid (BNA)
  modified_base (10)..(10): bicyclic nucleic acid (BNA)
gaagauggca

SEQ ID NO: 11749 - RNA, 9 nt, Artificial Sequence
  source: /note="Description of Artificial Sequence: Synthetic oligonucleotide"
  source: /note="RNA"
  source: /note="5' tri-ethylene glycol (TEG)"
  modified_base (1)..(1): bicyclic nucleic acid (BNA)
  modified_base (2)..(2): bicyclic nucleic acid (BNA)
  modified_base (8)..(8): bicyclic nucleic acid (BNA)
  modified_base (9)..(9): bicyclic nucleic acid (BNA)
gaagauggc

SEQ ID NO: 11750 - RNA, 8 nt, Artificial Sequence
  source: /note="Description of Artificial Sequence: Synthetic oligonucleotide"
  source: /note="RNA"
  source: /note="5' tri-ethylene glycol (TEG)"
  modified_base (1)..(1): bicyclic nucleic acid (BNA)
  modified_base (2)..(2): bicyclic nucleic acid (BNA)
  modified_base (7)..(7): bicyclic nucleic acid (BNA)
  modified_base (8)..(8): bicyclic nucleic acid (BNA)
gaagaugg

SEQ ID NO: 11751 - RNA, 16 nt, Artificial Sequence
  source: /note="Description of Artificial Sequence: Synthetic oligonucleotide"
  source: /note="RNA"
  source: /note="5' tri-ethylene glycol (TEG)"
  modified_base (1)..(1): bicyclic nucleic acid (BNA)
  modified_base (2)..(2): bicyclic nucleic acid (BNA)
  modified_base (15)..(15): bicyclic nucleic acid (BNA)
  modified_base (16)..(16): bicyclic nucleic acid (BNA)
aagauggcauuucuag

SEQ ID NO: 11752 - DNA, 15 bp, Artificial Sequence
  source: /note="Description of Artificial Sequence: Synthetic oligonucleotide"
  source: /note="Description of Combined DNA/RNA Molecule: Synthetic oligonucleotide"
  source: /note="DNA/RNA"
  source: /note="5' tri-ethylene glycol (TEG)"
  modified_base (1)..(1): bicyclic nucleic acid (BNA)
  modified_base (2)..(2): bicyclic nucleic acid (BNA)
  modified_base (14)..(14): bicyclic nucleic acid (BNA)
  modified_base (15)..(15): bicyclic nucleic acid (BNA)
aagauggcauuucta

SEQ ID NO: 11753 - DNA, 14 bp, Artificial Sequence
  source: /note="Description of Artificial Sequence: Synthetic oligonucleotide"
  source: /note="Description of Combined DNA/RNA Molecule: Synthetic oligonucleotide"
  source: /note="DNA/RNA"
  source: /note="5' tri-ethylene glycol (TEG)"
  modified_base (1)..(1): bicyclic nucleic acid (BNA)
  modified_base (2)..(2): bicyclic nucleic acid (BNA)
  modified_base (13)..(13): bicyclic nucleic acid (BNA)
  modified_base (14)..(14): bicyclic nucleic acid (BNA)
aagauggcauuuct

SEQ ID NO: 11754 - DNA, 13 bp, Artificial Sequence
  source: /note="Description of Artificial Sequence: Synthetic oligonucleotide"
  source: /note="Description of Combined DNA/RNA Molecule: Synthetic oligonucleotide"
  source: /note="DNA/RNA"
  source: /note="5' tri-ethylene glycol (TEG)"
  modified_base (1)..(1): bicyclic nucleic acid (BNA)
  modified_base (2)..(2): bicyclic nucleic acid (BNA)
  modified_base (12)..(12): bicyclic nucleic acid (BNA)
  modified_base (13)..(13): bicyclic nucleic acid (BNA)
aagauggcauutc

SEQ ID NO: 11755 - DNA, 12 bp, Artificial Sequence
  source: /note="Description of Artificial Sequence: Synthetic oligonucleotide"
  source: /note="Description of Combined DNA/RNA Molecule: Synthetic oligonucleotide"
  source: /note="DNA/RNA"
  source: /note="5' tri-ethylene glycol (TEG)"
  modified_base (1)..(1): bicyclic nucleic acid (BNA)
  modified_base (2)..(2): bicyclic nucleic acid (BNA)
  modified_base (11)..(11): bicyclic nucleic acid (BNA)
  modified_base (12)..(12): bicyclic nucleic acid (BNA)
aagauggcautt

SEQ ID NO: 11756 - DNA, 11 bp, Artificial Sequence
  source: /note="Description of Artificial Sequence: Synthetic oligonucleotide"
  source: /note="Description of Combined DNA/RNA Molecule: Synthetic oligonucleotide"
  source: /note="DNA/RNA"
  source: /note="5' tri-ethylene glycol (TEG)"
  modified_base (1)..(1): bicyclic nucleic acid (BNA)
  modified_base (2)..(2): bicyclic nucleic acid (BNA)
  modified_base (10)..(10): bicyclic nucleic acid (BNA)
  modified_base (11)..(11): bicyclic nucleic acid (BNA)
aagauggcatt

SEQ ID NO: 11757 - DNA, 10 bp, Artificial Sequence
  source: /note="Description of Artificial Sequence: Synthetic oligonucleotide"
  source: /note="Description of Combined DNA/RNA Molecule: Synthetic oligonucleotide"
  source: /note="DNA/RNA"
  source: /note="5' tri-ethylene glycol (TEG)"
  modified_base (1)..(1): bicyclic nucleic acid (BNA)
  modified_base (2)..(2): bicyclic nucleic acid (BNA)
  modified_base (9)..(9): bicyclic nucleic acid (BNA)
  modified_base (10)..(10): bicyclic nucleic acid (BNA)
aagauggcat

SEQ ID NO: 11758 - RNA, 9 nt, Artificial Sequence
  source: /note="Description of Artificial Sequence: Synthetic oligonucleotide"
  source: /note="RNA"
  source: /note="5' tri-ethylene glycol (TEG)"
  modified_base (1)..(1): bicyclic nucleic acid (BNA)
  modified_base (2)..(2): bicyclic nucleic acid (BNA)
  modified_base (8)..(8): bicyclic nucleic acid (BNA)
  modified_base (9)..(9): bicyclic nucleic acid (BNA)
aagauggca

SEQ ID NO: 11759 - RNA, 8 nt, Artificial Sequence
  source: /note="Description of Artificial Sequence: Synthetic oligonucleotide"
  source: /note="RNA"
  source: /note="5' tri-ethylene glycol (TEG)"
  modified_base (1)..(1): bicyclic nucleic acid (BNA)
  modified_base (2)..(2): bicyclic nucleic acid (BNA)
  modified_base (7)..(7): bicyclic nucleic acid (BNA)
  modified_base (8)..(8): bicyclic nucleic acid (BNA)
aagauggc

SEQ ID NO: 11760 - RNA, 15 nt, Artificial Sequence
  source: /note="Description of Artificial Sequence: Synthetic oligonucleotide"
  source: /note="RNA"
  source: /note="5' tri-ethylene glycol (TEG)"
  modified_base (1)..(1): bicyclic nucleic acid (BNA)
  modified_base (2)..(2): bicyclic nucleic acid (BNA)
  modified_base (14)..(14): bicyclic nucleic acid (BNA)
  modified_base (15)..(15): bicyclic nucleic acid (BNA)
agauggcauuucuag

SEQ ID NO: 11761 - DNA, 14 bp, Artificial Sequence
  source: /note="Description of Artificial Sequence: Synthetic oligonucleotide"
  source: /note="Description of Combined DNA/RNA Molecule: Synthetic oligonucleotide"
  source: /note="DNA/RNA"
  source: /note="5' tri-ethylene glycol (TEG)"
  modified_base (1)..(1): bicyclic nucleic acid (BNA)
  modified_base (2)..(2): bicyclic nucleic acid (BNA)
  modified_base (13)..(13): bicyclic nucleic acid (BNA)
  modified_base (14)..(14): bicyclic nucleic acid (BNA)
agauggcauuucta

SEQ ID NO: 11762 - DNA, 13 bp, Artificial Sequence
  source: /note="Description of Artificial Sequence: Synthetic oligonucleotide"
  source: /note="Description of Combined DNA/RNA Molecule: Synthetic oligonucleotide"
  source: /note="DNA/RNA"
  source: /note="5' tri-ethylene glycol (TEG)"
  modified_base (1)..(1): bicyclic nucleic acid (BNA)
  modified_base (2)..(2): bicyclic nucleic acid (BNA)
  modified_base (12)..(12): bicyclic nucleic acid (BNA)
  modified_base (13)..(13): bicyclic nucleic acid (BNA)
agauggcauuuct

SEQ ID NO: 11763 - DNA, 12 bp, Artificial Sequence
  source: /note="Description of Artificial Sequence: Synthetic oligonucleotide"
  source: /note="Description of Combined DNA/RNA Molecule: Synthetic oligonucleotide"
  source: /note="DNA/RNA"
  source: /note="5' tri-ethylene glycol (TEG)"
  modified_base (1)..(1): bicyclic nucleic acid (BNA)
  modified_base (2)..(2): bicyclic nucleic acid (BNA)
  modified_base (11)..(11): bicyclic nucleic acid (BNA)
  modified_base (12)..(12): bicyclic nucleic acid (BNA)
agauggcauutc

SEQ ID NO: 11764 - DNA, 11 bp, Artificial Sequence
  source: /note="Description of Artificial Sequence: Synthetic oligonucleotide"
  source: /note="Description of Combined DNA/RNA Molecule: Synthetic oligonucleotide"
  source: /note="DNA/RNA"
  source: /note="5' tri-ethylene glycol (TEG)"
  modified_base (1)..(1): bicyclic nucleic acid (BNA)
  modified_base (2)..(2): bicyclic nucleic acid (BNA)
  modified_base (10)..(10): bicyclic nucleic acid (BNA)
  modified_base (11)..(11): bicyclic nucleic acid (BNA)
agauggcautt

SEQ ID NO: 11765 - DNA, 10 bp, Artificial Sequence
  source: /note="Description of Artificial Sequence: Synthetic oligonucleotide"
  source: /note="Description of Combined DNA/RNA Molecule: Synthetic oligonucleotide"
  source: /note="DNA/RNA"
  source: /note="5' tri-ethylene glycol (TEG)"
  modified_base (1)..(1): bicyclic nucleic acid (BNA)
  modified_base (2)..(2): bicyclic nucleic acid (BNA)
  modified_base (9)..(9): bicyclic nucleic acid (BNA)
  modified_base (10)..(10): bicyclic nucleic acid (BNA)
agauggcatt

SEQ ID NO: 11766 - DNA, 9 bp, Artificial Sequence
  source: /note="Description of Artificial Sequence: Synthetic oligonucleotide"
  source: /note="Description of Combined DNA/RNA Molecule: Synthetic oligonucleotide"
  source: /note="DNA/RNA"
  source: /note="5' tri-ethylene glycol (TEG)"
  modified_base (1)..(1): bicyclic nucleic acid (BNA)
  modified_base (2)..(2): bicyclic nucleic acid (BNA)
  modified_base (8)..(8): bicyclic nucleic acid (BNA)
  modified_base (9)..(9): bicyclic nucleic acid (BNA)
agauggcat

SEQ ID NO: 11767 - RNA, 8 nt, Artificial Sequence
  source: /note="Description of Artificial Sequence: Synthetic oligonucleotide"
  source: /note="RNA"
  source: /note="5' tri-ethylene glycol (TEG)"
  modified_base (1)..(1): bicyclic nucleic acid (BNA)
  modified_base (2)..(2): bicyclic nucleic acid (BNA)
  modified_base (7)..(7): bicyclic nucleic acid (BNA)
  modified_base (8)..(8): bicyclic nucleic acid (BNA)
agauggca

SEQ ID NO: 11768 - DNA, 30 bp, Artificial Sequence; identical to SEQ ID NO: 8204
  source: /note="Description of Artificial Sequence: Synthetic oligonucleotide"
  source: /note="Description of Combined DNA/RNA Molecule: Synthetic oligonucleotide"
  source: /note="DNA/RNA"
  source: /note="5' tri-ethylene glycol (TEG)"
  modified_base (1)..(1): bicyclic nucleic acid (BNA)
  modified_base (2)..(2): bicyclic nucleic acid (BNA)
  modified_base (29)..(29): bicyclic nucleic acid (BNA)
  modified_base (30)..(30): bicyclic nucleic acid (BNA)

SEQ ID NO: 11769 - DNA, 29 bp, Artificial Sequence
  source: /note="Description of Artificial Sequence: Synthetic oligonucleotide"
  source: /note="Description of Combined DNA/RNA Molecule: Synthetic oligonucleotide"
  source: /note="DNA/RNA"
  source: /note="5' tri-ethylene glycol (TEG)"
  modified_base (1)..(1): bicyclic nucleic acid (BNA)
  modified_base (2)..(2): bicyclic nucleic acid (BNA)
  modified_base (28)..(28): bicyclic nucleic acid (BNA)
  modified_base (29)..(29): bicyclic nucleic acid (BNA)
ctccaacaucaaggaagauggcauuucta

SEQ ID NO: 11770 - DNA, 28 bp, Artificial Sequence
  source: /note="Description of Artificial Sequence: Synthetic oligonucleotide"
  source: /note="Description of Combined DNA/RNA Molecule: Synthetic oligonucleotide"
  source: /note="DNA/RNA"
  source: /note="5' tri-ethylene glycol (TEG)"
  modified_base (1)..(1): bicyclic nucleic acid (BNA)
  modified_base (2)..(2): bicyclic nucleic acid (BNA)
  modified_base (27)..(27): bicyclic nucleic acid (BNA)
  modified_base (28)..(28): bicyclic nucleic acid (BNA)
ctccaacaucaaggaagauggcauuuct

SEQ ID NO: 11771 - DNA, 27 bp, Artificial Sequence
  source: /note="Description of Artificial Sequence: Synthetic oligonucleotide"
  source: /note="Description of Combined DNA/RNA Molecule: Synthetic oligonucleotide"
  source: /note="DNA/RNA"
  source: /note="5' tri-ethylene glycol (TEG)"
  modified_base (1)..(1): bicyclic nucleic acid (BNA)
  modified_base (2)..(2): bicyclic nucleic acid (BNA)
  modified_base (26)..(26): bicyclic nucleic acid (BNA)
  modified_base (27)..(27): bicyclic nucleic acid (BNA)
ctccaacaucaaggaagauggcauutc

SEQ ID NO: 11772 - DNA, 26 bp, Artificial Sequence
  source: /note="Description of Artificial Sequence: Synthetic oligonucleotide"
  source: /note="Description of Combined DNA/RNA Molecule: Synthetic oligonucleotide"
  source: /note="DNA/RNA"
  source: /note="5' tri-ethylene glycol (TEG)"
  modified_base (1)..(1): bicyclic nucleic acid (BNA)
  modified_base (2)..(2): bicyclic nucleic acid (BNA)
  modified_base (25)..(25): bicyclic nucleic acid (BNA)
  modified_base (26)..(26): bicyclic nucleic acid (BNA)
ctccaacaucaaggaagauggcautt

SEQ ID NO: 11773 - DNA, 25 bp, Artificial Sequence
  source: /note="Description of Artificial Sequence: Synthetic oligonucleotide"
  source: /note="Description of Combined DNA/RNA Molecule: Synthetic oligonucleotide"
  source: /note="DNA/RNA"
  source: /note="5' tri-ethylene glycol (TEG)"
  modified_base (1)..(1): bicyclic nucleic acid (BNA)
  modified_base (2)..(2): bicyclic nucleic acid (BNA)
  modified_base (24)..(24): bicyclic nucleic acid (BNA)
  modified_base (25)..(25): bicyclic nucleic acid (BNA)
ctccaacaucaaggaagauggcatt

SEQ ID NO: 11774 - DNA, 24 bp, Artificial Sequence
  source: /note="Description of Artificial Sequence: Synthetic oligonucleotide"
  source: /note="Description of Combined DNA/RNA Molecule: Synthetic oligonucleotide"
  source: /note="DNA/RNA"
  source: /note="5' tri-ethylene glycol (TEG)"
  modified_base (1)..(1): bicyclic nucleic acid (BNA)
  modified_base (2)..(2): bicyclic nucleic acid (BNA)
  modified_base (23)..(23): bicyclic nucleic acid (BNA)
  modified_base (24)..(24): bicyclic nucleic acid (BNA)
ctccaacaucaaggaagauggcat

SEQ ID NO: 11775 - DNA, 23 bp, Artificial Sequence
  source: /note="Description of Artificial Sequence: Synthetic oligonucleotide"
  source: /note="Description of Combined DNA/RNA Molecule: Synthetic oligonucleotide"
  source: /note="DNA/RNA"
  source: /note="5' tri-ethylene glycol (TEG)"
  modified_base (1)..(1): bicyclic nucleic acid (BNA)
  modified_base (2)..(2): bicyclic nucleic acid (BNA)
  modified_base (22)..(22): bicyclic nucleic acid (BNA)
  modified_base (23)..(23): bicyclic nucleic acid (BNA)
ctccaacaucaaggaagauggca

SEQ ID NO: 11776 - DNA, 22 bp, Artificial Sequence
  source: /note="Description of Artificial Sequence: Synthetic oligonucleotide"
  source: /note="Description of Combined DNA/RNA Molecule: Synthetic oligonucleotide"
  source: /note="DNA/RNA"
  source: /note="5' tri-ethylene glycol (TEG)"
  modified_base (1)..(1): bicyclic nucleic acid (BNA)
  modified_base (2)..(2): bicyclic nucleic acid (BNA)
  modified_base (21)..(21): bicyclic nucleic acid (BNA)
  modified_base (22)..(22): bicyclic nucleic acid (BNA)
ctccaacaucaaggaagauggc

SEQ ID NO: 11777 - DNA, 21 bp, Artificial Sequence
  source: /note="Description of Artificial Sequence: Synthetic oligonucleotide"
  source: /note="Description of Combined DNA/RNA Molecule: Synthetic oligonucleotide"
  source: /note="DNA/RNA"
  source: /note="5' tri-ethylene glycol (TEG)"
  modified_base (1)..(1): bicyclic nucleic acid (BNA)
  modified_base (2)..(2): bicyclic nucleic acid (BNA)
  modified_base (20)..(20): bicyclic nucleic acid (BNA)
  modified_base (21)..(21): bicyclic nucleic acid (BNA)
ctccaacaucaaggaagaugg

SEQ ID NO: 11778 - DNA, 20 bp, Artificial Sequence
  source: /note="Description of Artificial Sequence: Synthetic oligonucleotide"
  source: /note="Description of Combined DNA/RNA Molecule: Synthetic oligonucleotide"
  source: /note="DNA/RNA"
  source: /note="5' tri-ethylene glycol (TEG)"
  modified_base (1)..(1): bicyclic nucleic acid (BNA)
  modified_base (2)..(2): bicyclic nucleic acid (BNA)
  modified_base (19)..(19): bicyclic nucleic acid (BNA)
  modified_base (20)..(20): bicyclic nucleic acid (BNA)
ctccaacaucaaggaagatg

SEQ ID NO: 11779 - DNA, 19 bp, Artificial Sequence
  source: /note="Description of Artificial Sequence: Synthetic oligonucleotide"
  source: /note="Description of Combined DNA/RNA Molecule: Synthetic oligonucleotide"
  source: /note="DNA/RNA"
  source: /note="5' tri-ethylene glycol (TEG)"
  modified_base (1)..(1): bicyclic nucleic acid (BNA)
  modified_base (2)..(2): bicyclic nucleic acid (BNA)
  modified_base (18)..(18): bicyclic nucleic acid (BNA)
  modified_base (19)..(19): bicyclic nucleic acid (BNA)
ctccaacaucaaggaagat

SEQ ID NO: 11780 - DNA, 18 bp, Artificial Sequence
  source: /note="Description of Artificial Sequence: Synthetic oligonucleotide"
  source: /note="Description of Combined DNA/RNA Molecule: Synthetic oligonucleotide"
  source: /note="DNA/RNA"
  source: /note="5' tri-ethylene glycol (TEG)"
  modified_base (1)..(1): bicyclic nucleic acid (BNA)
  modified_base (2)..(2): bicyclic nucleic acid (BNA)
  modified_base (17)..(17): bicyclic nucleic acid (BNA)
  modified_base (18)..(18): bicyclic nucleic acid (BNA)
ctccaacaucaaggaaga

SEQ ID NO: 11781 - DNA, 17 bp, Artificial Sequence
  source: /note="Description of Artificial Sequence: Synthetic oligonucleotide"
  source: /note="Description of Combined DNA/RNA Molecule: Synthetic oligonucleotide"
  source: /note="DNA/RNA"
  source: /note="5' tri-ethylene glycol (TEG)"
  modified_base (1)..(1): bicyclic nucleic acid (BNA)
  modified_base (2)..(2): bicyclic nucleic acid (BNA)
  modified_base (16)..(16): bicyclic nucleic acid (BNA)
  modified_base (17)..(17): bicyclic nucleic acid (BNA)
ctccaacaucaaggaag

SEQ ID NO: 11782 - DNA, 29 bp, Artificial Sequence
  source: /note="Description of Artificial Sequence: Synthetic oligonucleotide"
  source: /note="Description of Combined DNA/RNA Molecule: Synthetic oligonucleotide"
  source: /note="DNA/RNA"
  source: /note="5' tri-ethylene glycol (TEG)"
  modified_base (1)..(1): bicyclic nucleic acid (BNA)
  modified_base (2)..(2): bicyclic nucleic acid (BNA)
  modified_base (28)..(28): bicyclic nucleic acid (BNA)
  modified_base (29)..(29): bicyclic nucleic acid (BNA)
tccaacaucaaggaagauggcauuucuag

SEQ ID NO: 11783 - DNA, 28 bp, Artificial Sequence
  source: /note="Description of Artificial Sequence: Synthetic oligonucleotide"
  source: /note="Description of Combined DNA/RNA Molecule: Synthetic oligonucleotide"
  source: /note="DNA/RNA"
  source: /note="5' tri-ethylene glycol (TEG)"
  modified_base (1)..(1): bicyclic nucleic acid (BNA)
  modified_base (2)..(2): bicyclic nucleic acid (BNA)
  modified_base (27)..(27): bicyclic nucleic acid (BNA)
  modified_base (28)..(28): bicyclic nucleic acid (BNA)
tccaacaucaaggaagauggcauuucta

SEQ ID NO: 11784 - DNA, 27 bp, Artificial Sequence
  source: /note="Description of Artificial Sequence: Synthetic oligonucleotide"
  source: /note="Description of Combined DNA/RNA Molecule: Synthetic oligonucleotide"
  source: /note="DNA/RNA"
  source: /note="5' tri-ethylene glycol (TEG)"
  modified_base (1)..(1): bicyclic nucleic acid (BNA)
  modified_base (2)..(2): bicyclic nucleic acid (BNA)
  modified_base (26)..(26): bicyclic nucleic acid (BNA)
  modified_base (27)..(27): bicyclic nucleic acid (BNA)
tccaacaucaaggaagauggcauuuct

SEQ ID NO: 11785 - DNA, 26 bp, Artificial Sequence
  source: /note="Description of Artificial Sequence: Synthetic oligonucleotide"
  source: /note="Description of Combined DNA/RNA Molecule: Synthetic oligonucleotide"
  source: /note="DNA/RNA"
  source: /note="5' tri-ethylene glycol (TEG)"
  modified_base (1)..(1): bicyclic nucleic acid (BNA)
  modified_base (2)..(2): bicyclic nucleic acid (BNA)
  modified_base (25)..(25): bicyclic nucleic acid (BNA)
  modified_base (26)..(26): bicyclic nucleic acid (BNA)
tccaacaucaaggaagauggcauutc

SEQ ID NO: 11786 - DNA, 25 bp, Artificial Sequence
  source: /note="Description of Artificial Sequence: Synthetic oligonucleotide"
  source: /note="Description of Combined DNA/RNA Molecule: Synthetic oligonucleotide"
  source: /note="DNA/RNA"
  source: /note="5' tri-ethylene glycol (TEG)"
  modified_base (1)..(1): bicyclic nucleic acid (BNA)
  modified_base (2)..(2): bicyclic nucleic acid (BNA)
  modified_base (24)..(24): bicyclic nucleic acid (BNA)
  modified_base (25)..(25): bicyclic nucleic acid (BNA)
tccaacaucaaggaagauggcautt

SEQ ID NO: 11787 - DNA, 24 bp, Artificial Sequence
  source: /note="Description of Artificial Sequence: Synthetic oligonucleotide"
  source: /note="Description of Combined DNA/RNA Molecule: Synthetic oligonucleotide"
  source: /note="DNA/RNA"
  source: /note="5' tri-ethylene glycol (TEG)"
  modified_base (1)..(1): bicyclic nucleic acid (BNA)
  modified_base (2)..(2): bicyclic nucleic acid (BNA)
  modified_base (23)..(23): bicyclic nucleic acid (BNA)
  modified_base (24)..(24): bicyclic nucleic acid (BNA)
tccaacaucaaggaagauggcatt

SEQ ID NO: 11788 - DNA, 23 bp, Artificial Sequence
  source: /note="Description of Artificial Sequence: Synthetic oligonucleotide"
  source: /note="Description of Combined DNA/RNA Molecule: Synthetic oligonucleotide"
  source: /note="DNA/RNA"
  source: /note="5' tri-ethylene glycol (TEG)"
  modified_base (1)..(1): bicyclic nucleic acid (BNA)
  modified_base (2)..(2): bicyclic nucleic acid (BNA)
  modified_base (22)..(22): bicyclic nucleic acid (BNA)
  modified_base (23)..(23): bicyclic nucleic acid (BNA)
tccaacaucaaggaagauggcat

SEQ ID NO: 11789 - DNA, 22 bp, Artificial Sequence
  source: /note="Description of Artificial Sequence: Synthetic oligonucleotide"
  source: /note="Description of Combined DNA/RNA Molecule: Synthetic oligonucleotide"
  source: /note="DNA/RNA"
  source: /note="5' tri-ethylene glycol (TEG)"
  modified_base (1)..(1): bicyclic nucleic acid (BNA)
  modified_base (2)..(2): bicyclic nucleic acid (BNA)
  modified_base (21)..(21): bicyclic nucleic acid (BNA)
  modified_base (22)..(22): bicyclic nucleic acid (BNA)
tccaacaucaaggaagauggca

SEQ ID NO: 11790 - DNA, 21 bp, Artificial Sequence
  source: /note="Description of Artificial Sequence: Synthetic oligonucleotide"
  source: /note="Description of Combined DNA/RNA Molecule: Synthetic oligonucleotide"
  source: /note="DNA/RNA"
  source: /note="5' tri-ethylene glycol (TEG)"
  modified_base (1)..(1): bicyclic nucleic acid (BNA)
  modified_base (2)..(2): bicyclic nucleic acid (BNA)
  modified_base (20)..(20): bicyclic nucleic acid (BNA)
  modified_base (21)..(21): bicyclic nucleic acid (BNA)
tccaacaucaaggaagauggc

SEQ ID NO: 11791 - DNA, 20 bp, Artificial Sequence
  source: /note="Description of Artificial Sequence: Synthetic oligonucleotide"
  source: /note="Description of Combined DNA/RNA Molecule: Synthetic oligonucleotide"
  source: /note="DNA/RNA"
  source: /note="5' tri-ethylene glycol (TEG)"
  modified_base (1)..(1): bicyclic nucleic acid (BNA)
  modified_base (2)..(2): bicyclic nucleic acid (BNA)
  modified_base (19)..(19): bicyclic nucleic acid (BNA)
  modified_base (20)..(20): bicyclic nucleic acid (BNA)
tccaacaucaaggaagaugg

SEQ ID NO: 11792 - DNA, 19 bp, Artificial Sequence
  source: /note="Description of Artificial Sequence: Synthetic oligonucleotide"
  source: /note="Description of Combined DNA/RNA Molecule: Synthetic oligonucleotide"
  source: /note="DNA/RNA"
  source: /note="5' tri-ethylene glycol (TEG)"
  modified_base (1)..(1): bicyclic nucleic acid (BNA)
  modified_base (2)..(2): bicyclic nucleic acid (BNA)
  modified_base (18)..(18): bicyclic nucleic acid (BNA)
  modified_base (19)..(19): bicyclic nucleic acid (BNA)
tccaacaucaaggaagatg

SEQ ID NO: 11793 - DNA, 18 bp, Artificial Sequence
  source: /note="Description of Artificial Sequence: Synthetic oligonucleotide"
  source: /note="Description of Combined DNA/RNA Molecule: Synthetic oligonucleotide"
  source: /note="DNA/RNA"
  source: /note="5' tri-ethylene glycol (TEG)"
  modified_base (1)..(1): bicyclic nucleic acid (BNA)
  modified_base (2)..(2): bicyclic nucleic acid (BNA)
  modified_base (17)..(17): bicyclic nucleic acid (BNA)
  modified_base (18)..(18): bicyclic nucleic acid (BNA)
tccaacaucaaggaagat

SEQ ID NO: 11794 - DNA, 17 bp, Artificial Sequence
  source: /note="Description of Artificial Sequence: Synthetic oligonucleotide"
  source: /note="Description of Combined DNA/RNA Molecule: Synthetic oligonucleotide"
  source: /note="DNA/RNA"
  source: /note="5' tri-ethylene glycol (TEG)"
  modified_base (1)..(1): bicyclic nucleic acid (BNA)
  modified_base (2)..(2): bicyclic nucleic acid (BNA)
  modified_base (16)..(16): bicyclic nucleic acid (BNA)
  modified_base (17)..(17): bicyclic nucleic acid (BNA)
tccaacaucaaggaaga

SEQ ID NO: 11795 - DNA, 16 bp, Artificial Sequence
  source: /note="Description of Artificial Sequence: Synthetic oligonucleotide"
  source: /note="Description of Combined DNA/RNA Molecule: Synthetic oligonucleotide"
  source: /note="DNA/RNA"
  source: /note="5' tri-ethylene glycol (TEG)"
  modified_base (1)..(1): bicyclic nucleic acid (BNA)
  modified_base (2)..(2): bicyclic nucleic acid (BNA)
  modified_base (15)..(15): bicyclic nucleic acid (BNA)
  modified_base (16)..(16): bicyclic nucleic acid (BNA)
tccaacaucaaggaag

SEQ ID NO: 11796 - RNA, 28 nt, Artificial Sequence
  source: /note="Description of Artificial Sequence: Synthetic oligonucleotide"
  source: /note="RNA"
  source: /note="5' tri-ethylene glycol (TEG)"
  modified_base (1)..(1): bicyclic nucleic acid (BNA)
  modified_base (2)..(2): bicyclic nucleic acid (BNA)
  modified_base (27)..(27): bicyclic nucleic acid (BNA)
  modified_base (28)..(28): bicyclic nucleic acid (BNA)
ccaacaucaaggaagauggcauuucuag

SEQ ID NO: 11797 - DNA, 27 bp, Artificial Sequence
  source: /note="Description of Artificial Sequence: Synthetic oligonucleotide"
  source: /note="Description of Combined DNA/RNA Molecule: Synthetic oligonucleotide"
  source: /note="DNA/RNA"
  source: /note="5' tri-ethylene glycol (TEG)"
  modified_base (1)..(1): bicyclic nucleic acid (BNA)
  modified_base (2)..(2): bicyclic nucleic acid (BNA)
  modified_base (26)..(26): bicyclic nucleic acid (BNA)
  modified_base (27)..(27): bicyclic nucleic acid (BNA)
ccaacaucaaggaagauggcauuucta

SEQ ID NO: 11798 - DNA, 26 bp, Artificial Sequence
  source: /note="Description of Artificial Sequence: Synthetic oligonucleotide"
  source: /note="Description of Combined DNA/RNA Molecule: Synthetic oligonucleotide"
  source: /note="DNA/RNA"
  source: /note="5' tri-ethylene glycol (TEG)"
  modified_base (1)..(1): bicyclic nucleic acid (BNA)
  modified_base (2)..(2): bicyclic nucleic acid (BNA)
  modified_base (25)..(25): bicyclic nucleic acid (BNA)
  modified_base (26)..(26): bicyclic nucleic acid (BNA)
ccaacaucaaggaagauggcauuuct

SEQ ID NO: 11799 - DNA, 25 bp, Artificial Sequence
  source: /note="Description of Artificial Sequence: Synthetic oligonucleotide"
  source: /note="Description of Combined DNA/RNA Molecule: Synthetic oligonucleotide"
  source: /note="DNA/RNA"
  source: /note="5' tri-ethylene glycol (TEG)"
  modified_base (1)..(1): bicyclic nucleic acid (BNA)
  modified_base (2)..(2): bicyclic nucleic acid (BNA)
  modified_base (24)..(24): bicyclic nucleic acid (BNA)
  modified_base (25)..(25): bicyclic nucleic acid (BNA)
ccaacaucaaggaagauggcauutc

SEQ ID NO: 11800 - DNA, 24 bp, Artificial Sequence
  source: /note="Description of Artificial Sequence: Synthetic oligonucleotide"
  source: /note="Description of Combined DNA/RNA Molecule: Synthetic oligonucleotide"
  source: /note="DNA/RNA"
  source: /note="5' tri-ethylene glycol (TEG)"
  modified_base (1)..(1): bicyclic nucleic acid (BNA)
  modified_base (2)..(2): bicyclic nucleic acid (BNA)
  modified_base (23)..(23): bicyclic nucleic acid (BNA)
  modified_base (24)..(24): bicyclic nucleic acid (BNA)
ccaacaucaaggaagauggcautt

SEQ ID NO: 11801 - DNA, 23 bp, Artificial Sequence
  source: /note="Description of Artificial Sequence: Synthetic oligonucleotide"
  source: /note="Description of Combined DNA/RNA Molecule: Synthetic oligonucleotide"
  source: /note="DNA/RNA"
  source: /note="5' tri-ethylene glycol (TEG)"
  modified_base (1)..(1): bicyclic nucleic acid (BNA)
  modified_base (2)..(2): bicyclic nucleic acid (BNA)
  modified_base (22)..(22): bicyclic nucleic acid (BNA)
  modified_base (23)..(23): bicyclic nucleic acid (BNA)
ccaacaucaaggaagauggcatt

SEQ ID NO: 11802 - DNA, 22 bp, Artificial Sequence
  source: /note="Description of Artificial Sequence: Synthetic oligonucleotide"
  source: /note="Description of Combined DNA/RNA Molecule: Synthetic oligonucleotide"
  source: /note="DNA/RNA"
  source: /note="5' tri-ethylene glycol (TEG)"
  modified_base (1)..(1): bicyclic nucleic acid (BNA)
  modified_base (2)..(2): bicyclic nucleic acid (BNA)
  modified_base (21)..(21): bicyclic nucleic acid (BNA)
  modified_base (22)..(22): bicyclic nucleic acid (BNA)
ccaacaucaaggaagauggcat

SEQ ID NO: 11803 - RNA, 21 nt, Artificial Sequence
  source: /note="Description of Artificial Sequence: Synthetic oligonucleotide"
  source: /note="RNA"
  source: /note="5' tri-ethylene glycol (TEG)"
  modified_base (1)..(1): bicyclic nucleic acid (BNA)
  modified_base (2)..(2): bicyclic nucleic acid (BNA)
  modified_base (20)..(20): bicyclic nucleic acid (BNA)
  modified_base (21)..(21): bicyclic nucleic acid (BNA)
ccaacaucaaggaagauggca

SEQ ID NO: 11804 - RNA, 20 nt, Artificial Sequence
  source: /note="Description of Artificial Sequence: Synthetic oligonucleotide"
  source: /note="RNA"
  source: /note="5' tri-ethylene glycol (TEG)"
  modified_base (1)..(1): bicyclic nucleic acid (BNA)
  modified_base (2)..(2): bicyclic nucleic acid (BNA)
  modified_base (19)..(19): bicyclic nucleic acid (BNA)
  modified_base (20)..(20): bicyclic nucleic acid (BNA)
ccaacaucaaggaagauggc

SEQ ID NO: 11805 - RNA, 19 nt, Artificial Sequence
  source: /note="Description of Artificial Sequence: Synthetic oligonucleotide"
  source: /note="RNA"
  source: /note="5' tri-ethylene glycol (TEG)"
  modified_base (1)..(1): bicyclic nucleic acid (BNA)
  modified_base (2)..(2): bicyclic nucleic acid (BNA)
  modified_base (18)..(18): bicyclic nucleic acid (BNA)
  modified_base (19)..(19): bicyclic nucleic acid (BNA)
ccaacaucaaggaagaugg

SEQ ID NO: 11806 - DNA, 18 bp, Artificial Sequence
  source: /note="Description of Artificial Sequence: Synthetic oligonucleotide"
  source: /note="Description of Combined DNA/RNA Molecule: Synthetic oligonucleotide"
  source: /note="DNA/RNA"
  source: /note="5' tri-ethylene glycol (TEG)"
  modified_base (1)..(1): bicyclic nucleic acid (BNA)
  modified_base (2)..(2): bicyclic nucleic acid (BNA)
  modified_base (17)..(17): bicyclic nucleic acid (BNA)
  modified_base (18)..(18): bicyclic nucleic acid (BNA)
ccaacaucaaggaagatg

SEQ ID NO: 11807 - DNA, 17 bp, Artificial Sequence
  source: /note="Description of Artificial Sequence: Synthetic oligonucleotide"
  source: /note="Description of Combined DNA/RNA Molecule: Synthetic oligonucleotide"
  source: /note="DNA/RNA"
  source: /note="5' tri-ethylene glycol (TEG)"
  modified_base (1)..(1): bicyclic nucleic acid (BNA)
  modified_base (2)..(2): bicyclic nucleic acid (BNA)
  modified_base (16)..(16): bicyclic nucleic acid (BNA)
  modified_base (17)..(17): bicyclic nucleic acid (BNA)
ccaacaucaaggaagat

SEQ ID NO: 11808 - RNA, 16 nt, Artificial Sequence
  source: /note="Description of Artificial Sequence: Synthetic oligonucleotide"
  source: /note="RNA"
  source: /note="5' tri-ethylene glycol (TEG)"
  modified_base (1)..(1): bicyclic nucleic acid (BNA)
  modified_base (2)..(2): bicyclic nucleic acid (BNA)
  modified_base (15)..(15): bicyclic nucleic acid (BNA)
  modified_base (16)..(16): bicyclic nucleic acid (BNA)
ccaacaucaaggaaga

SEQ ID NO: 11809 - RNA, 15 nt, Artificial Sequence
  source: /note="Description of Artificial Sequence: Synthetic oligonucleotide"
  source: /note="RNA"
  source: /note="5' tri-ethylene glycol (TEG)"
  modified_base (1)..(1): bicyclic nucleic acid (BNA)
  modified_base (2)..(2): bicyclic nucleic acid (BNA)
  modified_base (14)..(14): bicyclic nucleic acid (BNA)
  modified_base (15)..(15): bicyclic nucleic acid (BNA)
ccaacaucaaggaag

SEQ ID NO: 11810 - RNA, 27 nt, Artificial Sequence
  source: /note="Description of Artificial Sequence: Synthetic oligonucleotide"
  source: /note="RNA"
  source: /note="5' tri-ethylene glycol (TEG)"
  modified_base (1)..(1): bicyclic nucleic acid (BNA)
  modified_base (2)..(2): bicyclic nucleic acid (BNA)
  modified_base (26)..(26): bicyclic nucleic acid (BNA)
  modified_base (27)..(27): bicyclic nucleic acid (BNA)
caacaucaaggaagauggcauuucuag

SEQ ID NO: 11811 - DNA, 26 bp, Artificial Sequence
  source: /note="Description of Artificial Sequence: Synthetic oligonucleotide"
  source: /note="Description of Combined DNA/RNA Molecule: Synthetic oligonucleotide"
  source: /note="DNA/RNA"
  source: /note="5' tri-ethylene glycol (TEG)"
  modified_base (1)..(1): bicyclic nucleic acid (BNA)
  modified_base (2)..(2): bicyclic nucleic acid (BNA)
  modified_base (25)..(25): bicyclic nucleic acid (BNA)
  modified_base (26)..(26): bicyclic nucleic acid (BNA)
caacaucaaggaagauggcauuucta

SEQ ID NO: 11812 - DNA, 25 bp, Artificial Sequence
  source: /note="Description of Artificial Sequence: Synthetic oligonucleotide"
  source: /note="Description of Combined DNA/RNA Molecule: Synthetic oligonucleotide"
  source: /note="DNA/RNA"
  source: /note="5' tri-ethylene glycol (TEG)"
  modified_base (1)..(1): bicyclic nucleic acid (BNA)
  modified_base (2)..(2): bicyclic nucleic acid (BNA)
  modified_base (24)..(24): bicyclic nucleic acid (BNA)
  modified_base (25)..(25): bicyclic nucleic acid (BNA)
caacaucaaggaagauggcauuuct

SEQ ID NO: 11813 - DNA, 24 bp, Artificial Sequence
  source: /note="Description of Artificial Sequence: Synthetic oligonucleotide"
  source: /note="Description of Combined DNA/RNA Molecule: Synthetic oligonucleotide"
  source: /note="DNA/RNA"
  source: /note="5' tri-ethylene glycol (TEG)"
  modified_base (1)..(1): bicyclic nucleic acid (BNA)
  modified_base (2)..(2): bicyclic nucleic acid (BNA)
  modified_base (23)..(23): bicyclic nucleic acid (BNA)
  modified_base (24)..(24): bicyclic nucleic acid (BNA)
caacaucaaggaagauggcauutc

SEQ ID NO: 11814 - DNA, 23 bp, Artificial Sequence
  source: /note="Description of Artificial Sequence: Synthetic oligonucleotide"
  source: /note="Description of Combined DNA/RNA Molecule: Synthetic oligonucleotide"
  source: /note="DNA/RNA"
  source: /note="5' tri-ethylene glycol (TEG)"
  modified_base (1)..(1): bicyclic nucleic acid (BNA)
  modified_base (2)..(2): bicyclic nucleic acid (BNA)
  modified_base (22)..(22): bicyclic nucleic acid (BNA)
  modified_base (23)..(23): bicyclic nucleic acid (BNA)
caacaucaaggaagauggcautt

SEQ ID NO: 11815 - DNA, 22 bp, Artificial Sequence
  source: /note="Description of Artificial Sequence: Synthetic oligonucleotide"
  source: /note="Description of Combined DNA/RNA Molecule: Synthetic oligonucleotide"
  source: /note="DNA/RNA"
  source: /note="5' tri-ethylene glycol (TEG)"
  modified_base (1)..(1): bicyclic nucleic acid (BNA)
  modified_base (2)..(2): bicyclic nucleic acid (BNA)
  modified_base (21)..(21): bicyclic nucleic acid (BNA)
  modified_base (22)..(22): bicyclic nucleic acid (BNA)
caacaucaaggaagauggcatt

SEQ ID NO: 11816 - DNA, 21 bp, Artificial Sequence
  source: /note="Description of Artificial Sequence: Synthetic oligonucleotide"
  source: /note="Description of Combined DNA/RNA Molecule: Synthetic oligonucleotide"
  source: /note="DNA/RNA"
  source: /note="5' tri-ethylene glycol (TEG)"
  modified_base (1)..(1): bicyclic nucleic acid (BNA)
  modified_base (2)..(2): bicyclic nucleic acid (BNA)
  modified_base (20)..(20): bicyclic nucleic acid (BNA)
  modified_base (21)..(21): bicyclic nucleic acid (BNA)
caacaucaaggaagauggcat

SEQ ID NO: 11817 - RNA, 20 nt, Artificial Sequence
  source: /note="Description of Artificial Sequence: Synthetic oligonucleotide"
  source: /note="RNA"
  source: /note="5' tri-ethylene glycol (TEG)"
  modified_base (1)..(1): bicyclic nucleic acid (BNA)
  modified_base (2)..(2): bicyclic nucleic acid (BNA)
  modified_base (19)..(19): bicyclic nucleic acid (BNA)
  modified_base (20)..(20): bicyclic nucleic acid (BNA)
caacaucaaggaagauggca

SEQ ID NO: 11818 - RNA, 19 nt, Artificial Sequence
  source: /note="Description of Artificial Sequence: Synthetic oligonucleotide"
  source: /note="RNA"
  source: /note="5' tri-ethylene glycol (TEG)"
  modified_base (1)..(1): bicyclic nucleic acid (BNA)
  modified_base (2)..(2): bicyclic nucleic acid (BNA)
  modified_base (18)..(18): bicyclic nucleic acid (BNA)
  modified_base (19)..(19): bicyclic nucleic acid (BNA)
caacaucaaggaagauggc

SEQ ID NO: 11819 - RNA, 18 nt, Artificial Sequence
  source: /note="Description of Artificial Sequence: Synthetic oligonucleotide"
  source: /note="RNA"
  source: /note="5' tri-ethylene glycol (TEG)"
  modified_base (1)..(1): bicyclic nucleic acid (BNA)
  modified_base (2)..(2): bicyclic nucleic acid (BNA)
  modified_base (17)..(17): bicyclic nucleic acid (BNA)
  modified_base (18)..(18): bicyclic nucleic acid (BNA)
caacaucaaggaagaugg

SEQ ID NO: 11820 - DNA, 17 bp, Artificial Sequence
  source: /note="Description of Artificial Sequence: Synthetic oligonucleotide"
  source: /note="Description of Combined DNA/RNA Molecule: Synthetic oligonucleotide"
  source: /note="DNA/RNA"
  source: /note="5' tri-ethylene glycol (TEG)"
  modified_base (1)..(1): bicyclic nucleic acid (BNA)
  modified_base (2)..(2): bicyclic nucleic acid (BNA)
  modified_base (16)..(16): bicyclic nucleic acid (BNA)
  modified_base (17)..(17): bicyclic nucleic acid (BNA)
caacaucaaggaagatg

SEQ ID NO: 11821 - DNA, 16 bp, Artificial Sequence
  source: /note="Description of Artificial Sequence: Synthetic oligonucleotide"
  source: /note="Description of Combined DNA/RNA Molecule: Synthetic oligonucleotide"
  source: /note="DNA/RNA"
  source: /note="5' tri-ethylene glycol (TEG)"
  modified_base (1)..(1): bicyclic nucleic acid (BNA)
  modified_base (2)..(2): bicyclic nucleic acid (BNA)
  modified_base (15)..(15): bicyclic nucleic acid (BNA)
  modified_base (16)..(16): bicyclic nucleic acid (BNA)
caacaucaaggaagat

SEQ ID NO: 11822 - RNA, 15 nt, Artificial Sequence
  source: /note="Description of Artificial Sequence: Synthetic oligonucleotide"
  source: /note="RNA"
  source: /note="5' tri-ethylene glycol (TEG)"
  modified_base (1)..(1): bicyclic nucleic acid (BNA)
  modified_base (2)..(2): bicyclic nucleic acid (BNA)
  modified_base (14)..(14): bicyclic nucleic acid (BNA)
  modified_base (15)..(15): bicyclic nucleic acid (BNA)
caacaucaaggaaga

SEQ ID NO: 11823 - RNA, 14 nt, Artificial Sequence
  source: /note="Description of Artificial Sequence: Synthetic oligonucleotide"
  source: /note="RNA"
  source: /note="5' tri-ethylene glycol (TEG)"
  modified_base (1)..(1): bicyclic nucleic acid (BNA)
  modified_base (2)..(2): bicyclic nucleic acid (BNA)
  modified_base (13)..(13): bicyclic nucleic acid (BNA)
  modified_base (14)..(14): bicyclic nucleic acid (BNA)
caacaucaaggaag

SEQ ID NO: 11824 - RNA, 26 nt, Artificial Sequence
  source: /note="Description of Artificial Sequence: Synthetic oligonucleotide"
  source: /note="RNA"
  source: /note="5' tri-ethylene glycol (TEG)"
  modified_base (1)..(1): bicyclic nucleic acid (BNA)
  modified_base (2)..(2): bicyclic nucleic acid (BNA)
  modified_base (25)..(25): bicyclic nucleic acid (BNA)
  modified_base (26)..(26): bicyclic nucleic acid (BNA)
aacaucaaggaagauggcauuucuag

SEQ ID NO: 11825 - DNA, 25 bp, Artificial Sequence
  source: /note="Description of Artificial Sequence: Synthetic oligonucleotide"
  source: /note="Description of Combined DNA/RNA Molecule: Synthetic oligonucleotide"
  source: /note="DNA/RNA"
  source: /note="5' tri-ethylene glycol (TEG)"
  modified_base (1)..(1): bicyclic nucleic acid (BNA)
  modified_base (2)..(2): bicyclic nucleic acid (BNA)
  modified_base (24)..(24): bicyclic nucleic acid (BNA)
  modified_base (25)..(25): bicyclic nucleic acid (BNA)
aacaucaaggaagauggcauuucta

SEQ ID NO: 11826 - DNA, 24 bp, Artificial Sequence
  source: /note="Description of Artificial Sequence: Synthetic oligonucleotide"
  source: /note="Description of Combined DNA/RNA Molecule: Synthetic oligonucleotide"
  source: /note="DNA/RNA"
  source: /note="5' tri-ethylene glycol (TEG)"
  modified_base (1)..(1): bicyclic nucleic acid (BNA)
  modified_base (2)..(2): bicyclic nucleic acid (BNA)
  modified_base (23)..(23): bicyclic nucleic acid (BNA)
  modified_base (24)..(24): bicyclic nucleic acid (BNA)
aacaucaaggaagauggcauuuct

SEQ ID NO: 11827 - DNA, 23 bp, Artificial Sequence
  source: /note="Description of Artificial Sequence: Synthetic oligonucleotide"
  source: /note="Description of Combined DNA/RNA Molecule: Synthetic oligonucleotide"
  source: /note="DNA/RNA"
  source: /note="5' tri-ethylene glycol (TEG)"
  modified_base (1)..(1): bicyclic nucleic acid (BNA)
  modified_base (2)..(2): bicyclic nucleic acid (BNA)
  modified_base (22)..(22): bicyclic nucleic acid (BNA)
  modified_base (23)..(23): bicyclic nucleic acid (BNA)
aacaucaaggaagauggcauutc

SEQ ID NO: 11828 - DNA, 22 bp, Artificial Sequence
  source: /note="Description of Artificial Sequence: Synthetic oligonucleotide"
  source: /note="Description of Combined DNA/RNA Molecule: Synthetic oligonucleotide"
  source: /note="DNA/RNA"
  source: /note="5' tri-ethylene glycol (TEG)"
  modified_base (1)..(1): bicyclic nucleic acid (BNA)
  modified_base (2)..(2): bicyclic nucleic acid (BNA)
  modified_base (21)..(21): bicyclic nucleic acid (BNA)
  modified_base (22)..(22): bicyclic nucleic acid (BNA)
aacaucaaggaagauggcautt

SEQ ID NO: 11829 - DNA, 21 bp, Artificial Sequence
  source: /note="Description of Artificial Sequence: Synthetic oligonucleotide"
  source: /note="Description of Combined DNA/RNA Molecule: Synthetic oligonucleotide"
  source: /note="DNA/RNA"
  source: /note="5' tri-ethylene glycol (TEG)"
  modified_base (1)..(1): bicyclic nucleic acid (BNA)
  modified_base (2)..(2): bicyclic nucleic acid (BNA)
  modified_base (20)..(20): bicyclic nucleic acid (BNA)
  modified_base (21)..(21): bicyclic nucleic acid (BNA)
aacaucaaggaagauggcatt

SEQ ID NO: 11830 - DNA, 20 bp, Artificial Sequence
  source: /note="Description of Artificial Sequence: Synthetic oligonucleotide"
  source: /note="Description of Combined DNA/RNA Molecule: Synthetic oligonucleotide"
  source: /note="DNA/RNA"
  source: /note="5' tri-ethylene glycol (TEG)"
  modified_base (1)..(1): bicyclic nucleic acid (BNA)
  modified_base (2)..(2): bicyclic nucleic acid (BNA)
  modified_base (19)..(19): bicyclic nucleic acid (BNA)
  modified_base (20)..(20): bicyclic nucleic acid (BNA)
aacaucaaggaagauggcat

SEQ ID NO: 11831 - RNA, 19 nt, Artificial Sequence
  source: /note="Description of Artificial Sequence: Synthetic oligonucleotide"
  source: /note="RNA"
  source: /note="5' tri-ethylene glycol (TEG)"
  modified_base (1)..(1): bicyclic nucleic acid (BNA)
  modified_base (2)..(2): bicyclic nucleic acid (BNA)
  modified_base (18)..(18): bicyclic nucleic acid (BNA)
  modified_base (19)..(19): bicyclic nucleic acid (BNA)
aacaucaaggaagauggca

SEQ ID NO: 11832 - RNA, 18 nt, Artificial Sequence
  source: /note="Description of Artificial Sequence: Synthetic oligonucleotide"
  source: /note="RNA"
  source: /note="5' tri-ethylene glycol (TEG)"
  modified_base (1)..(1): bicyclic nucleic acid (BNA)
  modified_base (2)..(2): bicyclic nucleic acid (BNA)
  modified_base (17)..(17): bicyclic nucleic acid (BNA)
  modified_base (18)..(18): bicyclic nucleic acid (BNA)
aacaucaaggaagauggc

SEQ ID NO: 11833 - RNA, 17 nt, Artificial Sequence
  source: /note="Description of Artificial Sequence: Synthetic oligonucleotide"
  source: /note="RNA"
  source: /note="5' tri-ethylene glycol (TEG)"
  modified_base (1)..(1): bicyclic nucleic acid (BNA)
  modified_base (2)..(2): bicyclic nucleic acid (BNA)
  modified_base (16)..(16): bicyclic nucleic acid (BNA)
  modified_base (17)..(17): bicyclic nucleic acid (BNA)
aacaucaaggaagaugg

SEQ ID NO: 11834 - DNA, 16 bp, Artificial Sequence
  source: /note="Description of Artificial Sequence: Synthetic oligonucleotide"
  source: /note="Description of Combined DNA/RNA Molecule: Synthetic oligonucleotide"
  source: /note="DNA/RNA"
  source: /note="5' tri-ethylene glycol (TEG)"
  modified_base (1)..(1): bicyclic nucleic acid (BNA)
  modified_base (2)..(2): bicyclic nucleic acid (BNA)
  modified_base (15)..(15): bicyclic nucleic acid (BNA)
  modified_base (16)..(16): bicyclic nucleic acid (BNA)
aacaucaaggaagatg

SEQ ID NO: 11835 - DNA, 15 bp, Artificial Sequence
  source: /note="Description of Artificial Sequence: Synthetic oligonucleotide"
  source: /note="Description of Combined DNA/RNA Molecule: Synthetic oligonucleotide"
  source: /note="DNA/RNA"
  source: /note="5' tri-ethylene glycol (TEG)"
  modified_base (1)..(1): bicyclic nucleic acid (BNA)
  modified_base (2)..(2): bicyclic nucleic acid (BNA)
  modified_base (14)..(14): bicyclic nucleic acid (BNA)
  modified_base (15)..(15): bicyclic nucleic acid (BNA)
aacaucaaggaagat

SEQ ID NO: 11836 - RNA, 14 nt, Artificial Sequence
  source: /note="Description of Artificial Sequence: Synthetic oligonucleotide"
  source: /note="RNA"
  source: /note="5' tri-ethylene glycol (TEG)"
  modified_base (1)..(1): bicyclic nucleic acid (BNA)
  modified_base (2)..(2): bicyclic nucleic acid (BNA)
  modified_base (13)..(13): bicyclic nucleic acid (BNA)
  modified_base (14)..(14): bicyclic nucleic acid (BNA)
aacaucaaggaaga

SEQ ID NO: 11837 - RNA, 13 nt, Artificial Sequence
  source: /note="Description of Artificial Sequence: Synthetic oligonucleotide"
  source: /note="RNA"
  source: /note="5' tri-ethylene glycol (TEG)"
  modified_base (1)..(1): bicyclic nucleic acid (BNA)
  modified_base (2)..(2): bicyclic nucleic acid (BNA)
  modified_base (12)..(12): bicyclic nucleic acid (BNA)
  modified_base (13)..(13): bicyclic nucleic acid (BNA)
aacaucaaggaag

SEQ ID NO: 11838 - RNA, 25 nt, Artificial Sequence
  source: /note="Description of Artificial Sequence: Synthetic oligonucleotide"
  source: /note="RNA"
  source: /note="5' tri-ethylene glycol (TEG)"
  modified_base (1)..(1): bicyclic nucleic acid (BNA)
  modified_base (2)..(2): bicyclic nucleic acid (BNA)
  modified_base (24)..(24): bicyclic nucleic acid (BNA)
  modified_base (25)..(25): bicyclic nucleic acid (BNA)
acaucaaggaagauggcauuucuag

SEQ ID NO: 11839 - DNA, 24 bp, Artificial Sequence
  source: /note="Description of Artificial Sequence: Synthetic oligonucleotide"
  source: /note="Description of Combined DNA/RNA Molecule: Synthetic oligonucleotide"
  source: /note="DNA/RNA"
  source: /note="5' tri-ethylene glycol (TEG)"
  modified_base (1)..(1): bicyclic nucleic acid (BNA)
  modified_base (2)..(2): bicyclic nucleic acid (BNA)
  modified_base (23)..(23): bicyclic nucleic acid (BNA)
  modified_base (24)..(24): bicyclic nucleic acid (BNA)
acaucaaggaagauggcauuucta

SEQ ID NO: 11840 - DNA, 23 bp, Artificial Sequence
  source: /note="Description of Artificial Sequence: Synthetic oligonucleotide"
  source: /note="Description of Combined DNA/RNA Molecule: Synthetic oligonucleotide"
  source: /note="DNA/RNA"
  source: /note="5' tri-ethylene glycol (TEG)"
  modified_base (1)..(1): bicyclic nucleic acid (BNA)
  modified_base (2)..(2): bicyclic nucleic acid (BNA)
  modified_base (22)..(22): bicyclic nucleic acid (BNA)
  modified_base (23)..(23): bicyclic nucleic acid (BNA)
acaucaaggaagauggcauuuct

SEQ ID NO: 11841 - DNA, 22 bp, Artificial Sequence
  source: /note="Description of Artificial Sequence: Synthetic oligonucleotide"
  source: /note="Description of Combined DNA/RNA Molecule: Synthetic oligonucleotide"
  source: /note="DNA/RNA"
  source: /note="5' tri-ethylene glycol (TEG)"
  modified_base (1)..(1): bicyclic nucleic acid (BNA)
  modified_base (2)..(2): bicyclic nucleic acid (BNA)
  modified_base (21)..(21): bicyclic nucleic acid (BNA)
  modified_base (22)..(22): bicyclic nucleic acid (BNA)
acaucaaggaagauggcauutc

SEQ ID NO: 11842 - DNA, 21 bp, Artificial Sequence
  source: /note="Description of Artificial Sequence: Synthetic oligonucleotide"
  source: /note="Description of Combined DNA/RNA Molecule: Synthetic oligonucleotide"
  source: /note="DNA/RNA"
  source: /note="5' tri-ethylene glycol (TEG)"
  modified_base (1)..(1): bicyclic nucleic acid (BNA)
  modified_base (2)..(2): bicyclic nucleic acid (BNA)
  modified_base (20)..(20): bicyclic nucleic acid (BNA)
  modified_base (21)..(21): bicyclic nucleic acid (BNA)
acaucaaggaagauggcautt

SEQ ID NO: 11843 - DNA, 20 bp, Artificial Sequence
  source: /note="Description of Artificial Sequence: Synthetic oligonucleotide"
  source: /note="Description of Combined DNA/RNA Molecule: Synthetic oligonucleotide"
  source: /note="DNA/RNA"
  source: /note="5' tri-ethylene glycol (TEG)"
  modified_base (1)..(1): bicyclic nucleic acid (BNA)
  modified_base (2)..(2): bicyclic nucleic acid (BNA)
  modified_base (19)..(19): bicyclic nucleic acid (BNA)
  modified_base (20)..(20): bicyclic nucleic acid (BNA)
acaucaaggaagauggcatt

SEQ ID NO: 11844 - DNA, 19 bp, Artificial Sequence
  source: /note="Description of Artificial Sequence: Synthetic oligonucleotide"
  source: /note="Description of Combined DNA/RNA Molecule: Synthetic oligonucleotide"
  source: /note="DNA/RNA"
  source: /note="5' tri-ethylene glycol (TEG)"
  modified_base (1)..(1): bicyclic nucleic acid (BNA)
  modified_base (2)..(2): bicyclic nucleic acid (BNA)
  modified_base (18)..(18): bicyclic nucleic acid (BNA)
  modified_base (19)..(19): bicyclic nucleic acid (BNA)
acaucaaggaagauggcat

SEQ ID NO: 11845 - RNA, 18 nt, Artificial Sequence
  source: /note="Description of Artificial Sequence: Synthetic oligonucleotide"
  source: /note="RNA"
  source: /note="5' tri-ethylene glycol (TEG)"
  modified_base (1)..(1): bicyclic nucleic acid (BNA)
  modified_base (2)..(2): bicyclic nucleic acid (BNA)
  modified_base (17)..(17): bicyclic nucleic acid (BNA)
  modified_base (18)..(18): bicyclic nucleic acid (BNA)
acaucaaggaagauggca

SEQ ID NO: 11846 - RNA, 17 nt, Artificial Sequence
  source: /note="Description of Artificial Sequence: Synthetic oligonucleotide"
  source: /note="RNA"
  source: /note="5' tri-ethylene glycol (TEG)"
  modified_base (1)..(1): bicyclic nucleic acid (BNA)
  modified_base (2)..(2): bicyclic nucleic acid (BNA)
  modified_base (16)..(16): bicyclic nucleic acid (BNA)
  modified_base (17)..(17): bicyclic nucleic acid (BNA)
acaucaaggaagauggc

SEQ ID NO: 11847 - RNA, 16 nt, Artificial Sequence
  source: /note="Description of Artificial Sequence: Synthetic oligonucleotide"
  source: /note="RNA"
  source: /note="5' tri-ethylene glycol (TEG)"
  modified_base (1)..(1): bicyclic nucleic acid (BNA)
  modified_base (2)..(2): bicyclic nucleic acid (BNA)
  modified_base (15)..(15): bicyclic nucleic acid (BNA)
  modified_base (16)..(16): bicyclic nucleic acid (BNA)
acaucaaggaagaugg

SEQ ID NO: 11848 - DNA, 15 bp, Artificial Sequence
  source: /note="Description of Artificial Sequence: Synthetic oligonucleotide"
  source: /note="Description of Combined DNA/RNA Molecule: Synthetic oligonucleotide"
  source: /note="DNA/RNA"
  source: /note="5' tri-ethylene glycol (TEG)"
  modified_base (1)..(1): bicyclic nucleic acid (BNA)
  modified_base (2)..(2): bicyclic nucleic acid (BNA)
  modified_base (14)..(14): bicyclic nucleic acid (BNA)
  modified_base (15)..(15): bicyclic nucleic acid (BNA)
acaucaaggaagatg

SEQ ID NO: 11849 - DNA, 14 bp, Artificial Sequence
  source: /note="Description of Artificial Sequence: Synthetic oligonucleotide"
  source: /note="Description of Combined DNA/RNA Molecule: Synthetic oligonucleotide"
  source: /note="DNA/RNA"
  source: /note="5' tri-ethylene glycol (TEG)"
  modified_base (1)..(1): bicyclic nucleic acid (BNA)
  modified_base (2)..(2): bicyclic nucleic acid (BNA)
  modified_base (13)..(13): bicyclic nucleic acid (BNA)
  modified_base (14)..(14): bicyclic nucleic acid (BNA)
acaucaaggaagat

SEQ ID NO: 11850 - RNA, 13 nt, Artificial Sequence
  source: /note="Description of Artificial Sequence: Synthetic oligonucleotide"
  source: /note="RNA"
  source: /note="5' tri-ethylene glycol (TEG)"
  modified_base (1)..(1): bicyclic nucleic acid (BNA)
  modified_base (2)..(2): bicyclic nucleic acid (BNA)
  modified_base (12)..(12): bicyclic nucleic acid (BNA)
  modified_base (13)..(13): bicyclic nucleic acid (BNA)
acaucaaggaaga

SEQ ID NO: 11851 - RNA, 12 nt, Artificial Sequence
  source: /note="Description of Artificial Sequence: Synthetic oligonucleotide"
  source: /note="RNA"
  source: /note="5' tri-ethylene glycol (TEG)"
  modified_base (1)..(1): bicyclic nucleic acid (BNA)
  modified_base (2)..(2): bicyclic nucleic acid (BNA)
  modified_base (11)..(11): bicyclic nucleic acid (BNA)
  modified_base (12)..(12): bicyclic nucleic acid (BNA)
acaucaaggaag

SEQ ID NO: 11852 - RNA, 24 nt, Artificial Sequence
  source: /note="Description of Artificial Sequence: Synthetic oligonucleotide"
  source: /note="RNA"
  source: /note="5' tri-ethylene glycol (TEG)"
  modified_base (1)..(1): bicyclic nucleic acid (BNA)
  modified_base (2)..(2): bicyclic nucleic acid (BNA)
  modified_base (23)..(23): bicyclic nucleic acid (BNA)
  modified_base (24)..(24): bicyclic nucleic acid (BNA)
caucaaggaagauggcauuucuag

SEQ ID NO: 11853 - DNA, 23 bp, Artificial Sequence
  source: /note="Description of Artificial Sequence: Synthetic oligonucleotide"
  source: /note="Description of Combined DNA/RNA Molecule: Synthetic oligonucleotide"
  source: /note="DNA/RNA"
  source: /note="5' tri-ethylene glycol (TEG)"
  modified_base (1)..(1): bicyclic nucleic acid (BNA)
  modified_base (2)..(2): bicyclic nucleic acid (BNA)
  modified_base (22)..(22): bicyclic nucleic acid (BNA)
  modified_base (23)..(23): bicyclic nucleic acid (BNA)
caucaaggaagauggcauuucta

SEQ ID NO: 11854 - DNA, 22 bp, Artificial Sequence
  source: /note="Description of Artificial Sequence: Synthetic oligonucleotide"
  source: /note="Description of Combined DNA/RNA Molecule: Synthetic oligonucleotide"
  source: /note="DNA/RNA"
  source: /note="5' tri-ethylene glycol (TEG)"
  modified_base (1)..(1): bicyclic nucleic acid (BNA)
  modified_base (2)..(2): bicyclic nucleic acid (BNA)
  modified_base (21)..(21): bicyclic nucleic acid (BNA)
  modified_base (22)..(22): bicyclic nucleic acid (BNA)
caucaaggaagauggcauuuct

SEQ ID NO: 11855 - DNA, 21 bp, Artificial Sequence
  source: /note="Description of Artificial Sequence: Synthetic oligonucleotide"
  source: /note="Description of Combined DNA/RNA Molecule: Synthetic oligonucleotide"
  source: /note="DNA/RNA"
  source: /note="5' tri-ethylene glycol (TEG)"
  modified_base (1)..(1): bicyclic nucleic acid (BNA)
  modified_base (2)..(2): bicyclic nucleic acid (BNA)
  modified_base (20)..(20): bicyclic nucleic acid (BNA)
  modified_base (21)..(21): bicyclic nucleic acid (BNA)
caucaaggaagauggcauutc

SEQ ID NO: 11856 - DNA, 20 bp, Artificial Sequence
  source: /note="Description of Artificial Sequence: Synthetic oligonucleotide"
  source: /note="Description of Combined DNA/RNA Molecule: Synthetic oligonucleotide"
  source: /note="DNA/RNA"
  source: /note="5' tri-ethylene glycol (TEG)"
  modified_base (1)..(1): bicyclic nucleic acid (BNA)
  modified_base (2)..(2): bicyclic nucleic acid (BNA)
  modified_base (19)..(19): bicyclic nucleic acid (BNA)
  modified_base (20)..(20): bicyclic nucleic acid (BNA)
caucaaggaagauggcautt

SEQ ID NO: 11857 - DNA, 19 bp, Artificial Sequence
  source: /note="Description of Artificial Sequence: Synthetic oligonucleotide"
  source: /note="Description of Combined DNA/RNA Molecule: Synthetic oligonucleotide"
  source: /note="DNA/RNA"
  source: /note="5' tri-ethylene glycol (TEG)"
  modified_base (1)..(1): bicyclic nucleic acid (BNA)
  modified_base (2)..(2): bicyclic nucleic acid (BNA)
  modified_base (18)..(18): bicyclic nucleic acid (BNA)
  modified_base (19)..(19): bicyclic nucleic acid (BNA)
caucaaggaagauggcatt

SEQ ID NO: 11858 - DNA, 18 bp, Artificial Sequence
  source: /note="Description of Artificial Sequence: Synthetic oligonucleotide"
  source: /note="Description of Combined DNA/RNA Molecule: Synthetic oligonucleotide"
  source: /note="DNA/RNA"
  source: /note="5' tri-ethylene glycol (TEG)"
  modified_base (1)..(1): bicyclic nucleic acid (BNA)
  modified_base (2)..(2): bicyclic nucleic acid (BNA)
  modified_base (17)..(17): bicyclic nucleic acid (BNA)
  modified_base (18)..(18): bicyclic nucleic acid (BNA)
caucaaggaagauggcat

SEQ ID NO: 11859 - RNA, 17 nt, Artificial Sequence
  source: /note="Description of Artificial Sequence: Synthetic oligonucleotide"
  source: /note="RNA"
  source: /note="5' tri-ethylene glycol (TEG)"
  modified_base (1)..(1): bicyclic nucleic acid (BNA)
  modified_base (2)..(2): bicyclic nucleic acid (BNA)
  modified_base (16)..(16): bicyclic nucleic acid (BNA)
  modified_base (17)..(17): bicyclic nucleic acid (BNA)
caucaaggaagauggca

SEQ ID NO: 11860 - RNA, 16 nt, Artificial Sequence
  source: /note="Description of Artificial Sequence: Synthetic oligonucleotide"
  source: /note="RNA"
  source: /note="5' tri-ethylene glycol (TEG)"
  modified_base (1)..(1): bicyclic nucleic acid (BNA)
  modified_base (2)..(2): bicyclic nucleic acid (BNA)
  modified_base (15)..(15): bicyclic nucleic acid (BNA)
  modified_base (16)..(16): bicyclic nucleic acid (BNA)
caucaaggaagauggc

SEQ ID NO: 11861 - RNA, 15 nt, Artificial Sequence
  source: /note="Description of Artificial Sequence: Synthetic oligonucleotide"
  source: /note="RNA"
  source: /note="5' tri-ethylene glycol (TEG)"
  modified_base (1)..(1): bicyclic nucleic acid (BNA)
  modified_base (2)..(2): bicyclic nucleic acid (BNA)
  modified_base (14)..(14): bicyclic nucleic acid (BNA)
  modified_base (15)..(15): bicyclic nucleic acid (BNA)
caucaaggaagaugg

SEQ ID NO: 11862 - DNA, 14 bp, Artificial Sequence
  source: /note="Description of Artificial Sequence: Synthetic oligonucleotide"
  source: /note="Description of Combined DNA/RNA Molecule: Synthetic oligonucleotide"
  source: /note="DNA/RNA"
  source: /note="5' tri-ethylene glycol (TEG)"
  modified_base (1)..(1): bicyclic nucleic acid (BNA)
  modified_base (2)..(2): bicyclic nucleic acid (BNA)
  modified_base (13)..(13): bicyclic nucleic acid (BNA)
  modified_base (14)..(14): bicyclic nucleic acid (BNA)
caucaaggaagatg

SEQ ID NO: 11863 - DNA, 13 bp, Artificial Sequence
  source: /note="Description of Artificial Sequence: Synthetic oligonucleotide"
  source: /note="Description of Combined DNA/RNA Molecule: Synthetic oligonucleotide"
  source: /note="DNA/RNA"
  source: /note="5' tri-ethylene glycol (TEG)"
  modified_base (1)..(1): bicyclic nucleic acid (BNA)
  modified_base (2)..(2): bicyclic nucleic acid (BNA)
  modified_base (12)..(12): bicyclic nucleic acid (BNA)
  modified_base (13)..(13): bicyclic nucleic acid (BNA)
caucaaggaagat

SEQ ID NO: 11864 - RNA, 12 nt, Artificial Sequence
  source: /note="Description of Artificial Sequence: Synthetic oligonucleotide"
  source: /note="RNA"
  source: /note="5' tri-ethylene glycol (TEG)"
  modified_base (1)..(1): bicyclic nucleic acid (BNA)
  modified_base (2)..(2): bicyclic nucleic acid (BNA)
  modified_base (11)..(11): bicyclic nucleic acid (BNA)
  modified_base (12)..(12): bicyclic nucleic acid (BNA)
caucaaggaaga

SEQ ID NO: 11865 - RNA, 11 nt, Artificial Sequence
  source: /note="Description of Artificial Sequence: Synthetic oligonucleotide"
  source: /note="RNA"
  source: /note="5' tri-ethylene glycol (TEG)"
  modified_base (1)..(1): bicyclic nucleic acid (BNA)
  modified_base (2)..(2): bicyclic nucleic acid (BNA)
  modified_base (10)..(10): bicyclic nucleic acid (BNA)
  modified_base (11)..(11): bicyclic nucleic acid (BNA)
caucaaggaag

SEQ ID NO: 11866 - DNA, 23 bp, Artificial Sequence
  source: /note="Description of Artificial Sequence: Synthetic oligonucleotide"
  source: /note="Description of Combined DNA/RNA Molecule: Synthetic oligonucleotide"
  source: /note="DNA/RNA"
  source: /note="5' tri-ethylene glycol (TEG)"
  modified_base (1)..(1): bicyclic nucleic acid (BNA)
  modified_base (2)..(2): bicyclic nucleic acid (BNA)
  modified_base (22)..(22): bicyclic nucleic acid (BNA)
  modified_base (23)..(23): bicyclic nucleic acid (BNA)
atcaaggaagauggcauuucuag

SEQ ID NO: 11867 - DNA, 22 bp, Artificial Sequence
  source: /note="Description of Artificial Sequence: Synthetic oligonucleotide"
  source: /note="Description of Combined DNA/RNA Molecule: Synthetic oligonucleotide"
  source: /note="DNA/RNA"
  source: /note="5' tri-ethylene glycol (TEG)"
  modified_base (1)..(1): bicyclic nucleic acid (BNA)
  modified_base (2)..(2): bicyclic nucleic acid (BNA)
  modified_base (21)..(21): bicyclic nucleic acid (BNA)
  modified_base (22)..(22): bicyclic nucleic acid (BNA)
atcaaggaagauggcauuucta

SEQ ID NO: 11868 - DNA, 21 bp, Artificial Sequence
  source: /note="Description of Artificial Sequence: Synthetic oligonucleotide"
  source: /note="Description of Combined DNA/RNA Molecule: Synthetic oligonucleotide"
  source: /note="DNA/RNA"
  source: /note="5' tri-ethylene glycol (TEG)"
  modified_base (1)..(1): bicyclic nucleic acid (BNA)
  modified_base (2)..(2): bicyclic nucleic acid (BNA)
  modified_base (20)..(20): bicyclic nucleic acid (BNA)
  modified_base (21)..(21): bicyclic nucleic acid (BNA)
atcaaggaagauggcauuuct

SEQ ID NO: 11869 - DNA, 20 bp, Artificial Sequence
  source: /note="Description of Artificial Sequence: Synthetic oligonucleotide"
  source: /note="Description of Combined DNA/RNA Molecule: Synthetic oligonucleotide"
  source: /note="DNA/RNA"
  source: /note="5' tri-ethylene glycol (TEG)"
  modified_base (1)..(1): bicyclic nucleic acid (BNA)
  modified_base (2)..(2): bicyclic nucleic acid (BNA)
  modified_base (19)..(19): bicyclic nucleic acid (BNA)
  modified_base (20)..(20): bicyclic nucleic acid (BNA)
atcaaggaagauggcauutc

SEQ ID NO: 11870 - DNA, 19 bp, Artificial Sequence
  source: /note="Description of Artificial Sequence: Synthetic oligonucleotide"
  source: /note="Description of Combined DNA/RNA Molecule: Synthetic oligonucleotide"
  source: /note="DNA/RNA"
  source: /note="5' tri-ethylene glycol (TEG)"
  modified_base (1)..(1): bicyclic nucleic acid (BNA)
  modified_base (2)..(2): bicyclic nucleic acid (BNA)
  modified_base (18)..(18): bicyclic nucleic acid (BNA)
  modified_base (19)..(19): bicyclic nucleic acid (BNA)
atcaaggaagauggcautt

SEQ ID NO: 11871 - DNA, 18 bp, Artificial Sequence
  source: /note="Description of Artificial Sequence: Synthetic oligonucleotide"
  source: /note="Description of Combined DNA/RNA Molecule: Synthetic oligonucleotide"
  source: /note="DNA/RNA"
  source: /note="5' tri-ethylene glycol (TEG)"
  modified_base (1)..(1): bicyclic nucleic acid (BNA)
  modified_base (2)..(2): bicyclic nucleic acid (BNA)
  modified_base (17)..(17): bicyclic nucleic acid (BNA)
  modified_base (18)..(18): bicyclic nucleic acid (BNA)
atcaaggaagauggcatt

SEQ ID NO: 11872 - DNA, 17 bp, Artificial Sequence
  source: /note="Description of Artificial Sequence: Synthetic oligonucleotide"
  source: /note="Description of Combined DNA/RNA Molecule: Synthetic oligonucleotide"
  source: /note="DNA/RNA"
  source: /note="5' tri-ethylene glycol (TEG)"
  modified_base (1)..(1): bicyclic nucleic acid (BNA)
  modified_base (2)..(2): bicyclic nucleic acid (BNA)
  modified_base (16)..(16): bicyclic nucleic acid (BNA)
  modified_base (17)..(17): bicyclic nucleic acid (BNA)
atcaaggaagauggcat

SEQ ID NO: 11873 - DNA, 16 bp, Artificial Sequence
  source: /note="Description of Artificial Sequence: Synthetic oligonucleotide"
  source: /note="Description of Combined DNA/RNA Molecule: Synthetic oligonucleotide"
  source: /note="DNA/RNA"
  source: /note="5' tri-ethylene glycol (TEG)"
  modified_base (1)..(1): bicyclic nucleic acid (BNA)
  modified_base (2)..(2): bicyclic nucleic acid (BNA)
  modified_base (15)..(15): bicyclic nucleic acid (BNA)
  modified_base (16)..(16): bicyclic nucleic acid (BNA)
atcaaggaagauggca

SEQ ID NO: 11874 - DNA, 15 bp, Artificial Sequence
  source: /note="Description of Artificial Sequence: Synthetic oligonucleotide"
  source: /note="Description of Combined DNA/RNA Molecule: Synthetic oligonucleotide"
  source: /note="DNA/RNA"
  source: /note="5' tri-ethylene glycol (TEG)"
  modified_base (1)..(1): bicyclic nucleic acid (BNA)
  modified_base (2)..(2): bicyclic nucleic acid (BNA)
  modified_base (14)..(14): bicyclic nucleic acid (BNA)
  modified_base (15)..(15): bicyclic nucleic acid (BNA)
atcaaggaagauggc

SEQ ID NO: 11875 - DNA, 14 bp, Artificial Sequence
  source: /note="Description of Artificial Sequence: Synthetic oligonucleotide"
  source: /note="Description of Combined DNA/RNA Molecule: Synthetic oligonucleotide"
  source: /note="DNA/RNA"
  source: /note="5' tri-ethylene glycol (TEG)"
  modified_base (1)..(1): bicyclic nucleic acid (BNA)
  modified_base (2)..(2): bicyclic nucleic acid (BNA)
  modified_base (13)..(13): bicyclic nucleic acid (BNA)
  modified_base (14)..(14): bicyclic nucleic acid (BNA)
atcaaggaagaugg

SEQ ID NO: 11876 - DNA, 13 bp, Artificial Sequence
  source: /note="Description of Artificial Sequence: Synthetic oligonucleotide"
  source: /note="DNA/RNA"
  source: /note="5' tri-ethylene glycol (TEG)"
  modified_base (1)..(1): bicyclic nucleic acid (BNA)
  modified_base (2)..(2): bicyclic nucleic acid (BNA)
  modified_base (12)..(12): bicyclic nucleic acid (BNA)
  modified_base (13)..(13): bicyclic nucleic acid (BNA)
atcaaggaagatg

SEQ ID NO: 11877 - DNA, 12 bp, Artificial Sequence
  source: /note="Description of Artificial Sequence: Synthetic oligonucleotide"
  source: /note="DNA/RNA"
  source: /note="5' tri-ethylene glycol (TEG)"
  modified_base (1)..(1): bicyclic nucleic acid (BNA)
  modified_base (2)..(2): bicyclic nucleic acid (BNA)
  modified_base (11)..(11): bicyclic nucleic acid (BNA)
  modified_base (12)..(12): bicyclic nucleic acid (BNA)
atcaaggaagat

SEQ ID NO: 11878 - DNA, 11 bp, Artificial Sequence
  source: /note="Description of Artificial Sequence: Synthetic oligonucleotide"
  source: /note="DNA/RNA"
  source: /note="5' tri-ethylene glycol (TEG)"
  modified_base (1)..(1): bicyclic nucleic acid (BNA)
  modified_base (2)..(2): bicyclic nucleic acid (BNA)
  modified_base (10)..(10): bicyclic nucleic acid (BNA)
  modified_base (11)..(11): bicyclic nucleic acid (BNA)
atcaaggaaga

SEQ ID NO: 11879 - DNA, 10 bp, Artificial Sequence
  source: /note="Description of Artificial Sequence: Synthetic oligonucleotide"
  source: /note="DNA/RNA"
  source: /note="5' tri-ethylene glycol (TEG)"
  modified_base (1)..(1): bicyclic nucleic acid (BNA)
  modified_base (2)..(2): bicyclic nucleic acid (BNA)
  modified_base (9)..(9): bicyclic nucleic acid (BNA)
  modified_base (10)..(10): bicyclic nucleic acid (BNA)
atcaaggaag

SEQ ID NO: 11880 - DNA, 23 bp, Artificial Sequence
  source: /note="Description of Artificial Sequence: Synthetic oligonucleotide"
  source: /note="Description of Combined DNA/RNA Molecule: Synthetic oligonucleotide"
  source: /note="DNA/RNA"
  source: /note="5' tri-ethylene glycol (TEG)"
  modified_base (1)..(1): bicyclic nucleic acid (BNA)
  modified_base (2)..(2): bicyclic nucleic acid (BNA)
  modified_base (22)..(22): bicyclic nucleic acid (BNA)
  modified_base (23)..(23): bicyclic nucleic acid (BNA)
ccagagcagguaccuccaacatc

SEQ ID NO: 11881 - RNA, 18 nt, Artificial Sequence
  source: /note="Description of Artificial Sequence: Synthetic oligonucleotide"
  source: /note="RNA"
  source: /note="5' tri-ethylene glycol (TEG)"
  modified_base (1)..(1): bicyclic nucleic acid (BNA)
  modified_base (2)..(2): bicyclic nucleic acid (BNA)
  modified_base (17)..(17): bicyclic nucleic acid (BNA)
  modified_base (18)..(18): bicyclic nucleic acid (BNA)
ccagagcagguaccucca

SEQ ID NO: 11882 - DNA, 23 bp, Artificial Sequence
  source: /note="Description of Artificial Sequence: Synthetic oligonucleotide"
  source: /note="Description of Combined DNA/RNA Molecule: Synthetic oligonucleotide"
  source: /note="DNA/RNA"
  source: /note="5' tri-ethylene glycol (TEG)"
  modified_base (1)..(1): bicyclic nucleic acid (BNA)
  modified_base (2)..(2): bicyclic nucleic acid (BNA)
  modified_base (22)..(22): bicyclic nucleic acid (BNA)
  modified_base (23)..(23): bicyclic nucleic acid (BNA)
ccucugugauuuuauaacuugat

SEQ ID NO: 11883 - DNA, 17 bp, Artificial Sequence
  source: /note="Description of Artificial Sequence: Synthetic oligonucleotide"
  source: /note="Description of Combined DNA/RNA Molecule: Synthetic oligonucleotide"
  source: /note="DNA/RNA"
  source: /note="5' tri-ethylene glycol (TEG)"
  modified_base (1)..(1): bicyclic nucleic acid (BNA)
  modified_base (2)..(2): bicyclic nucleic acid (BNA)
  modified_base (16)..(16): bicyclic nucleic acid (BNA)
  modified_base (17)..(17): bicyclic nucleic acid (BNA)
tcacccaccaucaccct

SEQ ID NO: 11884 - DNA, 20 bp, Artificial Sequence
  source: /note="Description of Artificial Sequence: Synthetic oligonucleotide"
  source: /note="Description of Combined DNA/RNA Molecule: Synthetic oligonucleotide"
  source: /note="DNA/RNA"
  source: /note="5' tri-ethylene glycol (TEG)"
  modified_base (1)..(1): bicyclic nucleic acid (BNA)
  modified_base (2)..(2): bicyclic nucleic acid (BNA)
  modified_base (19)..(19): bicyclic nucleic acid (BNA)
  modified_base (20)..(20): bicyclic nucleic acid (BNA)
tgauauccucaaggucaccc

SEQ ID NO: 11885 - DNA, 22 bp, Artificial Sequence
  source: /note="Description of Artificial Sequence: Synthetic oligonucleotide"
  source: /note="Description of Combined DNA/RNA Molecule: Synthetic oligonucleotide"
  source: /note="DNA/RNA"
  source: /note="5' tri-ethylene glycol (TEG)"
  modified_base (1)..(1): bicyclic nucleic acid (BNA)
  modified_base (2)..(2): bicyclic nucleic acid (BNA)
  modified_base (21)..(21): bicyclic nucleic acid (BNA)
  modified_base (22)..(22): bicyclic nucleic acid (BNA)
ctgcuugaugaucaucucgutg

SEQ ID NO: 11886 - DNA, 18 bp, Artificial Sequence
  source: /note="Description of Artificial Sequence: Synthetic oligonucleotide"
  source: /note="Description of Combined DNA/RNA Molecule: Synthetic oligonucleotide"
  source: /note="DNA/RNA"
  source: /note="5' tri-ethylene glycol (TEG)"
  modified_base (1)..(1): bicyclic nucleic acid (BNA)
  modified_base (2)..(2): bicyclic nucleic acid (BNA)
  modified_base (17)..(17): bicyclic nucleic acid (BNA)
  modified_base (18)..(18): bicyclic nucleic acid (BNA)
ctgcuugaugaucauctc

SEQ ID NO: 11887 - DNA, 19 bp, Artificial Sequence
  source: /note="Description of Artificial Sequence: Synthetic oligonucleotide"
  source: /note="Description of Combined DNA/RNA Molecule: Synthetic oligonucleotide"
  source: /note="DNA/RNA"
  source: /note="5' tri-ethylene glycol (TEG)"
  modified_base (1)..(1): bicyclic nucleic acid (BNA)
  modified_base (2)..(2): bicyclic nucleic acid (BNA)
  modified_base (18)..(18): bicyclic nucleic acid (BNA)
  modified_base (19)..(19): bicyclic nucleic acid (BNA)
gtuuccuuaguaaccacag

SEQ ID NO: 11888 - DNA, 17 bp, Artificial Sequence
  source: /note="Description of Artificial Sequence: Synthetic oligonucleotide"
  source: /note="Description of Combined DNA/RNA Molecule: Synthetic oligonucleotide"
  source: /note="DNA/RNA"
  source: /note="5' tri-ethylene glycol (TEG)"
  modified_base (1)..(1): bicyclic nucleic acid (BNA)
  modified_base (2)..(2): bicyclic nucleic acid (BNA)
  modified_base (16)..(16): bicyclic nucleic acid (BNA)
  modified_base (17)..(17): bicyclic nucleic acid (BNA)
gtuuccuuaguaaccac

SEQ ID NO: 11889 - DNA, 20 bp, Artificial Sequence
  source: /note="Description of Artificial Sequence: Synthetic oligonucleotide"
  source: /note="Description of Combined DNA/RNA Molecule: Synthetic oligonucleotide"
  source: /note="DNA/RNA"
  modified_base (1)..(1): bicyclic nucleic acid (BNA)
  modified_base (2)..(2): bicyclic nucleic acid (BNA)
  modified_base (19)..(19): bicyclic nucleic acid (BNA)
  modified_base (20)..(20): bicyclic nucleic acid (BNA)
  source: /note="3' tri-ethylene glycol (TEG)"
tcaaggaagauggcauuuct

SEQ ID NO: 11890 - DNA, 22 bp, Artificial Sequence
  source: /note="Description of Artificial Sequence: Synthetic oligonucleotide"
  source: /note="Description of Combined DNA/RNA Molecule: Synthetic oligonucleotide"
  source: /note="DNA/RNA"
  modified_base (1)..(1): bicyclic nucleic acid (BNA)
  modified_base (2)..(2): bicyclic nucleic acid (BNA)
  modified_base (21)..(21): bicyclic nucleic acid (BNA)
  modified_base (22)..(22): bicyclic nucleic acid (BNA)
  source: /note="3' tri-ethylene glycol (TEG)"
tcaaggaagauggcauuucuag

SEQ ID NO: 11891 - RNA, 18 nt, Artificial Sequence
  source: /note="Description of Artificial Sequence: Synthetic oligonucleotide"
  source: /note="RNA"
  modified_base (1)..(1): bicyclic nucleic acid (BNA)
  modified_base (2)..(2): bicyclic nucleic acid (BNA)
  modified_base (17)..(17): bicyclic nucleic acid (BNA)
  modified_base (18)..(18): bicyclic nucleic acid (BNA)
  source: /note="3' tri-ethylene glycol (TEG)"
gguaaguucuguccaagc

SEQ ID NO: 11892 - DNA, 18 bp, Artificial Sequence
  source: /note="Description of Artificial Sequence: Synthetic oligonucleotide"
  source: /note="Description of Combined DNA/RNA Molecule: Synthetic oligonucleotide"
  source: /note="DNA/RNA"
  modified_base (1)..(1): bicyclic nucleic acid (BNA)
  modified_base (2)..(2): bicyclic nucleic acid (BNA)
  modified_base (17)..(17): bicyclic nucleic acid (BNA)
  modified_base (18)..(18): bicyclic nucleic acid (BNA)
  source: /note="3' tri-ethylene glycol (TEG)"
gtaaguucuguccaagcc

SEQ ID NO: 11893 - RNA, 18 nt, Artificial Sequence
  source: /note="Description of Artificial Sequence: Synthetic oligonucleotide"
  source: /note="RNA"
  modified_base (1)..(1): bicyclic nucleic acid (BNA)
  modified_base (2)..(2): bicyclic nucleic acid (BNA)
  modified_base (17)..(17): bicyclic nucleic acid (BNA)
  modified_base (18)..(18): bicyclic nucleic acid (BNA)
  source: /note="3' tri-ethylene glycol (TEG)"
agucgguaaguucugucc

SEQ ID NO: 11894 - DNA, 18 bp, Artificial Sequence
  source: /note="Description of Artificial Sequence: Synthetic oligonucleotide"
  source: /note="Description of Combined DNA/RNA Molecule: Synthetic oligonucleotide"
  source: /note="DNA/RNA"
  modified_base (1)..(1): bicyclic nucleic acid (BNA)
  modified_base (2)..(2): bicyclic nucleic acid (BNA)
  modified_base (17)..(17): bicyclic nucleic acid (BNA)
  modified_base (18)..(18): bicyclic nucleic acid (BNA)
  source: /note="3' tri-ethylene glycol (TEG)"
ctguccaagcccgguuga

SEQ ID NO: 11895 - DNA, 15 bp, Artificial Sequence
  source: /note="Description of Artificial Sequence: Synthetic oligonucleotide"
  source: /note="Description of Combined DNA/RNA Molecule: Synthetic oligonucleotide"
  source: /note="DNA/RNA"
  modified_base (1)..(1): bicyclic nucleic acid (BNA)
  modified_base (2)..(2): bicyclic nucleic acid (BNA)
  modified_base (14)..(14): bicyclic nucleic acid (BNA)
  modified_base (15)..(15): bicyclic nucleic acid (BNA)
  source: /note="3' tri-ethylene glycol (TEG)"
taaguucuguccaag

SEQ ID NO: 11896 - DNA, 20 bp, Artificial Sequence
  source: /note="Description of Artificial Sequence: Synthetic oligonucleotide"
  source: /note="Description of Combined DNA/RNA Molecule: Synthetic oligonucleotide"
  source: /note="DNA/RNA"
  modified_base (1)..(1): bicyclic nucleic acid (BNA)
  modified_base (2)..(2): bicyclic nucleic acid (BNA)
  modified_base (19)..(19): bicyclic nucleic acid (BNA)
  modified_base (20)..(20): bicyclic nucleic acid (BNA)
  source: /note="3' tri-ethylene glycol (TEG)"
ttcuguccaagcccgguuga

SEQ ID NO: 11897 - DNA, 19 bp, Artificial Sequence
  source: /note="Description of Artificial Sequence: Synthetic oligonucleotide"
  source: /note="Description of Combined DNA/RNA Molecule: Synthetic oligonucleotide"
  source: /note="DNA/RNA"
  modified_base (1)..(1): bicyclic nucleic acid (BNA)
  modified_base (2)..(2): bicyclic nucleic acid (BNA)
  modified_base (18)..(18): bicyclic nucleic acid (BNA)
  modified_base (19)..(19): bicyclic nucleic acid (BNA)
  source: /note="3' tri-ethylene glycol (TEG)"
ttcuguccaagcccggutg

SEQ ID NO: 11898 - DNA, 18 bp, Artificial Sequence
  source: /note="Description of Artificial Sequence: Synthetic oligonucleotide"
  source: /note="Description of Combined DNA/RNA Molecule: Synthetic oligonucleotide"
  source: /note="DNA/RNA"
  modified_base (1)..(1): bicyclic nucleic acid (BNA)
  modified_base (2)..(2): bicyclic nucleic acid (BNA)
  modified_base (17)..(17): bicyclic nucleic acid (BNA)
  modified_base (18)..(18): bicyclic nucleic acid (BNA)
  source: /note="3' tri-ethylene glycol (TEG)"
ttcuguccaagcccggtt

SEQ ID NO: 11899 - DNA, 17 bp, Artificial Sequence
  source: /note="Description of Artificial Sequence: Synthetic oligonucleotide"
  source: /note="Description of Combined DNA/RNA Molecule: Synthetic oligonucleotide"
  source: /note="DNA/RNA"
  modified_base (1)..(1): bicyclic nucleic acid (BNA)
  modified_base (2)..(2): bicyclic nucleic acid (BNA)
  modified_base (16)..(16): bicyclic nucleic acid (BNA)
  modified_base (17)..(17): bicyclic nucleic acid (BNA)
  source: /note="3' tri-ethylene glycol (TEG)"
ttcuguccaagcccggt

SEQ ID NO: 11900 - DNA, 16 bp, Artificial Sequence
  source: /note="Description of Artificial Sequence: Synthetic oligonucleotide"
  source: /note="Description of Combined DNA/RNA Molecule: Synthetic oligonucleotide"
  source: /note="DNA/RNA"
  modified_base (1)..(1): bicyclic nucleic acid (BNA)
  modified_base (2)..(2): bicyclic nucleic acid (BNA)
  modified_base (15)..(15): bicyclic nucleic acid (BNA)
  modified_base (16)..(16): bicyclic nucleic acid (BNA)
  source: /note="3' tri-ethylene glycol (TEG)"
ttcuguccaagcccgg

SEQ ID NO: 11901 - DNA, 15 bp, Artificial Sequence
  source: /note="Description of Artificial Sequence: Synthetic oligonucleotide"
  source: /note="Description of Combined DNA/RNA Molecule: Synthetic oligonucleotide"
  source: /note="DNA/RNA"
  modified_base (1)..(1): bicyclic nucleic acid (BNA)
  modified_base (2)..(2): bicyclic nucleic acid (BNA)
  modified_base (14)..(14): bicyclic nucleic acid (BNA)
  modified_base (15)..(15): bicyclic nucleic acid (BNA)
  source: /note="3' tri-ethylene glycol (TEG)"
ttcuguccaagcccg

SEQ ID NO: 11902 - DNA, 14 bp, Artificial Sequence
  source: /note="Description of Artificial Sequence: Synthetic oligonucleotide"
  source: /note="Description of Combined DNA/RNA Molecule: Synthetic oligonucleotide"
  source: /note="DNA/RNA"
  modified_base (1)..(1): bicyclic nucleic acid (BNA)
  modified_base (2)..(2): bicyclic nucleic acid (BNA)
  modified_base (13)..(13): bicyclic nucleic acid (BNA)
  modified_base (14)..(14): bicyclic nucleic acid (BNA)
  source: /note="3' tri-ethylene glycol (TEG)"
ttcuguccaagccc

SEQ ID NO: 11903 - DNA, 13 bp, Artificial Sequence
  source: /note="Description of Artificial Sequence: Synthetic oligonucleotide"
  source: /note="Description of Combined DNA/RNA Molecule: Synthetic oligonucleotide"
  source: /note="DNA/RNA"
  modified_base (1)..(1): bicyclic nucleic acid (BNA)
  modified_base (2)..(2): bicyclic nucleic acid (BNA)
  modified_base (12)..(12): bicyclic nucleic acid (BNA)
  modified_base (13)..(13): bicyclic nucleic acid (BNA)
  source: /note="3' tri-ethylene glycol (TEG)"
ttcuguccaagcc

SEQ ID NO: 11904 - DNA, 12 bp, Artificial Sequence
  source: /note="Description of Artificial Sequence: Synthetic oligonucleotide"
  source: /note="Description of Combined DNA/RNA Molecule: Synthetic oligonucleotide"
  source: /note="DNA/RNA"
  modified_base (1)..(1): bicyclic nucleic acid (BNA)
  modified_base (2)..(2): bicyclic nucleic acid (BNA)
  modified_base (11)..(11): bicyclic nucleic acid (BNA)
  modified_base (12)..(12): bicyclic nucleic acid (BNA)
  source: /note="3' tri-ethylene glycol (TEG)"
ttcuguccaagc

SEQ ID NO: 11905 - DNA, 11 bp, Artificial Sequence
  source: /note="Description of Artificial Sequence: Synthetic oligonucleotide"
  source: /note="Description of Combined DNA/RNA Molecule: Synthetic oligonucleotide"
  source: /note="DNA/RNA"
  modified_base (1)..(1): bicyclic nucleic acid (BNA)
  modified_base (2)..(2): bicyclic nucleic acid (BNA)
  modified_base (10)..(10): bicyclic nucleic acid (BNA)
  modified_base (11)..(11): bicyclic nucleic acid (BNA)
  source: /note="3' tri-ethylene glycol (TEG)"
ttcuguccaag

SEQ ID NO: 11906 - DNA, 10 bp, Artificial Sequence
  source: /note="Description of Artificial Sequence: Synthetic oligonucleotide"
  source: /note="Description of Combined DNA/RNA Molecule: Synthetic oligonucleotide"
  source: /note="DNA/RNA"
  modified_base (1)..(1): bicyclic nucleic acid (BNA)
  modified_base (2)..(2): bicyclic nucleic acid (BNA)
  modified_base (9)..(9): bicyclic nucleic acid (BNA)
  modified_base (10)..(10): bicyclic nucleic acid (BNA)
  source: /note="3' tri-ethylene glycol (TEG)"
ttcuguccaa

SEQ ID NO: 11907 - DNA, 9 bp, Artificial Sequence
  source: /note="Description of Artificial Sequence: Synthetic oligonucleotide"
  source: /note="Description of Combined DNA/RNA Molecule: Synthetic oligonucleotide"
  source: /note="DNA/RNA"
  modified_base (1)..(1): bicyclic nucleic acid (BNA)
  modified_base (2)..(2): bicyclic nucleic acid (BNA)
  modified_base (8)..(8): bicyclic nucleic acid (BNA)
  modified_base (9)..(9): bicyclic nucleic acid (BNA)
  source: /note="3' tri-ethylene glycol (TEG)"
ttcugucca

SEQ ID NO: 11908 - DNA, 8 bp, Artificial Sequence
  source: /note="Description of Artificial Sequence: Synthetic oligonucleotide"
  source: /note="Description of Combined DNA/RNA Molecule: Synthetic oligonucleotide"
  source: /note="DNA/RNA"
  modified_base (1)..(1): bicyclic nucleic acid (BNA)
  modified_base (2)..(2): bicyclic nucleic acid (BNA)
  modified_base (7)..(7): bicyclic nucleic acid (BNA)
  modified_base (8)..(8): bicyclic nucleic acid (BNA)
  source: /note="3' tri-ethylene glycol (TEG)"
ttcugucc

SEQ ID NO: 11909 - DNA, 19 bp, Artificial Sequence
  source: /note="Description of Artificial Sequence: Synthetic oligonucleotide"
  source: /note="Description of Combined DNA/RNA Molecule: Synthetic oligonucleotide"
  source: /note="DNA/RNA"
  modified_base (1)..(1): bicyclic nucleic acid (BNA)
  modified_base (2)..(2): bicyclic nucleic acid (BNA)
  modified_base (18)..(18): bicyclic nucleic acid (BNA)
  modified_base (19)..(19): bicyclic nucleic acid (BNA)
  source: /note="3' tri-ethylene glycol (TEG)"
tcuguccaagcccgguuga

SEQ ID NO: 11910 - DNA, 18 bp, Artificial Sequence
  source: /note="Description of Artificial Sequence: Synthetic oligonucleotide"
  source: /note="Description of Combined DNA/RNA Molecule: Synthetic oligonucleotide"
  source: /note="DNA/RNA"
  modified_base (1)..(1): bicyclic nucleic acid (BNA)
  modified_base (2)..(2): bicyclic nucleic acid (BNA)
  modified_base (17)..(17): bicyclic nucleic acid (BNA)
  modified_base (18)..(18): bicyclic nucleic acid (BNA)
  source: /note="3' tri-ethylene glycol (TEG)"
tcuguccaagcccggutg

SEQ ID NO: 11911 - DNA, 17 bp, Artificial Sequence
  source: /note="Description of Artificial Sequence: Synthetic oligonucleotide"
  source: /note="Description of Combined DNA/RNA Molecule: Synthetic oligonucleotide"
  source: /note="DNA/RNA"
  modified_base (1)..(1): bicyclic nucleic acid (BNA)
  modified_base (2)..(2): bicyclic nucleic acid (BNA)
  modified_base (16)..(16): bicyclic nucleic acid (BNA)
  modified_base (17)..(17): bicyclic nucleic acid (BNA)
  source: /note="3' tri-ethylene glycol (TEG)"
tcuguccaagcccggtt

SEQ ID NO: 11912 - DNA, 16 bp, Artificial Sequence
  source: /note="Description of Artificial Sequence: Synthetic oligonucleotide"
  source: /note="Description of Combined DNA/RNA Molecule: Synthetic oligonucleotide"
  source: /note="DNA/RNA"
  modified_base (1)..(1): bicyclic nucleic acid (BNA)
  modified_base (2)..(2): bicyclic nucleic acid (BNA)
  modified_base (15)..(15): bicyclic nucleic acid (BNA)
  modified_base (16)..(16): bicyclic nucleic acid (BNA)
  source: /note="3' tri-ethylene glycol (TEG)"
tcuguccaagcccggt

SEQ ID NO: 11913 - DNA, 15 bp, Artificial Sequence
  source: /note="Description of Artificial Sequence: Synthetic oligonucleotide"
  source: /note="Description of Combined DNA/RNA Molecule: Synthetic oligonucleotide"
  source: /note="DNA/RNA"
  modified_base (1)..(1): bicyclic nucleic acid (BNA)
  modified_base (2)..(2): bicyclic nucleic acid (BNA)
  modified_base (14)..(14): bicyclic nucleic acid (BNA)
  modified_base (15)..(15): bicyclic nucleic acid (BNA)
  source: /note="3' tri-ethylene glycol (TEG)"
tcuguccaagcccgg

SEQ ID NO: 11914 - DNA, 14 bp, Artificial Sequence
  source: /note="Description of Artificial Sequence: Synthetic oligonucleotide"
  source: /note="Description of Combined DNA/RNA Molecule: Synthetic oligonucleotide"
  source: /note="DNA/RNA"
  modified_base (1)..(1): bicyclic nucleic acid (BNA)
  modified_base (2)..(2): bicyclic nucleic acid (BNA)
  modified_base (13)..(13): bicyclic nucleic acid (BNA)
  modified_base (14)..(14): bicyclic nucleic acid (BNA)
  source: /note="3' tri-ethylene glycol (TEG)"
tcuguccaagcccg

SEQ ID NO: 11915 - DNA, 13 bp, Artificial Sequence
  source: /note="Description of Artificial Sequence: Synthetic oligonucleotide"
  source: /note="Description of Combined DNA/RNA Molecule: Synthetic oligonucleotide"
  source: /note="DNA/RNA"
  modified_base (1)..(1): bicyclic nucleic acid (BNA)
  modified_base (2)..(2): bicyclic nucleic acid (BNA)
  modified_base (12)..(12): bicyclic nucleic acid (BNA)
  modified_base (13)..(13): bicyclic nucleic acid (BNA)
  source: /note="3' tri-ethylene glycol (TEG)"
tcuguccaagccc

SEQ ID NO: 11916 - DNA, 12 bp, Artificial Sequence
  source: /note="Description of Artificial Sequence: Synthetic oligonucleotide"
  source: /note="Description of Combined DNA/RNA Molecule: Synthetic oligonucleotide"
  source: /note="DNA/RNA"
  modified_base (1)..(1): bicyclic nucleic acid (BNA)
  modified_base (2)..(2): bicyclic nucleic acid (BNA)
  modified_base (11)..(11): bicyclic nucleic acid (BNA)
  modified_base (12)..(12): bicyclic nucleic acid (BNA)
  source: /note="3' tri-ethylene glycol (TEG)"
tcuguccaagcc

SEQ ID NO: 11917 - DNA, 11 bp, Artificial Sequence
  source: /note="Description of Artificial Sequence: Synthetic oligonucleotide"
  source: /note="Description of Combined DNA/RNA Molecule: Synthetic oligonucleotide"
  source: /note="DNA/RNA"
  modified_base (1)..(1): bicyclic nucleic acid (BNA)
  modified_base (2)..(2): bicyclic nucleic acid (BNA)
  modified_base (10)..(10): bicyclic nucleic acid (BNA)
  modified_base (11)..(11): bicyclic nucleic acid (BNA)
  source: /note="3' tri-ethylene glycol (TEG)"
tcuguccaagc

SEQ ID NO: 11918 - DNA, 10 bp, Artificial Sequence
  source: /note="Description of Artificial Sequence: Synthetic oligonucleotide"
  source: /note="Description of Combined DNA/RNA Molecule: Synthetic oligonucleotide"
  source: /note="DNA/RNA"
  modified_base (1)..(1): bicyclic nucleic acid (BNA)
  modified_base (2)..(2): bicyclic nucleic acid (BNA)
  modified_base (9)..(9): bicyclic nucleic acid (BNA)
  modified_base (10)..(10): bicyclic nucleic acid (BNA)
  source: /note="3' tri-ethylene glycol (TEG)"
tcuguccaag

SEQ ID NO: 11919 - DNA, 9 bp, Artificial Sequence
  source: /note="Description of Artificial Sequence: Synthetic oligonucleotide"
  source: /note="Description of Combined DNA/RNA Molecule: Synthetic oligonucleotide"
  source: /note="DNA/RNA"
  modified_base (1)..(1): bicyclic nucleic acid (BNA)
  modified_base (2)..(2): bicyclic nucleic acid (BNA)
  modified_base (8)..(8): bicyclic nucleic acid (BNA)
  modified_base (9)..(9): bicyclic nucleic acid (BNA)
  source: /note="3' tri-ethylene glycol (TEG)"
tcuguccaa

SEQ ID NO: 11920 - DNA, 8 bp, Artificial Sequence
  source: /note="Description of Artificial Sequence: Synthetic oligonucleotide"
  source: /note="Description of Combined DNA/RNA Molecule: Synthetic oligonucleotide"
  source: /note="DNA/RNA"
  modified_base (1)..(1): bicyclic nucleic acid (BNA)
  modified_base (2)..(2): bicyclic nucleic acid (BNA)
  modified_base (7)..(7): bicyclic nucleic acid (BNA)
  modified_base (8)..(8): bicyclic nucleic acid (BNA)
  source: /note="3' tri-ethylene glycol (TEG)"
tcugucca

SEQ ID NO: 11921 - DNA, 17 bp, Artificial Sequence
  source: /note="Description of Artificial Sequence: Synthetic oligonucleotide"
  source: /note="Description of Combined DNA/RNA Molecule: Synthetic oligonucleotide"
  source: /note="DNA/RNA"
  modified_base (1)..(1): bicyclic nucleic acid (BNA)
  modified_base (2)..(2): bicyclic nucleic acid (BNA)
  modified_base (16)..(16): bicyclic nucleic acid (BNA)
  modified_base (17)..(17): bicyclic nucleic acid (BNA)
  source: /note="3' tri-ethylene glycol (TEG)"
ctguccaagcccggutg

SEQ ID NO: 11922 - DNA, 16 bp, Artificial Sequence
  source: /note="Description of Artificial Sequence: Synthetic oligonucleotide"
  source: /note="Description of Combined DNA/RNA Molecule: Synthetic oligonucleotide"
  source: /note="DNA/RNA"
  modified_base (1)..(1): bicyclic nucleic acid (BNA)
  modified_base (2)..(2): bicyclic nucleic acid (BNA)
  modified_base (15)..(15): bicyclic nucleic acid (BNA)
  modified_base (16)..(16): bicyclic nucleic acid (BNA)
  source: /note="3' tri-ethylene glycol (TEG)"
ctguccaagcccggtt

SEQ ID NO: 11923 - DNA, 15 bp, Artificial Sequence
  source: /note="Description of Artificial Sequence: Synthetic oligonucleotide"
  source: /note="Description of Combined DNA/RNA Molecule: Synthetic oligonucleotide"
  source: /note="DNA/RNA"
  modified_base (1)..(1): bicyclic nucleic acid (BNA)
  modified_base (2)..(2): bicyclic nucleic acid (BNA)
  modified_base (14)..(14): bicyclic nucleic acid (BNA)
  modified_base (15)..(15): bicyclic nucleic acid (BNA)
  source: /note="3' tri-ethylene glycol (TEG)"
ctguccaagcccggt

SEQ ID NO: 11924 - DNA, 14 bp, Artificial Sequence
  source: /note="Description of Artificial Sequence: Synthetic oligonucleotide"
  source: /note="Description of Combined DNA/RNA Molecule: Synthetic oligonucleotide"
  source: /note="DNA/RNA"
  modified_base (1)..(1): bicyclic nucleic acid (BNA)
  modified_base (2)..(2): bicyclic nucleic acid (BNA)
  modified_base (13)..(13): bicyclic nucleic acid (BNA)
  modified_base (14)..(14): bicyclic nucleic acid (BNA)
  source: /note="3' tri-ethylene glycol (TEG)"
ctguccaagcccgg

SEQ ID NO: 11925 - DNA, 13 bp, Artificial Sequence
  source: /note="Description of Artificial Sequence: Synthetic oligonucleotide"
  source: /note="Description of Combined DNA/RNA Molecule: Synthetic oligonucleotide"
  source: /note="DNA/RNA"
  modified_base (1)..(1): bicyclic nucleic acid (BNA)
  modified_base (2)..(2): bicyclic nucleic acid (BNA)
  modified_base (12)..(12): bicyclic nucleic acid (BNA)
  modified_base (13)..(13): bicyclic nucleic acid (BNA)
  source: /note="3' tri-ethylene glycol (TEG)"
ctguccaagcccg

SEQ ID NO: 11926 - DNA, 12 bp, Artificial Sequence
  source: /note="Description of Artificial Sequence: Synthetic oligonucleotide"
  source: /note="Description of Combined DNA/RNA Molecule: Synthetic oligonucleotide"
  source: /note="DNA/RNA"
  modified_base (1)..(1): bicyclic nucleic acid (BNA)
  modified_base (2)..(2): bicyclic nucleic acid (BNA)
  modified_base (11)..(11): bicyclic nucleic acid (BNA)
  modified_base (12)..(12): bicyclic nucleic acid (BNA)
  source: /note="3' tri-ethylene glycol (TEG)"
ctguccaagccc

SEQ ID NO: 11927 - DNA, 11 bp, Artificial Sequence
  source: /note="Description of Artificial Sequence: Synthetic oligonucleotide"
  source: /note="Description of Combined DNA/RNA Molecule: Synthetic oligonucleotide"
  source: /note="DNA/RNA"
  modified_base (1)..(1): bicyclic nucleic acid (BNA)
  modified_base (2)..(2): bicyclic nucleic acid (BNA)
  modified_base (10)..(10): bicyclic nucleic acid (BNA)
  modified_base (11)..(11): bicyclic nucleic acid (BNA)
  source: /note="3' tri-ethylene glycol (TEG)"
ctguccaagcc

SEQ ID NO: 11928 - DNA, 10 bp, Artificial Sequence
  source: /note="Description of Artificial Sequence: Synthetic oligonucleotide"
  source: /note="Description of Combined DNA/RNA Molecule: Synthetic oligonucleotide"
  source: /note="DNA/RNA"
  modified_base (1)..(1): bicyclic nucleic acid (BNA)
  modified_base (2)..(2): bicyclic nucleic acid (BNA)
  modified_base (9)..(9): bicyclic nucleic acid (BNA)
  modified_base (10)..(10): bicyclic nucleic acid (BNA)
  source: /note="3' tri-ethylene glycol (TEG)"
ctguccaagc

SEQ ID NO: 11929 - DNA, 9 bp, Artificial Sequence
  source: /note="Description of Artificial Sequence: Synthetic oligonucleotide"
  source: /note="Description of Combined DNA/RNA Molecule: Synthetic oligonucleotide"
  source: /note="DNA/RNA"
  modified_base (1)..(1): bicyclic nucleic acid (BNA)
  modified_base (2)..(2): bicyclic nucleic acid (BNA)
  modified_base (8)..(8): bicyclic nucleic acid (BNA)
  modified_base (9)..(9): bicyclic nucleic acid (BNA)
  source: /note="3' tri-ethylene glycol (TEG)"
ctguccaag

SEQ ID NO: 11930 - DNA, 8 bp, Artificial Sequence
  source: /note="Description of Artificial Sequence: Synthetic oligonucleotide"
  source: /note="Description of Combined DNA/RNA Molecule: Synthetic oligonucleotide"
  source: /note="DNA/RNA"
  modified_base (1)..(1): bicyclic nucleic acid (BNA)
  modified_base (2)..(2): bicyclic nucleic acid (BNA)
  modified_base (7)..(7): bicyclic nucleic acid (BNA)
  modified_base (8)..(8): bicyclic nucleic acid (BNA)
  source: /note="3' tri-ethylene glycol (TEG)"
ctguccaa

SEQ ID NO: 11931 - DNA, 20 bp, Artificial Sequence
  source: /note="Description of Artificial Sequence: Synthetic oligonucleotide"
  source: /note="Description of Combined DNA/RNA Molecule: Synthetic oligonucleotide"
  source: /note="DNA/RNA"
  modified_base (1)..(1): bicyclic nucleic acid (BNA)
  modified_base (2)..(2): bicyclic nucleic acid (BNA)
  modified_base (19)..(19): bicyclic nucleic acid (BNA)
  modified_base (20)..(20): bicyclic nucleic acid (BNA)
  source: /note="3' tri-ethylene glycol (TEG)"
gtucuguccaagcccggutg

SEQ ID NO: 11932 - DNA, 19 bp, Artificial Sequence
  source: /note="Description of Artificial Sequence: Synthetic oligonucleotide"
  source: /note="Description of Combined DNA/RNA Molecule: Synthetic oligonucleotide"
  source: /note="DNA/RNA"
  modified_base (1)..(1): bicyclic nucleic acid (BNA)
  modified_base (2)..(2): bicyclic nucleic acid (BNA)
  modified_base (18)..(18): bicyclic nucleic acid (BNA)
  modified_base (19)..(19): bicyclic nucleic acid (BNA)
  source: /note="3' tri-ethylene glycol (TEG)"
gtucuguccaagcccggtt

SEQ ID NO: 11933 - DNA, 18 bp, Artificial Sequence
  source: /note="Description of Artificial Sequence: Synthetic oligonucleotide"
  source: /note="Description of Combined DNA/RNA Molecule: Synthetic oligonucleotide"
  source: /note="DNA/RNA"
  modified_base (1)..(1): bicyclic nucleic acid (BNA)
  modified_base (2)..(2): bicyclic nucleic acid (BNA)
  modified_base (17)..(17): bicyclic nucleic acid (BNA)
  modified_base (18)..(18): bicyclic nucleic acid (BNA)
  source: /note="3' tri-ethylene glycol (TEG)"
gtucuguccaagcccggt

SEQ ID NO: 11934 - DNA, 17 bp, Artificial Sequence
  source: /note="Description of Artificial Sequence: Synthetic oligonucleotide"
  source: /note="Description of Combined DNA/RNA Molecule: Synthetic oligonucleotide"
  source: /note="DNA/RNA"
  modified_base (1)..(1): bicyclic nucleic acid (BNA)
  modified_base (2)..(2): bicyclic nucleic acid (BNA)
  modified_base (16)..(16): bicyclic nucleic acid (BNA)
  modified_base (17)..(17): bicyclic nucleic acid (BNA)
  source: /note="3' tri-ethylene glycol (TEG)"
gtucuguccaagcccgg

SEQ ID NO: 11935 - DNA, 16 bp, Artificial Sequence
  source: /note="Description of Artificial Sequence: Synthetic oligonucleotide"
  source: /note="Description of Combined DNA/RNA Molecule: Synthetic oligonucleotide"
  source: /note="DNA/RNA"
  modified_base (1)..(1): bicyclic nucleic acid (BNA)
  modified_base (2)..(2): bicyclic nucleic acid (BNA)
  modified_base (15)..(15): bicyclic nucleic acid (BNA)
  modified_base (16)..(16): bicyclic nucleic acid (BNA)
  source: /note="3' tri-ethylene glycol (TEG)"
gtucuguccaagcccg

SEQ ID NO: 11936 - DNA, 15 bp, Artificial Sequence
  source: /note="Description of Artificial Sequence: Synthetic oligonucleotide"
  source: /note="Description of Combined DNA/RNA Molecule: Synthetic oligonucleotide"
  source: /note="DNA/RNA"
  modified_base (1)..(1): bicyclic nucleic acid (BNA)
  modified_base (2)..(2): bicyclic nucleic acid (BNA)
  modified_base (14)..(14): bicyclic nucleic acid (BNA)
  modified_base (15)..(15): bicyclic nucleic acid (BNA)
  source: /note="3' tri-ethylene glycol (TEG)"
gtucuguccaagccc

SEQ ID NO: 11937 - DNA, 14 bp, Artificial Sequence
  source: /note="Description of Artificial Sequence: Synthetic oligonucleotide"
  source: /note="Description of Combined DNA/RNA Molecule: Synthetic oligonucleotide"
  source: /note="DNA/RNA"
  modified_base (1)..(1): bicyclic nucleic acid (BNA)
  modified_base (2)..(2): bicyclic nucleic acid (BNA)
  modified_base (13)..(13): bicyclic nucleic acid (BNA)
  modified_base (14)..(14): bicyclic nucleic acid (BNA)
  source: /note="3' tri-ethylene glycol (TEG)"
gtucuguccaagcc

SEQ ID NO: 11938 - DNA, 13 bp, Artificial Sequence
  source: /note="Description of Artificial Sequence: Synthetic oligonucleotide"
  source: /note="Description of Combined DNA/RNA Molecule: Synthetic oligonucleotide"
  source: /note="DNA/RNA"
  modified_base (1)..(1): bicyclic nucleic acid (BNA)
  modified_base (2)..(2): bicyclic nucleic acid (BNA)
  modified_base (12)..(12): bicyclic nucleic acid (BNA)
  modified_base (13)..(13): bicyclic nucleic acid (BNA)
  source: /note="3' tri-ethylene glycol (TEG)"
gtucuguccaagc

SEQ ID NO: 11939 - DNA, 12 bp, Artificial Sequence
  source: /note="Description of Artificial Sequence: Synthetic oligonucleotide"
  source: /note="Description of Combined DNA/RNA Molecule: Synthetic oligonucleotide"
  source: /note="DNA/RNA"
  modified_base (1)..(1): bicyclic nucleic acid (BNA)
  modified_base (2)..(2): bicyclic nucleic acid (BNA)
  modified_base (11)..(11): bicyclic nucleic acid (BNA)
  modified_base (12)..(12): bicyclic nucleic acid (BNA)
  source: /note="3' tri-ethylene glycol (TEG)"
gtucuguccaag

SEQ ID NO: 11940 - DNA, 11 bp, Artificial Sequence
  source: /note="Description of Artificial Sequence: Synthetic oligonucleotide"
  source: /note="Description of Combined DNA/RNA Molecule: Synthetic oligonucleotide"
  source: /note="DNA/RNA"
  modified_base (1)..(1): bicyclic nucleic acid (BNA)
  modified_base (2)..(2): bicyclic nucleic acid (BNA)
  modified_base (10)..(10): bicyclic nucleic acid (BNA)
  modified_base (11)..(11): bicyclic nucleic acid (BNA)
  source: /note="3' tri-ethylene glycol (TEG)"
gtucuguccaa

SEQ ID NO: 11941 - DNA, 10 bp, Artificial Sequence
  source: /note="Description of Artificial Sequence: Synthetic oligonucleotide"
  source: /note="Description of Combined DNA/RNA Molecule: Synthetic oligonucleotide"
  source: /note="DNA/RNA"
  modified_base (1)..(1): bicyclic nucleic acid (BNA)
  modified_base (2)..(2): bicyclic nucleic acid (BNA)
  modified_base (9)..(9): bicyclic nucleic acid (BNA)
  modified_base (10)..(10): bicyclic nucleic acid (BNA)
  source: /note="3' tri-ethylene glycol (TEG)"
gtucugucca

SEQ ID NO: 11942 - DNA, 9 bp, Artificial Sequence
  source: /note="Description of Artificial Sequence: Synthetic oligonucleotide"
  source: /note="Description of Combined DNA/RNA Molecule: Synthetic oligonucleotide"
  source: /note="DNA/RNA"
  modified_base (1)..(1): bicyclic nucleic acid (BNA)
  modified_base (2)..(2): bicyclic nucleic acid (BNA)
  modified_base (8)..(8): bicyclic nucleic acid (BNA)
  modified_base (9)..(9): bicyclic nucleic acid (BNA)
  source: /note="3' tri-ethylene glycol (TEG)"
gtucugucc

SEQ ID NO: 11943 - DNA, 8 bp, Artificial Sequence
  source: /note="Description of Artificial Sequence: Synthetic oligonucleotide"
  source: /note="Description of Combined DNA/RNA Molecule: Synthetic oligonucleotide"
  source: /note="DNA/RNA"
  modified_base (1)..(1): bicyclic nucleic acid (BNA)
  modified_base (2)..(2): bicyclic nucleic acid (BNA)
  modified_base (7)..(7): bicyclic nucleic acid (BNA)
  modified_base (8)..(8): bicyclic nucleic acid (BNA)
  source: /note="3' tri-ethylene glycol (TEG)"
gtucugtc

SEQ ID NO: 11944 - DNA, 20 bp, Artificial Sequence
  source: /note="Description of Artificial Sequence: Synthetic oligonucleotide"
  source: /note="Description of Combined DNA/RNA Molecule: Synthetic oligonucleotide"
  source: /note="DNA/RNA"
  modified_base (1)..(1): bicyclic nucleic acid (BNA)
  modified_base (2)..(2): bicyclic nucleic acid (BNA)
  modified_base (19)..(19): bicyclic nucleic acid (BNA)
  modified_base (20)..(20): bicyclic nucleic acid (BNA)
  source: /note="3' tri-ethylene glycol (TEG)"
aguucuguccaagcccggtt

SEQ ID NO: 11945 - DNA, 19 bp, Artificial Sequence
  source: /note="Description of Artificial Sequence: Synthetic oligonucleotide"
  source: /note="Description of Combined DNA/RNA Molecule: Synthetic oligonucleotide"
  source: /note="DNA/RNA"
  modified_base (1)..(1): bicyclic nucleic acid (BNA)
  modified_base (2)..(2): bicyclic nucleic acid (BNA)
  modified_base (18)..(18): bicyclic nucleic acid (BNA)
  modified_base (19)..(19): bicyclic nucleic acid (BNA)
  source: /note="3' tri-ethylene glycol (TEG)"
aguucuguccaagcccggt

SEQ ID NO: 11946 - RNA, 18 nt, Artificial Sequence
  source: /note="Description of Artificial Sequence: Synthetic oligonucleotide"
  source: /note="RNA"
  modified_base (1)..(1): bicyclic nucleic acid (BNA)
  modified_base (2)..(2): bicyclic nucleic acid (BNA)
  modified_base (17)..(17): bicyclic nucleic acid (BNA)
  modified_base (18)..(18): bicyclic nucleic acid (BNA)
  source: /note="3' tri-ethylene glycol (TEG)"
aguucuguccaagcccgg

SEQ ID NO: 11947 - RNA, 17 nt, Artificial Sequence
  source: /note="Description of Artificial Sequence: Synthetic oligonucleotide"
  source: /note="RNA"
  modified_base (1)..(1): bicyclic nucleic acid (BNA)
  modified_base (2)..(2): bicyclic nucleic acid (BNA)
  modified_base (16)..(16): bicyclic nucleic acid (BNA)
  modified_base (17)..(17): bicyclic nucleic acid (BNA)
  source: /note="3' tri-ethylene glycol (TEG)"
aguucuguccaagcccg

SEQ ID NO: 11948 - RNA, 16 nt, Artificial Sequence
  source: /note="Description of Artificial Sequence: Synthetic oligonucleotide"
  source: /note="RNA"
  modified_base (1)..(1): bicyclic nucleic acid (BNA)
  modified_base (2)..(2): bicyclic nucleic acid (BNA)
  modified_base (15)..(15): bicyclic nucleic acid (BNA)
  modified_base (16)..(16): bicyclic nucleic acid (BNA)
  source: /note="3' tri-ethylene glycol (TEG)"
aguucuguccaagccc

SEQ ID NO: 11949 - RNA, 15 nt, Artificial Sequence
  source: /note="Description of Artificial Sequence: Synthetic oligonucleotide"
  source: /note="RNA"
  modified_base (1)..(1): bicyclic nucleic acid (BNA)
  modified_base (2)..(2): bicyclic nucleic acid (BNA)
  modified_base (14)..(14): bicyclic nucleic acid (BNA)
  modified_base (15)..(15): bicyclic nucleic acid (BNA)
  source: /note="3' tri-ethylene glycol (TEG)"
aguucuguccaagcc

SEQ ID NO: 11950 - RNA, 14 nt, Artificial Sequence
  source: /note="Description of Artificial Sequence: Synthetic oligonucleotide"
  source: /note="RNA"
  modified_base (1)..(1): bicyclic nucleic acid (BNA)
  modified_base (2)..(2): bicyclic nucleic acid (BNA)
  modified_base (13)..(13): bicyclic nucleic acid (BNA)
  modified_base (14)..(14): bicyclic nucleic acid (BNA)
  source: /note="3' tri-ethylene glycol (TEG)"
aguucuguccaagc

SEQ ID NO: 11951 - RNA, 13 nt, Artificial Sequence
  source: /note="Description of Artificial Sequence: Synthetic oligonucleotide"
  source: /note="RNA"
  modified_base (1)..(1): bicyclic nucleic acid (BNA)
  modified_base (2)..(2): bicyclic nucleic acid (BNA)
  modified_base (12)..(12): bicyclic nucleic acid (BNA)
  modified_base (13)..(13): bicyclic nucleic acid (BNA)
  source: /note="3' tri-ethylene glycol (TEG)"
aguucuguccaag

SEQ ID NO: 11952 - RNA, 12 nt, Artificial Sequence
  source: /note="Description of Artificial Sequence: Synthetic oligonucleotide"
  source: /note="RNA"
  modified_base (1)..(1): bicyclic nucleic acid (BNA)
  modified_base (2)..(2): bicyclic nucleic acid (BNA)
  modified_base (11)..(11): bicyclic nucleic acid (BNA)
  modified_base (12)..(12): bicyclic nucleic acid (BNA)
  source: /note="3' tri-ethylene glycol (TEG)"
aguucuguccaa

SEQ ID NO: 11953 - RNA, 11 nt, Artificial Sequence
  source: /note="Description of Artificial Sequence: Synthetic oligonucleotide"
  source: /note="RNA"
  modified_base (1)..(1): bicyclic nucleic acid (BNA)
  modified_base (2)..(2): bicyclic nucleic acid (BNA)
  modified_base (10)..(10): bicyclic nucleic acid (BNA)
  modified_base (11)..(11): bicyclic nucleic acid (BNA)
  source: /note="3' tri-ethylene glycol (TEG)"
aguucugucca

SEQ ID NO: 11954 - RNA, 10 nt, Artificial Sequence
  source: /note="Description of Artificial Sequence: Synthetic oligonucleotide"
  source: /note="RNA"
  modified_base (1)..(1): bicyclic nucleic acid (BNA)
  modified_base (2)..(2): bicyclic nucleic acid (BNA)
  modified_base (9)..(9): bicyclic nucleic acid (BNA)
  modified_base (10)..(10): bicyclic nucleic acid (BNA)
  source: /note="3' tri-ethylene glycol (TEG)"
aguucugucc

SEQ ID NO: 11955 - DNA, 9 bp, Artificial Sequence
  source: /note="Description of Artificial Sequence: Synthetic oligonucleotide"
  source: /note="Description of Combined DNA/RNA Molecule: Synthetic oligonucleotide"
  source: /note="DNA/RNA"
  modified_base (1)..(1): bicyclic nucleic acid (BNA)
  modified_base (2)..(2): bicyclic nucleic acid (BNA)
  modified_base (8)..(8): bicyclic nucleic acid (BNA)
  modified_base (9)..(9): bicyclic nucleic acid (BNA)
  source: /note="3' tri-ethylene glycol (TEG)"
aguucugtc

SEQ ID NO: 11956 - DNA, 8 bp, Artificial Sequence
  source: /note="Description of Artificial Sequence: Synthetic oligonucleotide"
  source: /note="Description of Combined DNA/RNA Molecule: Synthetic oligonucleotide"
  source: /note="DNA/RNA"
  modified_base (1)..(1): bicyclic nucleic acid (BNA)
  modified_base (2)..(2): bicyclic nucleic acid (BNA)
  modified_base (7)..(7): bicyclic nucleic acid (BNA)
  modified_base (8)..(8): bicyclic nucleic acid (BNA)
  source: /note="3' tri-ethylene glycol (TEG)"
aguucugt

SEQ ID NO: 11957 - DNA, 20 bp, Artificial Sequence
  source: /note="Description of Artificial Sequence: Synthetic oligonucleotide"
  source: /note="Description of Combined DNA/RNA Molecule: Synthetic oligonucleotide"
  source: /note="DNA/RNA"
  modified_base (1)..(1): bicyclic nucleic acid (BNA)
  modified_base (2)..(2): bicyclic nucleic acid (BNA)
  modified_base (19)..(19): bicyclic nucleic acid (BNA)
  modified_base (20)..(20): bicyclic nucleic acid (BNA)
  source: /note="3' tri-ethylene glycol (TEG)"
aaguucuguccaagcccggt

SEQ ID NO: 11958 - RNA, 19 nt, Artificial Sequence
  source: /note="Description of Artificial Sequence: Synthetic oligonucleotide"
  source: /note="RNA"
  modified_base (1)..(1): bicyclic nucleic acid (BNA)
  modified_base (2)..(2): bicyclic nucleic acid (BNA)
  modified_base (18)..(18): bicyclic nucleic acid (BNA)
  modified_base (19)..(19): bicyclic nucleic acid (BNA)
  source: /note="3' tri-ethylene glycol (TEG)"
aaguucuguccaagcccgg

SEQ ID NO: 11959 - RNA, 18 nt, Artificial Sequence
  source: /note="Description of Artificial Sequence: Synthetic oligonucleotide"
  source: /note="RNA"
  modified_base (1)..(1): bicyclic nucleic acid (BNA)
  modified_base (2)..(2): bicyclic nucleic acid (BNA)
  modified_base (17)..(17): bicyclic nucleic acid (BNA)
  modified_base (18)..(18): bicyclic nucleic acid (BNA)
  source: /note="3' tri-ethylene glycol (TEG)"
aaguucuguccaagcccg

SEQ ID NO: 11960 - RNA, 17 nt, Artificial Sequence
  source: /note="Description of Artificial Sequence: Synthetic oligonucleotide"
  source: /note="RNA"
  modified_base (1)..(1): bicyclic nucleic acid (BNA)
  modified_base (2)..(2): bicyclic nucleic acid (BNA)
  modified_base (16)..(16): bicyclic nucleic acid (BNA)
  modified_base (17)..(17): bicyclic nucleic acid (BNA)
  source: /note="3' tri-ethylene glycol (TEG)"
aaguucuguccaagccc

SEQ ID NO: 11961 - RNA, 16 nt, Artificial Sequence
  source: /note="Description of Artificial Sequence: Synthetic oligonucleotide"
  source: /note="RNA"
  modified_base (1)..(1): bicyclic nucleic acid (BNA)
  modified_base (2)..(2): bicyclic nucleic acid (BNA)
  modified_base (15)..(15): bicyclic nucleic acid (BNA)
  modified_base (16)..(16): bicyclic nucleic acid (BNA)
  source: /note="3' tri-ethylene glycol (TEG)"
aaguucuguccaagcc

SEQ ID NO: 11962 - RNA, 15 nt, Artificial Sequence
  source: /note="Description of Artificial Sequence: Synthetic oligonucleotide"
  source: /note="RNA"
  modified_base (1)..(1): bicyclic nucleic acid (BNA)
  modified_base (2)..(2): bicyclic nucleic acid (BNA)
  modified_base (14)..(14): bicyclic nucleic acid (BNA)
  modified_base (15)..(15): bicyclic nucleic acid (BNA)
  source: /note="3' tri-ethylene glycol (TEG)"
aaguucuguccaagc

SEQ ID NO: 11963 - RNA, 14 nt, Artificial Sequence
  source: /note="Description of Artificial Sequence: Synthetic oligonucleotide"
  source: /note="RNA"
  modified_base (1)..(1): bicyclic nucleic acid (BNA)
  modified_base (2)..(2): bicyclic nucleic acid (BNA)
  modified_base (13)..(13): bicyclic nucleic acid (BNA)
  modified_base (14)..(14): bicyclic nucleic acid (BNA)
  source: /note="3' tri-ethylene glycol (TEG)"
aaguucuguccaag

SEQ ID NO: 11964 - RNA, 13 nt, Artificial Sequence
  source: /note="Description of Artificial Sequence: Synthetic oligonucleotide"
  source: /note="RNA"
  modified_base (1)..(1): bicyclic nucleic acid (BNA)
  modified_base (2)..(2): bicyclic nucleic acid (BNA)
  modified_base (12)..(12): bicyclic nucleic acid (BNA)
  modified_base (13)..(13): bicyclic nucleic acid (BNA)
  source: /note="3' tri-ethylene glycol (TEG)"
aaguucuguccaa

SEQ ID NO: 11965 - RNA, 12 nt, Artificial Sequence
  source: /note="Description of Artificial Sequence: Synthetic oligonucleotide"
  source: /note="RNA"
  modified_base (1)..(1): bicyclic nucleic acid (BNA)
  modified_base (2)..(2): bicyclic nucleic acid (BNA)
  modified_base (11)..(11): bicyclic nucleic acid (BNA)
  modified_base (12)..(12): bicyclic nucleic acid (BNA)
  source: /note="3' tri-ethylene glycol (TEG)"
aaguucugucca

SEQ ID NO: 11966 - RNA, 11 nt, Artificial Sequence
  source: /note="Description of Artificial Sequence: Synthetic oligonucleotide"
  source: /note="RNA"
  modified_base (1)..(1): bicyclic nucleic acid (BNA)
  modified_base (2)..(2): bicyclic nucleic acid (BNA)
  modified_base (10)..(10): bicyclic nucleic acid (BNA)
  modified_base (11)..(11): bicyclic nucleic acid (BNA)
  source: /note="3' tri-ethylene glycol (TEG)"
aaguucugucc

SEQ ID NO: 11967 - DNA, 10 bp, Artificial Sequence
  source: /note="Description of Artificial Sequence: Synthetic oligonucleotide"
  source: /note="Description of Combined DNA/RNA Molecule: Synthetic oligonucleotide"
  source: /note="DNA/RNA"
  modified_base (1)..(1): bicyclic nucleic acid (BNA)
  modified_base (2)..(2): bicyclic nucleic acid (BNA)
  modified_base (9)..(9): bicyclic nucleic acid (BNA)
  modified_base (10)..(10): bicyclic nucleic acid (BNA)
  source: /note="3' tri-ethylene glycol (TEG)"
aaguucugtc

SEQ ID NO: 11968 - DNA, 9 bp, Artificial Sequence
  source: /note="Description of Artificial Sequence: Synthetic oligonucleotide"
  source: /note="Description of Combined DNA/RNA Molecule: Synthetic oligonucleotide"
  source: /note="DNA/RNA"
  modified_base (1)..(1): bicyclic nucleic acid (BNA)
  modified_base (2)..(2): bicyclic nucleic acid (BNA)
  modified_base (8)..(8): bicyclic nucleic acid (BNA)
  modified_base (9)..(9): bicyclic nucleic acid (BNA)
  source: /note="3' tri-ethylene glycol (TEG)"
aaguucugt

SEQ ID NO: 11969 - DNA, 8 bp, Artificial Sequence
  source: /note="Description of Artificial Sequence: Synthetic oligonucleotide"
  source: /note="Description of Combined DNA/RNA Molecule: Synthetic oligonucleotide"
  source: /note="DNA/RNA"
  modified_base (1)..(1): bicyclic nucleic acid (BNA)
  modified_base (2)..(2): bicyclic nucleic acid (BNA)
  modified_base (7)..(7): bicyclic nucleic acid (BNA)
  modified_base (8)..(8): bicyclic nucleic acid (BNA)
  source: /note="3' tri-ethylene glycol (TEG)"
aaguuctg

SEQ ID NO: 11970 - DNA, 20 bp, Artificial Sequence
  source: /note="Description of Artificial Sequence: Synthetic oligonucleotide"
  source: /note="Description of Combined DNA/RNA Molecule: Synthetic oligonucleotide"
  source: /note="DNA/RNA"
  modified_base (1)..(1): bicyclic nucleic acid (BNA)
  modified_base (2)..(2): bicyclic nucleic acid (BNA)
  modified_base (19)..(19): bicyclic nucleic acid (BNA)
  modified_base (20)..(20): bicyclic nucleic acid (BNA)
  source: /note="3' tri-ethylene glycol (TEG)"
taaguucuguccaagcccgg

SEQ ID NO: 11971 - DNA, 19 bp, Artificial Sequence
  source: /note="Description of Artificial Sequence: Synthetic oligonucleotide"
  source: /note="Description of Combined DNA/RNA Molecule: Synthetic oligonucleotide"
  source: /note="DNA/RNA"
  modified_base (1)..(1): bicyclic nucleic acid (BNA)
  modified_base (2)..(2): bicyclic nucleic acid (BNA)
  modified_base (18)..(18): bicyclic nucleic acid (BNA)
  modified_base (19)..(19): bicyclic nucleic acid (BNA)
  source: /note="3' tri-ethylene glycol (TEG)"
taaguucuguccaagcccg

SEQ ID NO: 11972 - DNA, 18 bp, Artificial Sequence
  source: /note="Description of Artificial Sequence: Synthetic oligonucleotide"
  source: /note="Description of Combined DNA/RNA Molecule: Synthetic oligonucleotide"
  source: /note="DNA/RNA"
  modified_base (1)..(1): bicyclic nucleic acid (BNA)
  modified_base (2)..(2): bicyclic nucleic acid (BNA)
  modified_base (17)..(17): bicyclic nucleic acid (BNA)
  modified_base (18)..(18): bicyclic nucleic acid (BNA)
  source: /note="3' tri-ethylene glycol (TEG)"
taaguucuguccaagccc

SEQ ID NO: 11973 - DNA, 17 bp, Artificial Sequence
  source: /note="Description of Artificial Sequence: Synthetic oligonucleotide"
  source: /note="Description of Combined DNA/RNA Molecule: Synthetic oligonucleotide"
  source: /note="DNA/RNA"
  modified_base (1)..(1): bicyclic nucleic acid (BNA)
  modified_base (2)..(2): bicyclic nucleic acid (BNA)
  modified_base (16)..(16): bicyclic nucleic acid (BNA)
  modified_base (17)..(17): bicyclic nucleic acid (BNA)
  source: /note="3' tri-ethylene glycol (TEG)"
taaguucuguccaagcc

SEQ ID NO: 11974 - DNA, 16 bp, Artificial Sequence
  source: /note="Description of Artificial Sequence: Synthetic oligonucleotide"
  source: /note="Description of Combined DNA/RNA Molecule: Synthetic oligonucleotide"
  source: /note="DNA/RNA"
  modified_base (1)..(1): bicyclic nucleic acid (BNA)
  modified_base (2)..(2): bicyclic nucleic acid (BNA)
  modified_base (15)..(15): bicyclic nucleic acid (BNA)
  modified_base (16)..(16): bicyclic nucleic acid (BNA)
  source: /note="3' tri-ethylene glycol (TEG)"
taaguucuguccaagc

SEQ ID NO: 11975 - DNA, 14 bp, Artificial Sequence
  source: /note="Description of Artificial Sequence: Synthetic oligonucleotide"
  source: /note="Description of Combined DNA/RNA Molecule: Synthetic oligonucleotide"
  source: /note="DNA/RNA"
  modified_base (1)..(1): bicyclic nucleic acid (BNA)
  modified_base (2)..(2): bicyclic nucleic acid (BNA)
  modified_base (13)..(13): bicyclic nucleic acid (BNA)
  modified_base (14)..(14): bicyclic nucleic acid (BNA)
  source: /note="3' tri-ethylene glycol (TEG)"
taaguucuguccaa

SEQ ID NO: 11976 - DNA, 13 bp, Artificial Sequence
  source: /note="Description of Artificial Sequence: Synthetic oligonucleotide"
  source: /note="Description of Combined DNA/RNA Molecule: Synthetic oligonucleotide"
  source: /note="DNA/RNA"
  modified_base (1)..(1): bicyclic nucleic acid (BNA)
  modified_base (2)..(2): bicyclic nucleic acid (BNA)
  modified_base (12)..(12): bicyclic nucleic acid (BNA)
  modified_base (13)..(13): bicyclic nucleic acid (BNA)
  source: /note="3' tri-ethylene glycol (TEG)"
taaguucugucca

SEQ ID NO: 11977 - DNA, 12 bp, Artificial Sequence
  source: /note="Description of Artificial Sequence: Synthetic oligonucleotide"
  source: /note="Description of Combined DNA/RNA Molecule: Synthetic oligonucleotide"
  source: /note="DNA/RNA"
  modified_base (1)..(1): bicyclic nucleic acid (BNA)
  modified_base (2)..(2): bicyclic nucleic acid (BNA)
  modified_base (11)..(11): bicyclic nucleic acid (BNA)
  modified_base (12)..(12): bicyclic nucleic acid (BNA)
  source: /note="3' tri-ethylene glycol (TEG)"
taaguucugucc

SEQ ID NO: 11978 - DNA, 11 bp, Artificial Sequence
  source: /note="Description of Artificial Sequence: Synthetic oligonucleotide"
  source: /note="Description of Combined DNA/RNA Molecule: Synthetic oligonucleotide"
  source: /note="DNA/RNA"
  modified_base (1)..(1): bicyclic nucleic acid (BNA)
  modified_base (2)..(2): bicyclic nucleic acid (BNA)
  modified_base (10)..(10): bicyclic nucleic acid (BNA)
  modified_base (11)..(11): bicyclic nucleic acid (BNA)
  source: /note="3' tri-ethylene glycol (TEG)"
taaguucugtc

SEQ ID NO: 11979 - DNA, 10 bp, Artificial Sequence
  source: /note="Description of Artificial Sequence: Synthetic oligonucleotide"
  source: /note="Description of Combined DNA/RNA Molecule: Synthetic oligonucleotide"
  source: /note="DNA/RNA"
  modified_base (1)..(1): bicyclic nucleic acid (BNA)
  modified_base (2)..(2): bicyclic nucleic acid (BNA)
  modified_base (9)..(9): bicyclic nucleic acid (BNA)
  modified_base (10)..(10): bicyclic nucleic acid (BNA)
  source: /note="3' tri-ethylene glycol (TEG)"
taaguucugt

SEQ ID NO: 11980 - DNA, 9 bp, Artificial Sequence
  source: /note="Description of Artificial Sequence: Synthetic oligonucleotide"
  source: /note="Description of Combined DNA/RNA Molecule: Synthetic oligonucleotide"
  source: /note="DNA/RNA"
  modified_base (1)..(1): bicyclic nucleic acid (BNA)
  modified_base (2)..(2): bicyclic nucleic acid (BNA)
  modified_base (8)..(8): bicyclic nucleic acid (BNA)
  modified_base (9)..(9): bicyclic nucleic acid (BNA)
  source: /note="3' tri-ethylene glycol (TEG)"
taaguuctg

SEQ ID NO: 11981 - DNA, 8 bp, Artificial Sequence
  source: /note="Description of Artificial Sequence: Synthetic oligonucleotide"
  source: /note="Description of Combined DNA/RNA Molecule: Synthetic oligonucleotide"
  source: /note="DNA/RNA"
  modified_base (1)..(1): bicyclic nucleic acid (BNA)
  modified_base (2)..(2): bicyclic nucleic acid (BNA)
  modified_base (7)..(7): bicyclic nucleic acid (BNA)
  modified_base (8)..(8): bicyclic nucleic acid (BNA)
  source: /note="3' tri-ethylene glycol (TEG)"
taaguuct

SEQ ID NO: 11982 - DNA, 20 bp, Artificial Sequence
  source: /note="Description of Artificial Sequence: Synthetic oligonucleotide"
  source: /note="Description of Combined DNA/RNA Molecule: Synthetic oligonucleotide"
  source: /note="DNA/RNA"
  modified_base (1)..(1): bicyclic nucleic acid (BNA)
  modified_base (2)..(2): bicyclic nucleic acid (BNA)
  modified_base (19)..(19): bicyclic nucleic acid (BNA)
  modified_base (20)..(20): bicyclic nucleic acid (BNA)
  source: /note="3' tri-ethylene glycol (TEG)"
gtaaguucuguccaagcccg

SEQ ID NO: 11983 - DNA, 19 bp, Artificial Sequence
  source: /note="Description of Artificial Sequence: Synthetic oligonucleotide"
  source: /note="Description of Combined DNA/RNA Molecule: Synthetic oligonucleotide"
  source: /note="DNA/RNA"
  modified_base (1)..(1): bicyclic nucleic acid (BNA)
  modified_base (2)..(2): bicyclic nucleic acid (BNA)
  modified_base (18)..(18): bicyclic nucleic acid (BNA)
  modified_base (19)..(19): bicyclic nucleic acid (BNA)
  source: /note="3' tri-ethylene glycol (TEG)"
gtaaguucuguccaagccc

SEQ ID NO: 11984 - DNA, 17 bp, Artificial Sequence
  source: /note="Description of Artificial Sequence: Synthetic oligonucleotide"
  source: /note="Description of Combined DNA/RNA Molecule: Synthetic oligonucleotide"
  source: /note="DNA/RNA"
  modified_base (1)..(1): bicyclic nucleic acid (BNA)
  modified_base (2)..(2): bicyclic nucleic acid (BNA)
  modified_base (16)..(16): bicyclic nucleic acid (BNA)
  modified_base (17)..(17): bicyclic nucleic acid (BNA)
  source: /note="3' tri-ethylene glycol (TEG)"
gtaaguucuguccaagc

SEQ ID NO: 11985 - DNA, 16 bp, Artificial Sequence
  source: /note="Description of Artificial Sequence: Synthetic oligonucleotide"
  source: /note="Description of Combined DNA/RNA Molecule: Synthetic oligonucleotide"
  source: /note="DNA/RNA"
  modified_base (1)..(1): bicyclic nucleic acid (BNA)
  modified_base (2)..(2): bicyclic nucleic acid (BNA)
  modified_base (15)..(15): bicyclic nucleic acid (BNA)
  modified_base (16)..(16): bicyclic nucleic acid (BNA)
  source: /note="3' tri-ethylene glycol (TEG)"
gtaaguucuguccaag

SEQ ID NO: 11986 - DNA, 15 bp, Artificial Sequence
  source: /note="Description of Artificial Sequence: Synthetic oligonucleotide"
  source: /note="Description of Combined DNA/RNA Molecule: Synthetic oligonucleotide"
  source: /note="DNA/RNA"
  modified_base (1)..(1): bicyclic nucleic acid (BNA)
  modified_base (2)..(2): bicyclic nucleic acid (BNA)
  modified_base (14)..(14): bicyclic nucleic acid (BNA)
  modified_base (15)..(15): bicyclic nucleic acid (BNA)
  source: /note="3' tri-ethylene glycol (TEG)"
gtaaguucuguccaa

SEQ ID NO: 11987 - DNA, 14 bp, Artificial Sequence
  source: /note="Description of Artificial Sequence: Synthetic oligonucleotide"
  source: /note="Description of Combined DNA/RNA Molecule: Synthetic oligonucleotide"
  source: /note="DNA/RNA"
  modified_base (1)..(1): bicyclic nucleic acid (BNA)
  modified_base (2)..(2): bicyclic nucleic acid (BNA)
  modified_base (13)..(13): bicyclic nucleic acid (BNA)
  modified_base (14)..(14): bicyclic nucleic acid (BNA)
  source: /note="3' tri-ethylene glycol (TEG)"
gtaaguucugucca

SEQ ID NO: 11988 - DNA, 13 bp, Artificial Sequence
  source: /note="Description of Artificial Sequence: Synthetic oligonucleotide"
  source: /note="Description of Combined DNA/RNA Molecule: Synthetic oligonucleotide"
  source: /note="DNA/RNA"
  modified_base (1)..(1): bicyclic nucleic acid (BNA)
  modified_base (2)..(2): bicyclic nucleic acid (BNA)
  modified_base (12)..(12): bicyclic nucleic acid (BNA)
  modified_base (13)..(13): bicyclic nucleic acid (BNA)
  source: /note="3' tri-ethylene glycol (TEG)"
gtaaguucugucc

SEQ ID NO: 11989 - DNA, 12 bp, Artificial Sequence
  source: /note="Description of Artificial Sequence: Synthetic oligonucleotide"
  source: /note="Description of Combined DNA/RNA Molecule: Synthetic oligonucleotide"
  source: /note="DNA/RNA"
  modified_base (1)..(1): bicyclic nucleic acid (BNA)
  modified_base (2)..(2): bicyclic nucleic acid (BNA)
  modified_base (11)..(11): bicyclic nucleic acid (BNA)
  modified_base (12)..(12): bicyclic nucleic acid (BNA)
  source: /note="3' tri-ethylene glycol (TEG)"
gtaaguucugtc

SEQ ID NO: 11990 - DNA, 11 bp, Artificial Sequence
  source: /note="Description of Artificial Sequence: Synthetic oligonucleotide"
  source: /note="Description of Combined DNA/RNA Molecule: Synthetic oligonucleotide"
  source: /note="DNA/RNA"
  modified_base (1)..(1): bicyclic nucleic acid (BNA)
  modified_base (2)..(2): bicyclic nucleic acid (BNA)
  modified_base (10)..(10): bicyclic nucleic acid (BNA)
  modified_base (11)..(11): bicyclic nucleic acid (BNA)
  source: /note="3' tri-ethylene glycol (TEG)"
gtaaguucugt

SEQ ID NO: 11991 - DNA, 10 bp, Artificial Sequence
  source: /note="Description of Artificial Sequence: Synthetic oligonucleotide"
  source: /note="Description of Combined DNA/RNA Molecule: Synthetic oligonucleotide"
  source: /note="DNA/RNA"
  modified_base (1)..(1): bicyclic nucleic acid (BNA)
  modified_base (2)..(2): bicyclic nucleic acid (BNA)
  modified_base (9)..(9): bicyclic nucleic acid (BNA)
  modified_base (10)..(10): bicyclic nucleic acid (BNA)
  source: /note="3' tri-ethylene glycol (TEG)"
gtaaguuctg

SEQ ID NO: 11992 - DNA, 9 bp, Artificial Sequence
  source: /note="Description of Artificial Sequence: Synthetic oligonucleotide"
  source: /note="Description of Combined DNA/RNA Molecule: Synthetic oligonucleotide"
  source: /note="DNA/RNA"
  modified_base (1)..(1): bicyclic nucleic acid (BNA)
  modified_base (2)..(2): bicyclic nucleic acid (BNA)
  modified_base (8)..(8): bicyclic nucleic acid (BNA)
  modified_base (9)..(9): bicyclic nucleic acid (BNA)
  source: /note="3' tri-ethylene glycol (TEG)"
gtaaguuct

SEQ ID NO: 11993 - DNA, 8 bp, Artificial Sequence
  source: /note="Description of Artificial Sequence: Synthetic oligonucleotide"
  source: /note="Description of Combined DNA/RNA Molecule: Synthetic oligonucleotide"
  source: /note="DNA/RNA"
  modified_base (1)..(1): bicyclic nucleic acid (BNA)
  modified_base (2)..(2): bicyclic nucleic acid (BNA)
  modified_base (7)..(7): bicyclic nucleic acid (BNA)
  modified_base (8)..(8): bicyclic nucleic acid (BNA)
  source: /note="3' tri-ethylene glycol (TEG)"
gtaagutc

SEQ ID NO: 11994 - RNA, 20 nt, Artificial Sequence
  source: /note="Description of Artificial Sequence: Synthetic oligonucleotide"
  source: /note="RNA"
  modified_base (1)..(1): bicyclic nucleic acid (BNA)
  modified_base (2)..(2): bicyclic nucleic acid (BNA)
  modified_base (19)..(19): bicyclic nucleic acid (BNA)
  modified_base (20)..(20): bicyclic nucleic acid (BNA)
  source: /note="3' tri-ethylene glycol (TEG)"
gguaaguucuguccaagccc

SEQ ID NO: 11995 - RNA, 19 nt, Artificial Sequence
  source: /note="Description of Artificial Sequence: Synthetic oligonucleotide"
  source: /note="RNA"
  modified_base (1)..(1): bicyclic nucleic acid (BNA)
  modified_base (2)..(2): bicyclic nucleic acid (BNA)
  modified_base (18)..(18): bicyclic nucleic acid (BNA)
  modified_base (19)..(19): bicyclic nucleic acid (BNA)
  source: /note="3' tri-ethylene glycol (TEG)"
gguaaguucuguccaagcc

SEQ ID NO: 11996 - RNA, 17 nt, Artificial Sequence
  source: /note="Description of Artificial Sequence: Synthetic oligonucleotide"
  source: /note="RNA"
  modified_base (1)..(1): bicyclic nucleic acid (BNA)
  modified_base (2)..(2): bicyclic nucleic acid (BNA)
  modified_base (16)..(16): bicyclic nucleic acid (BNA)
  modified_base (17)..(17): bicyclic nucleic acid (BNA)
  source: /note="3' tri-ethylene glycol (TEG)"
gguaaguucuguccaag

SEQ ID NO: 11997 - RNA, 16 nt, Artificial Sequence
  source: /note="Description of Artificial Sequence: Synthetic oligonucleotide"
  source: /note="RNA"
  modified_base (1)..(1): bicyclic nucleic acid (BNA)
  modified_base (2)..(2): bicyclic nucleic acid (BNA)
  modified_base (15)..(15): bicyclic nucleic acid (BNA)
  modified_base (16)..(16): bicyclic nucleic acid (BNA)
  source: /note="3' tri-ethylene glycol (TEG)"
gguaaguucuguccaa

SEQ ID NO: 11998 - RNA, 15 nt, Artificial Sequence
  source: /note="Description of Artificial Sequence: Synthetic oligonucleotide"
  source: /note="RNA"
  modified_base (1)..(1): bicyclic nucleic acid (BNA)
  modified_base (2)..(2): bicyclic nucleic acid (BNA)
  modified_base (14)..(14): bicyclic nucleic acid (BNA)
  modified_base (15)..(15): bicyclic nucleic acid (BNA)
  source: /note="3' tri-ethylene glycol (TEG)"
gguaaguucugucca

SEQ ID NO: 11999 - RNA, 14 nt, Artificial Sequence
  source: /note="Description of Artificial Sequence: Synthetic oligonucleotide"
  source: /note="RNA"
  modified_base (1)..(1): bicyclic nucleic acid (BNA)
  modified_base (2)..(2): bicyclic nucleic acid (BNA)
  modified_base (13)..(13): bicyclic nucleic acid (BNA)
  modified_base (14)..(14): bicyclic nucleic acid (BNA)
  source: /note="3' tri-ethylene glycol (TEG)"
gguaaguucugucc

SEQ ID NO: 12000 - DNA, 13 bp, Artificial Sequence
  source: /note="Description of Artificial Sequence: Synthetic oligonucleotide"
  source: /note="Description of Combined DNA/RNA Molecule: Synthetic oligonucleotide"
  source: /note="DNA/RNA"
  modified_base (1)..(1): bicyclic nucleic acid (BNA)
  modified_base (2)..(2): bicyclic nucleic acid (BNA)
  modified_base (12)..(12): bicyclic nucleic acid (BNA)
  modified_base (13)..(13): bicyclic nucleic acid (BNA)
  source: /note="3' tri-ethylene glycol (TEG)"
gguaaguucugtc

SEQ ID NO: 12001 - DNA, 12 bp, Artificial Sequence
  source: /note="Description of Artificial Sequence: Synthetic oligonucleotide"
  source: /note="Description of Combined DNA/RNA Molecule: Synthetic oligonucleotide"
  source: /note="DNA/RNA"
  modified_base (1)..(1): bicyclic nucleic acid (BNA)
  modified_base (2)..(2): bicyclic nucleic acid (BNA)
  modified_base (11)..(11): bicyclic nucleic acid (BNA)
  modified_base (12)..(12): bicyclic nucleic acid (BNA)
  source: /note="3' tri-ethylene glycol (TEG)"
gguaaguucugt

SEQ ID NO: 12002 - DNA, 11 bp, Artificial Sequence
  source: /note="Description of Artificial Sequence: Synthetic oligonucleotide"
  source: /note="Description of Combined DNA/RNA Molecule: Synthetic oligonucleotide"
  source: /note="DNA/RNA"
  modified_base (1)..(1): bicyclic nucleic acid (BNA)
  modified_base (2)..(2): bicyclic nucleic acid (BNA)
  modified_base (10)..(10): bicyclic nucleic acid (BNA)
  modified_base (11)..(11): bicyclic nucleic acid (BNA)
  source: /note="3' tri-ethylene glycol (TEG)"
gguaaguuctg

SEQ ID NO: 12003 - DNA, 10 bp, Artificial Sequence
  source: /note="Description of Artificial Sequence: Synthetic oligonucleotide"
  source: /note="Description of Combined DNA/RNA Molecule: Synthetic oligonucleotide"
  source: /note="DNA/RNA"
  modified_base (1)..(1): bicyclic nucleic acid (BNA)
  modified_base (2)..(2): bicyclic nucleic acid (BNA)
  modified_base (9)..(9): bicyclic nucleic acid (BNA)
  modified_base (10)..(10): bicyclic nucleic acid (BNA)
  source: /note="3' tri-ethylene glycol (TEG)"
gguaaguuct

SEQ ID NO: 12004 - DNA, 9 bp, Artificial Sequence
  source: /note="Description of Artificial Sequence: Synthetic oligonucleotide"
  source: /note="Description of Combined DNA/RNA Molecule: Synthetic oligonucleotide"
  source: /note="DNA/RNA"
  modified_base (1)..(1): bicyclic nucleic acid (BNA)
  modified_base (2)..(2): bicyclic nucleic acid (BNA)
  modified_base (8)..(8): bicyclic nucleic acid (BNA)
  modified_base (9)..(9): bicyclic nucleic acid (BNA)
  source: /note="3' tri-ethylene glycol (TEG)"
gguaagutc

SEQ ID NO: 12005 - DNA, 8 bp, Artificial Sequence
  source: /note="Description of Artificial Sequence: Synthetic oligonucleotide"
  source: /note="Description of Combined DNA/RNA Molecule: Synthetic oligonucleotide"
  source: /note="DNA/RNA"
  modified_base (1)..(1): bicyclic nucleic acid (BNA)
  modified_base (2)..(2): bicyclic nucleic acid (BNA)
  modified_base (7)..(7): bicyclic nucleic acid (BNA)
  modified_base (8)..(8): bicyclic nucleic acid (BNA)
  source: /note="3' tri-ethylene glycol (TEG)"
gguaagtt

SEQ ID NO: 12006 - RNA, 20 nt, Artificial Sequence
  source: /note="Description of Artificial Sequence: Synthetic oligonucleotide"
  source: /note="RNA"
  modified_base (1)..(1): bicyclic nucleic acid (BNA)
  modified_base (2)..(2): bicyclic nucleic acid (BNA)
  modified_base (19)..(19): bicyclic nucleic acid (BNA)
  modified_base (20)..(20): bicyclic nucleic acid (BNA)
  source: /note="3' tri-ethylene glycol (TEG)"
cgguaaguucuguccaagcc

SEQ ID NO: 12007 - RNA, 19 nt, Artificial Sequence
  source: /note="Description of Artificial Sequence: Synthetic oligonucleotide"
  source: /note="RNA"
  modified_base (1)..(1): bicyclic nucleic acid (BNA)
  modified_base (2)..(2): bicyclic nucleic acid (BNA)
  modified_base (18)..(18): bicyclic nucleic acid (BNA)
  modified_base (19)..(19): bicyclic nucleic acid (BNA)
  source: /note="3' tri-ethylene glycol (TEG)"
cgguaaguucuguccaagc

SEQ ID NO: 12008 - RNA, 18 nt, Artificial Sequence
  source: /note="Description of Artificial Sequence: Synthetic oligonucleotide"
  source: /note="RNA"
  modified_base (1)..(1): bicyclic nucleic acid (BNA)
  modified_base (2)..(2): bicyclic nucleic acid (BNA)
  modified_base (17)..(17): bicyclic nucleic acid (BNA)
  modified_base (18)..(18): bicyclic nucleic acid (BNA)
  source: /note="3' tri-ethylene glycol (TEG)"
cgguaaguucuguccaag

SEQ ID NO: 12009 - RNA, 17 nt, Artificial Sequence
  source: /note="Description of Artificial Sequence: Synthetic oligonucleotide"
  source: /note="RNA"
  modified_base (1)..(1): bicyclic nucleic acid (BNA)
  modified_base (2)..(2): bicyclic nucleic acid (BNA)
  modified_base (16)..(16): bicyclic nucleic acid (BNA)
  modified_base (17)..(17): bicyclic nucleic acid (BNA)
  source: /note="3' tri-ethylene glycol (TEG)"
cgguaaguucuguccaa

SEQ ID NO: 12010 - RNA, 16 nt, Artificial Sequence
  source: /note="Description of Artificial Sequence: Synthetic oligonucleotide"
  source: /note="RNA"
  modified_base (1)..(1): bicyclic nucleic acid (BNA)
  modified_base (2)..(2): bicyclic nucleic acid (BNA)
  modified_base (15)..(15): bicyclic nucleic acid (BNA)
  modified_base (16)..(16): bicyclic nucleic acid (BNA)
  source: /note="3' tri-ethylene glycol (TEG)"
cgguaaguucugucca

SEQ ID NO: 12011 - RNA, 15 nt, Artificial Sequence
  source: /note="Description of Artificial Sequence: Synthetic oligonucleotide"
  source: /note="RNA"
  modified_base (1)..(1): bicyclic nucleic acid (BNA)
  modified_base (2)..(2): bicyclic nucleic acid (BNA)
  modified_base (14)..(14): bicyclic nucleic acid (BNA)
  modified_base (15)..(15): bicyclic nucleic acid (BNA)
  source: /note="3' tri-ethylene glycol (TEG)"
cgguaaguucugucc

SEQ ID NO: 12012 - DNA, 14 bp, Artificial Sequence
  source: /note="Description of Artificial Sequence: Synthetic oligonucleotide"
  source: /note="Description of Combined DNA/RNA Molecule: Synthetic oligonucleotide"
  source: /note="DNA/RNA"
  modified_base (1)..(1): bicyclic nucleic acid (BNA)
  modified_base (2)..(2): bicyclic nucleic acid (BNA)
  modified_base (13)..(13): bicyclic nucleic acid (BNA)
  modified_base (14)..(14): bicyclic nucleic acid (BNA)
  source: /note="3' tri-ethylene glycol (TEG)"
cgguaaguucugtc

SEQ ID NO: 12013 - DNA, 13 bp, Artificial Sequence
  source: /note="Description of Artificial Sequence: Synthetic oligonucleotide"
  source: /note="Description of Combined DNA/RNA Molecule: Synthetic oligonucleotide"
  source: /note="DNA/RNA"
  modified_base (1)..(1): bicyclic nucleic acid (BNA)
  modified_base (2)..(2): bicyclic nucleic acid (BNA)
  modified_base (12)..(12): bicyclic nucleic acid (BNA)
  modified_base (13)..(13): bicyclic nucleic acid (BNA)
  source: /note="3' tri-ethylene glycol (TEG)"
cgguaaguucugt

SEQ ID NO: 12014 - DNA, 12 bp, Artificial Sequence
  source: /note="Description of Artificial Sequence: Synthetic oligonucleotide"
  source: /note="Description of Combined DNA/RNA Molecule: Synthetic oligonucleotide"
  source: /note="DNA/RNA"
  modified_base (1)..(1): bicyclic nucleic acid (BNA)
  modified_base (2)..(2): bicyclic nucleic acid (BNA)
  modified_base (11)..(11): bicyclic nucleic acid (BNA)
  modified_base (12)..(12): bicyclic nucleic acid (BNA)
  source: /note="3' tri-ethylene glycol (TEG)"
cgguaaguuctg

SEQ ID NO: 12015 - DNA, 11 bp, Artificial Sequence
  source: /note="Description of Artificial Sequence: Synthetic oligonucleotide"
  source: /note="Description of Combined DNA/RNA Molecule: Synthetic oligonucleotide"
  source: /note="DNA/RNA"
  modified_base (1)..(1): bicyclic nucleic acid (BNA)
  modified_base (2)..(2): bicyclic nucleic acid (BNA)
  modified_base (10)..(10): bicyclic nucleic acid (BNA)
  modified_base (11)..(11): bicyclic nucleic acid (BNA)
  source: /note="3' tri-ethylene glycol (TEG)"
cgguaaguuct

SEQ ID NO: 12016 - DNA, 10 bp, Artificial Sequence
  source: /note="Description of Artificial Sequence: Synthetic oligonucleotide"
  source: /note="Description of Combined DNA/RNA Molecule: Synthetic oligonucleotide"
  source: /note="DNA/RNA"
  modified_base (1)..(1): bicyclic nucleic acid (BNA)
  modified_base (2)..(2): bicyclic nucleic acid (BNA)
  modified_base (9)..(9): bicyclic nucleic acid (BNA)
  modified_base (10)..(10): bicyclic nucleic acid (BNA)
  source: /note="3' tri-ethylene glycol (TEG)"
cgguaagutc

SEQ ID NO: 12017 - DNA, 9 bp, Artificial Sequence
  source: /note="Description of Artificial Sequence: Synthetic oligonucleotide"
  source: /note="Description of Combined DNA/RNA Molecule: Synthetic oligonucleotide"
  source: /note="DNA/RNA"
  modified_base (1)..(1): bicyclic nucleic acid (BNA)
  modified_base (2)..(2): bicyclic nucleic acid (BNA)
  modified_base (8)..(8): bicyclic nucleic acid (BNA)
  modified_base (9)..(9): bicyclic nucleic acid (BNA)
  source: /note="3' tri-ethylene glycol (TEG)"
cgguaagtt

SEQ ID NO: 12018 - DNA, 8 bp, Artificial Sequence
  source: /note="Description of Artificial Sequence: Synthetic oligonucleotide"
  source: /note="Description of Combined DNA/RNA Molecule: Synthetic oligonucleotide"
  source: /note="DNA/RNA"
  modified_base (1)..(1): bicyclic nucleic acid (BNA)
  modified_base (2)..(2): bicyclic nucleic acid (BNA)
  modified_base (7)..(7): bicyclic nucleic acid (BNA)
  modified_base (8)..(8): bicyclic nucleic acid (BNA)
  source: /note="3' tri-ethylene glycol (TEG)"
cgguaagt

SEQ ID NO: 12019 - DNA, 20 bp, Artificial Sequence
  source: /note="Description of Artificial Sequence: Synthetic oligonucleotide"
  source: /note="Description of Combined DNA/RNA Molecule: Synthetic oligonucleotide"
  source: /note="DNA/RNA"
  modified_base (1)..(1): bicyclic nucleic acid (BNA)
  modified_base (2)..(2): bicyclic nucleic acid (BNA)
  modified_base (19)..(19): bicyclic nucleic acid (BNA)
  modified_base (20)..(20): bicyclic nucleic acid (BNA)
  source: /note="3' tri-ethylene glycol (TEG)"
tcgguaaguucuguccaagc

SEQ ID NO: 12020 - DNA, 19 bp, Artificial Sequence
  source: /note="Description of Artificial Sequence: Synthetic oligonucleotide"
  source: /note="Description of Combined DNA/RNA Molecule: Synthetic oligonucleotide"
  source: /note="DNA/RNA"
  modified_base (1)..(1): bicyclic nucleic acid (BNA)
  modified_base (2)..(2): bicyclic nucleic acid (BNA)
  modified_base (18)..(18): bicyclic nucleic acid (BNA)
  modified_base (19)..(19): bicyclic nucleic acid (BNA)
  source: /note="3' tri-ethylene glycol (TEG)"
tcgguaaguucuguccaag

SEQ ID NO: 12021 - DNA, 18 bp, Artificial Sequence
  source: /note="Description of Artificial Sequence: Synthetic oligonucleotide"
  source: /note="Description of Combined DNA/RNA Molecule: Synthetic oligonucleotide"
  source: /note="DNA/RNA"
  modified_base (1)..(1): bicyclic nucleic acid (BNA)
  modified_base (2)..(2): bicyclic nucleic acid (BNA)
  modified_base (17)..(17): bicyclic nucleic acid (BNA)
  modified_base (18)..(18): bicyclic nucleic acid (BNA)
  source: /note="3' tri-ethylene glycol (TEG)"
tcgguaaguucuguccaa

SEQ ID NO: 12022 - DNA, 17 bp, Artificial Sequence
  source: /note="Description of Artificial Sequence: Synthetic oligonucleotide"
  source: /note="Description of Combined DNA/RNA Molecule: Synthetic oligonucleotide"
  source: /note="DNA/RNA"
  modified_base (1)..(1): bicyclic nucleic acid (BNA)
  modified_base (2)..(2): bicyclic nucleic acid (BNA)
  modified_base (16)..(16): bicyclic nucleic acid (BNA)
  modified_base (17)..(17): bicyclic nucleic acid (BNA)
  source: /note="3' tri-ethylene glycol (TEG)"
tcgguaaguucugucca

SEQ ID NO: 12023 - DNA, 16 bp, Artificial Sequence
  source: /note="Description of Artificial Sequence: Synthetic oligonucleotide"
  source: /note="Description of Combined DNA/RNA Molecule: Synthetic oligonucleotide"
  source: /note="DNA/RNA"
  modified_base (1)..(1): bicyclic nucleic acid (BNA)
  modified_base (2)..(2): bicyclic nucleic acid (BNA)
  modified_base (15)..(15): bicyclic nucleic acid (BNA)
  modified_base (16)..(16): bicyclic nucleic acid (BNA)
  source: /note="3' tri-ethylene glycol (TEG)"
tcgguaaguucugucc

SEQ ID NO: 12024 - DNA, 15 bp, Artificial Sequence
  source: /note="Description of Artificial Sequence: Synthetic oligonucleotide"
  source: /note="Description of Combined DNA/RNA Molecule: Synthetic oligonucleotide"
  source: /note="DNA/RNA"
  modified_base (1)..(1): bicyclic nucleic acid (BNA)
  modified_base (2)..(2): bicyclic nucleic acid (BNA)
  modified_base (14)..(14): bicyclic nucleic acid (BNA)
  modified_base (15)..(15): bicyclic nucleic acid (BNA)
  source: /note="3' tri-ethylene glycol (TEG)"
tcgguaaguucugtc

SEQ ID NO: 12025 - DNA, 14 bp, Artificial Sequence
  source: /note="Description of Artificial Sequence: Synthetic oligonucleotide"
  source: /note="Description of Combined DNA/RNA Molecule: Synthetic oligonucleotide"
  source: /note="DNA/RNA"
  modified_base (1)..(1): bicyclic nucleic acid (BNA)
  modified_base (2)..(2): bicyclic nucleic acid (BNA)
  modified_base (13)..(13): bicyclic nucleic acid (BNA)
  modified_base (14)..(14): bicyclic nucleic acid (BNA)
  source: /note="3' tri-ethylene glycol (TEG)"
tcgguaaguucugt

SEQ ID NO: 12026 - DNA, 13 bp, Artificial Sequence
  source: /note="Description of Artificial Sequence: Synthetic oligonucleotide"
  source: /note="Description of Combined DNA/RNA Molecule: Synthetic oligonucleotide"
  source: /note="DNA/RNA"
  modified_base (1)..(1): bicyclic nucleic acid (BNA)
  modified_base (2)..(2): bicyclic nucleic acid (BNA)
  modified_base (12)..(12): bicyclic nucleic acid (BNA)
  modified_base (13)..(13): bicyclic nucleic acid (BNA)
  source: /note="3' tri-ethylene glycol (TEG)"
tcgguaaguuctg

SEQ ID NO: 12027 - DNA, 12 bp, Artificial Sequence
  source: /note="Description of Artificial Sequence: Synthetic oligonucleotide"
  source: /note="Description of Combined DNA/RNA Molecule: Synthetic oligonucleotide"
  source: /note="DNA/RNA"
  modified_base (1)..(1): bicyclic nucleic acid (BNA)
  modified_base (2)..(2): bicyclic nucleic acid (BNA)
  modified_base (11)..(11): bicyclic nucleic acid (BNA)
  modified_base (12)..(12): bicyclic nucleic acid (BNA)
  source: /note="3' tri-ethylene glycol (TEG)"
tcgguaaguuct

SEQ ID NO: 12028 - DNA, 11 bp, Artificial Sequence
  source: /note="Description of Artificial Sequence: Synthetic oligonucleotide"
  source: /note="Description of Combined DNA/RNA Molecule: Synthetic oligonucleotide"
  source: /note="DNA/RNA"
  modified_base (1)..(1): bicyclic nucleic acid (BNA)
  modified_base (2)..(2): bicyclic nucleic acid (BNA)
  modified_base (10)..(10): bicyclic nucleic acid (BNA)
  modified_base (11)..(11): bicyclic nucleic acid (BNA)
  source: /note="3' tri-ethylene glycol (TEG)"
tcgguaagutc

SEQ ID NO: 12029 - DNA, 10 bp, Artificial Sequence
  source: /note="Description of Artificial Sequence: Synthetic oligonucleotide"
  source: /note="Description of Combined DNA/RNA Molecule: Synthetic oligonucleotide"
  source: /note="DNA/RNA"
  modified_base (1)..(1): bicyclic nucleic acid (BNA)
  modified_base (2)..(2): bicyclic nucleic acid (BNA)
  modified_base (9)..(9): bicyclic nucleic acid (BNA)
  modified_base (10)..(10): bicyclic nucleic acid (BNA)
  source: /note="3' tri-ethylene glycol (TEG)"
tcgguaagtt

SEQ ID NO: 12030 - DNA, 9 bp, Artificial Sequence
  source: /note="Description of Artificial Sequence: Synthetic oligonucleotide"
  source: /note="Description of Combined DNA/RNA Molecule: Synthetic oligonucleotide"
  source: /note="DNA/RNA"
  modified_base (1)..(1): bicyclic nucleic acid (BNA)
  modified_base (2)..(2): bicyclic nucleic acid (BNA)
  modified_base (8)..(8): bicyclic nucleic acid (BNA)
  modified_base (9)..(9): bicyclic nucleic acid (BNA)
  source: /note="3' tri-ethylene glycol (TEG)"
tcgguaagt

SEQ ID NO: 12031 - DNA, 20 bp, Artificial Sequence
  source: /note="Description of Artificial Sequence: Synthetic oligonucleotide"
  source: /note="Description of Combined DNA/RNA Molecule: Synthetic oligonucleotide"
  source: /note="DNA/RNA"
  modified_base (1)..(1): bicyclic nucleic acid (BNA)
  modified_base (2)..(2): bicyclic nucleic acid (BNA)
  modified_base (19)..(19): bicyclic nucleic acid (BNA)
  modified_base (20)..(20): bicyclic nucleic acid (BNA)
  source: /note="3' tri-ethylene glycol (TEG)"
gtcgguaaguucuguccaag

SEQ ID NO: 12032 - DNA, 19 bp, Artificial Sequence
  source: /note="Description of Artificial Sequence: Synthetic oligonucleotide"
  source: /note="Description of Combined DNA/RNA Molecule: Synthetic oligonucleotide"
  source: /note="DNA/RNA"
  modified_base (1)..(1): bicyclic nucleic acid (BNA)
  modified_base (2)..(2): bicyclic nucleic acid (BNA)
  modified_base (18)..(18): bicyclic nucleic acid (BNA)
  modified_base (19)..(19): bicyclic nucleic acid (BNA)
  source: /note="3' tri-ethylene glycol (TEG)"
gtcgguaaguucuguccaa

SEQ ID NO: 12033 - DNA, 18 bp, Artificial Sequence
  source: /note="Description of Artificial Sequence: Synthetic oligonucleotide"
  source: /note="Description of Combined DNA/RNA Molecule: Synthetic oligonucleotide"
  source: /note="DNA/RNA"
  modified_base (1)..(1): bicyclic nucleic acid (BNA)
  modified_base (2)..(2): bicyclic nucleic acid (BNA)
  modified_base (17)..(17): bicyclic nucleic acid (BNA)
  modified_base (18)..(18): bicyclic nucleic acid (BNA)
  source: /note="3' tri-ethylene glycol (TEG)"
gtcgguaaguucugucca

SEQ ID NO: 12034 - DNA, 17 bp, Artificial Sequence
  source: /note="Description of Artificial Sequence: Synthetic oligonucleotide"
  source: /note="Description of Combined DNA/RNA Molecule: Synthetic oligonucleotide"
  source: /note="DNA/RNA"
  modified_base (1)..(1): bicyclic nucleic acid (BNA)
  modified_base (2)..(2): bicyclic nucleic acid (BNA)
  modified_base (16)..(16): bicyclic nucleic acid (BNA)
  modified_base (17)..(17): bicyclic nucleic acid (BNA)
  source: /note="3' tri-ethylene glycol (TEG)"
gtcgguaaguucugucc

SEQ ID NO: 12035 - DNA, 16 bp, Artificial Sequence
  source: /note="Description of Artificial Sequence: Synthetic oligonucleotide"
  source: /note="Description of Combined DNA/RNA Molecule: Synthetic oligonucleotide"
  source: /note="DNA/RNA"
  modified_base (1)..(1): bicyclic nucleic acid (BNA)
  modified_base (2)..(2): bicyclic nucleic acid (BNA)
  modified_base (15)..(15): bicyclic nucleic acid (BNA)
  modified_base (16)..(16): bicyclic nucleic acid (BNA)
  source: /note="3' tri-ethylene glycol (TEG)"
gtcgguaaguucugtc

SEQ ID NO: 12036 - DNA, 15 bp, Artificial Sequence
  source: /note="Description of Artificial Sequence: Synthetic oligonucleotide"
  source: /note="Description of Combined DNA/RNA Molecule: Synthetic oligonucleotide"
  source: /note="DNA/RNA"
  modified_base (1)..(1): bicyclic nucleic acid (BNA)
  modified_base (2)..(2): bicyclic nucleic acid (BNA)
  modified_base (14)..(14): bicyclic nucleic acid (BNA)
  modified_base (15)..(15): bicyclic nucleic acid (BNA)
  source: /note="3' tri-ethylene glycol (TEG)"
gtcgguaaguucugt

SEQ ID NO: 12037 - DNA, 14 bp, Artificial Sequence
  source: /note="Description of Artificial Sequence: Synthetic oligonucleotide"
  source: /note="Description of Combined DNA/RNA Molecule: Synthetic oligonucleotide"
  source: /note="DNA/RNA"
  modified_base (1)..(1): bicyclic nucleic acid (BNA)
  modified_base (2)..(2): bicyclic nucleic acid (BNA)
  modified_base (13)..(13): bicyclic nucleic acid (BNA)
  modified_base (14)..(14): bicyclic nucleic acid (BNA)
  source: /note="3' tri-ethylene glycol (TEG)"
gtcgguaaguuctg

SEQ ID NO: 12038 - DNA, 13 bp, Artificial Sequence
  source: /note="Description of Artificial Sequence: Synthetic oligonucleotide"
  source: /note="Description of Combined DNA/RNA Molecule: Synthetic oligonucleotide"
  source: /note="DNA/RNA"
  modified_base (1)..(1): bicyclic nucleic acid (BNA)
  modified_base (2)..(2): bicyclic nucleic acid (BNA)
  modified_base (12)..(12): bicyclic nucleic acid (BNA)
  modified_base (13)..(13): bicyclic nucleic acid (BNA)
  source: /note="3' tri-ethylene glycol (TEG)"
gtcgguaaguuct

SEQ ID NO: 12039 - DNA, 12 bp, Artificial Sequence
  source: /note="Description of Artificial Sequence: Synthetic oligonucleotide"
  source: /note="Description of Combined DNA/RNA Molecule: Synthetic oligonucleotide"
  source: /note="DNA/RNA"
  modified_base (1)..(1): bicyclic nucleic acid (BNA)
  modified_base (2)..(2): bicyclic nucleic acid (BNA)
  modified_base (11)..(11): bicyclic nucleic acid (BNA)
  modified_base (12)..(12): bicyclic nucleic acid (BNA)
  source: /note="3' tri-ethylene glycol (TEG)"
gtcgguaagutc

SEQ ID NO: 12040 - DNA, 11 bp, Artificial Sequence
  source: /note="Description of Artificial Sequence: Synthetic oligonucleotide"
  source: /note="Description of Combined DNA/RNA Molecule: Synthetic oligonucleotide"
  source: /note="DNA/RNA"
  modified_base (1)..(1): bicyclic nucleic acid (BNA)
  modified_base (2)..(2): bicyclic nucleic acid (BNA)
  modified_base (10)..(10): bicyclic nucleic acid (BNA)
  modified_base (11)..(11): bicyclic nucleic acid (BNA)
  source: /note="3' tri-ethylene glycol (TEG)"
gtcgguaagtt

SEQ ID NO: 12041 - DNA, 10 bp, Artificial Sequence
  source: /note="Description of Artificial Sequence: Synthetic oligonucleotide"
  source: /note="Description of Combined DNA/RNA Molecule: Synthetic oligonucleotide"
  source: /note="DNA/RNA"
  modified_base (1)..(1): bicyclic nucleic acid (BNA)
  modified_base (2)..(2): bicyclic nucleic acid (BNA)
  modified_base (9)..(9): bicyclic nucleic acid (BNA)
  modified_base (10)..(10): bicyclic nucleic acid (BNA)
  source: /note="3' tri-ethylene glycol (TEG)"
gtcgguaagt

SEQ ID NO: 12042 - RNA, 20 nt, Artificial Sequence
  source: /note="Description of Artificial Sequence: Synthetic oligonucleotide"
  source: /note="RNA"
  modified_base (1)..(1): bicyclic nucleic acid (BNA)
  modified_base (2)..(2): bicyclic nucleic acid (BNA)
  modified_base (19)..(19): bicyclic nucleic acid (BNA)
  modified_base (20)..(20): bicyclic nucleic acid (BNA)
  source: /note="3' tri-ethylene glycol (TEG)"
agucgguaaguucuguccaa

SEQ ID NO: 12043 - RNA, 19 nt, Artificial Sequence
  source: /note="Description of Artificial Sequence: Synthetic oligonucleotide"
  source: /note="RNA"
  modified_base (1)..(1): bicyclic nucleic acid (BNA)
  modified_base (2)..(2): bicyclic nucleic acid (BNA)
  modified_base (18)..(18): bicyclic nucleic acid (BNA)
  modified_base (19)..(19): bicyclic nucleic acid (BNA)
  source: /note="3' tri-ethylene glycol (TEG)"
agucgguaaguucugucca

SEQ ID NO: 12044 - DNA, 17 bp, Artificial Sequence
  source: /note="Description of Artificial Sequence: Synthetic oligonucleotide"
  source: /note="Description of Combined DNA/RNA Molecule: Synthetic oligonucleotide"
  source: /note="DNA/RNA"
  modified_base (1)..(1): bicyclic nucleic acid (BNA)
  modified_base (2)..(2): bicyclic nucleic acid (BNA)
  modified_base (16)..(16): bicyclic nucleic acid (BNA)
  modified_base (17)..(17): bicyclic nucleic acid (BNA)
  source: /note="3' tri-ethylene glycol (TEG)"
agucgguaaguucugtc

SEQ ID NO: 12045 - DNA, 16 bp, Artificial Sequence
  source: /note="Description of Artificial Sequence: Synthetic oligonucleotide"
  source: /note="Description of Combined DNA/RNA Molecule: Synthetic oligonucleotide"
  source: /note="DNA/RNA"
  modified_base (1)..(1): bicyclic nucleic acid (BNA)
  modified_base (2)..(2): bicyclic nucleic acid (BNA)
  modified_base (15)..(15): bicyclic nucleic acid (BNA)
  modified_base (16)..(16): bicyclic nucleic acid (BNA)
  source: /note="3' tri-ethylene glycol (TEG)"
agucgguaaguucugt

SEQ ID NO: 12046 - DNA, 15 bp, Artificial Sequence
  source: /note="Description of Artificial Sequence: Synthetic oligonucleotide"
  source: /note="Description of Combined DNA/RNA Molecule: Synthetic oligonucleotide"
  source: /note="DNA/RNA"
  modified_base (1)..(1): bicyclic nucleic acid (BNA)
  modified_base (2)..(2): bicyclic nucleic acid (BNA)
  modified_base (14)..(14): bicyclic nucleic acid (BNA)
  modified_base (15)..(15): bicyclic nucleic acid (BNA)
  source: /note="3' tri-ethylene glycol (TEG)"
agucgguaaguuctg

SEQ ID NO: 12047 - DNA, 14 bp, Artificial Sequence
  source: /note="Description of Artificial Sequence: Synthetic oligonucleotide"
  source: /note="Description of Combined DNA/RNA Molecule: Synthetic oligonucleotide"
  source: /note="DNA/RNA"
  modified_base (1)..(1): bicyclic nucleic acid (BNA)
  modified_base (2)..(2): bicyclic nucleic acid (BNA)
  modified_base (13)..(13): bicyclic nucleic acid (BNA)
  modified_base (14)..(14): bicyclic nucleic acid (BNA)
  source: /note="3' tri-ethylene glycol (TEG)"
agucgguaaguuct

SEQ ID NO: 12048 - DNA, 13 bp, Artificial Sequence
  source: /note="Description of Artificial Sequence: Synthetic oligonucleotide"
  source: /note="Description of Combined DNA/RNA Molecule: Synthetic oligonucleotide"
  source: /note="DNA/RNA"
  modified_base (1)..(1): bicyclic nucleic acid (BNA)
  modified_base (2)..(2): bicyclic nucleic acid (BNA)
  modified_base (12)..(12): bicyclic nucleic acid (BNA)
  modified_base (13)..(13): bicyclic nucleic acid (BNA)
  source: /note="3' tri-ethylene glycol (TEG)"
agucgguaagutc

SEQ ID NO: 12049 - DNA, 12 bp, Artificial Sequence
  source: /note="Description of Artificial Sequence: Synthetic oligonucleotide"
  source: /note="Description of Combined DNA/RNA Molecule: Synthetic oligonucleotide"
  source: /note="DNA/RNA"
  modified_base (1)..(1): bicyclic nucleic acid (BNA)
  modified_base (2)..(2): bicyclic nucleic acid (BNA)
  modified_base (11)..(11): bicyclic nucleic acid (BNA)
  modified_base (12)..(12): bicyclic nucleic acid (BNA)
  source: /note="3' tri-ethylene glycol (TEG)"
agucgguaagtt

SEQ ID NO: 12050 - DNA, 11 bp, Artificial Sequence
  source: /note="Description of Artificial Sequence: Synthetic oligonucleotide"
  source: /note="Description of Combined DNA/RNA Molecule: Synthetic oligonucleotide"
  source: /note="DNA/RNA"
  modified_base (1)..(1): bicyclic nucleic acid (BNA)
  modified_base (2)..(2): bicyclic nucleic acid (BNA)
  modified_base (10)..(10): bicyclic nucleic acid (BNA)
  modified_base (11)..(11): bicyclic nucleic acid (BNA)
  source: /note="3' tri-ethylene glycol (TEG)"
agucgguaagt

SEQ ID NO: 12051 - RNA, 20 nt, Artificial Sequence
  source: /note="Description of Artificial Sequence: Synthetic oligonucleotide"
  source: /note="RNA"
  modified_base (1)..(1): bicyclic nucleic acid (BNA)
  modified_base (2)..(2): bicyclic nucleic acid (BNA)
  modified_base (19)..(19): bicyclic nucleic acid (BNA)
  modified_base (20)..(20): bicyclic nucleic acid (BNA)
  source: /note="3' tri-ethylene glycol (TEG)"
cagucgguaaguucugucca

SEQ ID NO: 12052 - RNA, 19 nt, Artificial Sequence
  source: /note="Description of Artificial Sequence: Synthetic oligonucleotide"
  source: /note="RNA"
  modified_base (1)..(1): bicyclic nucleic acid (BNA)
  modified_base (2)..(2): bicyclic nucleic acid (BNA)
  modified_base (18)..(18): bicyclic nucleic acid (BNA)
  modified_base (19)..(19): bicyclic nucleic acid (BNA)
  source: /note="3' tri-ethylene glycol (TEG)"
cagucgguaaguucugucc

SEQ ID NO: 12053 - DNA, 18 bp, Artificial Sequence
  source: /note="Description of Artificial Sequence: Synthetic oligonucleotide"
  source: /note="Description of Combined DNA/RNA Molecule: Synthetic oligonucleotide"
  source: /note="DNA/RNA"
  modified_base (1)..(1): bicyclic nucleic acid (BNA)
  modified_base (2)..(2): bicyclic nucleic acid (BNA)
  modified_base (17)..(17): bicyclic nucleic acid (BNA)
  modified_base (18)..(18): bicyclic nucleic acid (BNA)
  source: /note="3' tri-ethylene glycol (TEG)"
cagucgguaaguucugtc

SEQ ID NO: 12054 - DNA, 17 bp, Artificial Sequence
  source: /note="Description of Artificial Sequence: Synthetic oligonucleotide"
  source: /note="Description of Combined DNA/RNA Molecule: Synthetic oligonucleotide"
  source: /note="DNA/RNA"
  modified_base (1)..(1): bicyclic nucleic acid (BNA)
  modified_base (2)..(2): bicyclic nucleic acid (BNA)
  modified_base (16)..(16): bicyclic nucleic acid (BNA)
  modified_base (17)..(17): bicyclic nucleic acid (BNA)
  source: /note="3' tri-ethylene glycol (TEG)"
cagucgguaaguucugt

SEQ ID NO: 12055 - DNA, 16 bp, Artificial Sequence
  source: /note="Description of Artificial Sequence: Synthetic oligonucleotide"
  source: /note="Description of Combined DNA/RNA Molecule: Synthetic oligonucleotide"
  source: /note="DNA/RNA"
  modified_base (1)..(1): bicyclic nucleic acid (BNA)
  modified_base (2)..(2): bicyclic nucleic acid (BNA)
  modified_base (15)..(15): bicyclic nucleic acid (BNA)
  modified_base (16)..(16): bicyclic nucleic acid (BNA)
  source: /note="3' tri-ethylene glycol (TEG)"
cagucgguaaguuctg

SEQ ID NO: 12056 - DNA, 15 bp, Artificial Sequence
  source: /note="Description of Artificial Sequence: Synthetic oligonucleotide"
  source: /note="Description of Combined DNA/RNA Molecule: Synthetic oligonucleotide"
  source: /note="DNA/RNA"
  modified_base (1)..(1): bicyclic nucleic acid (BNA)
  modified_base (2)..(2): bicyclic nucleic acid (BNA)
  modified_base (14)..(14): bicyclic nucleic acid (BNA)
  modified_base (15)..(15): bicyclic nucleic acid (BNA)
  source: /note="3' tri-ethylene glycol (TEG)"
cagucgguaaguuct

SEQ ID NO: 12057 - DNA, 14 bp, Artificial Sequence
  source: /note="Description of Artificial Sequence: Synthetic oligonucleotide"
  source: /note="Description of Combined DNA/RNA Molecule: Synthetic oligonucleotide"
  source: /note="DNA/RNA"
  modified_base (1)..(1): bicyclic nucleic acid (BNA)
  modified_base (2)..(2): bicyclic nucleic acid (BNA)
  modified_base (13)..(13): bicyclic nucleic acid (BNA)
  modified_base (14)..(14): bicyclic nucleic acid (BNA)
  source: /note="3' tri-ethylene glycol (TEG)"
cagucgguaagutc

SEQ ID NO: 12058 - DNA, 13 bp, Artificial Sequence
  source: /note="Description of Artificial Sequence: Synthetic oligonucleotide"
  source: /note="Description of Combined DNA/RNA Molecule: Synthetic oligonucleotide"
  source: /note="DNA/RNA"
  modified_base (1)..(1): bicyclic nucleic acid (BNA)
  modified_base (2)..(2): bicyclic nucleic acid (BNA)
  modified_base (12)..(12): bicyclic nucleic acid (BNA)
  modified_base (13)..(13): bicyclic nucleic acid (BNA)
  source: /note="3' tri-ethylene glycol (TEG)"
cagucgguaagtt

SEQ ID NO: 12059 - DNA, 12 bp, Artificial Sequence
  source: /note="Description of Artificial Sequence: Synthetic oligonucleotide"
  source: /note="Description of Combined DNA/RNA Molecule: Synthetic oligonucleotide"
  source: /note="DNA/RNA"
  modified_base (1)..(1): bicyclic nucleic acid (BNA)
  modified_base (2)..(2): bicyclic nucleic acid (BNA)
  modified_base (11)..(11): bicyclic nucleic acid (BNA)
  modified_base (12)..(12): bicyclic nucleic acid (BNA)
  source: /note="3' tri-ethylene glycol (TEG)"
cagucgguaagt

SEQ ID NO: 12060 - RNA, 20 nt, Artificial Sequence
  source: /note="Description of Artificial Sequence: Synthetic oligonucleotide"
  source: /note="RNA"
  modified_base (1)..(1): bicyclic nucleic acid (BNA)
  modified_base (2)..(2): bicyclic nucleic acid (BNA)
  modified_base (19)..(19): bicyclic nucleic acid (BNA)
  modified_base (20)..(20): bicyclic nucleic acid (BNA)
  source: /note="3' tri-ethylene glycol (TEG)"
ccagucgguaaguucugucc

SEQ ID NO: 12061 - DNA, 19 bp, Artificial Sequence
  source: /note="Description of Artificial Sequence: Synthetic oligonucleotide"
  source: /note="Description of Combined DNA/RNA Molecule: Synthetic oligonucleotide"
  source: /note="DNA/RNA"
  modified_base (1)..(1): bicyclic nucleic acid (BNA)
  modified_base (2)..(2): bicyclic nucleic acid (BNA)
  modified_base (18)..(18): bicyclic nucleic acid (BNA)
  modified_base (19)..(19): bicyclic nucleic acid (BNA)
  source: /note="3' tri-ethylene glycol (TEG)"
ccagucgguaaguucugtc

SEQ ID NO: 12062 - DNA, 18 bp, Artificial Sequence
  source: /note="Description of Artificial Sequence: Synthetic oligonucleotide"
  source: /note="Description of Combined DNA/RNA Molecule: Synthetic oligonucleotide"
  source: /note="DNA/RNA"
  modified_base (1)..(1): bicyclic nucleic acid (BNA)
  modified_base (2)..(2): bicyclic nucleic acid (BNA)
  modified_base (17)..(17): bicyclic nucleic acid (BNA)
  modified_base (18)..(18): bicyclic nucleic acid (BNA)
  source: /note="3' tri-ethylene glycol (TEG)"
ccagucgguaaguucugt

SEQ ID NO: 12063 - DNA, 17 bp, Artificial Sequence
  source: /note="Description of Artificial Sequence: Synthetic oligonucleotide"
  source: /note="Description of Combined DNA/RNA Molecule: Synthetic oligonucleotide"
  source: /note="DNA/RNA"
  modified_base (1)..(1): bicyclic nucleic acid (BNA)
  modified_base (2)..(2): bicyclic nucleic acid (BNA)
  modified_base (16)..(16): bicyclic nucleic acid (BNA)
  modified_base (17)..(17): bicyclic nucleic acid (BNA)
  source: /note="3' tri-ethylene glycol (TEG)"
ccagucgguaaguuctg

SEQ ID NO: 12064 - DNA, 16 bp, Artificial Sequence
  source: /note="Description of Artificial Sequence: Synthetic oligonucleotide"
  source: /note="Description of Combined DNA/RNA Molecule: Synthetic oligonucleotide"
  source: /note="DNA/RNA"
  modified_base (1)..(1): bicyclic nucleic acid (BNA)
  modified_base (2)..(2): bicyclic nucleic acid (BNA)
  modified_base (15)..(15): bicyclic nucleic acid (BNA)
  modified_base (16)..(16): bicyclic nucleic acid (BNA)
  source: /note="3' tri-ethylene glycol (TEG)"
ccagucgguaaguuct

SEQ ID NO: 12065 - DNA, 15 bp, Artificial Sequence
  source: /note="Description of Artificial Sequence: Synthetic oligonucleotide"
  source: /note="Description of Combined DNA/RNA Molecule: Synthetic oligonucleotide"
  source: /note="DNA/RNA"
  modified_base (1)..(1): bicyclic nucleic acid (BNA)
  modified_base (2)..(2): bicyclic nucleic acid (BNA)
  modified_base (14)..(14): bicyclic nucleic acid (BNA)
  modified_base (15)..(15): bicyclic nucleic acid (BNA)
  source: /note="3' tri-ethylene glycol (TEG)"
ccagucgguaagutc

SEQ ID NO: 12066 - DNA, 14 bp, Artificial Sequence
  source: /note="Description of Artificial Sequence: Synthetic oligonucleotide"
  source: /note="Description of Combined DNA/RNA Molecule: Synthetic oligonucleotide"
  source: /note="DNA/RNA"
  modified_base (1)..(1): bicyclic nucleic acid (BNA)
  modified_base (2)..(2): bicyclic nucleic acid (BNA)
  modified_base (13)..(13): bicyclic nucleic acid (BNA)
  modified_base (14)..(14): bicyclic nucleic acid (BNA)
  source: /note="3' tri-ethylene glycol (TEG)"
ccagucgguaagtt

SEQ ID NO: 12067 - DNA, 13 bp, Artificial Sequence
  source: /note="Description of Artificial Sequence: Synthetic oligonucleotide"
  source: /note="Description of Combined DNA/RNA Molecule: Synthetic oligonucleotide"
  source: /note="DNA/RNA"
  modified_base (1)..(1): bicyclic nucleic acid (BNA)
  modified_base (2)..(2): bicyclic nucleic acid (BNA)
  modified_base (12)..(12): bicyclic nucleic acid (BNA)
  modified_base (13)..(13): bicyclic nucleic acid (BNA)
  source: /note="3' tri-ethylene glycol (TEG)"
ccagucgguaagt

SEQ ID NO: 12068 - DNA, 20 bp, Artificial Sequence
  source: /note="Description of Artificial Sequence: Synthetic oligonucleotide"
  source: /note="Description of Combined DNA/RNA Molecule: Synthetic oligonucleotide"
  source: /note="DNA/RNA"
  modified_base (1)..(1): bicyclic nucleic acid (BNA)
  modified_base (2)..(2): bicyclic nucleic acid (BNA)
  modified_base (19)..(19): bicyclic nucleic acid (BNA)
  modified_base (20)..(20): bicyclic nucleic acid (BNA)
  source: /note="3' tri-ethylene glycol (TEG)"
gccagucgguaaguucugtc

SEQ ID NO: 12069 - DNA, 19 bp, Artificial Sequence
  source: /note="Description of Artificial Sequence: Synthetic oligonucleotide"
  source: /note="Description of Combined DNA/RNA Molecule: Synthetic oligonucleotide"
  source: /note="DNA/RNA"
  modified_base (1)..(1): bicyclic nucleic acid (BNA)
  modified_base (2)..(2): bicyclic nucleic acid (BNA)
  modified_base (18)..(18): bicyclic nucleic acid (BNA)
  modified_base (19)..(19): bicyclic nucleic acid (BNA)
  source: /note="3' tri-ethylene glycol (TEG)"
gccagucgguaaguucugt

SEQ ID NO: 12070 - DNA, 18 bp, Artificial Sequence
  source: /note="Description of Artificial Sequence: Synthetic oligonucleotide"
  source: /note="Description of Combined DNA/RNA Molecule: Synthetic oligonucleotide"
  source: /note="DNA/RNA"
  modified_base (1)..(1): bicyclic nucleic acid (BNA)
  modified_base (2)..(2): bicyclic nucleic acid (BNA)
  modified_base (17)..(17): bicyclic nucleic acid (BNA)
  modified_base (18)..(18): bicyclic nucleic acid (BNA)
  source: /note="3' tri-ethylene glycol (TEG)"
gccagucgguaaguuctg

SEQ ID NO: 12071 - DNA, 17 bp, Artificial Sequence
  source: /note="Description of Artificial Sequence: Synthetic oligonucleotide"
  source: /note="Description of Combined DNA/RNA Molecule: Synthetic oligonucleotide"
  source: /note="DNA/RNA"
  modified_base (1)..(1): bicyclic nucleic acid (BNA)
  modified_base (2)..(2): bicyclic nucleic acid (BNA)
  modified_base (16)..(16): bicyclic nucleic acid (BNA)
  modified_base (17)..(17): bicyclic nucleic acid (BNA)
  source: /note="3' tri-ethylene glycol (TEG)"
gccagucgguaaguuct

SEQ ID NO: 12072 - DNA, 16 bp, Artificial Sequence
  source: /note="Description of Artificial Sequence: Synthetic oligonucleotide"
  source: /note="Description of Combined DNA/RNA Molecule: Synthetic oligonucleotide"
  source: /note="DNA/RNA"
  modified_base (1)..(1): bicyclic nucleic acid (BNA)
  modified_base (2)..(2): bicyclic nucleic acid (BNA)
  modified_base (15)..(15): bicyclic nucleic acid (BNA)
  modified_base (16)..(16): bicyclic nucleic acid (BNA)
  source: /note="3' tri-ethylene glycol (TEG)"
gccagucgguaagutc

SEQ ID NO: 12073 - DNA, 15 bp, Artificial Sequence
  source: /note="Description of Artificial Sequence: Synthetic oligonucleotide"
  source: /note="Description of Combined DNA/RNA Molecule: Synthetic oligonucleotide"
  source: /note="DNA/RNA"
  modified_base (1)..(1): bicyclic nucleic acid (BNA)
  modified_base (2)..(2): bicyclic nucleic acid (BNA)
  modified_base (14)..(14): bicyclic nucleic acid (BNA)
  modified_base (15)..(15): bicyclic nucleic acid (BNA)
  source: /note="3' tri-ethylene glycol (TEG)"
gccagucgguaagtt

SEQ ID NO: 12074 - DNA, 14 bp, Artificial Sequence
  source: /note="Description of Artificial Sequence: Synthetic oligonucleotide"
  source: /note="Description of Combined DNA/RNA Molecule: Synthetic oligonucleotide"
  source: /note="DNA/RNA"
  modified_base (1)..(1): bicyclic nucleic acid (BNA)
  modified_base (2)..(2): bicyclic nucleic acid (BNA)
  modified_base (13)..(13): bicyclic nucleic acid (BNA)
  modified_base (14)..(14): bicyclic nucleic acid (BNA)
  source: /note="3' tri-ethylene glycol (TEG)"
gccagucgguaagt

SEQ ID NO: 12075 - DNA, 20 bp, Artificial Sequence
  source: /note="Description of Artificial Sequence: Synthetic oligonucleotide"
  source: /note="Description of Combined DNA/RNA Molecule: Synthetic oligonucleotide"
  source: /note="DNA/RNA"
  modified_base (1)..(1): bicyclic nucleic acid (BNA)
  modified_base (2)..(2): bicyclic nucleic acid (BNA)
  modified_base (19)..(19): bicyclic nucleic acid (BNA)
  modified_base (20)..(20): bicyclic nucleic acid (BNA)
  source: /note="3' tri-ethylene glycol (TEG)"
tcaaggaagauggcauuuct

SEQ ID NO: 12076 - DNA, 22 bp, Artificial Sequence
  source: /note="Description of Artificial Sequence: Synthetic oligonucleotide"
  source: /note="Description of Combined DNA/RNA Molecule: Synthetic oligonucleotide"
  source: /note="DNA/RNA"
  modified_base (1)..(1): bicyclic nucleic acid (BNA)
  modified_base (2)..(2): bicyclic nucleic acid (BNA)
  modified_base (21)..(21): bicyclic nucleic acid (BNA)
  modified_base (22)..(22): bicyclic nucleic acid (BNA)
  source: /note="3' tri-ethylene glycol (TEG)"
tcaaggaagauggcauuucuag

SEQ ID NO: 12077 - DNA, 16 bp, Artificial Sequence
  source: /note="Description of Artificial Sequence: Synthetic oligonucleotide"
  source: /note="Description of Combined DNA/RNA Molecule: Synthetic oligonucleotide"
  source: /note="DNA/RNA"
  modified_base (1)..(1): bicyclic nucleic acid (BNA)
  modified_base (2)..(2): bicyclic nucleic acid (BNA)
  modified_base (15)..(15): bicyclic nucleic acid (BNA)
  modified_base (16)..(16): bicyclic nucleic acid (BNA)
  source: /note="3' tri-ethylene glycol (TEG)"
tcaaggaagauggcat

SEQ ID NO: 12078 - DNA, 15 bp, Artificial Sequence
  source: /note="Description of Artificial Sequence: Synthetic oligonucleotide"
  source: /note="Description of Combined DNA/RNA Molecule: Synthetic oligonucleotide"
  source: /note="DNA/RNA"
  modified_base (1)..(1): bicyclic nucleic acid (BNA)
  modified_base (2)..(2): bicyclic nucleic acid (BNA)
  modified_base (14)..(14): bicyclic nucleic acid (BNA)
  modified_base (15)..(15): bicyclic nucleic acid (BNA)
  source: /note="3' tri-ethylene glycol (TEG)"
gaagauggcauuuct

SEQ ID NO: 12079 - DNA, 21 bp, Artificial Sequence
  source: /note="Description of Artificial Sequence: Synthetic oligonucleotide"
  source: /note="Description of Combined DNA/RNA Molecule: Synthetic oligonucleotide"
  source: /note="DNA/RNA"
  modified_base (1)..(1): bicyclic nucleic acid (BNA)
  modified_base (2)..(2): bicyclic nucleic acid (BNA)
  modified_base (20)..(20): bicyclic nucleic acid (BNA)
  modified_base (21)..(21): bicyclic nucleic acid (BNA)
  source: /note="3' tri-ethylene glycol (TEG)"
tcaaggaagauggcauuucta

SEQ ID NO: 12080 - DNA, 19 bp, Artificial Sequence
  source: /note="Description of Artificial Sequence: Synthetic oligonucleotide"
  source: /note="Description of Combined DNA/RNA Molecule: Synthetic oligonucleotide"
  source: /note="DNA/RNA"
  modified_base (1)..(1): bicyclic nucleic acid (BNA)
  modified_base (2)..(2): bicyclic nucleic acid (BNA)
  modified_base (18)..(18): bicyclic nucleic acid (BNA)
  modified_base (19)..(19): bicyclic nucleic acid (BNA)
  source: /note="3' tri-ethylene glycol (TEG)"
tcaaggaagauggcauutc

SEQ ID NO: 12081 - DNA, 18 bp, Artificial Sequence
  source: /note="Description of Artificial Sequence: Synthetic oligonucleotide"
  source: /note="Description of Combined DNA/RNA Molecule: Synthetic oligonucleotide"
  source: /note="DNA/RNA"
  modified_base (1)..(1): bicyclic nucleic acid (BNA)
  modified_base (2)..(2): bicyclic nucleic acid (BNA)
  modified_base (17)..(17): bicyclic nucleic acid (BNA)
  modified_base (18)..(18): bicyclic nucleic acid (BNA)
  source: /note="3' tri-ethylene glycol (TEG)"
tcaaggaagauggcautt

SEQ ID NO: 12082 - DNA, 17 bp, Artificial Sequence
  source: /note="Description of Artificial Sequence: Synthetic oligonucleotide"
  source: /note="Description of Combined DNA/RNA Molecule: Synthetic oligonucleotide"
  source: /note="DNA/RNA"
  modified_base (1)..(1): bicyclic nucleic acid (BNA)
  modified_base (2)..(2): bicyclic nucleic acid (BNA)
  modified_base (16)..(16): bicyclic nucleic acid (BNA)
  modified_base (17)..(17): bicyclic nucleic acid (BNA)
  source: /note="3' tri-ethylene glycol (TEG)"
tcaaggaagauggcatt

SEQ ID NO: 12083 - DNA, 15 bp, Artificial Sequence
  source: /note="Description of Artificial Sequence: Synthetic oligonucleotide"
  source: /note="Description of Combined DNA/RNA Molecule: Synthetic oligonucleotide"
  source: /note="DNA/RNA"
  modified_base (1)..(1): bicyclic nucleic acid (BNA)
  modified_base (2)..(2): bicyclic nucleic acid (BNA)
  modified_base (14)..(14): bicyclic nucleic acid (BNA)
  modified_base (15)..(15): bicyclic nucleic acid (BNA)
  source: /note="3' tri-ethylene glycol (TEG)"
tcaaggaagauggca

SEQ ID NO: 12084 - DNA, 14 bp, Artificial Sequence
  source: /note="Description of Artificial Sequence: Synthetic oligonucleotide"
  source: /note="Description of Combined DNA/RNA Molecule: Synthetic oligonucleotide"
  source: /note="DNA/RNA"
  modified_base (1)..(1): bicyclic nucleic acid (BNA)
  modified_base (2)..(2): bicyclic nucleic acid (BNA)
  modified_base (13)..(13): bicyclic nucleic acid (BNA)
  modified_base (14)..(14): bicyclic nucleic acid (BNA)
  source: /note="3' tri-ethylene glycol (TEG)"
tcaaggaagauggc

SEQ ID NO: 12085 - DNA, 13 bp, Artificial Sequence
  source: /note="Description of Artificial Sequence: Synthetic oligonucleotide"
  source: /note="Description of Combined DNA/RNA Molecule: Synthetic oligonucleotide"
  source: /note="DNA/RNA"
  modified_base (1)..(1): bicyclic nucleic acid (BNA)
  modified_base (2)..(2): bicyclic nucleic acid (BNA)
  modified_base (12)..(12): bicyclic nucleic acid (BNA)
  modified_base (13)..(13): bicyclic nucleic acid (BNA)
  source: /note="3' tri-ethylene glycol (TEG)"
tcaaggaagaugg

SEQ ID NO: 12086 - DNA, 12 bp, Artificial Sequence
  source: /note="Description of Artificial Sequence: Synthetic oligonucleotide"
  source: /note="DNA/RNA"
  modified_base (1)..(1): bicyclic nucleic acid (BNA)
  modified_base (2)..(2): bicyclic nucleic acid (BNA)
  modified_base (11)..(11): bicyclic nucleic acid (BNA)
  modified_base (12)..(12): bicyclic nucleic acid (BNA)
  source: /note="3' tri-ethylene glycol (TEG)"
tcaaggaagatg

SEQ ID NO: 12087 - DNA, 11 bp, Artificial Sequence
  source: /note="Description of Artificial Sequence: Synthetic oligonucleotide"
  source: /note="DNA/RNA"
  modified_base (1)..(1): bicyclic nucleic acid (BNA)
  modified_base (2)..(2): bicyclic nucleic acid (BNA)
  modified_base (10)..(10): bicyclic nucleic acid (BNA)
  modified_base (11)..(11): bicyclic nucleic acid (BNA)
  source: /note="3' tri-ethylene glycol (TEG)"
tcaaggaagat

SEQ ID NO: 12088 - DNA, 10 bp, Artificial Sequence
  source: /note="Description of Artificial Sequence: Synthetic oligonucleotide"
  source: /note="DNA/RNA"
  modified_base (1)..(1): bicyclic nucleic acid (BNA)
  modified_base (2)..(2): bicyclic nucleic acid (BNA)
  modified_base (9)..(9): bicyclic nucleic acid (BNA)
  modified_base (10)..(10): bicyclic nucleic acid (BNA)
  source: /note="3' tri-ethylene glycol (TEG)"
tcaaggaaga

SEQ ID NO: 12089 - DNA, 9 bp, Artificial Sequence
  source: /note="Description of Artificial Sequence: Synthetic oligonucleotide"
  source: /note="DNA/RNA"
  modified_base (1)..(1): bicyclic nucleic acid (BNA)
  modified_base (2)..(2): bicyclic nucleic acid (BNA)
  modified_base (8)..(8): bicyclic nucleic acid (BNA)
  modified_base (9)..(9): bicyclic nucleic acid (BNA)
  source: /note="3' tri-ethylene glycol (TEG)"
tcaaggaag

SEQ ID NO: 12090 - RNA, 21 nt, Artificial Sequence
  source: /note="Description of Artificial Sequence: Synthetic oligonucleotide"
  source: /note="RNA"
  modified_base (1)..(1): bicyclic nucleic acid (BNA)
  modified_base (2)..(2): bicyclic nucleic acid (BNA)
  modified_base (20)..(20): bicyclic nucleic acid (BNA)
  modified_base (21)..(21): bicyclic nucleic acid (BNA)
  source: /note="3' tri-ethylene glycol (TEG)"
caaggaagauggcauuucuag

SEQ ID NO: 12091 - DNA, 20 bp, Artificial Sequence
  source: /note="Description of Artificial Sequence: Synthetic oligonucleotide"
  source: /note="Description of Combined DNA/RNA Molecule: Synthetic oligonucleotide"
  source: /note="DNA/RNA"
  modified_base (1)..(1): bicyclic nucleic acid (BNA)
  modified_base (2)..(2): bicyclic nucleic acid (BNA)
  modified_base (19)..(19): bicyclic nucleic acid (BNA)
  modified_base (20)..(20): bicyclic nucleic acid (BNA)
  source: /note="3' tri-ethylene glycol (TEG)"
caaggaagauggcauuucta

SEQ ID NO: 12092 - DNA, 19 bp, Artificial Sequence
  source: /note="Description of Artificial Sequence: Synthetic oligonucleotide"
  source: /note="Description of Combined DNA/RNA Molecule: Synthetic oligonucleotide"
  source: /note="DNA/RNA"
  modified_base (1)..(1): bicyclic nucleic acid (BNA)
  modified_base (2)..(2): bicyclic nucleic acid (BNA)
  modified_base (18)..(18): bicyclic nucleic acid (BNA)
  modified_base (19)..(19): bicyclic nucleic acid (BNA)
  source: /note="3' tri-ethylene glycol (TEG)"
caaggaagauggcauuuct

SEQ ID NO: 12093 - DNA, 18 bp, Artificial Sequence
  source: /note="Description of Artificial Sequence: Synthetic oligonucleotide"
  source: /note="Description of Combined DNA/RNA Molecule: Synthetic oligonucleotide"
  source: /note="DNA/RNA"
  modified_base (1)..(1): bicyclic nucleic acid (BNA)
  modified_base (2)..(2): bicyclic nucleic acid (BNA)
  modified_base (17)..(17): bicyclic nucleic acid (BNA)
  modified_base (18)..(18): bicyclic nucleic acid (BNA)
  source: /note="3' tri-ethylene glycol (TEG)"
caaggaagauggcauutc

SEQ ID NO: 12094 - DNA, 17 bp, Artificial Sequence
  source: /note="Description of Artificial Sequence: Synthetic oligonucleotide"
  source: /note="Description of Combined DNA/RNA Molecule: Synthetic oligonucleotide"
  source: /note="DNA/RNA"
  modified_base (1)..(1): bicyclic nucleic acid (BNA)
  modified_base (2)..(2): bicyclic nucleic acid (BNA)
  modified_base (16)..(16): bicyclic nucleic acid (BNA)
  modified_base (17)..(17): bicyclic nucleic acid (BNA)
  source: /note="3' tri-ethylene glycol (TEG)"
caaggaagauggcautt

SEQ ID NO: 12095 - DNA, 16 bp, Artificial Sequence
  source: /note="Description of Artificial Sequence: Synthetic oligonucleotide"
  source: /note="Description of Combined DNA/RNA Molecule: Synthetic oligonucleotide"
  source: /note="DNA/RNA"
  modified_base (1)..(1): bicyclic nucleic acid (BNA)
  modified_base (2)..(2): bicyclic nucleic acid (BNA)
  modified_base (15)..(15): bicyclic nucleic acid (BNA)
  modified_base (16)..(16): bicyclic nucleic acid (BNA)
  source: /note="3' tri-ethylene glycol (TEG)"
caaggaagauggcatt

SEQ ID NO: 12096 - DNA, 15 bp, Artificial Sequence
  source: /note="Description of Artificial Sequence: Synthetic oligonucleotide"
  source: /note="Description of Combined DNA/RNA Molecule: Synthetic oligonucleotide"
  source: /note="DNA/RNA"
  modified_base (1)..(1): bicyclic nucleic acid (BNA)
  modified_base (2)..(2): bicyclic nucleic acid (BNA)
  modified_base (14)..(14): bicyclic nucleic acid (BNA)
  modified_base (15)..(15): bicyclic nucleic acid (BNA)
  source: /note="3' tri-ethylene glycol (TEG)"
caaggaagauggcat

SEQ ID NO: 12097 - RNA, 14 nt, Artificial Sequence
  source: /note="Description of Artificial Sequence: Synthetic oligonucleotide"
  source: /note="RNA"
  modified_base (1)..(1): bicyclic nucleic acid (BNA)
  modified_base (2)..(2): bicyclic nucleic acid (BNA)
  modified_base (13)..(13): bicyclic nucleic acid (BNA)
  modified_base (14)..(14): bicyclic nucleic acid (BNA)
  source: /note="3' tri-ethylene glycol (TEG)"
caaggaagauggca

SEQ ID NO: 12098 - RNA, 13 nt, Artificial Sequence
  source: /note="Description of Artificial Sequence: Synthetic oligonucleotide"
  source: /note="RNA"
  modified_base (1)..(1): bicyclic nucleic acid (BNA)
  modified_base (2)..(2): bicyclic nucleic acid (BNA)
  modified_base (12)..(12): bicyclic nucleic acid (BNA)
  modified_base (13)..(13): bicyclic nucleic acid (BNA)
  source: /note="3' tri-ethylene glycol (TEG)"
caaggaagauggc

SEQ ID NO: 12099 - RNA, 12 nt, Artificial Sequence
  source: /note="Description of Artificial Sequence: Synthetic oligonucleotide"
  source: /note="RNA"
  modified_base (1)..(1): bicyclic nucleic acid (BNA)
  modified_base (2)..(2): bicyclic nucleic acid (BNA)
  modified_base (11)..(11): bicyclic nucleic acid (BNA)
  modified_base (12)..(12): bicyclic nucleic acid (BNA)
  source: /note="3' tri-ethylene glycol (TEG)"
caaggaagaugg

SEQ ID NO: 12100 - DNA, 11 bp, Artificial Sequence
  source: /note="Description of Artificial Sequence: Synthetic oligonucleotide"
  source: /note="DNA/RNA"
  modified_base (1)..(1): bicyclic nucleic acid (BNA)
  modified_base (2)..(2): bicyclic nucleic acid (BNA)
  modified_base (10)..(10): bicyclic nucleic acid (BNA)
  modified_base (11)..(11): bicyclic nucleic acid (BNA)
  source: /note="3' tri-ethylene glycol (TEG)"
caaggaagatg

SEQ ID NO: 12101 - DNA, 10 bp, Artificial Sequence
  source: /note="Description of Artificial Sequence: Synthetic oligonucleotide"
  source: /note="DNA/RNA"
  modified_base (1)..(1): bicyclic nucleic acid (BNA)
  modified_base (2)..(2): bicyclic nucleic acid (BNA)
  modified_base (9)..(9): bicyclic nucleic acid (BNA)
  modified_base (10)..(10): bicyclic nucleic acid (BNA)
  source: /note="3' tri-ethylene glycol (TEG)"
caaggaagat

SEQ ID NO: 12102 - RNA, 9 nt, Artificial Sequence
  source: /note="Description of Artificial Sequence: Synthetic oligonucleotide"
  source: /note="RNA/Antisense Oligonucleotide"
  modified_base (1)..(1): bicyclic nucleic acid (BNA)
  modified_base (2)..(2): bicyclic nucleic acid (BNA)
  modified_base (8)..(8): bicyclic nucleic acid (BNA)
  modified_base (9)..(9): bicyclic nucleic acid (BNA)
  source: /note="3' tri-ethylene glycol (TEG)"
caaggaaga

SEQ ID NO: 12103 - RNA, 8 nt, Artificial Sequence
  source: /note="Description of Artificial Sequence: Synthetic oligonucleotide"
  source: /note="RNA/Antisense Oligonucleotide"
  modified_base (1)..(1): bicyclic nucleic acid (BNA)
  modified_base (2)..(2): bicyclic nucleic acid (BNA)
  modified_base (7)..(7): bicyclic nucleic acid (BNA)
  modified_base (8)..(8): bicyclic nucleic acid (BNA)
  source: /note="3' tri-ethylene glycol (TEG)"
caaggaag

SEQ ID NO: 12104 - RNA, 20 nt, Artificial Sequence
  source: /note="Description of Artificial Sequence: Synthetic oligonucleotide"
  source: /note="RNA"
  modified_base (1)..(1): bicyclic nucleic acid (BNA)
  modified_base (2)..(2): bicyclic nucleic acid (BNA)
  modified_base (19)..(19): bicyclic nucleic acid (BNA)
  modified_base (20)..(20): bicyclic nucleic acid (BNA)
  source: /note="3' tri-ethylene glycol (TEG)"
aaggaagauggcauuucuag

SEQ ID NO: 12105 - DNA, 19 bp, Artificial Sequence
  source: /note="Description of Artificial Sequence: Synthetic oligonucleotide"
  source: /note="Description of Combined DNA/RNA Molecule: Synthetic oligonucleotide"
  source: /note="DNA/RNA"
  modified_base (1)..(1): bicyclic nucleic acid (BNA)
  modified_base (2)..(2): bicyclic nucleic acid (BNA)
  modified_base (18)..(18): bicyclic nucleic acid (BNA)
  modified_base (19)..(19): bicyclic nucleic acid (BNA)
  source: /note="3' tri-ethylene glycol (TEG)"
aaggaagauggcauuucta

SEQ ID NO: 12106 - DNA, 18 bp, Artificial Sequence
  source: /note="Description of Artificial Sequence: Synthetic oligonucleotide"
  source: /note="Description of Combined DNA/RNA Molecule: Synthetic oligonucleotide"
  source: /note="DNA/RNA"
  modified_base (1)..(1): bicyclic nucleic acid (BNA)
  modified_base (2)..(2): bicyclic nucleic acid (BNA)
  modified_base (17)..(17): bicyclic nucleic acid (BNA)
  modified_base (18)..(18): bicyclic nucleic acid (BNA)
  source: /note="3' tri-ethylene glycol (TEG)"
aaggaagauggcauuuct

SEQ ID NO: 12107 - DNA, 17 bp, Artificial Sequence
  source: /note="Description of Artificial Sequence: Synthetic oligonucleotide"
  source: /note="Description of Combined DNA/RNA Molecule: Synthetic oligonucleotide"
  source: /note="DNA/RNA"
  modified_base (1)..(1): bicyclic nucleic acid (BNA)
  modified_base (2)..(2): bicyclic nucleic acid (BNA)
  modified_base (16)..(16): bicyclic nucleic acid (BNA)
  modified_base (17)..(17): bicyclic nucleic acid (BNA)
  source: /note="3' tri-ethylene glycol (TEG)"
aaggaagauggcauutc

SEQ ID NO: 12108 - DNA, 16 bp, Artificial Sequence
  source: /note="Description of Artificial Sequence: Synthetic oligonucleotide"
  source: /note="Description of Combined DNA/RNA Molecule: Synthetic oligonucleotide"
  source: /note="DNA/RNA"
  modified_base (1)..(1): bicyclic nucleic acid (BNA)
  modified_base (2)..(2): bicyclic nucleic acid (BNA)
  modified_base (15)..(15): bicyclic nucleic acid (BNA)
  modified_base (16)..(16): bicyclic nucleic acid (BNA)
  source: /note="3' tri-ethylene glycol (TEG)"
aaggaagauggcautt

SEQ ID NO: 12109 - DNA, 15 bp, Artificial Sequence
  source: /note="Description of Artificial Sequence: Synthetic oligonucleotide"
  source: /note="Description of Combined DNA/RNA Molecule: Synthetic oligonucleotide"
  source: /note="DNA/RNA"
  modified_base (1)..(1): bicyclic nucleic acid (BNA)
  modified_base (2)..(2): bicyclic nucleic acid (BNA)
  modified_base (14)..(14): bicyclic nucleic acid (BNA)
  modified_base (15)..(15): bicyclic nucleic acid (BNA)
  source: /note="3' tri-ethylene glycol (TEG)"
aaggaagauggcatt

SEQ ID NO: 12110 - DNA, 14 bp, Artificial Sequence
  source: /note="Description of Artificial Sequence: Synthetic oligonucleotide"
  source: /note="Description of Combined DNA/RNA Molecule: Synthetic oligonucleotide"
  source: /note="DNA/RNA"
  modified_base (1)..(1): bicyclic nucleic acid (BNA)
  modified_base (2)..(2): bicyclic nucleic acid (BNA)
  modified_base (13)..(13): bicyclic nucleic acid (BNA)
  modified_base (14)..(14): bicyclic nucleic acid (BNA)
  source: /note="3' tri-ethylene glycol (TEG)"
aaggaagauggcat

SEQ ID NO: 12111 - RNA, 13 nt, Artificial Sequence
  source: /note="Description of Artificial Sequence: Synthetic oligonucleotide"
  source: /note="RNA"
  modified_base (1)..(1): bicyclic nucleic acid (BNA)
  modified_base (2)..(2): bicyclic nucleic acid (BNA)
  modified_base (12)..(12): bicyclic nucleic acid (BNA)
  modified_base (13)..(13): bicyclic nucleic acid (BNA)
  source: /note="3' tri-ethylene glycol (TEG)"
aaggaagauggca

SEQ ID NO: 12112 - RNA, 12 nt, Artificial Sequence
  source: /note="Description of Artificial Sequence: Synthetic oligonucleotide"
  source: /note="RNA"
  modified_base (1)..(1): bicyclic nucleic acid (BNA)
  modified_base (2)..(2): bicyclic nucleic acid (BNA)
  modified_base (11)..(11): bicyclic nucleic acid (BNA)
  modified_base (12)..(12): bicyclic nucleic acid (BNA)
  source: /note="3' tri-ethylene glycol (TEG)"
aaggaagauggc

SEQ ID NO: 12113 - RNA, 11 nt, Artificial Sequence
  source: /note="Description of Artificial Sequence: Synthetic oligonucleotide"
  source: /note="RNA"
  modified_base (1)..(1): bicyclic nucleic acid (BNA)
  modified_base (2)..(2): bicyclic nucleic acid (BNA)
  modified_base (10)..(10): bicyclic nucleic acid (BNA)
  modified_base (11)..(11): bicyclic nucleic acid (BNA)
  source: /note="3' tri-ethylene glycol (TEG)"
aaggaagaugg

SEQ ID NO: 12114 - DNA, 10 bp, Artificial Sequence
  source: /note="Description of Artificial Sequence: Synthetic oligonucleotide"
  source: /note="DNA/RNA"
  modified_base (1)..(1): bicyclic nucleic acid (BNA)
  modified_base (2)..(2): bicyclic nucleic acid (BNA)
  modified_base (9)..(9): bicyclic nucleic acid (BNA)
  modified_base (10)..(10): bicyclic nucleic acid (BNA)
  source: /note="3' tri-ethylene glycol (TEG)"
aaggaagatg

SEQ ID NO: 12115 - DNA, 9 bp, Artificial Sequence
  source: /note="Description of Artificial Sequence: Synthetic oligonucleotide"
  source: /note="DNA/RNA"
  modified_base (1)..(1): bicyclic nucleic acid (BNA)
  modified_base (2)..(2): bicyclic nucleic acid (BNA)
  modified_base (8)..(8): bicyclic nucleic acid (BNA)
  modified_base (9)..(9): bicyclic nucleic acid (BNA)
  source: /note="3' tri-ethylene glycol (TEG)"
aaggaagat

SEQ ID NO: 12116 - RNA, 8 nt, Artificial Sequence
  source: /note="Description of Artificial Sequence: Synthetic oligonucleotide"
  source: /note="RNA/Antisense Oligonucleotide"
  modified_base (1)..(1): bicyclic nucleic acid (BNA)
  modified_base (2)..(2): bicyclic nucleic acid (BNA)
  modified_base (7)..(7): bicyclic nucleic acid (BNA)
  modified_base (8)..(8): bicyclic nucleic acid (BNA)
  source: /note="3' tri-ethylene glycol (TEG)"
aaggaaga

SEQ ID NO: 12117 - RNA, 19 nt, Artificial Sequence
  source: /note="Description of Artificial Sequence: Synthetic oligonucleotide"
  source: /note="RNA"
  modified_base (1)..(1): bicyclic nucleic acid (BNA)
  modified_base (2)..(2): bicyclic nucleic acid (BNA)
  modified_base (18)..(18): bicyclic nucleic acid (BNA)
  modified_base (19)..(19): bicyclic nucleic acid (BNA)
  source: /note="3' tri-ethylene glycol (TEG)"
aggaagauggcauuucuag

SEQ ID NO: 12118 - DNA, 18 bp, Artificial Sequence
  source: /note="Description of Artificial Sequence: Synthetic oligonucleotide"
  source: /note="Description of Combined DNA/RNA Molecule: Synthetic oligonucleotide"
  source: /note="DNA/RNA"
  modified_base (1)..(1): bicyclic nucleic acid (BNA)
  modified_base (2)..(2): bicyclic nucleic acid (BNA)
  modified_base (17)..(17): bicyclic nucleic acid (BNA)
  modified_base (18)..(18): bicyclic nucleic acid (BNA)
  source: /note="3' tri-ethylene glycol (TEG)"
aggaagauggcauuucta

SEQ ID NO: 12119 - DNA, 17 bp, Artificial Sequence
  source: /note="Description of Artificial Sequence: Synthetic oligonucleotide"
  source: /note="Description of Combined DNA/RNA Molecule: Synthetic oligonucleotide"
  source: /note="DNA/RNA"
  modified_base (1)..(1): bicyclic nucleic acid (BNA)
  modified_base (2)..(2): bicyclic nucleic acid (BNA)
  modified_base (16)..(16): bicyclic nucleic acid (BNA)
  modified_base (17)..(17): bicyclic nucleic acid (BNA)
  source: /note="3' tri-ethylene glycol (TEG)"
aggaagauggcauuuct

SEQ ID NO: 12120 - DNA, 16 bp, Artificial Sequence
  source: /note="Description of Artificial Sequence: Synthetic oligonucleotide"
  source: /note="Description of Combined DNA/RNA Molecule: Synthetic oligonucleotide"
  source: /note="DNA/RNA"
  modified_base (1)..(1): bicyclic nucleic acid (BNA)
  modified_base (2)..(2): bicyclic nucleic acid (BNA)
  modified_base (15)..(15): bicyclic nucleic acid (BNA)
  modified_base (16)..(16): bicyclic nucleic acid (BNA)
  source: /note="3' tri-ethylene glycol (TEG)"
aggaagauggcauutc

SEQ ID NO: 12121 - DNA, 15 bp, Artificial Sequence
  source: /note="Description of Artificial Sequence: Synthetic oligonucleotide"
  source: /note="Description of Combined DNA/RNA Molecule: Synthetic oligonucleotide"
  source: /note="DNA/RNA"
  modified_base (1)..(1): bicyclic nucleic acid (BNA)
  modified_base (2)..(2): bicyclic nucleic acid (BNA)
  modified_base (14)..(14): bicyclic nucleic acid (BNA)
  modified_base (15)..(15): bicyclic nucleic acid (BNA)
  source: /note="3' tri-ethylene glycol (TEG)"
aggaagauggcautt

SEQ ID NO: 12122 - DNA, 14 bp, Artificial Sequence
  source: /note="Description of Artificial Sequence: Synthetic oligonucleotide"
  source: /note="Description of Combined DNA/RNA Molecule: Synthetic oligonucleotide"
  source: /note="DNA/RNA"
  modified_base (1)..(1): bicyclic nucleic acid (BNA)
  modified_base (2)..(2): bicyclic nucleic acid (BNA)
  modified_base (13)..(13): bicyclic nucleic acid (BNA)
  modified_base (14)..(14): bicyclic nucleic acid (BNA)
  source: /note="3' tri-ethylene glycol (TEG)"
aggaagauggcatt

SEQ ID NO: 12123 - DNA, 13 bp, Artificial Sequence
  source: /note="Description of Artificial Sequence: Synthetic oligonucleotide"
  source: /note="Description of Combined DNA/RNA Molecule: Synthetic oligonucleotide"
  source: /note="DNA/RNA"
  modified_base (1)..(1): bicyclic nucleic acid (BNA)
  modified_base (2)..(2): bicyclic nucleic acid (BNA)
  modified_base (12)..(12): bicyclic nucleic acid (BNA)
  modified_base (13)..(13): bicyclic nucleic acid (BNA)
  source: /note="3' tri-ethylene glycol (TEG)"
aggaagauggcat

SEQ ID NO: 12124 - RNA, 12 nt, Artificial Sequence
  source: /note="Description of Artificial Sequence: Synthetic oligonucleotide"
  source: /note="RNA"
  modified_base (1)..(1): bicyclic nucleic acid (BNA)
  modified_base (2)..(2): bicyclic nucleic acid (BNA)
  modified_base (11)..(11): bicyclic nucleic acid (BNA)
  modified_base (12)..(12): bicyclic nucleic acid (BNA)
  source: /note="3' tri-ethylene glycol (TEG)"
aggaagauggca

SEQ ID NO: 12125 - RNA, 10 nt, Artificial Sequence
  source: /note="Description of Artificial Sequence: Synthetic oligonucleotide"
  source: /note="RNA"
  modified_base (1)..(1): bicyclic nucleic acid (BNA)
  modified_base (2)..(2): bicyclic nucleic acid (BNA)
  modified_base (9)..(9): bicyclic nucleic acid (BNA)
  modified_base (10)..(10): bicyclic nucleic acid (BNA)
  source: /note="3' tri-ethylene glycol (TEG)"
aggaagaugg

SEQ ID NO: 12126 - DNA, 9 bp, Artificial Sequence
  source: /note="Description of Artificial Sequence: Synthetic oligonucleotide"
  source: /note="DNA/RNA"
  modified_base (1)..(1): bicyclic nucleic acid (BNA)
  modified_base (2)..(2): bicyclic nucleic acid (BNA)
  modified_base (8)..(8): bicyclic nucleic acid (BNA)
  modified_base (9)..(9): bicyclic nucleic acid (BNA)
  source: /note="3' tri-ethylene glycol (TEG)"
aggaagatg

SEQ ID NO: 12127 - DNA, 8 bp, Artificial Sequence
  source: /note="Description of Artificial Sequence: Synthetic oligonucleotide"
  source: /note="DNA/RNA"
  modified_base (1)..(1): bicyclic nucleic acid (BNA)
  modified_base (2)..(2): bicyclic nucleic acid (BNA)
  modified_base (7)..(7): bicyclic nucleic acid (BNA)
  modified_base (8)..(8): bicyclic nucleic acid (BNA)
  source: /note="3' tri-ethylene glycol (TEG)"
aggaagat

SEQ ID NO: 12128 - RNA, 18 nt, Artificial Sequence
  source: /note="Description of Artificial Sequence: Synthetic oligonucleotide"
  source: /note="RNA"
  modified_base (1)..(1): bicyclic nucleic acid (BNA)
  modified_base (2)..(2): bicyclic nucleic acid (BNA)
  modified_base (17)..(17): bicyclic nucleic acid (BNA)
  modified_base (18)..(18): bicyclic nucleic acid (BNA)
  source: /note="3' tri-ethylene glycol (TEG)"
ggaagauggcauuucuag

SEQ ID NO: 12129 - DNA, 17 bp, Artificial Sequence
  source: /note="Description of Artificial Sequence: Synthetic oligonucleotide"
  source: /note="Description of Combined DNA/RNA Molecule: Synthetic oligonucleotide"
  source: /note="DNA/RNA"
  modified_base (1)..(1): bicyclic nucleic acid (BNA)
  modified_base (2)..(2): bicyclic nucleic acid (BNA)
  modified_base (16)..(16): bicyclic nucleic acid (BNA)
  modified_base (17)..(17): bicyclic nucleic acid (BNA)
  source: /note="3' tri-ethylene glycol (TEG)"
ggaagauggcauuucta

SEQ ID NO: 12130 - DNA, 16 bp, Artificial Sequence
  source: /note="Description of Artificial Sequence: Synthetic oligonucleotide"
  source: /note="Description of Combined DNA/RNA Molecule: Synthetic oligonucleotide"
  source: /note="DNA/RNA"
  modified_base (1)..(1): bicyclic nucleic acid (BNA)
  modified_base (2)..(2): bicyclic nucleic acid (BNA)
  modified_base (15)..(15): bicyclic nucleic acid (BNA)
  modified_base (16)..(16): bicyclic nucleic acid (BNA)
  source: /note="3' tri-ethylene glycol (TEG)"
ggaagauggcauuuct

SEQ ID NO: 12131 - DNA, 15 bp, Artificial Sequence
  source: /note="Description of Artificial Sequence: Synthetic oligonucleotide"
  source: /note="Description of Combined DNA/RNA Molecule: Synthetic oligonucleotide"
  source: /note="DNA/RNA"
  modified_base (1)..(1): bicyclic nucleic acid (BNA)
  modified_base (2)..(2): bicyclic nucleic acid (BNA)
  modified_base (14)..(14): bicyclic nucleic acid (BNA)
  modified_base (15)..(15): bicyclic nucleic acid (BNA)
  source: /note="3' tri-ethylene glycol (TEG)"
ggaagauggcauutc

SEQ ID NO: 12132 - DNA, 14 bp, Artificial Sequence
  source: /note="Description of Artificial Sequence: Synthetic oligonucleotide"
  source: /note="Description of Combined DNA/RNA Molecule: Synthetic oligonucleotide"
  source: /note="DNA/RNA"
  modified_base (1)..(1): bicyclic nucleic acid (BNA)
  modified_base (2)..(2): bicyclic nucleic acid (BNA)
  modified_base (13)..(13): bicyclic nucleic acid (BNA)
  modified_base (14)..(14): bicyclic nucleic acid (BNA)
  source: /note="3' tri-ethylene glycol (TEG)"
ggaagauggcautt

SEQ ID NO: 12133 - DNA, 13 bp, Artificial Sequence
  source: /note="Description of Artificial Sequence: Synthetic oligonucleotide"
  source: /note="Description of Combined DNA/RNA Molecule: Synthetic oligonucleotide"
  source: /note="DNA/RNA"
  modified_base (1)..(1): bicyclic nucleic acid (BNA)
  modified_base (2)..(2): bicyclic nucleic acid (BNA)
  modified_base (12)..(12): bicyclic nucleic acid (BNA)
  modified_base (13)..(13): bicyclic nucleic acid (BNA)
  source: /note="3' tri-ethylene glycol (TEG)"
ggaagauggcatt

SEQ ID NO: 12134 - DNA, 12 bp, Artificial Sequence
  source: /note="Description of Artificial Sequence: Synthetic oligonucleotide"
  source: /note="Description of Combined DNA/RNA Molecule: Synthetic oligonucleotide"
  source: /note="DNA/RNA"
  modified_base (1)..(1): bicyclic nucleic acid (BNA)
  modified_base (2)..(2): bicyclic nucleic acid (BNA)
  modified_base (11)..(11): bicyclic nucleic acid (BNA)
  modified_base (12)..(12): bicyclic nucleic acid (BNA)
  source: /note="3' tri-ethylene glycol (TEG)"
ggaagauggcat

SEQ ID NO: 12135 - RNA, 11 nt, Artificial Sequence
  source: /note="Description of Artificial Sequence: Synthetic oligonucleotide"
  source: /note="RNA"
  modified_base (1)..(1): bicyclic nucleic acid (BNA)
  modified_base (2)..(2): bicyclic nucleic acid (BNA)
  modified_base (10)..(10): bicyclic nucleic acid (BNA)
  modified_base (11)..(11): bicyclic nucleic acid (BNA)
  source: /note="3' tri-ethylene glycol (TEG)"
ggaagauggca

SEQ ID NO: 12136 - RNA, 10 nt, Artificial Sequence
  source: /note="Description of Artificial Sequence: Synthetic oligonucleotide"
  source: /note="RNA"
  modified_base (1)..(1): bicyclic nucleic acid (BNA)
  modified_base (2)..(2): bicyclic nucleic acid (BNA)
  modified_base (9)..(9): bicyclic nucleic acid (BNA)
  modified_base (10)..(10): bicyclic nucleic acid (BNA)
  source: /note="3' tri-ethylene glycol (TEG)"
ggaagauggc

SEQ ID NO: 12137 - DNA, 8 bp, Artificial Sequence
  source: /note="Description of Artificial Sequence: Synthetic oligonucleotide"
  source: /note="DNA/RNA"
  modified_base (1)..(1): bicyclic nucleic acid (BNA)
  modified_base (2)..(2): bicyclic nucleic acid (BNA)
  modified_base (7)..(7): bicyclic nucleic acid (BNA)
  modified_base (8)..(8): bicyclic nucleic acid (BNA)
  source: /note="3' tri-ethylene glycol (TEG)"
ggaagatg

SEQ ID NO: 12138 - RNA, 17 nt, Artificial Sequence
  source: /note="Description of Artificial Sequence: Synthetic oligonucleotide"
  source: /note="RNA"
  modified_base (1)..(1): bicyclic nucleic acid (BNA)
  modified_base (2)..(2): bicyclic nucleic acid (BNA)
  modified_base (16)..(16): bicyclic nucleic acid (BNA)
  modified_base (17)..(17): bicyclic nucleic acid (BNA)
  source: /note="3' tri-ethylene glycol (TEG)"
gaagauggcauuucuag

SEQ ID NO: 12139 - DNA, 16 bp, Artificial Sequence
  source: /note="Description of Artificial Sequence: Synthetic oligonucleotide"
  source: /note="Description of Combined DNA/RNA Molecule: Synthetic oligonucleotide"
  source: /note="DNA/RNA"
  modified_base (1)..(1): bicyclic nucleic acid (BNA)
  modified_base (2)..(2): bicyclic nucleic acid (BNA)
  modified_base (15)..(15): bicyclic nucleic acid (BNA)
  modified_base (16)..(16): bicyclic nucleic acid (BNA)
  source: /note="3' tri-ethylene glycol (TEG)"
gaagauggcauuucta

SEQ ID NO: 12140 - DNA, 14 bp, Artificial Sequence
  source: /note="Description of Artificial Sequence: Synthetic oligonucleotide"
  source: /note="Description of Combined DNA/RNA Molecule: Synthetic oligonucleotide"
  source: /note="DNA/RNA"
  modified_base (1)..(1): bicyclic nucleic acid (BNA)
  modified_base (2)..(2): bicyclic nucleic acid (BNA)
  modified_base (13)..(13): bicyclic nucleic acid (BNA)
  modified_base (14)..(14): bicyclic nucleic acid (BNA)
  source: /note="3' tri-ethylene glycol (TEG)"
gaagauggcauutc

SEQ ID NO: 12141 - DNA, 13 bp, Artificial Sequence
  source: /note="Description of Artificial Sequence: Synthetic oligonucleotide"
  source: /note="Description of Combined DNA/RNA Molecule: Synthetic oligonucleotide"
  source: /note="DNA/RNA"
  modified_base (1)..(1): bicyclic nucleic acid (BNA)
  modified_base (2)..(2): bicyclic nucleic acid (BNA)
  modified_base (12)..(12): bicyclic nucleic acid (BNA)
  modified_base (13)..(13): bicyclic nucleic acid (BNA)
  source: /note="3' tri-ethylene glycol (TEG)"
gaagauggcautt

SEQ ID NO: 12142 - DNA, 12 bp, Artificial Sequence
  source: /note="Description of Artificial Sequence: Synthetic oligonucleotide"
  source: /note="Description of Combined DNA/RNA Molecule: Synthetic oligonucleotide"
  source: /note="DNA/RNA"
  modified_base (1)..(1): bicyclic nucleic acid (BNA)
  modified_base (2)..(2): bicyclic nucleic acid (BNA)
  modified_base (11)..(11): bicyclic nucleic acid (BNA)
  modified_base (12)..(12): bicyclic nucleic acid (BNA)
  source: /note="3' tri-ethylene glycol (TEG)"
gaagauggcatt

SEQ ID NO: 12143 - DNA, 11 bp, Artificial Sequence
  source: /note="Description of Artificial Sequence: Synthetic oligonucleotide"
  source: /note="Description of Combined DNA/RNA Molecule: Synthetic oligonucleotide"
  source: /note="DNA/RNA"
  modified_base (1)..(1): bicyclic nucleic acid (BNA)
  modified_base (2)..(2): bicyclic nucleic acid (BNA)
  modified_base (10)..(10): bicyclic nucleic acid (BNA)
  modified_base (11)..(11): bicyclic nucleic acid (BNA)
  source: /note="3' tri-ethylene glycol (TEG)"
gaagauggcat

SEQ ID NO: 12144 - RNA, 10 nt, Artificial Sequence
  source: /note="Description of Artificial Sequence: Synthetic oligonucleotide"
  source: /note="RNA"
  modified_base (1)..(1): bicyclic nucleic acid (BNA)
  modified_base (2)..(2): bicyclic nucleic acid (BNA)
  modified_base (9)..(9): bicyclic nucleic acid (BNA)
  modified_base (10)..(10): bicyclic nucleic acid (BNA)
  source: /note="3' tri-ethylene glycol (TEG)"
gaagauggca

SEQ ID NO: 12145 - RNA, 9 nt, Artificial Sequence
  source: /note="Description of Artificial Sequence: Synthetic oligonucleotide"
  source: /note="RNA"
  modified_base (1)..(1): bicyclic nucleic acid (BNA)
  modified_base (2)..(2): bicyclic nucleic acid (BNA)
  modified_base (8)..(8): bicyclic nucleic acid (BNA)
  modified_base (9)..(9): bicyclic nucleic acid (BNA)
  source: /note="3' tri-ethylene glycol (TEG)"
gaagauggc

SEQ ID NO: 12146 - RNA, 8 nt, Artificial Sequence
  source: /note="Description of Artificial Sequence: Synthetic oligonucleotide"
  source: /note="RNA"
  modified_base (1)..(1): bicyclic nucleic acid (BNA)
  modified_base (2)..(2): bicyclic nucleic acid (BNA)
  modified_base (7)..(7): bicyclic nucleic acid (BNA)
  modified_base (8)..(8): bicyclic nucleic acid (BNA)
  source: /note="3' tri-ethylene glycol (TEG)"
gaagaugg

SEQ ID NO: 12147 - RNA, 16 nt, Artificial Sequence
  source: /note="Description of Artificial Sequence: Synthetic oligonucleotide"
  source: /note="RNA"
  modified_base (1)..(1): bicyclic nucleic acid (BNA)
  modified_base (2)..(2): bicyclic nucleic acid (BNA)
  modified_base (15)..(15): bicyclic nucleic acid (BNA)
  modified_base (16)..(16): bicyclic nucleic acid (BNA)
  source: /note="3' tri-ethylene glycol (TEG)"
aagauggcauuucuag

SEQ ID NO: 12148 - DNA, 15 bp, Artificial Sequence
  source: /note="Description of Artificial Sequence: Synthetic oligonucleotide"
  source: /note="Description of Combined DNA/RNA Molecule: Synthetic oligonucleotide"
  source: /note="DNA/RNA"
  modified_base (1)..(1): bicyclic nucleic acid (BNA)
  modified_base (2)..(2): bicyclic nucleic acid (BNA)
  modified_base (14)..(14): bicyclic nucleic acid (BNA)
  modified_base (15)..(15): bicyclic nucleic acid (BNA)
  source: /note="3' tri-ethylene glycol (TEG)"
aagauggcauuucta

SEQ ID NO: 12149 - DNA, 14 bp, Artificial Sequence
  source: /note="Description of Artificial Sequence: Synthetic oligonucleotide"
  source: /note="Description of Combined DNA/RNA Molecule: Synthetic oligonucleotide"
  source: /note="DNA/RNA"
  modified_base (1)..(1): bicyclic nucleic acid (BNA)
  modified_base (2)..(2): bicyclic nucleic acid (BNA)
  modified_base (13)..(13): bicyclic nucleic acid (BNA)
  modified_base (14)..(14): bicyclic nucleic acid (BNA)
  source: /note="3' tri-ethylene glycol (TEG)"
aagauggcauuuct

SEQ ID NO: 12150 - DNA, 13 bp, Artificial Sequence
  source: /note="Description of Artificial Sequence: Synthetic oligonucleotide"
  source: /note="Description of Combined DNA/RNA Molecule: Synthetic oligonucleotide"
  source: /note="DNA/RNA"
  modified_base (1)..(1): bicyclic nucleic acid (BNA)
  modified_base (2)..(2): bicyclic nucleic acid (BNA)
  modified_base (12)..(12): bicyclic nucleic acid (BNA)
  modified_base (13)..(13): bicyclic nucleic acid (BNA)
  source: /note="3' tri-ethylene glycol (TEG)"
aagauggcauutc

SEQ ID NO: 12151 - DNA, 12 bp, Artificial Sequence
  source: /note="Description of Artificial Sequence: Synthetic oligonucleotide"
  source: /note="Description of Combined DNA/RNA Molecule: Synthetic oligonucleotide"
  source: /note="DNA/RNA"
  modified_base (1)..(1): bicyclic nucleic acid (BNA)
  modified_base (2)..(2): bicyclic nucleic acid (BNA)
  modified_base (11)..(11): bicyclic nucleic acid (BNA)
  modified_base (12)..(12): bicyclic nucleic acid (BNA)
  source: /note="3' tri-ethylene glycol (TEG)"
aagauggcautt

SEQ ID NO: 12152 - DNA, 11 bp, Artificial Sequence
  source: /note="Description of Artificial Sequence: Synthetic oligonucleotide"
  source: /note="Description of Combined DNA/RNA Molecule: Synthetic oligonucleotide"
  source: /note="DNA/RNA"
  modified_base (1)..(1): bicyclic nucleic acid (BNA)
  modified_base (2)..(2): bicyclic nucleic acid (BNA)
  modified_base (10)..(10): bicyclic nucleic acid (BNA)
  modified_base (11)..(11): bicyclic nucleic acid (BNA)
  source: /note="3' tri-ethylene glycol (TEG)"
aagauggcatt

SEQ ID NO: 12153 - DNA, 10 bp, Artificial Sequence
  source: /note="Description of Artificial Sequence: Synthetic oligonucleotide"
  source: /note="Description of Combined DNA/RNA Molecule: Synthetic oligonucleotide"
  source: /note="DNA/RNA"
  modified_base (1)..(1): bicyclic nucleic acid (BNA)
  modified_base (2)..(2): bicyclic nucleic acid (BNA)
  modified_base (9)..(9): bicyclic nucleic acid (BNA)
  modified_base (10)..(10): bicyclic nucleic acid (BNA)
  source: /note="3' tri-ethylene glycol (TEG)"
aagauggcat

SEQ ID NO: 12154 - RNA, 9 nt, Artificial Sequence
  source: /note="Description of Artificial Sequence: Synthetic oligonucleotide"
  source: /note="RNA"
  modified_base (1)..(1): bicyclic nucleic acid (BNA)
  modified_base (2)..(2): bicyclic nucleic acid (BNA)
  modified_base (8)..(8): bicyclic nucleic acid (BNA)
  modified_base (9)..(9): bicyclic nucleic acid (BNA)
  source: /note="3' tri-ethylene glycol (TEG)"
aagauggca

SEQ ID NO: 12155 - RNA, 8 nt, Artificial Sequence
  source: /note="Description of Artificial Sequence: Synthetic oligonucleotide"
  source: /note="RNA"
  modified_base (1)..(1): bicyclic nucleic acid (BNA)
  modified_base (2)..(2): bicyclic nucleic acid (BNA)
  modified_base (7)..(7): bicyclic nucleic acid (BNA)
  modified_base (8)..(8): bicyclic nucleic acid (BNA)
  source: /note="3' tri-ethylene glycol (TEG)"
aagauggc

SEQ ID NO: 12156 - RNA, 15 nt, Artificial Sequence
  source: /note="Description of Artificial Sequence: Synthetic oligonucleotide"
  source: /note="RNA"
  modified_base (1)..(1): bicyclic nucleic acid (BNA)
  modified_base (2)..(2): bicyclic nucleic acid (BNA)
  modified_base (14)..(14): bicyclic nucleic acid (BNA)
  modified_base (15)..(15): bicyclic nucleic acid (BNA)
  source: /note="3' tri-ethylene glycol (TEG)"
agauggcauuucuag

SEQ ID NO: 12157 - DNA, 14 bp, Artificial Sequence
  source: /note="Description of Artificial Sequence: Synthetic oligonucleotide"
  source: /note="Description of Combined DNA/RNA Molecule: Synthetic oligonucleotide"
  source: /note="DNA/RNA"
  modified_base (1)..(1): bicyclic nucleic acid (BNA)
  modified_base (2)..(2): bicyclic nucleic acid (BNA)
  modified_base (13)..(13): bicyclic nucleic acid (BNA)
  modified_base (14)..(14): bicyclic nucleic acid (BNA)
  source: /note="3' tri-ethylene glycol (TEG)"
agauggcauuucta

SEQ ID NO: 12158 - DNA, 13 bp, Artificial Sequence
  source: /note="Description of Artificial Sequence: Synthetic oligonucleotide"
  source: /note="Description of Combined DNA/RNA Molecule: Synthetic oligonucleotide"
  source: /note="DNA/RNA"
  modified_base (1)..(1): bicyclic nucleic acid (BNA)
  modified_base (2)..(2): bicyclic nucleic acid (BNA)
  modified_base (12)..(12): bicyclic nucleic acid (BNA)
  modified_base (13)..(13): bicyclic nucleic acid (BNA)
  source: /note="3' tri-ethylene glycol (TEG)"
agauggcauuuct

SEQ ID NO: 12159 - DNA, 12 bp, Artificial Sequence
  source: /note="Description of Artificial Sequence: Synthetic oligonucleotide"
  source: /note="Description of Combined DNA/RNA Molecule: Synthetic oligonucleotide"
  source: /note="DNA/RNA"
  modified_base (1)..(1): bicyclic nucleic acid (BNA)
  modified_base (2)..(2): bicyclic nucleic acid (BNA)
  modified_base (11)..(11): bicyclic nucleic acid (BNA)
  modified_base (12)..(12): bicyclic nucleic acid (BNA)
  source: /note="3' tri-ethylene glycol (TEG)"
agauggcauutc

SEQ ID NO: 12160 - DNA, 11 bp, Artificial Sequence
  source: /note="Description of Artificial Sequence: Synthetic oligonucleotide"
  source: /note="Description of Combined DNA/RNA Molecule: Synthetic oligonucleotide"
  source: /note="DNA/RNA"
  modified_base (1)..(1): bicyclic nucleic acid (BNA)
  modified_base (2)..(2): bicyclic nucleic acid (BNA)
  modified_base (10)..(10): bicyclic nucleic acid (BNA)
  modified_base (11)..(11): bicyclic nucleic acid (BNA)
  source: /note="3' tri-ethylene glycol (TEG)"
agauggcautt

SEQ ID NO: 12161 - DNA, 10 bp, Artificial Sequence
  source: /note="Description of Artificial Sequence: Synthetic oligonucleotide"
  source: /note="Description of Combined DNA/RNA Molecule: Synthetic oligonucleotide"
  source: /note="DNA/RNA"
  modified_base (1)..(1): bicyclic nucleic acid (BNA)
  modified_base (2)..(2): bicyclic nucleic acid (BNA)
  modified_base (9)..(9): bicyclic nucleic acid (BNA)
  modified_base (10)..(10): bicyclic nucleic acid (BNA)
  source: /note="3' tri-ethylene glycol (TEG)"
agauggcatt

SEQ ID NO: 12162 - DNA, 9 bp, Artificial Sequence
  source: /note="Description of Artificial Sequence: Synthetic oligonucleotide"
  source: /note="Description of Combined DNA/RNA Molecule: Synthetic oligonucleotide"
  source: /note="DNA/RNA"
  modified_base (1)..(1): bicyclic nucleic acid (BNA)
  modified_base (2)..(2): bicyclic nucleic acid (BNA)
  modified_base (8)..(8): bicyclic nucleic acid (BNA)
  modified_base (9)..(9): bicyclic nucleic acid (BNA)
  source: /note="3' tri-ethylene glycol (TEG)"
agauggcat

SEQ ID NO: 12163 - RNA, 8 nt, Artificial Sequence
  source: /note="Description of Artificial Sequence: Synthetic oligonucleotide"
  source: /note="RNA"
  modified_base (1)..(1): bicyclic nucleic acid (BNA)
  modified_base (2)..(2): bicyclic nucleic acid (BNA)
  modified_base (7)..(7): bicyclic nucleic acid (BNA)
  modified_base (8)..(8): bicyclic nucleic acid (BNA)
  source: /note="3' tri-ethylene glycol (TEG)"
agauggca

SEQ ID NO: 12164 - DNA, 30 bp, Artificial Sequence; identical to SEQ ID NO: 8204
  source: /note="Description of Artificial Sequence: Synthetic oligonucleotide"
  source: /note="Description of Combined DNA/RNA Molecule: Synthetic oligonucleotide"
  source: /note="DNA/RNA"
  modified_base (1)..(1): bicyclic nucleic acid (BNA)
  modified_base (2)..(2): bicyclic nucleic acid (BNA)
  modified_base (29)..(29): bicyclic nucleic acid (BNA)
  modified_base (30)..(30): bicyclic nucleic acid (BNA)
  source: /note="3' tri-ethylene glycol (TEG)"

SEQ ID NO: 12165 - DNA, 29 bp, Artificial Sequence
  source: /note="Description of Artificial Sequence: Synthetic oligonucleotide"
  source: /note="Description of Combined DNA/RNA Molecule: Synthetic oligonucleotide"
  source: /note="DNA/RNA"
  modified_base (1)..(1): bicyclic nucleic acid (BNA)
  modified_base (2)..(2): bicyclic nucleic acid (BNA)
  modified_base (28)..(28): bicyclic nucleic acid (BNA)
  modified_base (29)..(29): bicyclic nucleic acid (BNA)
  source: /note="3' tri-ethylene glycol (TEG)"
ctccaacaucaaggaagauggcauuucta

SEQ ID NO: 12166 - DNA, 28 bp, Artificial Sequence
  source: /note="Description of Artificial Sequence: Synthetic oligonucleotide"
  source: /note="Description of Combined DNA/RNA Molecule: Synthetic oligonucleotide"
  source: /note="DNA/RNA"
  modified_base (1)..(1): bicyclic nucleic acid (BNA)
  modified_base (2)..(2): bicyclic nucleic acid (BNA)
  modified_base (27)..(27): bicyclic nucleic acid (BNA)
  modified_base (28)..(28): bicyclic nucleic acid (BNA)
  source: /note="3' tri-ethylene glycol (TEG)"
ctccaacaucaaggaagauggcauuuct

SEQ ID NO: 12167 - DNA, 27 bp, Artificial Sequence
  source: /note="Description of Artificial Sequence: Synthetic oligonucleotide"
  source: /note="Description of Combined DNA/RNA Molecule: Synthetic oligonucleotide"
  source: /note="DNA/RNA"
  modified_base (1)..(1): bicyclic nucleic acid (BNA)
  modified_base (2)..(2): bicyclic nucleic acid (BNA)
  modified_base (26)..(26): bicyclic nucleic acid (BNA)
  modified_base (27)..(27): bicyclic nucleic acid (BNA)
  source: /note="3' tri-ethylene glycol (TEG)"
ctccaacaucaaggaagauggcauutc

SEQ ID NO: 12168 - DNA, 26 bp, Artificial Sequence
  source: /note="Description of Artificial Sequence: Synthetic oligonucleotide"
  source: /note="Description of Combined DNA/RNA Molecule: Synthetic oligonucleotide"
  source: /note="DNA/RNA"
  modified_base (1)..(1): bicyclic nucleic acid (BNA)
  modified_base (2)..(2): bicyclic nucleic acid (BNA)
  modified_base (25)..(25): bicyclic nucleic acid (BNA)
  modified_base (26)..(26): bicyclic nucleic acid (BNA)
  source: /note="3' tri-ethylene glycol (TEG)"
ctccaacaucaaggaagauggcautt

SEQ ID NO: 12169 - DNA, 25 bp, Artificial Sequence
  source: /note="Description of Artificial Sequence: Synthetic oligonucleotide"
  source: /note="Description of Combined DNA/RNA Molecule: Synthetic oligonucleotide"
  source: /note="DNA/RNA"
  modified_base (1)..(1): bicyclic nucleic acid (BNA)
  modified_base (2)..(2): bicyclic nucleic acid (BNA)
  modified_base (24)..(24): bicyclic nucleic acid (BNA)
  modified_base (25)..(25): bicyclic nucleic acid (BNA)
  source: /note="3' tri-ethylene glycol (TEG)"
ctccaacaucaaggaagauggcatt

SEQ ID NO: 12170 - DNA, 24 bp, Artificial Sequence
  source: /note="Description of Artificial Sequence: Synthetic oligonucleotide"
  source: /note="Description of Combined DNA/RNA Molecule: Synthetic oligonucleotide"
  source: /note="DNA/RNA"
  modified_base (1)..(1): bicyclic nucleic acid (BNA)
  modified_base (2)..(2): bicyclic nucleic acid (BNA)
  modified_base (23)..(23): bicyclic nucleic acid (BNA)
  modified_base (24)..(24): bicyclic nucleic acid (BNA)
  source: /note="3' tri-ethylene glycol (TEG)"
ctccaacaucaaggaagauggcat

SEQ ID NO: 12171 - DNA, 23 bp, Artificial Sequence
  source: /note="Description of Artificial Sequence: Synthetic oligonucleotide"
  source: /note="Description of Combined DNA/RNA Molecule: Synthetic oligonucleotide"
  source: /note="DNA/RNA"
  modified_base (1)..(1): bicyclic nucleic acid (BNA)
  modified_base (2)..(2): bicyclic nucleic acid (BNA)
  modified_base (22)..(22): bicyclic nucleic acid (BNA)
  modified_base (23)..(23): bicyclic nucleic acid (BNA)
  source: /note="3' tri-ethylene glycol (TEG)"
ctccaacaucaaggaagauggca

SEQ ID NO: 12172 - DNA, 22 bp, Artificial Sequence
  source: /note="Description of Artificial Sequence: Synthetic oligonucleotide"
  source: /note="Description of Combined DNA/RNA Molecule: Synthetic oligonucleotide"
  source: /note="DNA/RNA"
  modified_base (1)..(1): bicyclic nucleic acid (BNA)
  modified_base (2)..(2): bicyclic nucleic acid (BNA)
  modified_base (21)..(21): bicyclic nucleic acid (BNA)
  modified_base (22)..(22): bicyclic nucleic acid (BNA)
  source: /note="3' tri-ethylene glycol (TEG)"
ctccaacaucaaggaagauggc

SEQ ID NO: 12173 - DNA, 21 bp, Artificial Sequence
  source: /note="Description of Artificial Sequence: Synthetic oligonucleotide"
  source: /note="Description of Combined DNA/RNA Molecule: Synthetic oligonucleotide"
  source: /note="DNA/RNA"
  modified_base (1)..(1): bicyclic nucleic acid (BNA)
  modified_base (2)..(2): bicyclic nucleic acid (BNA)
  modified_base (20)..(20): bicyclic nucleic acid (BNA)
  modified_base (21)..(21): bicyclic nucleic acid (BNA)
  source: /note="3' tri-ethylene glycol (TEG)"
ctccaacaucaaggaagaugg

SEQ ID NO: 12174 - DNA, 20 bp, Artificial Sequence
  source: /note="Description of Artificial Sequence: Synthetic oligonucleotide"
  source: /note="Description of Combined DNA/RNA Molecule: Synthetic oligonucleotide"
  source: /note="DNA/RNA"
  modified_base (1)..(1): bicyclic nucleic acid (BNA)
  modified_base (2)..(2): bicyclic nucleic acid (BNA)
  modified_base (19)..(19): bicyclic nucleic acid (BNA)
  modified_base (20)..(20): bicyclic nucleic acid (BNA)
  source: /note="3' tri-ethylene glycol (TEG)"
ctccaacaucaaggaagatg

SEQ ID NO: 12175 - DNA, 19 bp, Artificial Sequence
  source: /note="Description of Artificial Sequence: Synthetic oligonucleotide"
  source: /note="Description of Combined DNA/RNA Molecule: Synthetic oligonucleotide"
  source: /note="DNA/RNA"
  modified_base (1)..(1): bicyclic nucleic acid (BNA)
  modified_base (2)..(2): bicyclic nucleic acid (BNA)
  modified_base (18)..(18): bicyclic nucleic acid (BNA)
  modified_base (19)..(19): bicyclic nucleic acid (BNA)
  source: /note="3' tri-ethylene glycol (TEG)"
ctccaacaucaaggaagat

SEQ ID NO: 12176 - DNA, 18 bp, Artificial Sequence
  source: /note="Description of Artificial Sequence: Synthetic oligonucleotide"
  source: /note="Description of Combined DNA/RNA Molecule: Synthetic oligonucleotide"
  source: /note="DNA/RNA"
  modified_base (1)..(1): bicyclic nucleic acid (BNA)
  modified_base (2)..(2): bicyclic nucleic acid (BNA)
  modified_base (17)..(17): bicyclic nucleic acid (BNA)
  modified_base (18)..(18): bicyclic nucleic acid (BNA)
  source: /note="3' tri-ethylene glycol (TEG)"
ctccaacaucaaggaaga

SEQ ID NO: 12177 - DNA, 17 bp, Artificial Sequence
  source: /note="Description of Artificial Sequence: Synthetic oligonucleotide"
  source: /note="Description of Combined DNA/RNA Molecule: Synthetic oligonucleotide"
  source: /note="DNA/RNA"
  modified_base (1)..(1): bicyclic nucleic acid (BNA)
  modified_base (2)..(2): bicyclic nucleic acid (BNA)
  modified_base (16)..(16): bicyclic nucleic acid (BNA)
  modified_base (17)..(17): bicyclic nucleic acid (BNA)
  source: /note="3' tri-ethylene glycol (TEG)"
ctccaacaucaaggaag

SEQ ID NO: 12178 - DNA, 29 bp, Artificial Sequence
  source: /note="Description of Artificial Sequence: Synthetic oligonucleotide"
  source: /note="Description of Combined DNA/RNA Molecule: Synthetic oligonucleotide"
  source: /note="DNA/RNA"
  modified_base (1)..(1): bicyclic nucleic acid (BNA)
  modified_base (2)..(2): bicyclic nucleic acid (BNA)
  modified_base (28)..(28): bicyclic nucleic acid (BNA)
  modified_base (29)..(29): bicyclic nucleic acid (BNA)
  source: /note="3' tri-ethylene glycol (TEG)"
tccaacaucaaggaagauggcauuucuag

SEQ ID NO: 12179 - DNA, 28 bp, Artificial Sequence
  source: /note="Description of Artificial Sequence: Synthetic oligonucleotide"
  source: /note="Description of Combined DNA/RNA Molecule: Synthetic oligonucleotide"
  source: /note="DNA/RNA"
  modified_base (1)..(1): bicyclic nucleic acid (BNA)
  modified_base (2)..(2): bicyclic nucleic acid (BNA)
  modified_base (27)..(27): bicyclic nucleic acid (BNA)
  modified_base (28)..(28): bicyclic nucleic acid (BNA)
  source: /note="3' tri-ethylene glycol (TEG)"
tccaacaucaaggaagauggcauuucta

SEQ ID NO: 12180 - DNA, 27 bp, Artificial Sequence
  source: /note="Description of Artificial Sequence: Synthetic oligonucleotide"
  source: /note="Description of Combined DNA/RNA Molecule: Synthetic oligonucleotide"
  source: /note="DNA/RNA"
  modified_base (1)..(1): bicyclic nucleic acid (BNA)
  modified_base (2)..(2): bicyclic nucleic acid (BNA)
  modified_base (26)..(26): bicyclic nucleic acid (BNA)
  modified_base (27)..(27): bicyclic nucleic acid (BNA)
  source: /note="3' tri-ethylene glycol (TEG)"
tccaacaucaaggaagauggcauuuct

SEQ ID NO: 12181 - DNA, 26 bp, Artificial Sequence
  source: /note="Description of Artificial Sequence: Synthetic oligonucleotide"
  source: /note="Description of Combined DNA/RNA Molecule: Synthetic oligonucleotide"
  source: /note="DNA/RNA"
  modified_base (1)..(1): bicyclic nucleic acid (BNA)
  modified_base (2)..(2): bicyclic nucleic acid (BNA)
  modified_base (25)..(25): bicyclic nucleic acid (BNA)
  modified_base (26)..(26): bicyclic nucleic acid (BNA)
  source: /note="3' tri-ethylene glycol (TEG)"
tccaacaucaaggaagauggcauutc

SEQ ID NO: 12182 - DNA, 25 bp, Artificial Sequence
  source: /note="Description of Artificial Sequence: Synthetic oligonucleotide"
  source: /note="Description of Combined DNA/RNA Molecule: Synthetic oligonucleotide"
  source: /note="DNA/RNA"
  modified_base (1)..(1): bicyclic nucleic acid (BNA)
  modified_base (2)..(2): bicyclic nucleic acid (BNA)
  modified_base (24)..(24): bicyclic nucleic acid (BNA)
  modified_base (25)..(25): bicyclic nucleic acid (BNA)
  source: /note="3' tri-ethylene glycol (TEG)"
tccaacaucaaggaagauggcautt

SEQ ID NO: 12183 - DNA, 24 bp, Artificial Sequence
  source: /note="Description of Artificial Sequence: Synthetic oligonucleotide"
  source: /note="Description of Combined DNA/RNA Molecule: Synthetic oligonucleotide"
  source: /note="DNA/RNA"
  modified_base (1)..(1): bicyclic nucleic acid (BNA)
  modified_base (2)..(2): bicyclic nucleic acid (BNA)
  modified_base (23)..(23): bicyclic nucleic acid (BNA)
  modified_base (24)..(24): bicyclic nucleic acid (BNA)
  source: /note="3' tri-ethylene glycol (TEG)"
tccaacaucaaggaagauggcatt

SEQ ID NO: 12184 - DNA, 23 bp, Artificial Sequence
  source: /note="Description of Artificial Sequence: Synthetic oligonucleotide"
  source: /note="Description of Combined DNA/RNA Molecule: Synthetic oligonucleotide"
  source: /note="DNA/RNA"
  modified_base (1)..(1): bicyclic nucleic acid (BNA)
  modified_base (2)..(2): bicyclic nucleic acid (BNA)
  modified_base (22)..(22): bicyclic nucleic acid (BNA)
  modified_base (23)..(23): bicyclic nucleic acid (BNA)
  source: /note="3' tri-ethylene glycol (TEG)"
tccaacaucaaggaagauggcat

SEQ ID NO: 12185 - DNA, 22 bp, Artificial Sequence
  source: /note="Description of Artificial Sequence: Synthetic oligonucleotide"
  source: /note="Description of Combined DNA/RNA Molecule: Synthetic oligonucleotide"
  source: /note="DNA/RNA"
  modified_base (1)..(1): bicyclic nucleic acid (BNA)
  modified_base (2)..(2): bicyclic nucleic acid (BNA)
  modified_base (21)..(21): bicyclic nucleic acid (BNA)
  modified_base (22)..(22): bicyclic nucleic acid (BNA)
  source: /note="3' tri-ethylene glycol (TEG)"
tccaacaucaaggaagauggca

SEQ ID NO: 12186 - DNA, 21 bp, Artificial Sequence
  source: /note="Description of Artificial Sequence: Synthetic oligonucleotide"
  source: /note="Description of Combined DNA/RNA Molecule: Synthetic oligonucleotide"
  source: /note="DNA/RNA"
  modified_base (1)..(1): bicyclic nucleic acid (BNA)
  modified_base (2)..(2): bicyclic nucleic acid (BNA)
  modified_base (20)..(20): bicyclic nucleic acid (BNA)
  modified_base (21)..(21): bicyclic nucleic acid (BNA)
  source: /note="3' tri-ethylene glycol (TEG)"
tccaacaucaaggaagauggc

SEQ ID NO: 12187 - DNA, 20 bp, Artificial Sequence
  source: /note="Description of Artificial Sequence: Synthetic oligonucleotide"
  source: /note="Description of Combined DNA/RNA Molecule: Synthetic oligonucleotide"
  source: /note="DNA/RNA"
  modified_base (1)..(1): bicyclic nucleic acid (BNA)
  modified_base (2)..(2): bicyclic nucleic acid (BNA)
  modified_base (19)..(19): bicyclic nucleic acid (BNA)
  modified_base (20)..(20): bicyclic nucleic acid (BNA)
  source: /note="3' tri-ethylene glycol (TEG)"
tccaacaucaaggaagaugg

SEQ ID NO: 12188 - DNA, 19 bp, Artificial Sequence
  source: /note="Description of Artificial Sequence: Synthetic oligonucleotide"
  source: /note="Description of Combined DNA/RNA Molecule: Synthetic oligonucleotide"
  source: /note="DNA/RNA"
  modified_base (1)..(1): bicyclic nucleic acid (BNA)
  modified_base (2)..(2): bicyclic nucleic acid (BNA)
  modified_base (18)..(18): bicyclic nucleic acid (BNA)
  modified_base (19)..(19): bicyclic nucleic acid (BNA)
  source: /note="3' tri-ethylene glycol (TEG)"
tccaacaucaaggaagatg

SEQ ID NO: 12189 - DNA, 18 bp, Artificial Sequence
  source: /note="Description of Artificial Sequence: Synthetic oligonucleotide"
  source: /note="Description of Combined DNA/RNA Molecule: Synthetic oligonucleotide"
  source: /note="DNA/RNA"
  modified_base (1)..(1): bicyclic nucleic acid (BNA)
  modified_base (2)..(2): bicyclic nucleic acid (BNA)
  modified_base (17)..(17): bicyclic nucleic acid (BNA)
  modified_base (18)..(18): bicyclic nucleic acid (BNA)
  source: /note="3' tri-ethylene glycol (TEG)"
tccaacaucaaggaagat

SEQ ID NO: 12190 - DNA, 17 bp, Artificial Sequence
  source: /note="Description of Artificial Sequence: Synthetic oligonucleotide"
  source: /note="Description of Combined DNA/RNA Molecule: Synthetic oligonucleotide"
  source: /note="DNA/RNA"
  modified_base (1)..(1): bicyclic nucleic acid (BNA)
  modified_base (2)..(2): bicyclic nucleic acid (BNA)
  modified_base (16)..(16): bicyclic nucleic acid (BNA)
  modified_base (17)..(17): bicyclic nucleic acid (BNA)
  source: /note="3' tri-ethylene glycol (TEG)"
tccaacaucaaggaaga

SEQ ID NO: 12191 - DNA, 16 bp, Artificial Sequence
  source: /note="Description of Artificial Sequence: Synthetic oligonucleotide"
  source: /note="Description of Combined DNA/RNA Molecule: Synthetic oligonucleotide"
  source: /note="DNA/RNA"
  modified_base (1)..(1): bicyclic nucleic acid (BNA)
  modified_base (2)..(2): bicyclic nucleic acid (BNA)
  modified_base (15)..(15): bicyclic nucleic acid (BNA)
  modified_base (16)..(16): bicyclic nucleic acid (BNA)
  source: /note="3' tri-ethylene glycol (TEG)"
tccaacaucaaggaag

SEQ ID NO: 12192 - RNA, 28 nt, Artificial Sequence
  source: /note="Description of Artificial Sequence: Synthetic oligonucleotide"
  source: /note="RNA"
  modified_base (1)..(1): bicyclic nucleic acid (BNA)
  modified_base (2)..(2): bicyclic nucleic acid (BNA)
  modified_base (27)..(27): bicyclic nucleic acid (BNA)
  modified_base (28)..(28): bicyclic nucleic acid (BNA)
  source: /note="3' tri-ethylene glycol (TEG)"
ccaacaucaaggaagauggcauuucuag

SEQ ID NO: 12193 - DNA, 27 bp, Artificial Sequence
  source: /note="Description of Artificial Sequence: Synthetic oligonucleotide"
  source: /note="Description of Combined DNA/RNA Molecule: Synthetic oligonucleotide"
  source: /note="DNA/RNA"
  modified_base (1)..(1): bicyclic nucleic acid (BNA)
  modified_base (2)..(2): bicyclic nucleic acid (BNA)
  modified_base (26)..(26): bicyclic nucleic acid (BNA)
  modified_base (27)..(27): bicyclic nucleic acid (BNA)
  source: /note="3' tri-ethylene glycol (TEG)"
ccaacaucaaggaagauggcauuucta

SEQ ID NO: 12194 - DNA, 26 bp, Artificial Sequence
  source: /note="Description of Artificial Sequence: Synthetic oligonucleotide"
  source: /note="Description of Combined DNA/RNA Molecule: Synthetic oligonucleotide"
  source: /note="DNA/RNA"
  modified_base (1)..(1): bicyclic nucleic acid (BNA)
  modified_base (2)..(2): bicyclic nucleic acid (BNA)
  modified_base (25)..(25): bicyclic nucleic acid (BNA)
  modified_base (26)..(26): bicyclic nucleic acid (BNA)
  source: /note="3' tri-ethylene glycol (TEG)"
ccaacaucaaggaagauggcauuuct

SEQ ID NO: 12195 - DNA, 25 bp, Artificial Sequence
  source: /note="Description of Artificial Sequence: Synthetic oligonucleotide"
  source: /note="Description of Combined DNA/RNA Molecule: Synthetic oligonucleotide"
  source: /note="DNA/RNA"
  modified_base (1)..(1): bicyclic nucleic acid (BNA)
  modified_base (2)..(2): bicyclic nucleic acid (BNA)
  modified_base (24)..(24): bicyclic nucleic acid (BNA)
  modified_base (25)..(25): bicyclic nucleic acid (BNA)
  source: /note="3' tri-ethylene glycol (TEG)"
ccaacaucaaggaagauggcauutc

SEQ ID NO: 12196 - DNA, 24 bp, Artificial Sequence
  source: /note="Description of Artificial Sequence: Synthetic oligonucleotide"
  source: /note="Description of Combined DNA/RNA Molecule: Synthetic oligonucleotide"
  source: /note="DNA/RNA"
  modified_base (1)..(1): bicyclic nucleic acid (BNA)
  modified_base (2)..(2): bicyclic nucleic acid (BNA)
  modified_base (23)..(23): bicyclic nucleic acid (BNA)
  modified_base (24)..(24): bicyclic nucleic acid (BNA)
  source: /note="3' tri-ethylene glycol (TEG)"
ccaacaucaaggaagauggcautt

SEQ ID NO: 12197 - DNA, 23 bp, Artificial Sequence
  source: /note="Description of Artificial Sequence: Synthetic oligonucleotide"
  source: /note="Description of Combined DNA/RNA Molecule: Synthetic oligonucleotide"
  source: /note="DNA/RNA"
  modified_base (1)..(1): bicyclic nucleic acid (BNA)
  modified_base (2)..(2): bicyclic nucleic acid (BNA)
  modified_base (22)..(22): bicyclic nucleic acid (BNA)
  modified_base (23)..(23): bicyclic nucleic acid (BNA)
  source: /note="3' tri-ethylene glycol (TEG)"
ccaacaucaaggaagauggcatt

SEQ ID NO: 12198 - DNA, 22 bp, Artificial Sequence
  source: /note="Description of Artificial Sequence: Synthetic oligonucleotide"
  source: /note="Description of Combined DNA/RNA Molecule: Synthetic oligonucleotide"
  source: /note="DNA/RNA"
  modified_base (1)..(1): bicyclic nucleic acid (BNA)
  modified_base (2)..(2): bicyclic nucleic acid (BNA)
  modified_base (21)..(21): bicyclic nucleic acid (BNA)
  modified_base (22)..(22): bicyclic nucleic acid (BNA)
  source: /note="3' tri-ethylene glycol (TEG)"
ccaacaucaaggaagauggcat

SEQ ID NO: 12199 - RNA, 21 nt, Artificial Sequence
  source: /note="Description of Artificial Sequence: Synthetic oligonucleotide"
  source: /note="RNA"
  modified_base (1)..(1): bicyclic nucleic acid (BNA)
  modified_base (2)..(2): bicyclic nucleic acid (BNA)
  modified_base (20)..(20): bicyclic nucleic acid (BNA)
  modified_base (21)..(21): bicyclic nucleic acid (BNA)
  source: /note="3' tri-ethylene glycol (TEG)"
ccaacaucaaggaagauggca

SEQ ID NO: 12200 - RNA, 20 nt, Artificial Sequence
  source: /note="Description of Artificial Sequence: Synthetic oligonucleotide"
  source: /note="RNA"
  modified_base (1)..(1): bicyclic nucleic acid (BNA)
  modified_base (2)..(2): bicyclic nucleic acid (BNA)
  modified_base (19)..(19): bicyclic nucleic acid (BNA)
  modified_base (20)..(20): bicyclic nucleic acid (BNA)
  source: /note="3' tri-ethylene glycol (TEG)"
ccaacaucaaggaagauggc

SEQ ID NO: 12201 - RNA, 19 nt, Artificial Sequence
  source: /note="Description of Artificial Sequence: Synthetic oligonucleotide"
  source: /note="RNA"
  modified_base (1)..(1): bicyclic nucleic acid (BNA)
  modified_base (2)..(2): bicyclic nucleic acid (BNA)
  modified_base (18)..(18): bicyclic nucleic acid (BNA)
  modified_base (19)..(19): bicyclic nucleic acid (BNA)
  source: /note="3' tri-ethylene glycol (TEG)"
ccaacaucaaggaagaugg

SEQ ID NO: 12202 - DNA, 18 bp, Artificial Sequence
  source: /note="Description of Artificial Sequence: Synthetic oligonucleotide"
  source: /note="Description of Combined DNA/RNA Molecule: Synthetic oligonucleotide"
  source: /note="DNA/RNA"
  modified_base (1)..(1): bicyclic nucleic acid (BNA)
  modified_base (2)..(2): bicyclic nucleic acid (BNA)
  modified_base (17)..(17): bicyclic nucleic acid (BNA)
  modified_base (18)..(18): bicyclic nucleic acid (BNA)
  source: /note="3' tri-ethylene glycol (TEG)"
ccaacaucaaggaagatg

SEQ ID NO: 12203 - DNA, 17 bp, Artificial Sequence
  source: /note="Description of Artificial Sequence: Synthetic oligonucleotide"
  source: /note="Description of Combined DNA/RNA Molecule: Synthetic oligonucleotide"
  source: /note="DNA/RNA"
  modified_base (1)..(1): bicyclic nucleic acid (BNA)
  modified_base (2)..(2): bicyclic nucleic acid (BNA)
  modified_base (16)..(16): bicyclic nucleic acid (BNA)
  modified_base (17)..(17): bicyclic nucleic acid (BNA)
  source: /note="3' tri-ethylene glycol (TEG)"
ccaacaucaaggaagat

SEQ ID NO: 12204 - RNA, 16 nt, Artificial Sequence
  source: /note="Description of Artificial Sequence: Synthetic oligonucleotide"
  source: /note="RNA"
  modified_base (1)..(1): bicyclic nucleic acid (BNA)
  modified_base (2)..(2): bicyclic nucleic acid (BNA)
  modified_base (15)..(15): bicyclic nucleic acid (BNA)
  modified_base (16)..(16): bicyclic nucleic acid (BNA)
  source: /note="3' tri-ethylene glycol (TEG)"
ccaacaucaaggaaga

SEQ ID NO: 12205 - RNA, 15 nt, Artificial Sequence
  source: /note="Description of Artificial Sequence: Synthetic oligonucleotide"
  source: /note="RNA"
  modified_base (1)..(1): bicyclic nucleic acid (BNA)
  modified_base (2)..(2): bicyclic nucleic acid (BNA)
  modified_base (14)..(14): bicyclic nucleic acid (BNA)
  modified_base (15)..(15): bicyclic nucleic acid (BNA)
  source: /note="3' tri-ethylene glycol (TEG)"
ccaacaucaaggaag

SEQ ID NO: 12206 - RNA, 27 nt, Artificial Sequence
  source: /note="Description of Artificial Sequence: Synthetic oligonucleotide"
  source: /note="RNA"
  modified_base (1)..(1): bicyclic nucleic acid (BNA)
  modified_base (2)..(2): bicyclic nucleic acid (BNA)
  modified_base (26)..(26): bicyclic nucleic acid (BNA)
  modified_base (27)..(27): bicyclic nucleic acid (BNA)
  source: /note="3' tri-ethylene glycol (TEG)"
caacaucaaggaagauggcauuucuag

SEQ ID NO: 12207 - DNA, 26 bp, Artificial Sequence
  source: /note="Description of Artificial Sequence: Synthetic oligonucleotide"
  source: /note="Description of Combined DNA/RNA Molecule: Synthetic oligonucleotide"
  source: /note="DNA/RNA"
  modified_base (1)..(1): bicyclic nucleic acid (BNA)
  modified_base (2)..(2): bicyclic nucleic acid (BNA)
  modified_base (25)..(25): bicyclic nucleic acid (BNA)
  modified_base (26)..(26): bicyclic nucleic acid (BNA)
  source: /note="3' tri-ethylene glycol (TEG)"
caacaucaaggaagauggcauuucta

SEQ ID NO: 12208 - DNA, 25 bp, Artificial Sequence
  source: /note="Description of Artificial Sequence: Synthetic oligonucleotide"
  source: /note="Description of Combined DNA/RNA Molecule: Synthetic oligonucleotide"
  source: /note="DNA/RNA"
  modified_base (1)..(1): bicyclic nucleic acid (BNA)
  modified_base (2)..(2): bicyclic nucleic acid (BNA)
  modified_base (24)..(24): bicyclic nucleic acid (BNA)
  modified_base (25)..(25): bicyclic nucleic acid (BNA)
  source: /note="3' tri-ethylene glycol (TEG)"
caacaucaaggaagauggcauuuct

SEQ ID NO: 12209 - DNA, 24 bp, Artificial Sequence
  source: /note="Description of Artificial Sequence: Synthetic oligonucleotide"
  source: /note="Description of Combined DNA/RNA Molecule: Synthetic oligonucleotide"
  source: /note="DNA/RNA"
  modified_base (1)..(1): bicyclic nucleic acid (BNA)
  modified_base (2)..(2): bicyclic nucleic acid (BNA)
  modified_base (23)..(23): bicyclic nucleic acid (BNA)
  modified_base (24)..(24): bicyclic nucleic acid (BNA)
  source: /note="3' tri-ethylene glycol (TEG)"
caacaucaaggaagauggcauutc

SEQ ID NO: 12210 - DNA, 23 bp, Artificial Sequence
  source: /note="Description of Artificial Sequence: Synthetic oligonucleotide"
  source: /note="Description of Combined DNA/RNA Molecule: Synthetic oligonucleotide"
  source: /note="DNA/RNA"
  modified_base (1)..(1): bicyclic nucleic acid (BNA)
  modified_base (2)..(2): bicyclic nucleic acid (BNA)
  modified_base (22)..(22): bicyclic nucleic acid (BNA)
  modified_base (23)..(23): bicyclic nucleic acid (BNA)
  source: /note="3' tri-ethylene glycol (TEG)"
caacaucaaggaagauggcautt

SEQ ID NO: 12211 - DNA, 22 bp, Artificial Sequence
  source: /note="Description of Artificial Sequence: Synthetic oligonucleotide"
  source: /note="Description of Combined DNA/RNA Molecule: Synthetic oligonucleotide"
  source: /note="DNA/RNA"
  modified_base (1)..(1): bicyclic nucleic acid (BNA)
  modified_base (2)..(2): bicyclic nucleic acid (BNA)
  modified_base (21)..(21): bicyclic nucleic acid (BNA)
  modified_base (22)..(22): bicyclic nucleic acid (BNA)
  source: /note="3' tri-ethylene glycol (TEG)"
caacaucaaggaagauggcatt

SEQ ID NO: 12212 - DNA, 21 bp, Artificial Sequence
  source: /note="Description of Artificial Sequence: Synthetic oligonucleotide"
  source: /note="Description of Combined DNA/RNA Molecule: Synthetic oligonucleotide"
  source: /note="DNA/RNA"
  modified_base (1)..(1): bicyclic nucleic acid (BNA)
  modified_base (2)..(2): bicyclic nucleic acid (BNA)
  modified_base (20)..(20): bicyclic nucleic acid (BNA)
  modified_base (21)..(21): bicyclic nucleic acid (BNA)
  source: /note="3' tri-ethylene glycol (TEG)"
caacaucaaggaagauggcat

SEQ ID NO: 12213 - RNA, 20 nt, Artificial Sequence
  source: /note="Description of Artificial Sequence: Synthetic oligonucleotide"
  source: /note="RNA"
  modified_base (1)..(1): bicyclic nucleic acid (BNA)
  modified_base (2)..(2): bicyclic nucleic acid (BNA)
  modified_base (19)..(19): bicyclic nucleic acid (BNA)
  modified_base (20)..(20): bicyclic nucleic acid (BNA)
  source: /note="3' tri-ethylene glycol (TEG)"
caacaucaaggaagauggca

SEQ ID NO: 12214 - RNA, 19 nt, Artificial Sequence
  source: /note="Description of Artificial Sequence: Synthetic oligonucleotide"
  source: /note="RNA"
  modified_base (1)..(1): bicyclic nucleic acid (BNA)
  modified_base (2)..(2): bicyclic nucleic acid (BNA)
  modified_base (18)..(18): bicyclic nucleic acid (BNA)
  modified_base (19)..(19): bicyclic nucleic acid (BNA)
  source: /note="3' tri-ethylene glycol (TEG)"
caacaucaaggaagauggc

SEQ ID NO: 12215 - RNA, 18 nt, Artificial Sequence
  source: /note="Description of Artificial Sequence: Synthetic oligonucleotide"
  source: /note="RNA"
  modified_base (1)..(1): bicyclic nucleic acid (BNA)
  modified_base (2)..(2): bicyclic nucleic acid (BNA)
  modified_base (17)..(17): bicyclic nucleic acid (BNA)
  modified_base (18)..(18): bicyclic nucleic acid (BNA)
  source: /note="3' tri-ethylene glycol (TEG)"
caacaucaaggaagaugg

SEQ ID NO: 12216 - DNA, 17 bp, Artificial Sequence
  source: /note="Description of Artificial Sequence: Synthetic oligonucleotide"
  source: /note="Description of Combined DNA/RNA Molecule: Synthetic oligonucleotide"
  source: /note="DNA/RNA"
  modified_base (1)..(1): bicyclic nucleic acid (BNA)
  modified_base (2)..(2): bicyclic nucleic acid (BNA)
  modified_base (16)..(16): bicyclic nucleic acid (BNA)
  modified_base (17)..(17): bicyclic nucleic acid (BNA)
  source: /note="3' tri-ethylene glycol (TEG)"
caacaucaaggaagatg

SEQ ID NO: 12217 - DNA, 16 bp, Artificial Sequence
  source: /note="Description of Artificial Sequence: Synthetic oligonucleotide"
  source: /note="Description of Combined DNA/RNA Molecule: Synthetic oligonucleotide"
  source: /note="DNA/RNA"
  modified_base (1)..(1): bicyclic nucleic acid (BNA)
  modified_base (2)..(2): bicyclic nucleic acid (BNA)
  modified_base (15)..(15): bicyclic nucleic acid (BNA)
  modified_base (16)..(16): bicyclic nucleic acid (BNA)
  source: /note="3' tri-ethylene glycol (TEG)"
caacaucaaggaagat

SEQ ID NO: 12218 - RNA, 15 nt, Artificial Sequence
  source: /note="Description of Artificial Sequence: Synthetic oligonucleotide"
  source: /note="RNA"
  modified_base (1)..(1): bicyclic nucleic acid (BNA)
  modified_base (2)..(2): bicyclic nucleic acid (BNA)
  modified_base (14)..(14): bicyclic nucleic acid (BNA)
  modified_base (15)..(15): bicyclic nucleic acid (BNA)
  source: /note="3' tri-ethylene glycol (TEG)"
caacaucaaggaaga

SEQ ID NO: 12219 - RNA, 14 nt, Artificial Sequence
  source: /note="Description of Artificial Sequence: Synthetic oligonucleotide"
  source: /note="RNA"
  modified_base (1)..(1): bicyclic nucleic acid (BNA)
  modified_base (2)..(2): bicyclic nucleic acid (BNA)
  modified_base (13)..(13): bicyclic nucleic acid (BNA)
  modified_base (14)..(14): bicyclic nucleic acid (BNA)
  source: /note="3' tri-ethylene glycol (TEG)"
caacaucaaggaag

SEQ ID NO: 12220 - RNA, 26 nt, Artificial Sequence
  source: /note="Description of Artificial Sequence: Synthetic oligonucleotide"
  source: /note="RNA"
  modified_base (1)..(1): bicyclic nucleic acid (BNA)
  modified_base (2)..(2): bicyclic nucleic acid (BNA)
  modified_base (25)..(25): bicyclic nucleic acid (BNA)
  modified_base (26)..(26): bicyclic nucleic acid (BNA)
  source: /note="3' tri-ethylene glycol (TEG)"
aacaucaaggaagauggcauuucuag

SEQ ID NO: 12221 - DNA, 25 bp, Artificial Sequence
  source: /note="Description of Artificial Sequence: Synthetic oligonucleotide"
  source: /note="Description of Combined DNA/RNA Molecule: Synthetic oligonucleotide"
  source: /note="DNA/RNA"
  modified_base (1)..(1): bicyclic nucleic acid (BNA)
  modified_base (2)..(2): bicyclic nucleic acid (BNA)
  modified_base (24)..(24): bicyclic nucleic acid (BNA)
  modified_base (25)..(25): bicyclic nucleic acid (BNA)
  source: /note="3' tri-ethylene glycol (TEG)"
aacaucaaggaagauggcauuucta

SEQ ID NO: 12222 - DNA, 24 bp, Artificial Sequence
  source: /note="Description of Artificial Sequence: Synthetic oligonucleotide"
  source: /note="Description of Combined DNA/RNA Molecule: Synthetic oligonucleotide"
  source: /note="DNA/RNA"
  modified_base (1)..(1): bicyclic nucleic acid (BNA)
  modified_base (2)..(2): bicyclic nucleic acid (BNA)
  modified_base (23)..(23): bicyclic nucleic acid (BNA)
  modified_base (24)..(24): bicyclic nucleic acid (BNA)
  source: /note="3' tri-ethylene glycol (TEG)"
aacaucaaggaagauggcauuuct

SEQ ID NO: 12223 - DNA, 23 bp, Artificial Sequence
  source: /note="Description of Artificial Sequence: Synthetic oligonucleotide"
  source: /note="Description of Combined DNA/RNA Molecule: Synthetic oligonucleotide"
  source: /note="DNA/RNA"
  modified_base (1)..(1): bicyclic nucleic acid (BNA)
  modified_base (2)..(2): bicyclic nucleic acid (BNA)
  modified_base (22)..(22): bicyclic nucleic acid (BNA)
  modified_base (23)..(23): bicyclic nucleic acid (BNA)
  source: /note="3' tri-ethylene glycol (TEG)"
aacaucaaggaagauggcauutc

SEQ ID NO: 12224 - DNA, 22 bp, Artificial Sequence
  source: /note="Description of Artificial Sequence: Synthetic oligonucleotide"
  source: /note="Description of Combined DNA/RNA Molecule: Synthetic oligonucleotide"
  source: /note="DNA/RNA"
  modified_base (1)..(1): bicyclic nucleic acid (BNA)
  modified_base (2)..(2): bicyclic nucleic acid (BNA)
  modified_base (21)..(21): bicyclic nucleic acid (BNA)
  modified_base (22)..(22): bicyclic nucleic acid (BNA)
  source: /note="3' tri-ethylene glycol (TEG)"
aacaucaaggaagauggcautt

SEQ ID NO: 12225 - DNA, 21 bp, Artificial Sequence
  source: /note="Description of Artificial Sequence: Synthetic oligonucleotide"
  source: /note="Description of Combined DNA/RNA Molecule: Synthetic oligonucleotide"
  source: /note="DNA/RNA"
  modified_base (1)..(1): bicyclic nucleic acid (BNA)
  modified_base (2)..(2): bicyclic nucleic acid (BNA)
  modified_base (20)..(20): bicyclic nucleic acid (BNA)
  modified_base (21)..(21): bicyclic nucleic acid (BNA)
  source: /note="3' tri-ethylene glycol (TEG)"
aacaucaaggaagauggcatt

SEQ ID NO: 12226 - DNA, 20 bp, Artificial Sequence
  source: /note="Description of Artificial Sequence: Synthetic oligonucleotide"
  source: /note="Description of Combined DNA/RNA Molecule: Synthetic oligonucleotide"
  source: /note="DNA/RNA"
  modified_base (1)..(1): bicyclic nucleic acid (BNA)
  modified_base (2)..(2): bicyclic nucleic acid (BNA)
  modified_base (19)..(19): bicyclic nucleic acid (BNA)
  modified_base (20)..(20): bicyclic nucleic acid (BNA)
  source: /note="3' tri-ethylene glycol (TEG)"
aacaucaaggaagauggcat

SEQ ID NO: 12227 - RNA, 19 nt, Artificial Sequence
  source: /note="Description of Artificial Sequence: Synthetic oligonucleotide"
  source: /note="RNA"
  modified_base (1)..(1): bicyclic nucleic acid (BNA)
  modified_base (2)..(2): bicyclic nucleic acid (BNA)
  modified_base (18)..(18): bicyclic nucleic acid (BNA)
  modified_base (19)..(19): bicyclic nucleic acid (BNA)
  source: /note="3' tri-ethylene glycol (TEG)"
aacaucaaggaagauggca

SEQ ID NO: 12228 - RNA, 18 nt, Artificial Sequence
  source: /note="Description of Artificial Sequence: Synthetic oligonucleotide"
  source: /note="RNA"
  modified_base (1)..(1): bicyclic nucleic acid (BNA)
  modified_base (2)..(2): bicyclic nucleic acid (BNA)
  modified_base (17)..(17): bicyclic nucleic acid (BNA)
  modified_base (18)..(18): bicyclic nucleic acid (BNA)
  source: /note="3' tri-ethylene glycol (TEG)"
aacaucaaggaagauggc

SEQ ID NO: 12229 - RNA, 17 nt, Artificial Sequence
  source: /note="Description of Artificial Sequence: Synthetic oligonucleotide"
  source: /note="RNA"
  modified_base (1)..(1): bicyclic nucleic acid (BNA)
  modified_base (2)..(2): bicyclic nucleic acid (BNA)
  modified_base (16)..(16): bicyclic nucleic acid (BNA)
  modified_base (17)..(17): bicyclic nucleic acid (BNA)
  source: /note="3' tri-ethylene glycol (TEG)"
aacaucaaggaagaugg

SEQ ID NO: 12230 - DNA, 16 bp, Artificial Sequence
  source: /note="Description of Artificial Sequence: Synthetic oligonucleotide"
  source: /note="Description of Combined DNA/RNA Molecule: Synthetic oligonucleotide"
  source: /note="DNA/RNA"
  modified_base (1)..(1): bicyclic nucleic acid (BNA)
  modified_base (2)..(2): bicyclic nucleic acid (BNA)
  modified_base (15)..(15): bicyclic nucleic acid (BNA)
  modified_base (16)..(16): bicyclic nucleic acid (BNA)
  source: /note="3' tri-ethylene glycol (TEG)"
aacaucaaggaagatg

SEQ ID NO: 12231 - DNA, 15 bp, Artificial Sequence
  source: /note="Description of Artificial Sequence: Synthetic oligonucleotide"
  source: /note="Description of Combined DNA/RNA Molecule: Synthetic oligonucleotide"
  source: /note="DNA/RNA"
  modified_base (1)..(1): bicyclic nucleic acid (BNA)
  modified_base (2)..(2): bicyclic nucleic acid (BNA)
  modified_base (14)..(14): bicyclic nucleic acid (BNA)
  modified_base (15)..(15): bicyclic nucleic acid (BNA)
  source: /note="3' tri-ethylene glycol (TEG)"
aacaucaaggaagat

SEQ ID NO: 12232 - RNA, 14 nt, Artificial Sequence
  source: /note="Description of Artificial Sequence: Synthetic oligonucleotide"
  source: /note="RNA"
  modified_base (1)..(1): bicyclic nucleic acid (BNA)
  modified_base (2)..(2): bicyclic nucleic acid (BNA)
  modified_base (13)..(13): bicyclic nucleic acid (BNA)
  modified_base (14)..(14): bicyclic nucleic acid (BNA)
  source: /note="3' tri-ethylene glycol (TEG)"
aacaucaaggaaga

SEQ ID NO: 12233 - RNA, 13 nt, Artificial Sequence
  source: /note="Description of Artificial Sequence: Synthetic oligonucleotide"
  source: /note="RNA"
  modified_base (1)..(1): bicyclic nucleic acid (BNA)
  modified_base (2)..(2): bicyclic nucleic acid (BNA)
  modified_base (12)..(12): bicyclic nucleic acid (BNA)
  modified_base (13)..(13): bicyclic nucleic acid (BNA)
  source: /note="3' tri-ethylene glycol (TEG)"
aacaucaaggaag

SEQ ID NO: 12234 - RNA, 25 nt, Artificial Sequence
  source: /note="Description of Artificial Sequence: Synthetic oligonucleotide"
  source: /note="RNA"
  modified_base (1)..(1): bicyclic nucleic acid (BNA)
  modified_base (2)..(2): bicyclic nucleic acid (BNA)
  modified_base (24)..(24): bicyclic nucleic acid (BNA)
  modified_base (25)..(25): bicyclic nucleic acid (BNA)
  source: /note="3' tri-ethylene glycol (TEG)"
acaucaaggaagauggcauuucuag

SEQ ID NO: 12235 - DNA, 24 bp, Artificial Sequence
  source: /note="Description of Artificial Sequence: Synthetic oligonucleotide"
  source: /note="Description of Combined DNA/RNA Molecule: Synthetic oligonucleotide"
  source: /note="DNA/RNA"
  modified_base (1)..(1): bicyclic nucleic acid (BNA)
  modified_base (2)..(2): bicyclic nucleic acid (BNA)
  modified_base (23)..(23): bicyclic nucleic acid (BNA)
  modified_base (24)..(24): bicyclic nucleic acid (BNA)
  source: /note="3' tri-ethylene glycol (TEG)"
acaucaaggaagauggcauuucta

SEQ ID NO: 12236 - DNA, 23 bp, Artificial Sequence
  source: /note="Description of Artificial Sequence: Synthetic oligonucleotide"
  source: /note="Description of Combined DNA/RNA Molecule: Synthetic oligonucleotide"
  source: /note="DNA/RNA"
  modified_base (1)..(1): bicyclic nucleic acid (BNA)
  modified_base (2)..(2): bicyclic nucleic acid (BNA)
  modified_base (22)..(22): bicyclic nucleic acid (BNA)
  modified_base (23)..(23): bicyclic nucleic acid (BNA)
  source: /note="3' tri-ethylene glycol (TEG)"
acaucaaggaagauggcauuuct

SEQ ID NO: 12237 - DNA, 22 bp, Artificial Sequence
  source: /note="Description of Artificial Sequence: Synthetic oligonucleotide"
  source: /note="Description of Combined DNA/RNA Molecule: Synthetic oligonucleotide"
  source: /note="DNA/RNA"
  modified_base (1)..(1): bicyclic nucleic acid (BNA)
  modified_base (2)..(2): bicyclic nucleic acid (BNA)
  modified_base (21)..(21): bicyclic nucleic acid (BNA)
  modified_base (22)..(22): bicyclic nucleic acid (BNA)
  source: /note="3' tri-ethylene glycol (TEG)"
acaucaaggaagauggcauutc

SEQ ID NO: 12238 - DNA, 21 bp, Artificial Sequence
  source: /note="Description of Artificial Sequence: Synthetic oligonucleotide"
  source: /note="Description of Combined DNA/RNA Molecule: Synthetic oligonucleotide"
  source: /note="DNA/RNA"
  modified_base (1)..(1): bicyclic nucleic acid (BNA)
  modified_base (2)..(2): bicyclic nucleic acid (BNA)
  modified_base (20)..(20): bicyclic nucleic acid (BNA)
  modified_base (21)..(21): bicyclic nucleic acid (BNA)
  source: /note="3' tri-ethylene glycol (TEG)"
acaucaaggaagauggcautt

SEQ ID NO: 12239 - DNA, 20 bp, Artificial Sequence
  source: /note="Description of Artificial Sequence: Synthetic oligonucleotide"
  source: /note="Description of Combined DNA/RNA Molecule: Synthetic oligonucleotide"
  source: /note="DNA/RNA"
  modified_base (1)..(1): bicyclic nucleic acid (BNA)
  modified_base (2)..(2): bicyclic nucleic acid (BNA)
  modified_base (19)..(19): bicyclic nucleic acid (BNA)
  modified_base (20)..(20): bicyclic nucleic acid (BNA)
  source: /note="3' tri-ethylene glycol (TEG)"
acaucaaggaagauggcatt

SEQ ID NO: 12240 - DNA, 19 bp, Artificial Sequence
  source: /note="Description of Artificial Sequence: Synthetic oligonucleotide"
  source: /note="Description of Combined DNA/RNA Molecule: Synthetic oligonucleotide"
  source: /note="DNA/RNA"
  modified_base (1)..(1): bicyclic nucleic acid (BNA)
  modified_base (2)..(2): bicyclic nucleic acid (BNA)
  modified_base (18)..(18): bicyclic nucleic acid (BNA)
  modified_base (19)..(19): bicyclic nucleic acid (BNA)
  source: /note="3' tri-ethylene glycol (TEG)"
acaucaaggaagauggcat

SEQ ID NO: 12241 - RNA, 18 nt, Artificial Sequence
  source: /note="Description of Artificial Sequence: Synthetic oligonucleotide"
  source: /note="RNA"
  modified_base (1)..(1): bicyclic nucleic acid (BNA)
  modified_base (2)..(2): bicyclic nucleic acid (BNA)
  modified_base (17)..(17): bicyclic nucleic acid (BNA)
  modified_base (18)..(18): bicyclic nucleic acid (BNA)
  source: /note="3' tri-ethylene glycol (TEG)"
acaucaaggaagauggca

SEQ ID NO: 12242 - RNA, 17 nt, Artificial Sequence
  source: /note="Description of Artificial Sequence: Synthetic oligonucleotide"
  source: /note="RNA"
  modified_base (1)..(1): bicyclic nucleic acid (BNA)
  modified_base (2)..(2): bicyclic nucleic acid (BNA)
  modified_base (16)..(16): bicyclic nucleic acid (BNA)
  modified_base (17)..(17): bicyclic nucleic acid (BNA)
  source: /note="3' tri-ethylene glycol (TEG)"
acaucaaggaagauggc

SEQ ID NO: 12243 - RNA, 16 nt, Artificial Sequence
  source: /note="Description of Artificial Sequence: Synthetic oligonucleotide"
  source: /note="RNA"
  modified_base (1)..(1): bicyclic nucleic acid (BNA)
  modified_base (2)..(2): bicyclic nucleic acid (BNA)
  modified_base (15)..(15): bicyclic nucleic acid (BNA)
  modified_base (16)..(16): bicyclic nucleic acid (BNA)
  source: /note="3' tri-ethylene glycol (TEG)"
acaucaaggaagaugg

SEQ ID NO: 12244 - DNA, 15 bp, Artificial Sequence
  source: /note="Description of Artificial Sequence: Synthetic oligonucleotide"
  source: /note="Description of Combined DNA/RNA Molecule: Synthetic oligonucleotide"
  source: /note="DNA/RNA"
  modified_base (1)..(1): bicyclic nucleic acid (BNA)
  modified_base (2)..(2): bicyclic nucleic acid (BNA)
  modified_base (14)..(14): bicyclic nucleic acid (BNA)
  modified_base (15)..(15): bicyclic nucleic acid (BNA)
  source: /note="3' tri-ethylene glycol (TEG)"
acaucaaggaagatg

SEQ ID NO: 12245 - DNA, 14 bp, Artificial Sequence
  source: /note="Description of Artificial Sequence: Synthetic oligonucleotide"
  source: /note="Description of Combined DNA/RNA Molecule: Synthetic oligonucleotide"
  source: /note="DNA/RNA"
  modified_base (1)..(1): bicyclic nucleic acid (BNA)
  modified_base (2)..(2): bicyclic nucleic acid (BNA)
  modified_base (13)..(13): bicyclic nucleic acid (BNA)
  modified_base (14)..(14): bicyclic nucleic acid (BNA)
  source: /note="3' tri-ethylene glycol (TEG)"
acaucaaggaagat

SEQ ID NO: 12246 - RNA, 13 nt, Artificial Sequence
  source: /note="Description of Artificial Sequence: Synthetic oligonucleotide"
  source: /note="RNA"
  modified_base (1)..(1): bicyclic nucleic acid (BNA)
  modified_base (2)..(2): bicyclic nucleic acid (BNA)
  modified_base (12)..(12): bicyclic nucleic acid (BNA)
  modified_base (13)..(13): bicyclic nucleic acid (BNA)
  source: /note="3' tri-ethylene glycol (TEG)"
acaucaaggaaga

SEQ ID NO: 12247 - RNA, 12 nt, Artificial Sequence
  source: /note="Description of Artificial Sequence: Synthetic oligonucleotide"
  source: /note="RNA"
  modified_base (1)..(1): bicyclic nucleic acid (BNA)
  modified_base (2)..(2): bicyclic nucleic acid (BNA)
  modified_base (11)..(11): bicyclic nucleic acid (BNA)
  modified_base (12)..(12): bicyclic nucleic acid (BNA)
  source: /note="3' tri-ethylene glycol (TEG)"
acaucaaggaag

SEQ ID NO: 12248 - RNA, 24 nt, Artificial Sequence
  source: /note="Description of Artificial Sequence: Synthetic oligonucleotide"
  source: /note="RNA"
  modified_base (1)..(1): bicyclic nucleic acid (BNA)
  modified_base (2)..(2): bicyclic nucleic acid (BNA)
  modified_base (23)..(23): bicyclic nucleic acid (BNA)
  modified_base (24)..(24): bicyclic nucleic acid (BNA)
  source: /note="3' tri-ethylene glycol (TEG)"
caucaaggaagauggcauuucuag

SEQ ID NO: 12249 - DNA, 23 bp, Artificial Sequence
  source: /note="Description of Artificial Sequence: Synthetic oligonucleotide"
  source: /note="Description of Combined DNA/RNA Molecule: Synthetic oligonucleotide"
  source: /note="DNA/RNA"
  modified_base (1)..(1): bicyclic nucleic acid (BNA)
  modified_base (2)..(2): bicyclic nucleic acid (BNA)
  modified_base (22)..(22): bicyclic nucleic acid (BNA)
  modified_base (23)..(23): bicyclic nucleic acid (BNA)
  source: /note="3' tri-ethylene glycol (TEG)"
caucaaggaagauggcauuucta

SEQ ID NO: 12250 - DNA, 22 bp, Artificial Sequence
  source: /note="Description of Artificial Sequence: Synthetic oligonucleotide"
  source: /note="Description of Combined DNA/RNA Molecule: Synthetic oligonucleotide"
  source: /note="DNA/RNA"
  modified_base (1)..(1): bicyclic nucleic acid (BNA)
  modified_base (2)..(2): bicyclic nucleic acid (BNA)
  modified_base (21)..(21): bicyclic nucleic acid (BNA)
  modified_base (22)..(22): bicyclic nucleic acid (BNA)
  source: /note="3' tri-ethylene glycol (TEG)"
caucaaggaagauggcauuuct

SEQ ID NO: 12251 - DNA, 21 bp, Artificial Sequence
  source: /note="Description of Artificial Sequence: Synthetic oligonucleotide"
  source: /note="Description of Combined DNA/RNA Molecule: Synthetic oligonucleotide"
  source: /note="DNA/RNA"
  modified_base (1)..(1): bicyclic nucleic acid (BNA)
  modified_base (2)..(2): bicyclic nucleic acid (BNA)
  modified_base (20)..(20): bicyclic nucleic acid (BNA)
  modified_base (21)..(21): bicyclic nucleic acid (BNA)
  source: /note="3' tri-ethylene glycol (TEG)"
caucaaggaagauggcauutc

SEQ ID NO: 12252 - DNA, 20 bp, Artificial Sequence
  source: /note="Description of Artificial Sequence: Synthetic oligonucleotide"
  source: /note="Description of Combined DNA/RNA Molecule: Synthetic oligonucleotide"
  source: /note="DNA/RNA"
  modified_base (1)..(1): bicyclic nucleic acid (BNA)
  modified_base (2)..(2): bicyclic nucleic acid (BNA)
  modified_base (19)..(19): bicyclic nucleic acid (BNA)
  modified_base (20)..(20): bicyclic nucleic acid (BNA)
  source: /note="3' tri-ethylene glycol (TEG)"
caucaaggaagauggcautt

SEQ ID NO: 12253 - DNA, 19 bp, Artificial Sequence
  source: /note="Description of Artificial Sequence: Synthetic oligonucleotide"
  source: /note="Description of Combined DNA/RNA Molecule: Synthetic oligonucleotide"
  source: /note="DNA/RNA"
  modified_base (1)..(1): bicyclic nucleic acid (BNA)
  modified_base (2)..(2): bicyclic nucleic acid (BNA)
  modified_base (18)..(18): bicyclic nucleic acid (BNA)
  modified_base (19)..(19): bicyclic nucleic acid (BNA)
  source: /note="3' tri-ethylene glycol (TEG)"
caucaaggaagauggcatt

SEQ ID NO: 12254 - DNA, 18 bp, Artificial Sequence
  source: /note="Description of Artificial Sequence: Synthetic oligonucleotide"
  source: /note="Description of Combined DNA/RNA Molecule: Synthetic oligonucleotide"
  source: /note="DNA/RNA"
  modified_base (1)..(1): bicyclic nucleic acid (BNA)
  modified_base (2)..(2): bicyclic nucleic acid (BNA)
  modified_base (17)..(17): bicyclic nucleic acid (BNA)
  modified_base (18)..(18): bicyclic nucleic acid (BNA)
  source: /note="3' tri-ethylene glycol (TEG)"
caucaaggaagauggcat

SEQ ID NO: 12255 - RNA, 17 nt, Artificial Sequence
  source: /note="Description of Artificial Sequence: Synthetic oligonucleotide"
  source: /note="RNA"
  modified_base (1)..(1): bicyclic nucleic acid (BNA)
  modified_base (2)..(2): bicyclic nucleic acid (BNA)
  modified_base (16)..(16): bicyclic nucleic acid (BNA)
  modified_base (17)..(17): bicyclic nucleic acid (BNA)
  source: /note="3' tri-ethylene glycol (TEG)"
caucaaggaagauggca

SEQ ID NO: 12256 - RNA, 16 nt, Artificial Sequence
  source: /note="Description of Artificial Sequence: Synthetic oligonucleotide"
  source: /note="RNA"
  modified_base (1)..(1): bicyclic nucleic acid (BNA)
  modified_base (2)..(2): bicyclic nucleic acid (BNA)
  modified_base (15)..(15): bicyclic nucleic acid (BNA)
  modified_base (16)..(16): bicyclic nucleic acid (BNA)
  source: /note="3' tri-ethylene glycol (TEG)"
caucaaggaagauggc

SEQ ID NO: 12257 - RNA, 15 nt, Artificial Sequence
  source: /note="Description of Artificial Sequence: Synthetic oligonucleotide"
  source: /note="RNA"
  modified_base (1)..(1): bicyclic nucleic acid (BNA)
  modified_base (2)..(2): bicyclic nucleic acid (BNA)
  modified_base (14)..(14): bicyclic nucleic acid (BNA)
  modified_base (15)..(15): bicyclic nucleic acid (BNA)
  source: /note="3' tri-ethylene glycol (TEG)"
caucaaggaagaugg

SEQ ID NO: 12258 - DNA, 14 bp, Artificial Sequence
  source: /note="Description of Artificial Sequence: Synthetic oligonucleotide"
  source: /note="Description of Combined DNA/RNA Molecule: Synthetic oligonucleotide"
  source: /note="DNA/RNA"
  modified_base (1)..(1): bicyclic nucleic acid (BNA)
  modified_base (2)..(2): bicyclic nucleic acid (BNA)
  modified_base (13)..(13): bicyclic nucleic acid (BNA)
  modified_base (14)..(14): bicyclic nucleic acid (BNA)
  source: /note="3' tri-ethylene glycol (TEG)"
caucaaggaagatg

SEQ ID NO: 12259 - DNA, 13 bp, Artificial Sequence
  source: /note="Description of Artificial Sequence: Synthetic oligonucleotide"
  source: /note="Description of Combined DNA/RNA Molecule: Synthetic oligonucleotide"
  source: /note="DNA/RNA"
  modified_base (1)..(1): bicyclic nucleic acid (BNA)
  modified_base (2)..(2): bicyclic nucleic acid (BNA)
  modified_base (12)..(12): bicyclic nucleic acid (BNA)
  modified_base (13)..(13): bicyclic nucleic acid (BNA)
  source: /note="3' tri-ethylene glycol (TEG)"
caucaaggaagat

SEQ ID NO: 12260 - RNA, 12 nt, Artificial Sequence
  source: /note="Description of Artificial Sequence: Synthetic oligonucleotide"
  source: /note="RNA"
  modified_base (1)..(1): bicyclic nucleic acid (BNA)
  modified_base (2)..(2): bicyclic nucleic acid (BNA)
  modified_base (11)..(11): bicyclic nucleic acid (BNA)
  modified_base (12)..(12): bicyclic nucleic acid (BNA)
  source: /note="3' tri-ethylene glycol (TEG)"
caucaaggaaga

SEQ ID NO: 12261 - RNA, 11 nt, Artificial Sequence
  source: /note="Description of Artificial Sequence: Synthetic oligonucleotide"
  source: /note="RNA"
  modified_base (1)..(1): bicyclic nucleic acid (BNA)
  modified_base (2)..(2): bicyclic nucleic acid (BNA)
  modified_base (10)..(10): bicyclic nucleic acid (BNA)
  modified_base (11)..(11): bicyclic nucleic acid (BNA)
  source: /note="3' tri-ethylene glycol (TEG)"
caucaaggaag

SEQ ID NO: 12262 - DNA, 23 bp, Artificial Sequence
  source: /note="Description of Artificial Sequence: Synthetic oligonucleotide"
  source: /note="Description of Combined DNA/RNA Molecule: Synthetic oligonucleotide"
  source: /note="DNA/RNA"
  modified_base (1)..(1): bicyclic nucleic acid (BNA)
  modified_base (2)..(2): bicyclic nucleic acid (BNA)
  modified_base (22)..(22): bicyclic nucleic acid (BNA)
  modified_base (23)..(23): bicyclic nucleic acid (BNA)
  source: /note="3' tri-ethylene glycol (TEG)"
atcaaggaagauggcauuucuag

SEQ ID NO: 12263 - DNA, 22 bp, Artificial Sequence
  source: /note="Description of Artificial Sequence: Synthetic oligonucleotide"
  source: /note="Description of Combined DNA/RNA Molecule: Synthetic oligonucleotide"
  source: /note="DNA/RNA"
  modified_base (1)..(1): bicyclic nucleic acid (BNA)
  modified_base (2)..(2): bicyclic nucleic acid (BNA)
  modified_base (21)..(21): bicyclic nucleic acid (BNA)
  modified_base (22)..(22): bicyclic nucleic acid (BNA)
  source: /note="3' tri-ethylene glycol (TEG)"
atcaaggaagauggcauuucta

SEQ ID NO: 12264 - DNA, 21 bp, Artificial Sequence
  source: /note="Description of Artificial Sequence: Synthetic oligonucleotide"
  source: /note="Description of Combined DNA/RNA Molecule: Synthetic oligonucleotide"
  source: /note="DNA/RNA"
  modified_base (1)..(1): bicyclic nucleic acid (BNA)
  modified_base (2)..(2): bicyclic nucleic acid (BNA)
  modified_base (20)..(20): bicyclic nucleic acid (BNA)
  modified_base (21)..(21): bicyclic nucleic acid (BNA)
  source: /note="3' tri-ethylene glycol (TEG)"
atcaaggaagauggcauuuct

SEQ ID NO: 12265 - DNA, 20 bp, Artificial Sequence
  source: /note="Description of Artificial Sequence: Synthetic oligonucleotide"
  source: /note="Description of Combined DNA/RNA Molecule: Synthetic oligonucleotide"
  source: /note="DNA/RNA"
  modified_base (1)..(1): bicyclic nucleic acid (BNA)
  modified_base (2)..(2): bicyclic nucleic acid (BNA)
  modified_base (19)..(19): bicyclic nucleic acid (BNA)
  modified_base (20)..(20): bicyclic nucleic acid (BNA)
  source: /note="3' tri-ethylene glycol (TEG)"
atcaaggaagauggcauutc

SEQ ID NO: 12266 - DNA, 19 bp, Artificial Sequence
  source: /note="Description of Artificial Sequence: Synthetic oligonucleotide"
  source: /note="Description of Combined DNA/RNA Molecule: Synthetic oligonucleotide"
  source: /note="DNA/RNA"
  modified_base (1)..(1): bicyclic nucleic acid (BNA)
  modified_base (2)..(2): bicyclic nucleic acid (BNA)
  modified_base (18)..(18): bicyclic nucleic acid (BNA)
  modified_base (19)..(19): bicyclic nucleic acid (BNA)
  source: /note="3' tri-ethylene glycol (TEG)"
atcaaggaagauggcautt

SEQ ID NO: 12267 - DNA, 18 bp, Artificial Sequence
  source: /note="Description of Artificial Sequence: Synthetic oligonucleotide"
  source: /note="Description of Combined DNA/RNA Molecule: Synthetic oligonucleotide"
  source: /note="DNA/RNA"
  modified_base (1)..(1): bicyclic nucleic acid (BNA)
  modified_base (2)..(2): bicyclic nucleic acid (BNA)
  modified_base (17)..(17): bicyclic nucleic acid (BNA)
  modified_base (18)..(18): bicyclic nucleic acid (BNA)
  source: /note="3' tri-ethylene glycol (TEG)"
atcaaggaagauggcatt

SEQ ID NO: 12268 - DNA, 17 bp, Artificial Sequence
  source: /note="Description of Artificial Sequence: Synthetic oligonucleotide"
  source: /note="Description of Combined DNA/RNA Molecule: Synthetic oligonucleotide"
  source: /note="DNA/RNA"
  modified_base (1)..(1): bicyclic nucleic acid (BNA)
  modified_base (2)..(2): bicyclic nucleic acid (BNA)
  modified_base (16)..(16): bicyclic nucleic acid (BNA)
  modified_base (17)..(17): bicyclic nucleic acid (BNA)
  source: /note="3' tri-ethylene glycol (TEG)"
atcaaggaagauggcat

SEQ ID NO: 12269 - DNA, 16 bp, Artificial Sequence
  source: /note="Description of Artificial Sequence: Synthetic oligonucleotide"
  source: /note="Description of Combined DNA/RNA Molecule: Synthetic oligonucleotide"
  source: /note="DNA/RNA"
  modified_base (1)..(1): bicyclic nucleic acid (BNA)
  modified_base (2)..(2): bicyclic nucleic acid (BNA)
  modified_base (15)..(15): bicyclic nucleic acid (BNA)
  modified_base (16)..(16): bicyclic nucleic acid (BNA)
  source: /note="3' tri-ethylene glycol (TEG)"
atcaaggaagauggca

SEQ ID NO: 12270 - DNA, 15 bp, Artificial Sequence
  source: /note="Description of Artificial Sequence: Synthetic oligonucleotide"
  source: /note="Description of Combined DNA/RNA Molecule: Synthetic oligonucleotide"
  source: /note="DNA/RNA"
  modified_base (1)..(1): bicyclic nucleic acid (BNA)
  modified_base (2)..(2): bicyclic nucleic acid (BNA)
  modified_base (14)..(14): bicyclic nucleic acid (BNA)
  modified_base (15)..(15): bicyclic nucleic acid (BNA)
  source: /note="3' tri-ethylene glycol (TEG)"
atcaaggaagauggc

SEQ ID NO: 12271 - DNA, 14 bp, Artificial Sequence
  source: /note="Description of Artificial Sequence: Synthetic oligonucleotide"
  source: /note="Description of Combined DNA/RNA Molecule: Synthetic oligonucleotide"
  source: /note="DNA/RNA"
  modified_base (1)..(1): bicyclic nucleic acid (BNA)
  modified_base (2)..(2): bicyclic nucleic acid (BNA)
  modified_base (13)..(13): bicyclic nucleic acid (BNA)
  modified_base (14)..(14): bicyclic nucleic acid (BNA)
  source: /note="3' tri-ethylene glycol (TEG)"
atcaaggaagaugg

SEQ ID NO: 12272 - DNA, 13 bp, Artificial Sequence
  source: /note="Description of Artificial Sequence: Synthetic oligonucleotide"
  source: /note="DNA/RNA"
  modified_base (1)..(1): bicyclic nucleic acid (BNA)
  modified_base (2)..(2): bicyclic nucleic acid (BNA)
  modified_base (12)..(12): bicyclic nucleic acid (BNA)
  modified_base (13)..(13): bicyclic nucleic acid (BNA)
  source: /note="3' tri-ethylene glycol (TEG)"
atcaaggaagatg

SEQ ID NO: 12273 - DNA, 12 bp, Artificial Sequence
  source: /note="Description of Artificial Sequence: Synthetic oligonucleotide"
  source: /note="DNA/RNA"
  modified_base (1)..(1): bicyclic nucleic acid (BNA)
  modified_base (2)..(2): bicyclic nucleic acid (BNA)
  modified_base (11)..(11): bicyclic nucleic acid (BNA)
  modified_base (12)..(12): bicyclic nucleic acid (BNA)
  source: /note="3' tri-ethylene glycol (TEG)"
atcaaggaagat

SEQ ID NO: 12274 - DNA, 11 bp, Artificial Sequence
  source: /note="Description of Artificial Sequence: Synthetic oligonucleotide"
  source: /note="DNA/RNA"
  modified_base (1)..(1): bicyclic nucleic acid (BNA)
  modified_base (2)..(2): bicyclic nucleic acid (BNA)
  modified_base (10)..(10): bicyclic nucleic acid (BNA)
  modified_base (11)..(11): bicyclic nucleic acid (BNA)
  source: /note="3' tri-ethylene glycol (TEG)"
atcaaggaaga

SEQ ID NO: 12275 - DNA, 10 bp, Artificial Sequence
  source: /note="Description of Artificial Sequence: Synthetic oligonucleotide"
  source: /note="DNA/RNA"
  modified_base (1)..(1): bicyclic nucleic acid (BNA)
  modified_base (2)..(2): bicyclic nucleic acid (BNA)
  modified_base (9)..(9): bicyclic nucleic acid (BNA)
  modified_base (10)..(10): bicyclic nucleic acid (BNA)
  source: /note="3' tri-ethylene glycol (TEG)"
atcaaggaag

SEQ ID NO: 12276 - DNA, 23 bp, Artificial Sequence
  source: /note="Description of Artificial Sequence: Synthetic oligonucleotide"
  source: /note="Description of Combined DNA/RNA Molecule: Synthetic oligonucleotide"
  source: /note="DNA/RNA"
  modified_base (1)..(1): bicyclic nucleic acid (BNA)
  modified_base (2)..(2): bicyclic nucleic acid (BNA)
  modified_base (22)..(22): bicyclic nucleic acid (BNA)
  modified_base (23)..(23): bicyclic nucleic acid (BNA)
  source: /note="3' tri-ethylene glycol (TEG)"
ccagagcagguaccuccaacatc

SEQ ID NO: 12277 - RNA, 18 nt, Artificial Sequence
  source: /note="Description of Artificial Sequence: Synthetic oligonucleotide"
  source: /note="RNA"
  modified_base (1)..(1): bicyclic nucleic acid (BNA)
  modified_base (2)..(2): bicyclic nucleic acid (BNA)
  modified_base (17)..(17): bicyclic nucleic acid (BNA)
  modified_base (18)..(18): bicyclic nucleic acid (BNA)
  source: /note="3' tri-ethylene glycol (TEG)"
ccagagcagguaccucca

SEQ ID NO: 12278 - DNA, 23 bp, Artificial Sequence
  source: /note="Description of Artificial Sequence: Synthetic oligonucleotide"
  source: /note="Description of Combined DNA/RNA Molecule: Synthetic oligonucleotide"
  source: /note="DNA/RNA"
  modified_base (1)..(1): bicyclic nucleic acid (BNA)
  modified_base (2)..(2): bicyclic nucleic acid (BNA)
  modified_base (22)..(22): bicyclic nucleic acid (BNA)
  modified_base (23)..(23): bicyclic nucleic acid (BNA)
  source: /note="3' tri-ethylene glycol (TEG)"
ccucugugauuuuauaacuugat

SEQ ID NO: 12279 - DNA, 17 bp, Artificial Sequence
  source: /note="Description of Artificial Sequence: Synthetic oligonucleotide"
  source: /note="Description of Combined DNA/RNA Molecule: Synthetic oligonucleotide"
  source: /note="DNA/RNA"
  modified_base (1)..(1): bicyclic nucleic acid (BNA)
  modified_base (2)..(2): bicyclic nucleic acid (BNA)
  modified_base (16)..(16): bicyclic nucleic acid (BNA)
  modified_base (17)..(17): bicyclic nucleic acid (BNA)
  source: /note="3' tri-ethylene glycol (TEG)"
tcacccaccaucaccct

SEQ ID NO: 12280 - DNA, 20 bp, Artificial Sequence
  source: /note="Description of Artificial Sequence: Synthetic oligonucleotide"
  source: /note="Description of Combined DNA/RNA Molecule: Synthetic oligonucleotide"
  source: /note="DNA/RNA"
  modified_base (1)..(1): bicyclic nucleic acid (BNA)
  modified_base (2)..(2): bicyclic nucleic acid (BNA)
  modified_base (19)..(19): bicyclic nucleic acid (BNA)
  modified_base (20)..(20): bicyclic nucleic acid (BNA)
  source: /note="3' tri-ethylene glycol (TEG)"
tgauauccucaaggucaccc

SEQ ID NO: 12281 - DNA, 22 bp, Artificial Sequence
  source: /note="Description of Artificial Sequence: Synthetic oligonucleotide"
  source: /note="Description of Combined DNA/RNA Molecule: Synthetic oligonucleotide"
  source: /note="DNA/RNA"
  modified_base (1)..(1): bicyclic nucleic acid (BNA)
  modified_base (2)..(2): bicyclic nucleic acid (BNA)
  modified_base (21)..(21): bicyclic nucleic acid (BNA)
  modified_base (22)..(22): bicyclic nucleic acid (BNA)
  source: /note="3' tri-ethylene glycol (TEG)"
ctgcuugaugaucaucucgutg

SEQ ID NO: 12282 - DNA, 18 bp, Artificial Sequence
  source: /note="Description of Artificial Sequence: Synthetic oligonucleotide"
  source: /note="Description of Combined DNA/RNA Molecule: Synthetic oligonucleotide"
  source: /note="DNA/RNA"
  modified_base (1)..(1): bicyclic nucleic acid (BNA)
  modified_base (2)..(2): bicyclic nucleic acid (BNA)
  modified_base (17)..(17): bicyclic nucleic acid (BNA)
  modified_base (18)..(18): bicyclic nucleic acid (BNA)
  source: /note="3' tri-ethylene glycol (TEG)"
ctgcuugaugaucauctc

SEQ ID NO: 12283 - DNA, 19 bp, Artificial Sequence
  source: /note="Description of Artificial Sequence: Synthetic oligonucleotide"
  source: /note="Description of Combined DNA/RNA Molecule: Synthetic oligonucleotide"
  source: /note="DNA/RNA"
  modified_base (1)..(1): bicyclic nucleic acid (BNA)
  modified_base (2)..(2): bicyclic nucleic acid (BNA)
  modified_base (18)..(18): bicyclic nucleic acid (BNA)
  modified_base (19)..(19): bicyclic nucleic acid (BNA)
  source: /note="3' tri-ethylene glycol (TEG)"
gtuuccuuaguaaccacag

SEQ ID NO: 12284 - DNA, 17 bp, Artificial Sequence
  source: /note="Description of Artificial Sequence: Synthetic oligonucleotide"
  source: /note="Description of Combined DNA/RNA Molecule: Synthetic oligonucleotide"
  source: /note="DNA/RNA"
  modified_base (1)..(1): bicyclic nucleic acid (BNA)
  modified_base (2)..(2): bicyclic nucleic acid (BNA)
  modified_base (16)..(16): bicyclic nucleic acid (BNA)
  modified_base (17)..(17): bicyclic nucleic acid (BNA)
  source: /note="3' tri-ethylene glycol (TEG)"
gtuuccuuaguaaccac

SEQ ID NO: 12285 - DNA, 20 bp, Artificial Sequence
  source: /note="Description of Artificial Sequence: Synthetic oligonucleotide"
  source: /note="Description of Combined DNA/RNA Molecule: Synthetic oligonucleotide"
  source: /note="DNA/RNA"
  source: /note="5' tri-ethylene glycol (TEG)"
  modified_base (1)..(1): bicyclic nucleic acid (BNA)
  modified_base (2)..(2): bicyclic nucleic acid (BNA)
  modified_base (19)..(19): bicyclic nucleic acid (BNA)
  modified_base (20)..(20): bicyclic nucleic acid (BNA)
  source: /note="3' tri-ethylene glycol (TEG)"
tcaaggaagauggcauuuct

SEQ ID NO: 12286 - DNA, 22 bp, Artificial Sequence
  source: /note="Description of Artificial Sequence: Synthetic oligonucleotide"
  source: /note="Description of Combined DNA/RNA Molecule: Synthetic oligonucleotide"
  source: /note="DNA/RNA"
  source: /note="5' tri-ethylene glycol (TEG)"
  modified_base (1)..(1): bicyclic nucleic acid (BNA)
  modified_base (2)..(2): bicyclic nucleic acid (BNA)
  modified_base (21)..(21): bicyclic nucleic acid (BNA)
  modified_base (22)..(22): bicyclic nucleic acid (BNA)
  source: /note="3' tri-ethylene glycol (TEG)"
tcaaggaagauggcauuucuag

SEQ ID NO: 12287 - RNA, 18 nt, Artificial Sequence
  source: /note="Description of Artificial Sequence: Synthetic oligonucleotide"
  source: /note="RNA"
  source: /note="5' tri-ethylene glycol (TEG)"
  modified_base (1)..(1): bicyclic nucleic acid (BNA)
  modified_base (2)..(2): bicyclic nucleic acid (BNA)
  modified_base (17)..(17): bicyclic nucleic acid (BNA)
  modified_base (18)..(18): bicyclic nucleic acid (BNA)
  source: /note="3' tri-ethylene glycol (TEG)"
gguaaguucuguccaagc

SEQ ID NO: 12288 - DNA, 18 bp, Artificial Sequence
  source: /note="Description of Artificial Sequence: Synthetic oligonucleotide"
  source: /note="Description of Combined DNA/RNA Molecule: Synthetic oligonucleotide"
  source: /note="DNA/RNA"
  source: /note="5' tri-ethylene glycol (TEG)"
  modified_base (1)..(1): bicyclic nucleic acid (BNA)
  modified_base (2)..(2): bicyclic nucleic acid (BNA)
  modified_base (17)..(17): bicyclic nucleic acid (BNA)
  modified_base (18)..(18): bicyclic nucleic acid (BNA)
  source: /note="3' tri-ethylene glycol (TEG)"
gtaaguucuguccaagcc

SEQ ID NO: 12289 - RNA, 18 nt, Artificial Sequence
  source: /note="Description of Artificial Sequence: Synthetic oligonucleotide"
  source: /note="RNA"
  source: /note="5' tri-ethylene glycol (TEG)"
  modified_base (1)..(1): bicyclic nucleic acid (BNA)
  modified_base (2)..(2): bicyclic nucleic acid (BNA)
  modified_base (17)..(17): bicyclic nucleic acid (BNA)
  modified_base (18)..(18): bicyclic nucleic acid (BNA)
  source: /note="3' tri-ethylene glycol (TEG)"
agucgguaaguucugucc

SEQ ID NO: 12290 - DNA, 18 bp, Artificial Sequence
  source: /note="Description of Artificial Sequence: Synthetic oligonucleotide"
  source: /note="Description of Combined DNA/RNA Molecule: Synthetic oligonucleotide"
  source: /note="DNA/RNA"
  source: /note="5' tri-ethylene glycol (TEG)"
  modified_base (1)..(1): bicyclic nucleic acid (BNA)
  modified_base (2)..(2): bicyclic nucleic acid (BNA)
  modified_base (17)..(17): bicyclic nucleic acid (BNA)
  modified_base (18)..(18): bicyclic nucleic acid (BNA)
  source: /note="3' tri-ethylene glycol (TEG)"
ctguccaagcccgguuga

SEQ ID NO: 12291 - DNA, 15 bp, Artificial Sequence
  source: /note="Description of Artificial Sequence: Synthetic oligonucleotide"
  source: /note="Description of Combined DNA/RNA Molecule: Synthetic oligonucleotide"
  source: /note="DNA/RNA"
  source: /note="5' tri-ethylene glycol (TEG)"
  modified_base (1)..(1): bicyclic nucleic acid (BNA)
  modified_base (2)..(2): bicyclic nucleic acid (BNA)
  modified_base (14)..(14): bicyclic nucleic acid (BNA)
  modified_base (15)..(15): bicyclic nucleic acid (BNA)
  source: /note="3' tri-ethylene glycol (TEG)"
taaguucuguccaag

SEQ ID NO: 12292 - DNA, 20 bp, Artificial Sequence
  source: /note="Description of Artificial Sequence: Synthetic oligonucleotide"
  source: /note="Description of Combined DNA/RNA Molecule: Synthetic oligonucleotide"
  source: /note="DNA/RNA"
  source: /note="5' tri-ethylene glycol (TEG)"
  modified_base (1)..(1): bicyclic nucleic acid (BNA)
  modified_base (2)..(2): bicyclic nucleic acid (BNA)
  modified_base (19)..(19): bicyclic nucleic acid (BNA)
  modified_base (20)..(20): bicyclic nucleic acid (BNA)
  source: /note="3' tri-ethylene glycol (TEG)"
ttcuguccaagcccgguuga

SEQ ID NO: 12293 - DNA, 19 bp, Artificial Sequence
  source: /note="Description of Artificial Sequence: Synthetic oligonucleotide"
  source: /note="Description of Combined DNA/RNA Molecule: Synthetic oligonucleotide"
  source: /note="DNA/RNA"
  source: /note="5' tri-ethylene glycol (TEG)"
  modified_base (1)..(1): bicyclic nucleic acid (BNA)
  modified_base (2)..(2): bicyclic nucleic acid (BNA)
  modified_base (18)..(18): bicyclic nucleic acid (BNA)
  modified_base (19)..(19): bicyclic nucleic acid (BNA)
  source: /note="3' tri-ethylene glycol (TEG)"
ttcuguccaagcccggutg

SEQ ID NO: 12294 - DNA, 18 bp, Artificial Sequence
  source: /note="Description of Artificial Sequence: Synthetic oligonucleotide"
  source: /note="Description of Combined DNA/RNA Molecule: Synthetic oligonucleotide"
  source: /note="DNA/RNA"
  source: /note="5' tri-ethylene glycol (TEG)"
  modified_base (1)..(1): bicyclic nucleic acid (BNA)
  modified_base (2)..(2): bicyclic nucleic acid (BNA)
  modified_base (17)..(17): bicyclic nucleic acid (BNA)
  modified_base (18)..(18): bicyclic nucleic acid (BNA)
  source: /note="3' tri-ethylene glycol (TEG)"
ttcuguccaagcccggtt

SEQ ID NO: 12295 - DNA, 17 bp, Artificial Sequence
  source: /note="Description of Artificial Sequence: Synthetic oligonucleotide"
  source: /note="Description of Combined DNA/RNA Molecule: Synthetic oligonucleotide"
  source: /note="DNA/RNA"
  source: /note="5' tri-ethylene glycol (TEG)"
  modified_base (1)..(1): bicyclic nucleic acid (BNA)
  modified_base (2)..(2): bicyclic nucleic acid (BNA)
  modified_base (16)..(16): bicyclic nucleic acid (BNA)
  modified_base (17)..(17): bicyclic nucleic acid (BNA)
  source: /note="3' tri-ethylene glycol (TEG)"
ttcuguccaagcccggt

SEQ ID NO: 12296 - DNA, 16 bp, Artificial Sequence
  source: /note="Description of Artificial Sequence: Synthetic oligonucleotide"
  source: /note="Description of Combined DNA/RNA Molecule: Synthetic oligonucleotide"
  source: /note="DNA/RNA"
  source: /note="5' tri-ethylene glycol (TEG)"
  modified_base (1)..(1): bicyclic nucleic acid (BNA)
  modified_base (2)..(2): bicyclic nucleic acid (BNA)
  modified_base (15)..(15): bicyclic nucleic acid (BNA)
  modified_base (16)..(16): bicyclic nucleic acid (BNA)
  source: /note="3' tri-ethylene glycol (TEG)"
ttcuguccaagcccgg

SEQ ID NO: 12297 - DNA, 15 bp, Artificial Sequence
  source: /note="Description of Artificial Sequence: Synthetic oligonucleotide"
  source: /note="Description of Combined DNA/RNA Molecule: Synthetic oligonucleotide"
  source: /note="DNA/RNA"
  source: /note="5' tri-ethylene glycol (TEG)"
  modified_base (1)..(1): bicyclic nucleic acid (BNA)
  modified_base (2)..(2): bicyclic nucleic acid (BNA)
  modified_base (14)..(14): bicyclic nucleic acid (BNA)
  modified_base (15)..(15): bicyclic nucleic acid (BNA)
  source: /note="3' tri-ethylene glycol (TEG)"
ttcuguccaagcccg

SEQ ID NO: 12298 - DNA, 14 bp, Artificial Sequence
  source: /note="Description of Artificial Sequence: Synthetic oligonucleotide"
  source: /note="Description of Combined DNA/RNA Molecule: Synthetic oligonucleotide"
  source: /note="DNA/RNA"
  source: /note="5' tri-ethylene glycol (TEG)"
  modified_base (1)..(1): bicyclic nucleic acid (BNA)
  modified_base (2)..(2): bicyclic nucleic acid (BNA)
  modified_base (13)..(13): bicyclic nucleic acid (BNA)
  modified_base (14)..(14): bicyclic nucleic acid (BNA)
  source: /note="3' tri-ethylene glycol (TEG)"
ttcuguccaagccc

SEQ ID NO: 12299 - DNA, 13 bp, Artificial Sequence
  source: /note="Description of Artificial Sequence: Synthetic oligonucleotide"
  source: /note="Description of Combined DNA/RNA Molecule: Synthetic oligonucleotide"
  source: /note="DNA/RNA"
  source: /note="5' tri-ethylene glycol (TEG)"
  modified_base (1)..(1): bicyclic nucleic acid (BNA)
  modified_base (2)..(2): bicyclic nucleic acid (BNA)
  modified_base (12)..(12): bicyclic nucleic acid (BNA)
  modified_base (13)..(13): bicyclic nucleic acid (BNA)
  source: /note="3' tri-ethylene glycol (TEG)"
ttcuguccaagcc

SEQ ID NO: 12300 - DNA, 12 bp, Artificial Sequence
  source: /note="Description of Artificial Sequence: Synthetic oligonucleotide"
  source: /note="Description of Combined DNA/RNA Molecule: Synthetic oligonucleotide"
  source: /note="DNA/RNA"
  source: /note="5' tri-ethylene glycol (TEG)"
  modified_base (1)..(1): bicyclic nucleic acid (BNA)
  modified_base (2)..(2): bicyclic nucleic acid (BNA)
  modified_base (11)..(11): bicyclic nucleic acid (BNA)
  modified_base (12)..(12): bicyclic nucleic acid (BNA)
  source: /note="3' tri-ethylene glycol (TEG)"
ttcuguccaagc

SEQ ID NO: 12301 - DNA, 11 bp, Artificial Sequence
  source: /note="Description of Artificial Sequence: Synthetic oligonucleotide"
  source: /note="Description of Combined DNA/RNA Molecule: Synthetic oligonucleotide"
  source: /note="DNA/RNA"
  source: /note="5' tri-ethylene glycol (TEG)"
  modified_base (1)..(1): bicyclic nucleic acid (BNA)
  modified_base (2)..(2): bicyclic nucleic acid (BNA)
  modified_base (10)..(10): bicyclic nucleic acid (BNA)
  modified_base (11)..(11): bicyclic nucleic acid (BNA)
  source: /note="3' tri-ethylene glycol (TEG)"
ttcuguccaag

SEQ ID NO: 12302 - DNA, 10 bp, Artificial Sequence
  source: /note="Description of Artificial Sequence: Synthetic oligonucleotide"
  source: /note="Description of Combined DNA/RNA Molecule: Synthetic oligonucleotide"
  source: /note="DNA/RNA"
  source: /note="5' tri-ethylene glycol (TEG)"
  modified_base (1)..(1): bicyclic nucleic acid (BNA)
  modified_base (2)..(2): bicyclic nucleic acid (BNA)
  modified_base (9)..(9): bicyclic nucleic acid (BNA)
  modified_base (10)..(10): bicyclic nucleic acid (BNA)
  source: /note="3' tri-ethylene glycol (TEG)"
ttcuguccaa

SEQ ID NO: 12303 - DNA, 9 bp, Artificial Sequence
  source: /note="Description of Artificial Sequence: Synthetic oligonucleotide"
  source: /note="Description of Combined DNA/RNA Molecule: Synthetic oligonucleotide"
  source: /note="DNA/RNA"
  source: /note="5' tri-ethylene glycol (TEG)"
  modified_base (1)..(1): bicyclic nucleic acid (BNA)
  modified_base (2)..(2): bicyclic nucleic acid (BNA)
  modified_base (8)..(8): bicyclic nucleic acid (BNA)
  modified_base (9)..(9): bicyclic nucleic acid (BNA)
  source: /note="3' tri-ethylene glycol (TEG)"
ttcugucca

SEQ ID NO: 12304 - DNA, 8 bp, Artificial Sequence
  source: /note="Description of Artificial Sequence: Synthetic oligonucleotide"
  source: /note="Description of Combined DNA/RNA Molecule: Synthetic oligonucleotide"
  source: /note="DNA/RNA"
  source: /note="5' tri-ethylene glycol (TEG)"
  modified_base (1)..(1): bicyclic nucleic acid (BNA)
  modified_base (2)..(2): bicyclic nucleic acid (BNA)
  modified_base (7)..(7): bicyclic nucleic acid (BNA)
  modified_base (8)..(8): bicyclic nucleic acid (BNA)
  source: /note="3' tri-ethylene glycol (TEG)"
ttcugucc

SEQ ID NO: 12305 - DNA, 19 bp, Artificial Sequence
  source: /note="Description of Artificial Sequence: Synthetic oligonucleotide"
  source: /note="Description of Combined DNA/RNA Molecule: Synthetic oligonucleotide"
  source: /note="DNA/RNA"
  source: /note="5' tri-ethylene glycol (TEG)"
  modified_base (1)..(1): bicyclic nucleic acid (BNA)
  modified_base (2)..(2): bicyclic nucleic acid (BNA)
  modified_base (18)..(18): bicyclic nucleic acid (BNA)
  modified_base (19)..(19): bicyclic nucleic acid (BNA)
  source: /note="3' tri-ethylene glycol (TEG)"
tcuguccaagcccgguuga

SEQ ID NO: 12306 - DNA, 18 bp, Artificial Sequence
  source: /note="Description of Artificial Sequence: Synthetic oligonucleotide"
  source: /note="Description of Combined DNA/RNA Molecule: Synthetic oligonucleotide"
  source: /note="DNA/RNA"
  source: /note="5' tri-ethylene glycol (TEG)"
  modified_base (1)..(1): bicyclic nucleic acid (BNA)
  modified_base (2)..(2): bicyclic nucleic acid (BNA)
  modified_base (17)..(17): bicyclic nucleic acid (BNA)
  modified_base (18)..(18): bicyclic nucleic acid (BNA)
  source: /note="3' tri-ethylene glycol (TEG)"
tcuguccaagcccggutg

SEQ ID NO: 12307 - DNA, 17 bp, Artificial Sequence
  source: /note="Description of Artificial Sequence: Synthetic oligonucleotide"
  source: /note="Description of Combined DNA/RNA Molecule: Synthetic oligonucleotide"
  source: /note="DNA/RNA"
  source: /note="5' tri-ethylene glycol (TEG)"
  modified_base (1)..(1): bicyclic nucleic acid (BNA)
  modified_base (2)..(2): bicyclic nucleic acid (BNA)
  modified_base (16)..(16): bicyclic nucleic acid (BNA)
  modified_base (17)..(17): bicyclic nucleic acid (BNA)
  source: /note="3' tri-ethylene glycol (TEG)"
tcuguccaagcccggtt

SEQ ID NO: 12308 - DNA, 16 bp, Artificial Sequence
  source: /note="Description of Artificial Sequence: Synthetic oligonucleotide"
  source: /note="Description of Combined DNA/RNA Molecule: Synthetic oligonucleotide"
  source: /note="DNA/RNA"
  source: /note="5' tri-ethylene glycol (TEG)"
  modified_base (1)..(1): bicyclic nucleic acid (BNA)
  modified_base (2)..(2): bicyclic nucleic acid (BNA)
  modified_base (15)..(15): bicyclic nucleic acid (BNA)
  modified_base (16)..(16): bicyclic nucleic acid (BNA)
  source: /note="3' tri-ethylene glycol (TEG)"
tcuguccaagcccggt

SEQ ID NO: 12309 - DNA, 15 bp, Artificial Sequence
  source: /note="Description of Artificial Sequence: Synthetic oligonucleotide"
  source: /note="Description of Combined DNA/RNA Molecule: Synthetic oligonucleotide"
  source: /note="DNA/RNA"
  source: /note="5' tri-ethylene glycol (TEG)"
  modified_base (1)..(1): bicyclic nucleic acid (BNA)
  modified_base (2)..(2): bicyclic nucleic acid (BNA)
  modified_base (14)..(14): bicyclic nucleic acid (BNA)
  modified_base (15)..(15): bicyclic nucleic acid (BNA)
  source: /note="3' tri-ethylene glycol (TEG)"
tcuguccaagcccgg

SEQ ID NO: 12310 - DNA, 14 bp, Artificial Sequence
  source: /note="Description of Artificial Sequence: Synthetic oligonucleotide"
  source: /note="Description of Combined DNA/RNA Molecule: Synthetic oligonucleotide"
  source: /note="DNA/RNA"
  source: /note="5' tri-ethylene glycol (TEG)"
  modified_base (1)..(1): bicyclic nucleic acid (BNA)
  modified_base (2)..(2): bicyclic nucleic acid (BNA)
  modified_base (13)..(13): bicyclic nucleic acid (BNA)
  modified_base (14)..(14): bicyclic nucleic acid (BNA)
  source: /note="3' tri-ethylene glycol (TEG)"
tcuguccaagcccg

SEQ ID NO: 12311 - DNA, 13 bp, Artificial Sequence
  source: /note="Description of Artificial Sequence: Synthetic oligonucleotide"
  source: /note="Description of Combined DNA/RNA Molecule: Synthetic oligonucleotide"
  source: /note="DNA/RNA"
  source: /note="5' tri-ethylene glycol (TEG)"
  modified_base (1)..(1): bicyclic nucleic acid (BNA)
  modified_base (2)..(2): bicyclic nucleic acid (BNA)
  modified_base (12)..(12): bicyclic nucleic acid (BNA)
  modified_base (13)..(13): bicyclic nucleic acid (BNA)
  source: /note="3' tri-ethylene glycol (TEG)"
tcuguccaagccc

SEQ ID NO: 12312 - DNA, 12 bp, Artificial Sequence
  source: /note="Description of Artificial Sequence: Synthetic oligonucleotide"
  source: /note="Description of Combined DNA/RNA Molecule: Synthetic oligonucleotide"
  source: /note="DNA/RNA"
  source: /note="5' tri-ethylene glycol (TEG)"
  modified_base (1)..(1): bicyclic nucleic acid (BNA)
  modified_base (2)..(2): bicyclic nucleic acid (BNA)
  modified_base (11)..(11): bicyclic nucleic acid (BNA)
  modified_base (12)..(12): bicyclic nucleic acid (BNA)
  source: /note="3' tri-ethylene glycol (TEG)"
tcuguccaagcc

SEQ ID NO: 12313 - DNA, 11 bp, Artificial Sequence
  source: /note="Description of Artificial Sequence: Synthetic oligonucleotide"
  source: /note="Description of Combined DNA/RNA Molecule: Synthetic oligonucleotide"
  source: /note="DNA/RNA"
  source: /note="5' tri-ethylene glycol (TEG)"
  modified_base (1)..(1): bicyclic nucleic acid (BNA)
  modified_base (2)..(2): bicyclic nucleic acid (BNA)
  modified_base (10)..(10): bicyclic nucleic acid (BNA)
  modified_base (11)..(11): bicyclic nucleic acid (BNA)
  source: /note="3' tri-ethylene glycol (TEG)"
tcuguccaagc

SEQ ID NO: 12314 - DNA, 10 bp, Artificial Sequence
  source: /note="Description of Artificial Sequence: Synthetic oligonucleotide"
  source: /note="Description of Combined DNA/RNA Molecule: Synthetic oligonucleotide"
  source: /note="DNA/RNA"
  source: /note="5' tri-ethylene glycol (TEG)"
  modified_base (1)..(1): bicyclic nucleic acid (BNA)
  modified_base (2)..(2): bicyclic nucleic acid (BNA)
  modified_base (9)..(9): bicyclic nucleic acid (BNA)
  modified_base (10)..(10): bicyclic nucleic acid (BNA)
  source: /note="3' tri-ethylene glycol (TEG)"
tcuguccaag

SEQ ID NO: 12315 - DNA, 9 bp, Artificial Sequence
  source: /note="Description of Artificial Sequence: Synthetic oligonucleotide"
  source: /note="Description of Combined DNA/RNA Molecule: Synthetic oligonucleotide"
  source: /note="DNA/RNA"
  source: /note="5' tri-ethylene glycol (TEG)"
  modified_base (1)..(1): bicyclic nucleic acid (BNA)
  modified_base (2)..(2): bicyclic nucleic acid (BNA)
  modified_base (8)..(8): bicyclic nucleic acid (BNA)
  modified_base (9)..(9): bicyclic nucleic acid (BNA)
  source: /note="3' tri-ethylene glycol (TEG)"
tcuguccaa

SEQ ID NO: 12316 - DNA, 8 bp, Artificial Sequence
  source: /note="Description of Artificial Sequence: Synthetic oligonucleotide"
  source: /note="Description of Combined DNA/RNA Molecule: Synthetic oligonucleotide"
  source: /note="DNA/RNA"
  source: /note="5' tri-ethylene glycol (TEG)"
  modified_base (1)..(1): bicyclic nucleic acid (BNA)
  modified_base (2)..(2): bicyclic nucleic acid (BNA)
  modified_base (7)..(7): bicyclic nucleic acid (BNA)
  modified_base (8)..(8): bicyclic nucleic acid (BNA)
  source: /note="3' tri-ethylene glycol (TEG)"
tcugucca

SEQ ID NO: 12317 - DNA, 17 bp, Artificial Sequence
  source: /note="Description of Artificial Sequence: Synthetic oligonucleotide"
  source: /note="Description of Combined DNA/RNA Molecule: Synthetic oligonucleotide"
  source: /note="DNA/RNA"
  source: /note="5' tri-ethylene glycol (TEG)"
  modified_base (1)..(1): bicyclic nucleic acid (BNA)
  modified_base (2)..(2): bicyclic nucleic acid (BNA)
  modified_base (16)..(16): bicyclic nucleic acid (BNA)
  modified_base (17)..(17): bicyclic nucleic acid (BNA)
  source: /note="3' tri-ethylene glycol (TEG)"
ctguccaagcccggutg

SEQ ID NO: 12318 - DNA, 16 bp, Artificial Sequence
  source: /note="Description of Artificial Sequence: Synthetic oligonucleotide"
  source: /note="Description of Combined DNA/RNA Molecule: Synthetic oligonucleotide"
  source: /note="DNA/RNA"
  source: /note="5' tri-ethylene glycol (TEG)"
  modified_base (1)..(1): bicyclic nucleic acid (BNA)
  modified_base (2)..(2): bicyclic nucleic acid (BNA)
  modified_base (15)..(15): bicyclic nucleic acid (BNA)
  modified_base (16)..(16): bicyclic nucleic acid (BNA)
  source: /note="3' tri-ethylene glycol (TEG)"
ctguccaagcccggtt

SEQ ID NO: 12319 - DNA, 15 bp, Artificial Sequence
  source: /note="Description of Artificial Sequence: Synthetic oligonucleotide"
  source: /note="Description of Combined DNA/RNA Molecule: Synthetic oligonucleotide"
  source: /note="DNA/RNA"
  source: /note="5' tri-ethylene glycol (TEG)"
  modified_base (1)..(1): bicyclic nucleic acid (BNA)
  modified_base (2)..(2): bicyclic nucleic acid (BNA)
  modified_base (14)..(14): bicyclic nucleic acid (BNA)
  modified_base (15)..(15): bicyclic nucleic acid (BNA)
  source: /note="3' tri-ethylene glycol (TEG)"
ctguccaagcccggt

SEQ ID NO: 12320 - DNA, 14 bp, Artificial Sequence
  source: /note="Description of Artificial Sequence: Synthetic oligonucleotide"
  source: /note="Description of Combined DNA/RNA Molecule: Synthetic oligonucleotide"
  source: /note="DNA/RNA"
  source: /note="5' tri-ethylene glycol (TEG)"
  modified_base (1)..(1): bicyclic nucleic acid (BNA)
  modified_base (2)..(2): bicyclic nucleic acid (BNA)
  modified_base (13)..(13): bicyclic nucleic acid (BNA)
  modified_base (14)..(14): bicyclic nucleic acid (BNA)
  source: /note="3' tri-ethylene glycol (TEG)"
ctguccaagcccgg

SEQ ID NO: 12321 - DNA, 13 bp, Artificial Sequence
  source: /note="Description of Artificial Sequence: Synthetic oligonucleotide"
  source: /note="Description of Combined DNA/RNA Molecule: Synthetic oligonucleotide"
  source: /note="DNA/RNA"
  source: /note="5' tri-ethylene glycol (TEG)"
  modified_base (1)..(1): bicyclic nucleic acid (BNA)
  modified_base (2)..(2): bicyclic nucleic acid (BNA)
  modified_base (12)..(12): bicyclic nucleic acid (BNA)
  modified_base (13)..(13): bicyclic nucleic acid (BNA)
  source: /note="3' tri-ethylene glycol (TEG)"
ctguccaagcccg

SEQ ID NO: 12322 - DNA, 12 bp, Artificial Sequence
  source: /note="Description of Artificial Sequence: Synthetic oligonucleotide"
  source: /note="Description of Combined DNA/RNA Molecule: Synthetic oligonucleotide"
  source: /note="DNA/RNA"
  source: /note="5' tri-ethylene glycol (TEG)"
  modified_base (1)..(1): bicyclic nucleic acid (BNA)
  modified_base (2)..(2): bicyclic nucleic acid (BNA)
  modified_base (11)..(11): bicyclic nucleic acid (BNA)
  modified_base (12)..(12): bicyclic nucleic acid (BNA)
  source: /note="3' tri-ethylene glycol (TEG)"
ctguccaagccc

SEQ ID NO: 12323 - DNA, 11 bp, Artificial Sequence
  source: /note="Description of Artificial Sequence: Synthetic oligonucleotide"
  source: /note="Description of Combined DNA/RNA Molecule: Synthetic oligonucleotide"
  source: /note="DNA/RNA"
  source: /note="5' tri-ethylene glycol (TEG)"
  modified_base (1)..(1): bicyclic nucleic acid (BNA)
  modified_base (2)..(2): bicyclic nucleic acid (BNA)
  modified_base (10)..(10): bicyclic nucleic acid (BNA)
  modified_base (11)..(11): bicyclic nucleic acid (BNA)
  source: /note="3' tri-ethylene glycol (TEG)"
ctguccaagcc

SEQ ID NO: 12324 - DNA, 10 bp, Artificial Sequence
  source: /note="Description of Artificial Sequence: Synthetic oligonucleotide"
  source: /note="Description of Combined DNA/RNA Molecule: Synthetic oligonucleotide"
  source: /note="DNA/RNA"
  source: /note="5' tri-ethylene glycol (TEG)"
  modified_base (1)..(1): bicyclic nucleic acid (BNA)
  modified_base (2)..(2): bicyclic nucleic acid (BNA)
  modified_base (9)..(9): bicyclic nucleic acid (BNA)
  modified_base (10)..(10): bicyclic nucleic acid (BNA)
  source: /note="3' tri-ethylene glycol (TEG)"
ctguccaagc

SEQ ID NO: 12325 - DNA, 9 bp, Artificial Sequence
  source: /note="Description of Artificial Sequence: Synthetic oligonucleotide"
  source: /note="Description of Combined DNA/RNA Molecule: Synthetic oligonucleotide"
  source: /note="DNA/RNA"
  source: /note="5' tri-ethylene glycol (TEG)"
  modified_base (1)..(1): bicyclic nucleic acid (BNA)
  modified_base (2)..(2): bicyclic nucleic acid (BNA)
  modified_base (8)..(8): bicyclic nucleic acid (BNA)
  modified_base (9)..(9): bicyclic nucleic acid (BNA)
  source: /note="3' tri-ethylene glycol (TEG)"
ctguccaag

SEQ ID NO: 12326 - DNA, 8 bp, Artificial Sequence
  source: /note="Description of Artificial Sequence: Synthetic oligonucleotide"
  source: /note="Description of Combined DNA/RNA Molecule: Synthetic oligonucleotide"
  source: /note="DNA/RNA"
  source: /note="5' tri-ethylene glycol (TEG)"
  modified_base (1)..(1): bicyclic nucleic acid (BNA)
  modified_base (2)..(2): bicyclic nucleic acid (BNA)
  modified_base (7)..(7): bicyclic nucleic acid (BNA)
  modified_base (8)..(8): bicyclic nucleic acid (BNA)
  source: /note="3' tri-ethylene glycol (TEG)"
ctguccaa

SEQ ID NO: 12327 - DNA, 20 bp, Artificial Sequence
  source: /note="Description of Artificial Sequence: Synthetic oligonucleotide"
  source: /note="Description of Combined DNA/RNA Molecule: Synthetic oligonucleotide"
  source: /note="DNA/RNA"
  source: /note="5' tri-ethylene glycol (TEG)"
  modified_base (1)..(1): bicyclic nucleic acid (BNA)
  modified_base (2)..(2): bicyclic nucleic acid (BNA)
  modified_base (19)..(19): bicyclic nucleic acid (BNA)
  modified_base (20)..(20): bicyclic nucleic acid (BNA)
  source: /note="3' tri-ethylene glycol (TEG)"
gtucuguccaagcccggutg

SEQ ID NO: 12328 - DNA, 19 bp, Artificial Sequence
  source: /note="Description of Artificial Sequence: Synthetic oligonucleotide"
  source: /note="Description of Combined DNA/RNA Molecule: Synthetic oligonucleotide"
  source: /note="DNA/RNA"
  source: /note="5' tri-ethylene glycol (TEG)"
  modified_base (1)..(1): bicyclic nucleic acid (BNA)
  modified_base (2)..(2): bicyclic nucleic acid (BNA)
  modified_base (18)..(18): bicyclic nucleic acid (BNA)
  modified_base (19)..(19): bicyclic nucleic acid (BNA)
  source: /note="3' tri-ethylene glycol (TEG)"
gtucuguccaagcccggtt

SEQ ID NO: 12329 - DNA, 18 bp, Artificial Sequence
  source: /note="Description of Artificial Sequence: Synthetic oligonucleotide"
  source: /note="Description of Combined DNA/RNA Molecule: Synthetic oligonucleotide"
  source: /note="DNA/RNA"
  source: /note="5' tri-ethylene glycol (TEG)"
  modified_base (1)..(1): bicyclic nucleic acid (BNA)
  modified_base (2)..(2): bicyclic nucleic acid (BNA)
  modified_base (17)..(17): bicyclic nucleic acid (BNA)
  modified_base (18)..(18): bicyclic nucleic acid (BNA)
  source: /note="3' tri-ethylene glycol (TEG)"
gtucuguccaagcccggt

SEQ ID NO: 12330 - DNA, 17 bp, Artificial Sequence
  source: /note="Description of Artificial Sequence: Synthetic oligonucleotide"
  source: /note="Description of Combined DNA/RNA Molecule: Synthetic oligonucleotide"
  source: /note="DNA/RNA"
  source: /note="5' tri-ethylene glycol (TEG)"
  modified_base (1)..(1): bicyclic nucleic acid (BNA)
  modified_base (2)..(2): bicyclic nucleic acid (BNA)
  modified_base (16)..(16): bicyclic nucleic acid (BNA)
  modified_base (17)..(17): bicyclic nucleic acid (BNA)
  source: /note="3' tri-ethylene glycol (TEG)"
gtucuguccaagcccgg

SEQ ID NO: 12331 - DNA, 16 bp, Artificial Sequence
  source: /note="Description of Artificial Sequence: Synthetic oligonucleotide"
  source: /note="Description of Combined DNA/RNA Molecule: Synthetic oligonucleotide"
  source: /note="DNA/RNA"
  source: /note="5' tri-ethylene glycol (TEG)"
  modified_base (1)..(1): bicyclic nucleic acid (BNA)
  modified_base (2)..(2): bicyclic nucleic acid (BNA)
  modified_base (15)..(15): bicyclic nucleic acid (BNA)
  modified_base (16)..(16): bicyclic nucleic acid (BNA)
  source: /note="3' tri-ethylene glycol (TEG)"
gtucuguccaagcccg

SEQ ID NO: 12332 - DNA, 15 bp, Artificial Sequence
  source: /note="Description of Artificial Sequence: Synthetic oligonucleotide"
  source: /note="Description of Combined DNA/RNA Molecule: Synthetic oligonucleotide"
  source: /note="DNA/RNA"
  source: /note="5' tri-ethylene glycol (TEG)"
  modified_base (1)..(1): bicyclic nucleic acid (BNA)
  modified_base (2)..(2): bicyclic nucleic acid (BNA)
  modified_base (14)..(14): bicyclic nucleic acid (BNA)
  modified_base (15)..(15): bicyclic nucleic acid (BNA)
  source: /note="3' tri-ethylene glycol (TEG)"
gtucuguccaagccc

SEQ ID NO: 12333 - DNA, 14 bp, Artificial Sequence
  source: /note="Description of Artificial Sequence: Synthetic oligonucleotide"
  source: /note="Description of Combined DNA/RNA Molecule: Synthetic oligonucleotide"
  source: /note="DNA/RNA"
  source: /note="5' tri-ethylene glycol (TEG)"
  modified_base (1)..(1): bicyclic nucleic acid (BNA)
  modified_base (2)..(2): bicyclic nucleic acid (BNA)
  modified_base (13)..(13): bicyclic nucleic acid (BNA)
  modified_base (14)..(14): bicyclic nucleic acid (BNA)
  source: /note="3' tri-ethylene glycol (TEG)"
gtucuguccaagcc

SEQ ID NO: 12334 - DNA, 13 bp, Artificial Sequence
  source: /note="Description of Artificial Sequence: Synthetic oligonucleotide"
  source: /note="Description of Combined DNA/RNA Molecule: Synthetic oligonucleotide"
  source: /note="DNA/RNA"
  source: /note="5' tri-ethylene glycol (TEG)"
  modified_base (1)..(1): bicyclic nucleic acid (BNA)
  modified_base (2)..(2): bicyclic nucleic acid (BNA)
  modified_base (12)..(12): bicyclic nucleic acid (BNA)
  modified_base (13)..(13): bicyclic nucleic acid (BNA)
  source: /note="3' tri-ethylene glycol (TEG)"
gtucuguccaagc

SEQ ID NO: 12335 - DNA, 12 bp, Artificial Sequence
  source: /note="Description of Artificial Sequence: Synthetic oligonucleotide"
  source: /note="Description of Combined DNA/RNA Molecule: Synthetic oligonucleotide"
  source: /note="DNA/RNA"
  source: /note="5' tri-ethylene glycol (TEG)"
  modified_base (1)..(1): bicyclic nucleic acid (BNA)
  modified_base (2)..(2): bicyclic nucleic acid (BNA)
  modified_base (11)..(11): bicyclic nucleic acid (BNA)
  modified_base (12)..(12): bicyclic nucleic acid (BNA)
  source: /note="3' tri-ethylene glycol (TEG)"
gtucuguccaag

SEQ ID NO: 12336 - DNA, 11 bp, Artificial Sequence
  source: /note="Description of Artificial Sequence: Synthetic oligonucleotide"
  source: /note="Description of Combined DNA/RNA Molecule: Synthetic oligonucleotide"
  source: /note="DNA/RNA"
  source: /note="5' tri-ethylene glycol (TEG)"
  modified_base (1)..(1): bicyclic nucleic acid (BNA)
  modified_base (2)..(2): bicyclic nucleic acid (BNA)
  modified_base (10)..(10): bicyclic nucleic acid (BNA)
  modified_base (11)..(11): bicyclic nucleic acid (BNA)
  source: /note="3' tri-ethylene glycol (TEG)"
gtucuguccaa

SEQ ID NO: 12337 - DNA, 10 bp, Artificial Sequence
  source: /note="Description of Artificial Sequence: Synthetic oligonucleotide"
  source: /note="Description of Combined DNA/RNA Molecule: Synthetic oligonucleotide"
  source: /note="DNA/RNA"
  source: /note="5' tri-ethylene glycol (TEG)"
  modified_base (1)..(1): bicyclic nucleic acid (BNA)
  modified_base (2)..(2): bicyclic nucleic acid (BNA)
  modified_base (9)..(9): bicyclic nucleic acid (BNA)
  modified_base (10)..(10): bicyclic nucleic acid (BNA)
  source: /note="3' tri-ethylene glycol (TEG)"
gtucugucca

SEQ ID NO: 12338 - DNA, 9 bp, Artificial Sequence
  source: /note="Description of Artificial Sequence: Synthetic oligonucleotide"
  source: /note="Description of Combined DNA/RNA Molecule: Synthetic oligonucleotide"
  source: /note="DNA/RNA"
  source: /note="5' tri-ethylene glycol (TEG)"
  modified_base (1)..(1): bicyclic nucleic acid (BNA)
  modified_base (2)..(2): bicyclic nucleic acid (BNA)
  modified_base (8)..(8): bicyclic nucleic acid (BNA)
  modified_base (9)..(9): bicyclic nucleic acid (BNA)
  source: /note="3' tri-ethylene glycol (TEG)"
gtucugucc

SEQ ID NO: 12339 - DNA, 8 bp, Artificial Sequence
  source: /note="Description of Artificial Sequence: Synthetic oligonucleotide"
  source: /note="Description of Combined DNA/RNA Molecule: Synthetic oligonucleotide"
  source: /note="DNA/RNA"
  source: /note="5' tri-ethylene glycol (TEG)"
  modified_base (1)..(1): bicyclic nucleic acid (BNA)
  modified_base (2)..(2): bicyclic nucleic acid (BNA)
  modified_base (7)..(7): bicyclic nucleic acid (BNA)
  modified_base (8)..(8): bicyclic nucleic acid (BNA)
  source: /note="3' tri-ethylene glycol (TEG)"
gtucugtc

SEQ ID NO: 12340 - DNA, 20 bp, Artificial Sequence
  source: /note="Description of Artificial Sequence: Synthetic oligonucleotide"
  source: /note="Description of Combined DNA/RNA Molecule: Synthetic oligonucleotide"
  source: /note="DNA/RNA"
  source: /note="5' tri-ethylene glycol (TEG)"
  modified_base (1)..(1): bicyclic nucleic acid (BNA)
  modified_base (2)..(2): bicyclic nucleic acid (BNA)
  modified_base (19)..(19): bicyclic nucleic acid (BNA)
  modified_base (20)..(20): bicyclic nucleic acid (BNA)
  source: /note="3' tri-ethylene glycol (TEG)"
aguucuguccaagcccggtt

SEQ ID NO: 12341 - DNA, 19 bp, Artificial Sequence
  source: /note="Description of Artificial Sequence: Synthetic oligonucleotide"
  source: /note="Description of Combined DNA/RNA Molecule: Synthetic oligonucleotide"
  source: /note="DNA/RNA"
  source: /note="5' tri-ethylene glycol (TEG)"
  modified_base (1)..(1): bicyclic nucleic acid (BNA)
  modified_base (2)..(2): bicyclic nucleic acid (BNA)
  modified_base (18)..(18): bicyclic nucleic acid (BNA)
  modified_base (19)..(19): bicyclic nucleic acid (BNA)
  source: /note="3' tri-ethylene glycol (TEG)"
aguucuguccaagcccggt

SEQ ID NO: 12342 - RNA, 18 nt, Artificial Sequence
  source: /note="Description of Artificial Sequence: Synthetic oligonucleotide"
  source: /note="RNA"
  source: /note="5' tri-ethylene glycol (TEG)"
  modified_base (1)..(1): bicyclic nucleic acid (BNA)
  modified_base (2)..(2): bicyclic nucleic acid (BNA)
  modified_base (17)..(17): bicyclic nucleic acid (BNA)
  modified_base (18)..(18): bicyclic nucleic acid (BNA)
  source: /note="3' tri-ethylene glycol (TEG)"
aguucuguccaagcccgg

SEQ ID NO: 12343 - RNA, 17 nt, Artificial Sequence
  source: /note="Description of Artificial Sequence: Synthetic oligonucleotide"
  source: /note="RNA"
  source: /note="5' tri-ethylene glycol (TEG)"
  modified_base (1)..(1): bicyclic nucleic acid (BNA)
  modified_base (2)..(2): bicyclic nucleic acid (BNA)
  modified_base (16)..(16): bicyclic nucleic acid (BNA)
  modified_base (17)..(17): bicyclic nucleic acid (BNA)
  source: /note="3' tri-ethylene glycol (TEG)"
aguucuguccaagcccg

SEQ ID NO: 12344 - RNA, 16 nt, Artificial Sequence
  source: /note="Description of Artificial Sequence: Synthetic oligonucleotide"
  source: /note="RNA"
  source: /note="5' tri-ethylene glycol (TEG)"
  modified_base (1)..(1): bicyclic nucleic acid (BNA)
  modified_base (2)..(2): bicyclic nucleic acid (BNA)
  modified_base (15)..(15): bicyclic nucleic acid (BNA)
  modified_base (16)..(16): bicyclic nucleic acid (BNA)
  source: /note="3' tri-ethylene glycol (TEG)"
aguucuguccaagccc

SEQ ID NO: 12345 - RNA, 15 nt, Artificial Sequence
  source: /note="Description of Artificial Sequence: Synthetic oligonucleotide"
  source: /note="RNA"
  source: /note="5' tri-ethylene glycol (TEG)"
  modified_base (1)..(1): bicyclic nucleic acid (BNA)
  modified_base (2)..(2): bicyclic nucleic acid (BNA)
  modified_base (14)..(14): bicyclic nucleic acid (BNA)
  modified_base (15)..(15): bicyclic nucleic acid (BNA)
  source: /note="3' tri-ethylene glycol (TEG)"
aguucuguccaagcc

SEQ ID NO: 12346 - RNA, 14 nt, Artificial Sequence
  source: /note="Description of Artificial Sequence: Synthetic oligonucleotide"
  source: /note="RNA"
  source: /note="5' tri-ethylene glycol (TEG)"
  modified_base (1)..(1): bicyclic nucleic acid (BNA)
  modified_base (2)..(2): bicyclic nucleic acid (BNA)
  modified_base (13)..(13): bicyclic nucleic acid (BNA)
  modified_base (14)..(14): bicyclic nucleic acid (BNA)
  source: /note="3' tri-ethylene glycol (TEG)"
aguucuguccaagc

SEQ ID NO: 12347 - RNA, 13 nt, Artificial Sequence
  source: /note="Description of Artificial Sequence: Synthetic oligonucleotide"
  source: /note="RNA"
  source: /note="5' tri-ethylene glycol (TEG)"
  modified_base (1)..(1): bicyclic nucleic acid (BNA)
  modified_base (2)..(2): bicyclic nucleic acid (BNA)
  modified_base (12)..(12): bicyclic nucleic acid (BNA)
  modified_base (13)..(13): bicyclic nucleic acid (BNA)
  source: /note="3' tri-ethylene glycol (TEG)"
aguucuguccaag

SEQ ID NO: 12348 - RNA, 12 nt, Artificial Sequence
  source: /note="Description of Artificial Sequence: Synthetic oligonucleotide"
  source: /note="RNA"
  source: /note="5' tri-ethylene glycol (TEG)"
  modified_base (1)..(1): bicyclic nucleic acid (BNA)
  modified_base (2)..(2): bicyclic nucleic acid (BNA)
  modified_base (11)..(11): bicyclic nucleic acid (BNA)
  modified_base (12)..(12): bicyclic nucleic acid (BNA)
  source: /note="3' tri-ethylene glycol (TEG)"
aguucuguccaa

SEQ ID NO: 12349 - RNA, 11 nt, Artificial Sequence
  source: /note="Description of Artificial Sequence: Synthetic oligonucleotide"
  source: /note="RNA"
  source: /note="5' tri-ethylene glycol (TEG)"
  modified_base (1)..(1): bicyclic nucleic acid (BNA)
  modified_base (2)..(2): bicyclic nucleic acid (BNA)
  modified_base (10)..(10): bicyclic nucleic acid (BNA)
  modified_base (11)..(11): bicyclic nucleic acid (BNA)
  source: /note="3' tri-ethylene glycol (TEG)"
aguucugucca

SEQ ID NO: 12350 - RNA, 10 nt, Artificial Sequence
  source: /note="Description of Artificial Sequence: Synthetic oligonucleotide"
  source: /note="RNA"
  source: /note="5' tri-ethylene glycol (TEG)"
  modified_base (1)..(1): bicyclic nucleic acid (BNA)
  modified_base (2)..(2): bicyclic nucleic acid (BNA)
  modified_base (9)..(9): bicyclic nucleic acid (BNA)
  modified_base (10)..(10): bicyclic nucleic acid (BNA)
  source: /note="3' tri-ethylene glycol (TEG)"
aguucugucc

SEQ ID NO: 12351 - DNA, 9 bp, Artificial Sequence
  source: /note="Description of Artificial Sequence: Synthetic oligonucleotide"
  source: /note="Description of Combined DNA/RNA Molecule: Synthetic oligonucleotide"
  source: /note="DNA/RNA"
  source: /note="5' tri-ethylene glycol (TEG)"
  modified_base (1)..(1): bicyclic nucleic acid (BNA)
  modified_base (2)..(2): bicyclic nucleic acid (BNA)
  modified_base (8)..(8): bicyclic nucleic acid (BNA)
  modified_base (9)..(9): bicyclic nucleic acid (BNA)
  source: /note="3' tri-ethylene glycol (TEG)"
aguucugtc

SEQ ID NO: 12352 - DNA, 8 bp, Artificial Sequence
  source: /note="Description of Artificial Sequence: Synthetic oligonucleotide"
  source: /note="Description of Combined DNA/RNA Molecule: Synthetic oligonucleotide"
  source: /note="DNA/RNA"
  source: /note="5' tri-ethylene glycol (TEG)"
  modified_base (1)..(1): bicyclic nucleic acid (BNA)
  modified_base (2)..(2): bicyclic nucleic acid (BNA)
  modified_base (7)..(7): bicyclic nucleic acid (BNA)
  modified_base (8)..(8): bicyclic nucleic acid (BNA)
  source: /note="3' tri-ethylene glycol (TEG)"
aguucugt

SEQ ID NO: 12353 - DNA, 20 bp, Artificial Sequence
  source: /note="Description of Artificial Sequence: Synthetic oligonucleotide"
  source: /note="Description of Combined DNA/RNA Molecule: Synthetic oligonucleotide"
  source: /note="DNA/RNA"
  source: /note="5' tri-ethylene glycol (TEG)"
  modified_base (1)..(1): bicyclic nucleic acid (BNA)
  modified_base (2)..(2): bicyclic nucleic acid (BNA)
  modified_base (19)..(19): bicyclic nucleic acid (BNA)
  modified_base (20)..(20): bicyclic nucleic acid (BNA)
  source: /note="3' tri-ethylene glycol (TEG)"
aaguucuguccaagcccggt

SEQ ID NO: 12354 - RNA, 19 nt, Artificial Sequence
  source: /note="Description of Artificial Sequence: Synthetic oligonucleotide"
  source: /note="RNA"
  source: /note="5' tri-ethylene glycol (TEG)"
  modified_base (1)..(1): bicyclic nucleic acid (BNA)
  modified_base (2)..(2): bicyclic nucleic acid (BNA)
  modified_base (18)..(18): bicyclic nucleic acid (BNA)
  modified_base (19)..(19): bicyclic nucleic acid (BNA)
  source: /note="3' tri-ethylene glycol (TEG)"
aaguucuguccaagcccgg

SEQ ID NO: 12355 - RNA, 18 nt, Artificial Sequence
  source: /note="Description of Artificial Sequence: Synthetic oligonucleotide"
  source: /note="RNA"
  source: /note="5' tri-ethylene glycol (TEG)"
  modified_base (1)..(1): bicyclic nucleic acid (BNA)
  modified_base (2)..(2): bicyclic nucleic acid (BNA)
  modified_base (17)..(17): bicyclic nucleic acid (BNA)
  modified_base (18)..(18): bicyclic nucleic acid (BNA)
  source: /note="3' tri-ethylene glycol (TEG)"
aaguucuguccaagcccg

SEQ ID NO: 12356 - RNA, 17 nt, Artificial Sequence
  source: /note="Description of Artificial Sequence: Synthetic oligonucleotide"
  source: /note="RNA"
  source: /note="5' tri-ethylene glycol (TEG)"
  modified_base (1)..(1): bicyclic nucleic acid (BNA)
  modified_base (2)..(2): bicyclic nucleic acid (BNA)
  modified_base (16)..(16): bicyclic nucleic acid (BNA)
  modified_base (17)..(17): bicyclic nucleic acid (BNA)
  source: /note="3' tri-ethylene glycol (TEG)"
aaguucuguccaagccc

SEQ ID NO: 12357 - RNA, 16 nt, Artificial Sequence
  source: /note="Description of Artificial Sequence: Synthetic oligonucleotide"
  source: /note="RNA"
  source: /note="5' tri-ethylene glycol (TEG)"
  modified_base (1)..(1): bicyclic nucleic acid (BNA)
  modified_base (2)..(2): bicyclic nucleic acid (BNA)
  modified_base (15)..(15): bicyclic nucleic acid (BNA)
  modified_base (16)..(16): bicyclic nucleic acid (BNA)
  source: /note="3' tri-ethylene glycol (TEG)"
aaguucuguccaagcc

SEQ ID NO: 12358 - RNA, 15 nt, Artificial Sequence
  source: /note="Description of Artificial Sequence: Synthetic oligonucleotide"
  source: /note="RNA"
  source: /note="5' tri-ethylene glycol (TEG)"
  modified_base (1)..(1): bicyclic nucleic acid (BNA)
  modified_base (2)..(2): bicyclic nucleic acid (BNA)
  modified_base (14)..(14): bicyclic nucleic acid (BNA)
  modified_base (15)..(15): bicyclic nucleic acid (BNA)
  source: /note="3' tri-ethylene glycol (TEG)"
aaguucuguccaagc

SEQ ID NO: 12359 - RNA, 14 nt, Artificial Sequence
  source: /note="Description of Artificial Sequence: Synthetic oligonucleotide"
  source: /note="RNA"
  source: /note="5' tri-ethylene glycol (TEG)"
  modified_base (1)..(1): bicyclic nucleic acid (BNA)
  modified_base (2)..(2): bicyclic nucleic acid (BNA)
  modified_base (13)..(13): bicyclic nucleic acid (BNA)
  modified_base (14)..(14): bicyclic nucleic acid (BNA)
  source: /note="3' tri-ethylene glycol (TEG)"
aaguucuguccaag

SEQ ID NO: 12360 - RNA, 13 nt, Artificial Sequence
  source: /note="Description of Artificial Sequence: Synthetic oligonucleotide"
  source: /note="RNA"
  source: /note="5' tri-ethylene glycol (TEG)"
  modified_base (1)..(1): bicyclic nucleic acid (BNA)
  modified_base (2)..(2): bicyclic nucleic acid (BNA)
  modified_base (12)..(12): bicyclic nucleic acid (BNA)
  modified_base (13)..(13): bicyclic nucleic acid (BNA)
  source: /note="3' tri-ethylene glycol (TEG)"
aaguucuguccaa

SEQ ID NO: 12361 - RNA, 12 nt, Artificial Sequence
  source: /note="Description of Artificial Sequence: Synthetic oligonucleotide"
  source: /note="RNA"
  source: /note="5' tri-ethylene glycol (TEG)"
  modified_base (1)..(1): bicyclic nucleic acid (BNA)
  modified_base (2)..(2): bicyclic nucleic acid (BNA)
  modified_base (11)..(11): bicyclic nucleic acid (BNA)
  modified_base (12)..(12): bicyclic nucleic acid (BNA)
  source: /note="3' tri-ethylene glycol (TEG)"
aaguucugucca

SEQ ID NO: 12362 - RNA, 11 nt, Artificial Sequence
  source: /note="Description of Artificial Sequence: Synthetic oligonucleotide"
  source: /note="RNA"
  source: /note="5' tri-ethylene glycol (TEG)"
  modified_base (1)..(1): bicyclic nucleic acid (BNA)
  modified_base (2)..(2): bicyclic nucleic acid (BNA)
  modified_base (10)..(10): bicyclic nucleic acid (BNA)
  modified_base (11)..(11): bicyclic nucleic acid (BNA)
  source: /note="3' tri-ethylene glycol (TEG)"
aaguucugucc

SEQ ID NO: 12363 - DNA, 10 bp, Artificial Sequence
  source: /note="Description of Artificial Sequence: Synthetic oligonucleotide"
  source: /note="Description of Combined DNA/RNA Molecule: Synthetic oligonucleotide"
  source: /note="DNA/RNA"
  source: /note="5' tri-ethylene glycol (TEG)"
  modified_base (1)..(1): bicyclic nucleic acid (BNA)
  modified_base (2)..(2): bicyclic nucleic acid (BNA)
  modified_base (9)..(9): bicyclic nucleic acid (BNA)
  modified_base (10)..(10): bicyclic nucleic acid (BNA)
  source: /note="3' tri-ethylene glycol (TEG)"
aaguucugtc

SEQ ID NO: 12364 - DNA, 9 bp, Artificial Sequence
  source: /note="Description of Artificial Sequence: Synthetic oligonucleotide"
  source: /note="Description of Combined DNA/RNA Molecule: Synthetic oligonucleotide"
  source: /note="DNA/RNA"
  source: /note="5' tri-ethylene glycol (TEG)"
  modified_base (1)..(1): bicyclic nucleic acid (BNA)
  modified_base (2)..(2): bicyclic nucleic acid (BNA)
  modified_base (8)..(8): bicyclic nucleic acid (BNA)
  modified_base (9)..(9): bicyclic nucleic acid (BNA)
  source: /note="3' tri-ethylene glycol (TEG)"
aaguucugt

SEQ ID NO: 12365 - DNA, 8 bp, Artificial Sequence
  source: /note="Description of Artificial Sequence: Synthetic oligonucleotide"
  source: /note="Description of Combined DNA/RNA Molecule: Synthetic oligonucleotide"
  source: /note="DNA/RNA"
  source: /note="5' tri-ethylene glycol (TEG)"
  modified_base (1)..(1): bicyclic nucleic acid (BNA)
  modified_base (2)..(2): bicyclic nucleic acid (BNA)
  modified_base (7)..(7): bicyclic nucleic acid (BNA)
  modified_base (8)..(8): bicyclic nucleic acid (BNA)
  source: /note="3' tri-ethylene glycol (TEG)"
aaguuctg

SEQ ID NO: 12366 - DNA, 20 bp, Artificial Sequence
  source: /note="Description of Artificial Sequence: Synthetic oligonucleotide"
  source: /note="Description of Combined DNA/RNA Molecule: Synthetic oligonucleotide"
  source: /note="DNA/RNA"
  source: /note="5' tri-ethylene glycol (TEG)"
  modified_base (1)..(1): bicyclic nucleic acid (BNA)
  modified_base (2)..(2): bicyclic nucleic acid (BNA)
  modified_base (19)..(19): bicyclic nucleic acid (BNA)
  modified_base (20)..(20): bicyclic nucleic acid (BNA)
  source: /note="3' tri-ethylene glycol (TEG)"
taaguucuguccaagcccgg

SEQ ID NO: 12367 - DNA, 19 bp, Artificial Sequence
  source: /note="Description of Artificial Sequence: Synthetic oligonucleotide"
  source: /note="Description of Combined DNA/RNA Molecule: Synthetic oligonucleotide"
  source: /note="DNA/RNA"
  source: /note="5' tri-ethylene glycol (TEG)"
  modified_base (1)..(1): bicyclic nucleic acid (BNA)
  modified_base (2)..(2): bicyclic nucleic acid (BNA)
  modified_base (18)..(18): bicyclic nucleic acid (BNA)
  modified_base (19)..(19): bicyclic nucleic acid (BNA)
  source: /note="3' tri-ethylene glycol (TEG)"
taaguucuguccaagcccg

SEQ ID NO: 12368 - DNA, 18 bp, Artificial Sequence
  source: /note="Description of Artificial Sequence: Synthetic oligonucleotide"
  source: /note="Description of Combined DNA/RNA Molecule: Synthetic oligonucleotide"
  source: /note="DNA/RNA"
  source: /note="5' tri-ethylene glycol (TEG)"
  modified_base (1)..(1): bicyclic nucleic acid (BNA)
  modified_base (2)..(2): bicyclic nucleic acid (BNA)
  modified_base (17)..(17): bicyclic nucleic acid (BNA)
  modified_base (18)..(18): bicyclic nucleic acid (BNA)
  source: /note="3' tri-ethylene glycol (TEG)"
taaguucuguccaagccc

SEQ ID NO: 12369 - DNA, 17 bp, Artificial Sequence
  source: /note="Description of Artificial Sequence: Synthetic oligonucleotide"
  source: /note="Description of Combined DNA/RNA Molecule: Synthetic oligonucleotide"
  source: /note="DNA/RNA"
  source: /note="5' tri-ethylene glycol (TEG)"
  modified_base (1)..(1): bicyclic nucleic acid (BNA)
  modified_base (2)..(2): bicyclic nucleic acid (BNA)
  modified_base (16)..(16): bicyclic nucleic acid (BNA)
  modified_base (17)..(17): bicyclic nucleic acid (BNA)
  source: /note="3' tri-ethylene glycol (TEG)"
taaguucuguccaagcc

SEQ ID NO: 12370 - DNA, 16 bp, Artificial Sequence
  source: /note="Description of Artificial Sequence: Synthetic oligonucleotide"
  source: /note="Description of Combined DNA/RNA Molecule: Synthetic oligonucleotide"
  source: /note="DNA/RNA"
  source: /note="5' tri-ethylene glycol (TEG)"
  modified_base (1)..(1): bicyclic nucleic acid (BNA)
  modified_base (2)..(2): bicyclic nucleic acid (BNA)
  modified_base (15)..(15): bicyclic nucleic acid (BNA)
  modified_base (16)..(16): bicyclic nucleic acid (BNA)
  source: /note="3' tri-ethylene glycol (TEG)"
taaguucuguccaagc

SEQ ID NO: 12371 - DNA, 14 bp, Artificial Sequence
  source: /note="Description of Artificial Sequence: Synthetic oligonucleotide"
  source: /note="Description of Combined DNA/RNA Molecule: Synthetic oligonucleotide"
  source: /note="DNA/RNA"
  source: /note="5' tri-ethylene glycol (TEG)"
  modified_base (1)..(1): bicyclic nucleic acid (BNA)
  modified_base (2)..(2): bicyclic nucleic acid (BNA)
  modified_base (13)..(13): bicyclic nucleic acid (BNA)
  modified_base (14)..(14): bicyclic nucleic acid (BNA)
  source: /note="3' tri-ethylene glycol (TEG)"
taaguucuguccaa

SEQ ID NO: 12372 - DNA, 13 bp, Artificial Sequence
  source: /note="Description of Artificial Sequence: Synthetic oligonucleotide"
  source: /note="Description of Combined DNA/RNA Molecule: Synthetic oligonucleotide"
  source: /note="DNA/RNA"
  source: /note="5' tri-ethylene glycol (TEG)"
  modified_base (1)..(1): bicyclic nucleic acid (BNA)
  modified_base (2)..(2): bicyclic nucleic acid (BNA)
  modified_base (12)..(12): bicyclic nucleic acid (BNA)
  modified_base (13)..(13): bicyclic nucleic acid (BNA)
  source: /note="3' tri-ethylene glycol (TEG)"
taaguucugucca

SEQ ID NO: 12373 - DNA, 12 bp, Artificial Sequence
  source: /note="Description of Artificial Sequence: Synthetic oligonucleotide"
  source: /note="Description of Combined DNA/RNA Molecule: Synthetic oligonucleotide"
  source: /note="DNA/RNA"
  source: /note="5' tri-ethylene glycol (TEG)"
  modified_base (1)..(1): bicyclic nucleic acid (BNA)
  modified_base (2)..(2): bicyclic nucleic acid (BNA)
  modified_base (11)..(11): bicyclic nucleic acid (BNA)
  modified_base (12)..(12): bicyclic nucleic acid (BNA)
  source: /note="3' tri-ethylene glycol (TEG)"
taaguucugucc

SEQ ID NO: 12374 - DNA, 11 bp, Artificial Sequence
  source: /note="Description of Artificial Sequence: Synthetic oligonucleotide"
  source: /note="Description of Combined DNA/RNA Molecule: Synthetic oligonucleotide"
  source: /note="DNA/RNA"
  source: /note="5' tri-ethylene glycol (TEG)"
  modified_base (1)..(1): bicyclic nucleic acid (BNA)
  modified_base (2)..(2): bicyclic nucleic acid (BNA)
  modified_base (10)..(10): bicyclic nucleic acid (BNA)
  modified_base (11)..(11): bicyclic nucleic acid (BNA)
  source: /note="3' tri-ethylene glycol (TEG)"
taaguucugtc

SEQ ID NO: 12375 - DNA, 10 bp, Artificial Sequence
  source: /note="Description of Artificial Sequence: Synthetic oligonucleotide"
  source: /note="Description of Combined DNA/RNA Molecule: Synthetic oligonucleotide"
  source: /note="DNA/RNA"
  source: /note="5' tri-ethylene glycol (TEG)"
  modified_base (1)..(1): bicyclic nucleic acid (BNA)
  modified_base (2)..(2): bicyclic nucleic acid (BNA)
  modified_base (9)..(9): bicyclic nucleic acid (BNA)
  modified_base (10)..(10): bicyclic nucleic acid (BNA)
  source: /note="3' tri-ethylene glycol (TEG)"
taaguucugt

SEQ ID NO: 12376 - DNA, 9 bp, Artificial Sequence
  source: /note="Description of Artificial Sequence: Synthetic oligonucleotide"
  source: /note="Description of Combined DNA/RNA Molecule: Synthetic oligonucleotide"
  source: /note="DNA/RNA"
  source: /note="5' tri-ethylene glycol (TEG)"
  modified_base (1)..(1): bicyclic nucleic acid (BNA)
  modified_base (2)..(2): bicyclic nucleic acid (BNA)
  modified_base (8)..(8): bicyclic nucleic acid (BNA)
  modified_base (9)..(9): bicyclic nucleic acid (BNA)
  source: /note="3' tri-ethylene glycol (TEG)"
taaguuctg

SEQ ID NO: 12377 - DNA, 8 bp, Artificial Sequence
  source: /note="Description of Artificial Sequence: Synthetic oligonucleotide"
  source: /note="Description of Combined DNA/RNA Molecule: Synthetic oligonucleotide"
  source: /note="DNA/RNA"
  source: /note="5' tri-ethylene glycol (TEG)"
  modified_base (1)..(1): bicyclic nucleic acid (BNA)
  modified_base (2)..(2): bicyclic nucleic acid (BNA)
  modified_base (7)..(7): bicyclic nucleic acid (BNA)
  modified_base (8)..(8): bicyclic nucleic acid (BNA)
  source: /note="3' tri-ethylene glycol (TEG)"
taaguuct

SEQ ID NO: 12378 - DNA, 20 bp, Artificial Sequence
  source: /note="Description of Artificial Sequence: Synthetic oligonucleotide"
  source: /note="Description of Combined DNA/RNA Molecule: Synthetic oligonucleotide"
  source: /note="DNA/RNA"
  source: /note="5' tri-ethylene glycol (TEG)"
  modified_base (1)..(1): bicyclic nucleic acid (BNA)
  modified_base (2)..(2): bicyclic nucleic acid (BNA)
  modified_base (19)..(19): bicyclic nucleic acid (BNA)
  modified_base (20)..(20): bicyclic nucleic acid (BNA)
  source: /note="3' tri-ethylene glycol (TEG)"
gtaaguucuguccaagcccg

SEQ ID NO: 12379 - DNA, 19 bp, Artificial Sequence
  source: /note="Description of Artificial Sequence: Synthetic oligonucleotide"
  source: /note="Description of Combined DNA/RNA Molecule: Synthetic oligonucleotide"
  source: /note="DNA/RNA"
  source: /note="5' tri-ethylene glycol (TEG)"
  modified_base (1)..(1): bicyclic nucleic acid (BNA)
  modified_base (2)..(2): bicyclic nucleic acid (BNA)
  modified_base (18)..(18): bicyclic nucleic acid (BNA)
  modified_base (19)..(19): bicyclic nucleic acid (BNA)
  source: /note="3' tri-ethylene glycol (TEG)"
gtaaguucuguccaagccc

SEQ ID NO: 12380 - DNA, 17 bp, Artificial Sequence
  source: /note="Description of Artificial Sequence: Synthetic oligonucleotide"
  source: /note="Description of Combined DNA/RNA Molecule: Synthetic oligonucleotide"
  source: /note="DNA/RNA"
  source: /note="5' tri-ethylene glycol (TEG)"
  modified_base (1)..(1): bicyclic nucleic acid (BNA)
  modified_base (2)..(2): bicyclic nucleic acid (BNA)
  modified_base (16)..(16): bicyclic nucleic acid (BNA)
  modified_base (17)..(17): bicyclic nucleic acid (BNA)
  source: /note="3' tri-ethylene glycol (TEG)"
gtaaguucuguccaagc

SEQ ID NO: 12381 - DNA, 16 bp, Artificial Sequence
  source: /note="Description of Artificial Sequence: Synthetic oligonucleotide"
  source: /note="Description of Combined DNA/RNA Molecule: Synthetic oligonucleotide"
  source: /note="DNA/RNA"
  source: /note="5' tri-ethylene glycol (TEG)"
  modified_base (1)..(1): bicyclic nucleic acid (BNA)
  modified_base (2)..(2): bicyclic nucleic acid (BNA)
  modified_base (15)..(15): bicyclic nucleic acid (BNA)
  modified_base (16)..(16): bicyclic nucleic acid (BNA)
  source: /note="3' tri-ethylene glycol (TEG)"
gtaaguucuguccaag

SEQ ID NO: 12382 - DNA, 15 bp, Artificial Sequence
  source: /note="Description of Artificial Sequence: Synthetic oligonucleotide"
  source: /note="Description of Combined DNA/RNA Molecule: Synthetic oligonucleotide"
  source: /note="DNA/RNA"
  source: /note="5' tri-ethylene glycol (TEG)"
  modified_base (1)..(1): bicyclic nucleic acid (BNA)
  modified_base (2)..(2): bicyclic nucleic acid (BNA)
  modified_base (14)..(14): bicyclic nucleic acid (BNA)
  modified_base (15)..(15): bicyclic nucleic acid (BNA)
  source: /note="3' tri-ethylene glycol (TEG)"
gtaaguucuguccaa

SEQ ID NO: 12383 - DNA, 14 bp, Artificial Sequence
  source: /note="Description of Artificial Sequence: Synthetic oligonucleotide"
  source: /note="Description of Combined DNA/RNA Molecule: Synthetic oligonucleotide"
  source: /note="DNA/RNA"
  source: /note="5' tri-ethylene glycol (TEG)"
  modified_base (1)..(1): bicyclic nucleic acid (BNA)
  modified_base (2)..(2): bicyclic nucleic acid (BNA)
  modified_base (13)..(13): bicyclic nucleic acid (BNA)
  modified_base (14)..(14): bicyclic nucleic acid (BNA)
  source: /note="3' tri-ethylene glycol (TEG)"
gtaaguucugucca

SEQ ID NO: 12384 - DNA, 13 bp, Artificial Sequence
  source: /note="Description of Artificial Sequence: Synthetic oligonucleotide"
  source: /note="Description of Combined DNA/RNA Molecule: Synthetic oligonucleotide"
  source: /note="DNA/RNA"
  source: /note="5' tri-ethylene glycol (TEG)"
  modified_base (1)..(1): bicyclic nucleic acid (BNA)
  modified_base (2)..(2): bicyclic nucleic acid (BNA)
  modified_base (12)..(12): bicyclic nucleic acid (BNA)
  modified_base (13)..(13): bicyclic nucleic acid (BNA)
  source: /note="3' tri-ethylene glycol (TEG)"
gtaaguucugucc

SEQ ID NO: 12385 - DNA, 12 bp, Artificial Sequence
  source: /note="Description of Artificial Sequence: Synthetic oligonucleotide"
  source: /note="Description of Combined DNA/RNA Molecule: Synthetic oligonucleotide"
  source: /note="DNA/RNA"
  source: /note="5' tri-ethylene glycol (TEG)"
  modified_base (1)..(1): bicyclic nucleic acid (BNA)
  modified_base (2)..(2): bicyclic nucleic acid (BNA)
  modified_base (11)..(11): bicyclic nucleic acid (BNA)
  modified_base (12)..(12): bicyclic nucleic acid (BNA)
  source: /note="3' tri-ethylene glycol (TEG)"
gtaaguucugtc

SEQ ID NO: 12386 - DNA, 11 bp, Artificial Sequence
  source: /note="Description of Artificial Sequence: Synthetic oligonucleotide"
  source: /note="Description of Combined DNA/RNA Molecule: Synthetic oligonucleotide"
  source: /note="DNA/RNA"
  source: /note="5' tri-ethylene glycol (TEG)"
  modified_base (1)..(1): bicyclic nucleic acid (BNA)
  modified_base (2)..(2): bicyclic nucleic acid (BNA)
  modified_base (10)..(10): bicyclic nucleic acid (BNA)
  modified_base (11)..(11): bicyclic nucleic acid (BNA)
  source: /note="3' tri-ethylene glycol (TEG)"
gtaaguucugt

SEQ ID NO: 12387 - DNA, 10 bp, Artificial Sequence
  source: /note="Description of Artificial Sequence: Synthetic oligonucleotide"
  source: /note="Description of Combined DNA/RNA Molecule: Synthetic oligonucleotide"
  source: /note="DNA/RNA"
  source: /note="5' tri-ethylene glycol (TEG)"
  modified_base (1)..(1): bicyclic nucleic acid (BNA)
  modified_base (2)..(2): bicyclic nucleic acid (BNA)
  modified_base (9)..(9): bicyclic nucleic acid (BNA)
  modified_base (10)..(10): bicyclic nucleic acid (BNA)
  source: /note="3' tri-ethylene glycol (TEG)"
gtaaguuctg

SEQ ID NO: 12388 - DNA, 9 bp, Artificial Sequence
  source: /note="Description of Artificial Sequence: Synthetic oligonucleotide"
  source: /note="Description of Combined DNA/RNA Molecule: Synthetic oligonucleotide"
  source: /note="DNA/RNA"
  source: /note="5' tri-ethylene glycol (TEG)"
  modified_base (1)..(1): bicyclic nucleic acid (BNA)
  modified_base (2)..(2): bicyclic nucleic acid (BNA)
  modified_base (8)..(8): bicyclic nucleic acid (BNA)
  modified_base (9)..(9): bicyclic nucleic acid (BNA)
  source: /note="3' tri-ethylene glycol (TEG)"
gtaaguuct

SEQ ID NO: 12389 - DNA, 8 bp, Artificial Sequence
  source: /note="Description of Artificial Sequence: Synthetic oligonucleotide"
  source: /note="Description of Combined DNA/RNA Molecule: Synthetic oligonucleotide"
  source: /note="DNA/RNA"
  source: /note="5' tri-ethylene glycol (TEG)"
  modified_base (1)..(1): bicyclic nucleic acid (BNA)
  modified_base (2)..(2): bicyclic nucleic acid (BNA)
  modified_base (7)..(7): bicyclic nucleic acid (BNA)
  modified_base (8)..(8): bicyclic nucleic acid (BNA)
  source: /note="3' tri-ethylene glycol (TEG)"
gtaagutc

SEQ ID NO: 12390 - RNA, 20 nt, Artificial Sequence
  source: /note="Description of Artificial Sequence: Synthetic oligonucleotide"
  source: /note="RNA"
  source: /note="5' tri-ethylene glycol (TEG)"
  modified_base (1)..(1): bicyclic nucleic acid (BNA)
  modified_base (2)..(2): bicyclic nucleic acid (BNA)
  modified_base (19)..(19): bicyclic nucleic acid (BNA)
  modified_base (20)..(20): bicyclic nucleic acid (BNA)
  source: /note="3' tri-ethylene glycol (TEG)"
gguaaguucuguccaagccc

SEQ ID NO: 12391 - RNA, 19 nt, Artificial Sequence
  source: /note="Description of Artificial Sequence: Synthetic oligonucleotide"
  source: /note="RNA"
  source: /note="5' tri-ethylene glycol (TEG)"
  modified_base (1)..(1): bicyclic nucleic acid (BNA)
  modified_base (2)..(2): bicyclic nucleic acid (BNA)
  modified_base (18)..(18): bicyclic nucleic acid (BNA)
  modified_base (19)..(19): bicyclic nucleic acid (BNA)
  source: /note="3' tri-ethylene glycol (TEG)"
gguaaguucuguccaagcc

SEQ ID NO: 12392 - RNA, 17 nt, Artificial Sequence
  source: /note="Description of Artificial Sequence: Synthetic oligonucleotide"
  source: /note="RNA"
  source: /note="5' tri-ethylene glycol (TEG)"
  modified_base (1)..(1): bicyclic nucleic acid (BNA)
  modified_base (2)..(2): bicyclic nucleic acid (BNA)
  modified_base (16)..(16): bicyclic nucleic acid (BNA)
  modified_base (17)..(17): bicyclic nucleic acid (BNA)
  source: /note="3' tri-ethylene glycol (TEG)"
gguaaguucuguccaag

SEQ ID NO: 12393 - RNA, 16 nt, Artificial Sequence
  source: /note="Description of Artificial Sequence: Synthetic oligonucleotide"
  source: /note="RNA"
  source: /note="5' tri-ethylene glycol (TEG)"
  modified_base (1)..(1): bicyclic nucleic acid (BNA)
  modified_base (2)..(2): bicyclic nucleic acid (BNA)
  modified_base (15)..(15): bicyclic nucleic acid (BNA)
  modified_base (16)..(16): bicyclic nucleic acid (BNA)
  source: /note="3' tri-ethylene glycol (TEG)"
gguaaguucuguccaa

SEQ ID NO: 12394 - RNA, 15 nt, Artificial Sequence
  source: /note="Description of Artificial Sequence: Synthetic oligonucleotide"
  source: /note="RNA"
  source: /note="5' tri-ethylene glycol (TEG)"
  modified_base (1)..(1): bicyclic nucleic acid (BNA)
  modified_base (2)..(2): bicyclic nucleic acid (BNA)
  modified_base (14)..(14): bicyclic nucleic acid (BNA)
  modified_base (15)..(15): bicyclic nucleic acid (BNA)
  source: /note="3' tri-ethylene glycol (TEG)"
gguaaguucugucca

SEQ ID NO: 12395 - RNA, 14 nt, Artificial Sequence
  source: /note="Description of Artificial Sequence: Synthetic oligonucleotide"
  source: /note="RNA"
  source: /note="5' tri-ethylene glycol (TEG)"
  modified_base (1)..(1): bicyclic nucleic acid (BNA)
  modified_base (2)..(2): bicyclic nucleic acid (BNA)
  modified_base (13)..(13): bicyclic nucleic acid (BNA)
  modified_base (14)..(14): bicyclic nucleic acid (BNA)
  source: /note="3' tri-ethylene glycol (TEG)"
gguaaguucugucc

SEQ ID NO: 12396 - DNA, 13 bp, Artificial Sequence
  source: /note="Description of Artificial Sequence: Synthetic oligonucleotide"
  source: /note="Description of Combined DNA/RNA Molecule: Synthetic oligonucleotide"
  source: /note="DNA/RNA"
  source: /note="5' tri-ethylene glycol (TEG)"
  modified_base (1)..(1): bicyclic nucleic acid (BNA)
  modified_base (2)..(2): bicyclic nucleic acid (BNA)
  modified_base (12)..(12): bicyclic nucleic acid (BNA)
  modified_base (13)..(13): bicyclic nucleic acid (BNA)
  source: /note="3' tri-ethylene glycol (TEG)"
gguaaguucugtc

SEQ ID NO: 12397 - DNA, 12 bp, Artificial Sequence
  source: /note="Description of Artificial Sequence: Synthetic oligonucleotide"
  source: /note="Description of Combined DNA/RNA Molecule: Synthetic oligonucleotide"
  source: /note="DNA/RNA"
  source: /note="5' tri-ethylene glycol (TEG)"
  modified_base (1)..(1): bicyclic nucleic acid (BNA)
  modified_base (2)..(2): bicyclic nucleic acid (BNA)
  modified_base (11)..(11): bicyclic nucleic acid (BNA)
  modified_base (12)..(12): bicyclic nucleic acid (BNA)
  source: /note="3' tri-ethylene glycol (TEG)"
gguaaguucugt

SEQ ID NO: 12398 - DNA, 11 bp, Artificial Sequence
  source: /note="Description of Artificial Sequence: Synthetic oligonucleotide"
  source: /note="Description of Combined DNA/RNA Molecule: Synthetic oligonucleotide"
  source: /note="DNA/RNA"
  source: /note="5' tri-ethylene glycol (TEG)"
  modified_base (1)..(1): bicyclic nucleic acid (BNA)
  modified_base (2)..(2): bicyclic nucleic acid (BNA)
  modified_base (10)..(10): bicyclic nucleic acid (BNA)
  modified_base (11)..(11): bicyclic nucleic acid (BNA)
  source: /note="3' tri-ethylene glycol (TEG)"
gguaaguuctg

SEQ ID NO: 12399 - DNA, 10 bp, Artificial Sequence
  source: /note="Description of Artificial Sequence: Synthetic oligonucleotide"
  source: /note="Description of Combined DNA/RNA Molecule: Synthetic oligonucleotide"
  source: /note="DNA/RNA"
  source: /note="5' tri-ethylene glycol (TEG)"
  modified_base (1)..(1): bicyclic nucleic acid (BNA)
  modified_base (2)..(2): bicyclic nucleic acid (BNA)
  modified_base (9)..(9): bicyclic nucleic acid (BNA)
  modified_base (10)..(10): bicyclic nucleic acid (BNA)
  source: /note="3' tri-ethylene glycol (TEG)"
gguaaguuct

SEQ ID NO: 12400 - DNA, 9 bp, Artificial Sequence
  source: /note="Description of Artificial Sequence: Synthetic oligonucleotide"
  source: /note="Description of Combined DNA/RNA Molecule: Synthetic oligonucleotide"
  source: /note="DNA/RNA"
  source: /note="5' tri-ethylene glycol (TEG)"
  modified_base (1)..(1): bicyclic nucleic acid (BNA)
  modified_base (2)..(2): bicyclic nucleic acid (BNA)
  modified_base (8)..(8): bicyclic nucleic acid (BNA)
  modified_base (9)..(9): bicyclic nucleic acid (BNA)
  source: /note="3' tri-ethylene glycol (TEG)"
gguaagutc

SEQ ID NO: 12401 - DNA, 8 bp, Artificial Sequence
  source: /note="Description of Artificial Sequence: Synthetic oligonucleotide"
  source: /note="Description of Combined DNA/RNA Molecule: Synthetic oligonucleotide"
  source: /note="DNA/RNA"
  source: /note="5' tri-ethylene glycol (TEG)"
  modified_base (1)..(1): bicyclic nucleic acid (BNA)
  modified_base (2)..(2): bicyclic nucleic acid (BNA)
  modified_base (7)..(7): bicyclic nucleic acid (BNA)
  modified_base (8)..(8): bicyclic nucleic acid (BNA)
  source: /note="3' tri-ethylene glycol (TEG)"
gguaagtt

SEQ ID NO: 12402 - RNA, 20 nt, Artificial Sequence
  source: /note="Description of Artificial Sequence: Synthetic oligonucleotide"
  source: /note="RNA"
  source: /note="5' tri-ethylene glycol (TEG)"
  modified_base (1)..(1): bicyclic nucleic acid (BNA)
  modified_base (2)..(2): bicyclic nucleic acid (BNA)
  modified_base (19)..(19): bicyclic nucleic acid (BNA)
  modified_base (20)..(20): bicyclic nucleic acid (BNA)
  source: /note="3' tri-ethylene glycol (TEG)"
cgguaaguucuguccaagcc

SEQ ID NO: 12403 - RNA, 19 nt, Artificial Sequence
  source: /note="Description of Artificial Sequence: Synthetic oligonucleotide"
  source: /note="RNA"
  source: /note="5' tri-ethylene glycol (TEG)"
  modified_base (1)..(1): bicyclic nucleic acid (BNA)
  modified_base (2)..(2): bicyclic nucleic acid (BNA)
  modified_base (18)..(18): bicyclic nucleic acid (BNA)
  modified_base (19)..(19): bicyclic nucleic acid (BNA)
  source: /note="3' tri-ethylene glycol (TEG)"
cgguaaguucuguccaagc

SEQ ID NO: 12404 - RNA, 18 nt, Artificial Sequence
  source: /note="Description of Artificial Sequence: Synthetic oligonucleotide"
  source: /note="RNA"
  source: /note="5' tri-ethylene glycol (TEG)"
  modified_base (1)..(1): bicyclic nucleic acid (BNA)
  modified_base (2)..(2): bicyclic nucleic acid (BNA)
  modified_base (17)..(17): bicyclic nucleic acid (BNA)
  modified_base (18)..(18): bicyclic nucleic acid (BNA)
  source: /note="3' tri-ethylene glycol (TEG)"
cgguaaguucuguccaag

SEQ ID NO: 12405 - RNA, 17 nt, Artificial Sequence
  source: /note="Description of Artificial Sequence: Synthetic oligonucleotide"
  source: /note="RNA"
  source: /note="5' tri-ethylene glycol (TEG)"
  modified_base (1)..(1): bicyclic nucleic acid (BNA)
  modified_base (2)..(2): bicyclic nucleic acid (BNA)
  modified_base (16)..(16): bicyclic nucleic acid (BNA)
  modified_base (17)..(17): bicyclic nucleic acid (BNA)
  source: /note="3' tri-ethylene glycol (TEG)"
cgguaaguucuguccaa

SEQ ID NO: 12406 - RNA, 16 nt, Artificial Sequence
  source: /note="Description of Artificial Sequence: Synthetic oligonucleotide"
  source: /note="RNA"
  source: /note="5' tri-ethylene glycol (TEG)"
  modified_base (1)..(1): bicyclic nucleic acid (BNA)
  modified_base (2)..(2): bicyclic nucleic acid (BNA)
  modified_base (15)..(15): bicyclic nucleic acid (BNA)
  modified_base (16)..(16): bicyclic nucleic acid (BNA)
  source: /note="3' tri-ethylene glycol (TEG)"
cgguaaguucugucca

SEQ ID NO: 12407 - RNA, 15 nt, Artificial Sequence
  source: /note="Description of Artificial Sequence: Synthetic oligonucleotide"
  source: /note="RNA"
  source: /note="5' tri-ethylene glycol (TEG)"
  modified_base (1)..(1): bicyclic nucleic acid (BNA)
  modified_base (2)..(2): bicyclic nucleic acid (BNA)
  modified_base (14)..(14): bicyclic nucleic acid (BNA)
  modified_base (15)..(15): bicyclic nucleic acid (BNA)
  source: /note="3' tri-ethylene glycol (TEG)"
cgguaaguucugucc

SEQ ID NO: 12408 - DNA, 14 bp, Artificial Sequence
  source: /note="Description of Artificial Sequence: Synthetic oligonucleotide"
  source: /note="Description of Combined DNA/RNA Molecule: Synthetic oligonucleotide"
  source: /note="DNA/RNA"
  source: /note="5' tri-ethylene glycol (TEG)"
  modified_base (1)..(1): bicyclic nucleic acid (BNA)
  modified_base (2)..(2): bicyclic nucleic acid (BNA)
  modified_base (13)..(13): bicyclic nucleic acid (BNA)
  modified_base (14)..(14): bicyclic nucleic acid (BNA)
  source: /note="3' tri-ethylene glycol (TEG)"
cgguaaguucugtc

SEQ ID NO: 12409 - DNA, 13 bp, Artificial Sequence
  source: /note="Description of Artificial Sequence: Synthetic oligonucleotide"
  source: /note="Description of Combined DNA/RNA Molecule: Synthetic oligonucleotide"
  source: /note="DNA/RNA"
  source: /note="5' tri-ethylene glycol (TEG)"
  modified_base (1)..(1): bicyclic nucleic acid (BNA)
  modified_base (2)..(2): bicyclic nucleic acid (BNA)
  modified_base (12)..(12): bicyclic nucleic acid (BNA)
  modified_base (13)..(13): bicyclic nucleic acid (BNA)
  source: /note="3' tri-ethylene glycol (TEG)"
cgguaaguucugt

SEQ ID NO: 12410 - DNA, 12 bp, Artificial Sequence
  source: /note="Description of Artificial Sequence: Synthetic oligonucleotide"
  source: /note="Description of Combined DNA/RNA Molecule: Synthetic oligonucleotide"
  source: /note="DNA/RNA"
  source: /note="5' tri-ethylene glycol (TEG)"
  modified_base (1)..(1): bicyclic nucleic acid (BNA)
  modified_base (2)..(2): bicyclic nucleic acid (BNA)
  modified_base (11)..(11): bicyclic nucleic acid (BNA)
  modified_base (12)..(12): bicyclic nucleic acid (BNA)
  source: /note="3' tri-ethylene glycol (TEG)"
cgguaaguuctg

SEQ ID NO: 12411 - DNA, 11 bp, Artificial Sequence
  source: /note="Description of Artificial Sequence: Synthetic oligonucleotide"
  source: /note="Description of Combined DNA/RNA Molecule: Synthetic oligonucleotide"
  source: /note="DNA/RNA"
  source: /note="5' tri-ethylene glycol (TEG)"
  modified_base (1)..(1): bicyclic nucleic acid (BNA)
  modified_base (2)..(2): bicyclic nucleic acid (BNA)
  modified_base (10)..(10): bicyclic nucleic acid (BNA)
  modified_base (11)..(11): bicyclic nucleic acid (BNA)
  source: /note="3' tri-ethylene glycol (TEG)"
cgguaaguuct

SEQ ID NO: 12412 - DNA, 10 bp, Artificial Sequence
  source: /note="Description of Artificial Sequence: Synthetic oligonucleotide"
  source: /note="Description of Combined DNA/RNA Molecule: Synthetic oligonucleotide"
  source: /note="DNA/RNA"
  source: /note="5' tri-ethylene glycol (TEG)"
  modified_base (1)..(1): bicyclic nucleic acid (BNA)
  modified_base (2)..(2): bicyclic nucleic acid (BNA)
  modified_base (9)..(9): bicyclic nucleic acid (BNA)
  modified_base (10)..(10): bicyclic nucleic acid (BNA)
  source: /note="3' tri-ethylene glycol (TEG)"
cgguaagutc

SEQ ID NO: 12413 - DNA, 9 bp, Artificial Sequence
  source: /note="Description of Artificial Sequence: Synthetic oligonucleotide"
  source: /note="Description of Combined DNA/RNA Molecule: Synthetic oligonucleotide"
  source: /note="DNA/RNA"
  source: /note="5' tri-ethylene glycol (TEG)"
  modified_base (1)..(1): bicyclic nucleic acid (BNA)
  modified_base (2)..(2): bicyclic nucleic acid (BNA)
  modified_base (8)..(8): bicyclic nucleic acid (BNA)
  modified_base (9)..(9): bicyclic nucleic acid (BNA)
  source: /note="3' tri-ethylene glycol (TEG)"
cgguaagtt

SEQ ID NO: 12414 - DNA, 8 bp, Artificial Sequence
  source: /note="Description of Artificial Sequence: Synthetic oligonucleotide"
  source: /note="Description of Combined DNA/RNA Molecule: Synthetic oligonucleotide"
  source: /note="DNA/RNA"
  source: /note="5' tri-ethylene glycol (TEG)"
  modified_base (1)..(1): bicyclic nucleic acid (BNA)
  modified_base (2)..(2): bicyclic nucleic acid (BNA)
  modified_base (7)..(7): bicyclic nucleic acid (BNA)
  modified_base (8)..(8): bicyclic nucleic acid (BNA)
  source: /note="3' tri-ethylene glycol (TEG)"
cgguaagt

SEQ ID NO: 12415 - DNA, 20 bp, Artificial Sequence
  source: /note="Description of Artificial Sequence: Synthetic oligonucleotide"
  source: /note="Description of Combined DNA/RNA Molecule: Synthetic oligonucleotide"
  source: /note="DNA/RNA"
  source: /note="5' tri-ethylene glycol (TEG)"
  modified_base (1)..(1): bicyclic nucleic acid (BNA)
  modified_base (2)..(2): bicyclic nucleic acid (BNA)
  modified_base (19)..(19): bicyclic nucleic acid (BNA)
  modified_base (20)..(20): bicyclic nucleic acid (BNA)
  source: /note="3' tri-ethylene glycol (TEG)"
tcgguaaguucuguccaagc

SEQ ID NO: 12416 - DNA, 19 bp, Artificial Sequence
  source: /note="Description of Artificial Sequence: Synthetic oligonucleotide"
  source: /note="Description of Combined DNA/RNA Molecule: Synthetic oligonucleotide"
  source: /note="DNA/RNA"
  source: /note="5' tri-ethylene glycol (TEG)"
  modified_base (1)..(1): bicyclic nucleic acid (BNA)
  modified_base (2)..(2): bicyclic nucleic acid (BNA)
  modified_base (18)..(18): bicyclic nucleic acid (BNA)
  modified_base (19)..(19): bicyclic nucleic acid (BNA)
  source: /note="3' tri-ethylene glycol (TEG)"
tcgguaaguucuguccaag

SEQ ID NO: 12417 - DNA, 18 bp, Artificial Sequence
  source: /note="Description of Artificial Sequence: Synthetic oligonucleotide"
  source: /note="Description of Combined DNA/RNA Molecule: Synthetic oligonucleotide"
  source: /note="DNA/RNA"
  source: /note="5' tri-ethylene glycol (TEG)"
  modified_base (1)..(1): bicyclic nucleic acid (BNA)
  modified_base (2)..(2): bicyclic nucleic acid (BNA)
  modified_base (17)..(17): bicyclic nucleic acid (BNA)
  modified_base (18)..(18): bicyclic nucleic acid (BNA)
  source: /note="3' tri-ethylene glycol (TEG)"
tcgguaaguucuguccaa

SEQ ID NO: 12418 - DNA, 17 bp, Artificial Sequence
  source: /note="Description of Artificial Sequence: Synthetic oligonucleotide"
  source: /note="Description of Combined DNA/RNA Molecule: Synthetic oligonucleotide"
  source: /note="DNA/RNA"
  source: /note="5' tri-ethylene glycol (TEG)"
  modified_base (1)..(1): bicyclic nucleic acid (BNA)
  modified_base (2)..(2): bicyclic nucleic acid (BNA)
  modified_base (16)..(16): bicyclic nucleic acid (BNA)
  modified_base (17)..(17): bicyclic nucleic acid (BNA)
  source: /note="3' tri-ethylene glycol (TEG)"
tcgguaaguucugucca

SEQ ID NO: 12419 - DNA, 16 bp, Artificial Sequence
  source: /note="Description of Artificial Sequence: Synthetic oligonucleotide"
  source: /note="Description of Combined DNA/RNA Molecule: Synthetic oligonucleotide"
  source: /note="DNA/RNA"
  source: /note="5' tri-ethylene glycol (TEG)"
  modified_base (1)..(1): bicyclic nucleic acid (BNA)
  modified_base (2)..(2): bicyclic nucleic acid (BNA)
  modified_base (15)..(15): bicyclic nucleic acid (BNA)
  modified_base (16)..(16): bicyclic nucleic acid (BNA)
  source: /note="3' tri-ethylene glycol (TEG)"
tcgguaaguucugucc

SEQ ID NO: 12420 - DNA, 15 bp, Artificial Sequence
  source: /note="Description of Artificial Sequence: Synthetic oligonucleotide"
  source: /note="Description of Combined DNA/RNA Molecule: Synthetic oligonucleotide"
  source: /note="DNA/RNA"
  source: /note="5' tri-ethylene glycol (TEG)"
  modified_base (1)..(1): bicyclic nucleic acid (BNA)
  modified_base (2)..(2): bicyclic nucleic acid (BNA)
  modified_base (14)..(14): bicyclic nucleic acid (BNA)
  modified_base (15)..(15): bicyclic nucleic acid (BNA)
  source: /note="3' tri-ethylene glycol (TEG)"
tcgguaaguucugtc

SEQ ID NO: 12421 - DNA, 14 bp, Artificial Sequence
  source: /note="Description of Artificial Sequence: Synthetic oligonucleotide"
  source: /note="Description of Combined DNA/RNA Molecule: Synthetic oligonucleotide"
  source: /note="DNA/RNA"
  source: /note="5' tri-ethylene glycol (TEG)"
  modified_base (1)..(1): bicyclic nucleic acid (BNA)
  modified_base (2)..(2): bicyclic nucleic acid (BNA)
  modified_base (13)..(13): bicyclic nucleic acid (BNA)
  modified_base (14)..(14): bicyclic nucleic acid (BNA)
  source: /note="3' tri-ethylene glycol (TEG)"
tcgguaaguucugt

SEQ ID NO: 12422 - DNA, 13 bp, Artificial Sequence
  source: /note="Description of Artificial Sequence: Synthetic oligonucleotide"
  source: /note="Description of Combined DNA/RNA Molecule: Synthetic oligonucleotide"
  source: /note="DNA/RNA"
  source: /note="5' tri-ethylene glycol (TEG)"
  modified_base (1)..(1): bicyclic nucleic acid (BNA)
  modified_base (2)..(2): bicyclic nucleic acid (BNA)
  modified_base (12)..(12): bicyclic nucleic acid (BNA)
  modified_base (13)..(13): bicyclic nucleic acid (BNA)
  source: /note="3' tri-ethylene glycol (TEG)"
tcgguaaguuctg

SEQ ID NO: 12423 - DNA, 12 bp, Artificial Sequence
  source: /note="Description of Artificial Sequence: Synthetic oligonucleotide"
  source: /note="Description of Combined DNA/RNA Molecule: Synthetic oligonucleotide"
  source: /note="DNA/RNA"
  source: /note="5' tri-ethylene glycol (TEG)"
  modified_base (1)..(1): bicyclic nucleic acid (BNA)
  modified_base (2)..(2): bicyclic nucleic acid (BNA)
  modified_base (11)..(11): bicyclic nucleic acid (BNA)
  modified_base (12)..(12): bicyclic nucleic acid (BNA)
  source: /note="3' tri-ethylene glycol (TEG)"
tcgguaaguuct

SEQ ID NO: 12424 - DNA, 11 bp, Artificial Sequence
  source: /note="Description of Artificial Sequence: Synthetic oligonucleotide"
  source: /note="Description of Combined DNA/RNA Molecule: Synthetic oligonucleotide"
  source: /note="DNA/RNA"
  source: /note="5' tri-ethylene glycol (TEG)"
  modified_base (1)..(1): bicyclic nucleic acid (BNA)
  modified_base (2)..(2): bicyclic nucleic acid (BNA)
  modified_base (10)..(10): bicyclic nucleic acid (BNA)
  modified_base (11)..(11): bicyclic nucleic acid (BNA)
  source: /note="3' tri-ethylene glycol (TEG)"
tcgguaagutc

SEQ ID NO: 12425 - DNA, 10 bp, Artificial Sequence
  source: /note="Description of Artificial Sequence: Synthetic oligonucleotide"
  source: /note="Description of Combined DNA/RNA Molecule: Synthetic oligonucleotide"
  source: /note="DNA/RNA"
  source: /note="5' tri-ethylene glycol (TEG)"
  modified_base (1)..(1): bicyclic nucleic acid (BNA)
  modified_base (2)..(2): bicyclic nucleic acid (BNA)
  modified_base (9)..(9): bicyclic nucleic acid (BNA)
  modified_base (10)..(10): bicyclic nucleic acid (BNA)
  source: /note="3' tri-ethylene glycol (TEG)"
tcgguaagtt

SEQ ID NO: 12426 - DNA, 9 bp, Artificial Sequence
  source: /note="Description of Artificial Sequence: Synthetic oligonucleotide"
  source: /note="Description of Combined DNA/RNA Molecule: Synthetic oligonucleotide"
  source: /note="DNA/RNA"
  source: /note="5' tri-ethylene glycol (TEG)"
  modified_base (1)..(1): bicyclic nucleic acid (BNA)
  modified_base (2)..(2): bicyclic nucleic acid (BNA)
  modified_base (8)..(8): bicyclic nucleic acid (BNA)
  modified_base (9)..(9): bicyclic nucleic acid (BNA)
  source: /note="3' tri-ethylene glycol (TEG)"
tcgguaagt

SEQ ID NO: 12427 - DNA, 20 bp, Artificial Sequence
  source: /note="Description of Artificial Sequence: Synthetic oligonucleotide"
  source: /note="Description of Combined DNA/RNA Molecule: Synthetic oligonucleotide"
  source: /note="DNA/RNA"
  source: /note="5' tri-ethylene glycol (TEG)"
  modified_base (1)..(1): bicyclic nucleic acid (BNA)
  modified_base (2)..(2): bicyclic nucleic acid (BNA)
  modified_base (19)..(19): bicyclic nucleic acid (BNA)
  modified_base (20)..(20): bicyclic nucleic acid (BNA)
  source: /note="3' tri-ethylene glycol (TEG)"
gtcgguaaguucuguccaag

SEQ ID NO: 12428 - DNA, 19 bp, Artificial Sequence
  source: /note="Description of Artificial Sequence: Synthetic oligonucleotide"
  source: /note="Description of Combined DNA/RNA Molecule: Synthetic oligonucleotide"
  source: /note="DNA/RNA"
  source: /note="5' tri-ethylene glycol (TEG)"
  modified_base (1)..(1): bicyclic nucleic acid (BNA)
  modified_base (2)..(2): bicyclic nucleic acid (BNA)
  modified_base (18)..(18): bicyclic nucleic acid (BNA)
  modified_base (19)..(19): bicyclic nucleic acid (BNA)
  source: /note="3' tri-ethylene glycol (TEG)"
gtcgguaaguucuguccaa

SEQ ID NO: 12429 - DNA, 18 bp, Artificial Sequence
  source: /note="Description of Artificial Sequence: Synthetic oligonucleotide"
  source: /note="Description of Combined DNA/RNA Molecule: Synthetic oligonucleotide"
  source: /note="DNA/RNA"
  source: /note="5' tri-ethylene glycol (TEG)"
  modified_base (1)..(1): bicyclic nucleic acid (BNA)
  modified_base (2)..(2): bicyclic nucleic acid (BNA)
  modified_base (17)..(17): bicyclic nucleic acid (BNA)
  modified_base (18)..(18): bicyclic nucleic acid (BNA)
  source: /note="3' tri-ethylene glycol (TEG)"
gtcgguaaguucugucca

SEQ ID NO: 12430 - DNA, 17 bp, Artificial Sequence
  source: /note="Description of Artificial Sequence: Synthetic oligonucleotide"
  source: /note="Description of Combined DNA/RNA Molecule: Synthetic oligonucleotide"
  source: /note="DNA/RNA"
  source: /note="5' tri-ethylene glycol (TEG)"
  modified_base (1)..(1): bicyclic nucleic acid (BNA)
  modified_base (2)..(2): bicyclic nucleic acid (BNA)
  modified_base (16)..(16): bicyclic nucleic acid (BNA)
  modified_base (17)..(17): bicyclic nucleic acid (BNA)
  source: /note="3' tri-ethylene glycol (TEG)"
gtcgguaaguucugucc

SEQ ID NO: 12431 - DNA, 16 bp, Artificial Sequence
  source: /note="Description of Artificial Sequence: Synthetic oligonucleotide"
  source: /note="Description of Combined DNA/RNA Molecule: Synthetic oligonucleotide"
  source: /note="DNA/RNA"
  source: /note="5' tri-ethylene glycol (TEG)"
  modified_base (1)..(1): bicyclic nucleic acid (BNA)
  modified_base (2)..(2): bicyclic nucleic acid (BNA)
  modified_base (15)..(15): bicyclic nucleic acid (BNA)
  modified_base (16)..(16): bicyclic nucleic acid (BNA)
  source: /note="3' tri-ethylene glycol (TEG)"
gtcgguaaguucugtc

SEQ ID NO: 12432 - DNA, 15 bp, Artificial Sequence
  source: /note="Description of Artificial Sequence: Synthetic oligonucleotide"
  source: /note="Description of Combined DNA/RNA Molecule: Synthetic oligonucleotide"
  source: /note="DNA/RNA"
  source: /note="5' tri-ethylene glycol (TEG)"
  modified_base (1)..(1): bicyclic nucleic acid (BNA)
  modified_base (2)..(2): bicyclic nucleic acid (BNA)
  modified_base (14)..(14): bicyclic nucleic acid (BNA)
  modified_base (15)..(15): bicyclic nucleic acid (BNA)
  source: /note="3' tri-ethylene glycol (TEG)"
gtcgguaaguucugt

SEQ ID NO: 12433 - DNA, 14 bp, Artificial Sequence
  source: /note="Description of Artificial Sequence: Synthetic oligonucleotide"
  source: /note="Description of Combined DNA/RNA Molecule: Synthetic oligonucleotide"
  source: /note="DNA/RNA"
  source: /note="5' tri-ethylene glycol (TEG)"
  modified_base (1)..(1): bicyclic nucleic acid (BNA)
  modified_base (2)..(2): bicyclic nucleic acid (BNA)
  modified_base (13)..(13): bicyclic nucleic acid (BNA)
  modified_base (14)..(14): bicyclic nucleic acid (BNA)
  source: /note="3' tri-ethylene glycol (TEG)"
gtcgguaaguuctg

SEQ ID NO: 12434 - DNA, 13 bp, Artificial Sequence
  source: /note="Description of Artificial Sequence: Synthetic oligonucleotide"
  source: /note="Description of Combined DNA/RNA Molecule: Synthetic oligonucleotide"
  source: /note="DNA/RNA"
  source: /note="5' tri-ethylene glycol (TEG)"
  modified_base (1)..(1): bicyclic nucleic acid (BNA)
  modified_base (2)..(2): bicyclic nucleic acid (BNA)
  modified_base (12)..(12): bicyclic nucleic acid (BNA)
  modified_base (13)..(13): bicyclic nucleic acid (BNA)
  source: /note="3' tri-ethylene glycol (TEG)"
gtcgguaaguuct

SEQ ID NO: 12435 - DNA, 12 bp, Artificial Sequence
  source: /note="Description of Artificial Sequence: Synthetic oligonucleotide"
  source: /note="Description of Combined DNA/RNA Molecule: Synthetic oligonucleotide"
  source: /note="DNA/RNA"
  source: /note="5' tri-ethylene glycol (TEG)"
  modified_base (1)..(1): bicyclic nucleic acid (BNA)
  modified_base (2)..(2): bicyclic nucleic acid (BNA)
  modified_base (11)..(11): bicyclic nucleic acid (BNA)
  modified_base (12)..(12): bicyclic nucleic acid (BNA)
  source: /note="3' tri-ethylene glycol (TEG)"
gtcgguaagutc

SEQ ID NO: 12436 - DNA, 11 bp, Artificial Sequence
  source: /note="Description of Artificial Sequence: Synthetic oligonucleotide"
  source: /note="Description of Combined DNA/RNA Molecule: Synthetic oligonucleotide"
  source: /note="DNA/RNA"
  source: /note="5' tri-ethylene glycol (TEG)"
  modified_base (1)..(1): bicyclic nucleic acid (BNA)
  modified_base (2)..(2): bicyclic nucleic acid (BNA)
  modified_base (10)..(10): bicyclic nucleic acid (BNA)
  modified_base (11)..(11): bicyclic nucleic acid (BNA)
  source: /note="3' tri-ethylene glycol (TEG)"
gtcgguaagtt

SEQ ID NO: 12437 - DNA, 10 bp, Artificial Sequence
  source: /note="Description of Artificial Sequence: Synthetic oligonucleotide"
  source: /note="Description of Combined DNA/RNA Molecule: Synthetic oligonucleotide"
  source: /note="DNA/RNA"
  source: /note="5' tri-ethylene glycol (TEG)"
  modified_base (1)..(1): bicyclic nucleic acid (BNA)
  modified_base (2)..(2): bicyclic nucleic acid (BNA)
  modified_base (9)..(9): bicyclic nucleic acid (BNA)
  modified_base (10)..(10): bicyclic nucleic acid (BNA)
  source: /note="3' tri-ethylene glycol (TEG)"
gtcgguaagt

SEQ ID NO: 12438 - RNA, 20 nt, Artificial Sequence
  source: /note="Description of Artificial Sequence: Synthetic oligonucleotide"
  source: /note="RNA"
  source: /note="5' tri-ethylene glycol (TEG)"
  modified_base (1)..(1): bicyclic nucleic acid (BNA)
  modified_base (2)..(2): bicyclic nucleic acid (BNA)
  modified_base (19)..(19): bicyclic nucleic acid (BNA)
  modified_base (20)..(20): bicyclic nucleic acid (BNA)
  source: /note="3' tri-ethylene glycol (TEG)"
agucgguaaguucuguccaa

SEQ ID NO: 12439 - RNA, 19 nt, Artificial Sequence
  source: /note="Description of Artificial Sequence: Synthetic oligonucleotide"
  source: /note="RNA"
  source: /note="5' tri-ethylene glycol (TEG)"
  modified_base (1)..(1): bicyclic nucleic acid (BNA)
  modified_base (2)..(2): bicyclic nucleic acid (BNA)
  modified_base (18)..(18): bicyclic nucleic acid (BNA)
  modified_base (19)..(19): bicyclic nucleic acid (BNA)
  source: /note="3' tri-ethylene glycol (TEG)"
agucgguaaguucugucca

SEQ ID NO: 12440 - DNA, 17 bp, Artificial Sequence
  source: /note="Description of Artificial Sequence: Synthetic oligonucleotide"
  source: /note="Description of Combined DNA/RNA Molecule: Synthetic oligonucleotide"
  source: /note="DNA/RNA"
  source: /note="5' tri-ethylene glycol (TEG)"
  modified_base (1)..(1): bicyclic nucleic acid (BNA)
  modified_base (2)..(2): bicyclic nucleic acid (BNA)
  modified_base (16)..(16): bicyclic nucleic acid (BNA)
  modified_base (17)..(17): bicyclic nucleic acid (BNA)
  source: /note="3' tri-ethylene glycol (TEG)"
agucgguaaguucugtc

SEQ ID NO: 12441 - DNA, 16 bp, Artificial Sequence
  source: /note="Description of Artificial Sequence: Synthetic oligonucleotide"
  source: /note="Description of Combined DNA/RNA Molecule: Synthetic oligonucleotide"
  source: /note="DNA/RNA"
  source: /note="5' tri-ethylene glycol (TEG)"
  modified_base (1)..(1): bicyclic nucleic acid (BNA)
  modified_base (2)..(2): bicyclic nucleic acid (BNA)
  modified_base (15)..(15): bicyclic nucleic acid (BNA)
  modified_base (16)..(16): bicyclic nucleic acid (BNA)
  source: /note="3' tri-ethylene glycol (TEG)"
agucgguaaguucugt

SEQ ID NO: 12442 - DNA, 15 bp, Artificial Sequence
  source: /note="Description of Artificial Sequence: Synthetic oligonucleotide"
  source: /note="Description of Combined DNA/RNA Molecule: Synthetic oligonucleotide"
  source: /note="DNA/RNA"
  source: /note="5' tri-ethylene glycol (TEG)"
  modified_base (1)..(1): bicyclic nucleic acid (BNA)
  modified_base (2)..(2): bicyclic nucleic acid (BNA)
  modified_base (14)..(14): bicyclic nucleic acid (BNA)
  modified_base (15)..(15): bicyclic nucleic acid (BNA)
  source: /note="3' tri-ethylene glycol (TEG)"
agucgguaaguuctg

SEQ ID NO: 12443 - DNA, 14 bp, Artificial Sequence
  source: /note="Description of Artificial Sequence: Synthetic oligonucleotide"
  source: /note="Description of Combined DNA/RNA Molecule: Synthetic oligonucleotide"
  source: /note="DNA/RNA"
  source: /note="5' tri-ethylene glycol (TEG)"
  modified_base (1)..(1): bicyclic nucleic acid (BNA)
  modified_base (2)..(2): bicyclic nucleic acid (BNA)
  modified_base (13)..(13): bicyclic nucleic acid (BNA)
  modified_base (14)..(14): bicyclic nucleic acid (BNA)
  source: /note="3' tri-ethylene glycol (TEG)"
agucgguaaguuct

SEQ ID NO: 12444 - DNA, 13 bp, Artificial Sequence
  source: /note="Description of Artificial Sequence: Synthetic oligonucleotide"
  source: /note="Description of Combined DNA/RNA Molecule: Synthetic oligonucleotide"
  source: /note="DNA/RNA"
  source: /note="5' tri-ethylene glycol (TEG)"
  modified_base (1)..(1): bicyclic nucleic acid (BNA)
  modified_base (2)..(2): bicyclic nucleic acid (BNA)
  modified_base (12)..(12): bicyclic nucleic acid (BNA)
  modified_base (13)..(13): bicyclic nucleic acid (BNA)
  source: /note="3' tri-ethylene glycol (TEG)"
agucgguaagutc

SEQ ID NO: 12445 - DNA, 12 bp, Artificial Sequence
  source: /note="Description of Artificial Sequence: Synthetic oligonucleotide"
  source: /note="Description of Combined DNA/RNA Molecule: Synthetic oligonucleotide"
  source: /note="DNA/RNA"
  source: /note="5' tri-ethylene glycol (TEG)"
  modified_base (1)..(1): bicyclic nucleic acid (BNA)
  modified_base (2)..(2): bicyclic nucleic acid (BNA)
  modified_base (11)..(11): bicyclic nucleic acid (BNA)
  modified_base (12)..(12): bicyclic nucleic acid (BNA)
  source: /note="3' tri-ethylene glycol (TEG)"
agucgguaagtt

SEQ ID NO: 12446 - DNA, 11 bp, Artificial Sequence
  source: /note="Description of Artificial Sequence: Synthetic oligonucleotide"
  source: /note="Description of Combined DNA/RNA Molecule: Synthetic oligonucleotide"
  source: /note="DNA/RNA"
  source: /note="5' tri-ethylene glycol (TEG)"
  modified_base (1)..(1): bicyclic nucleic acid (BNA)
  modified_base (2)..(2): bicyclic nucleic acid (BNA)
  modified_base (10)..(10): bicyclic nucleic acid (BNA)
  modified_base (11)..(11): bicyclic nucleic acid (BNA)
  source: /note="3' tri-ethylene glycol (TEG)"
agucgguaagt

SEQ ID NO: 12447 - RNA, 20 nt, Artificial Sequence
  source: /note="Description of Artificial Sequence: Synthetic oligonucleotide"
  source: /note="RNA"
  source: /note="5' tri-ethylene glycol (TEG)"
  modified_base (1)..(1): bicyclic nucleic acid (BNA)
  modified_base (2)..(2): bicyclic nucleic acid (BNA)
  modified_base (19)..(19): bicyclic nucleic acid (BNA)
  modified_base (20)..(20): bicyclic nucleic acid (BNA)
  source: /note="3' tri-ethylene glycol (TEG)"
cagucgguaaguucugucca

SEQ ID NO: 12448 - RNA, 19 nt, Artificial Sequence
  source: /note="Description of Artificial Sequence: Synthetic oligonucleotide"
  source: /note="RNA"
  source: /note="5' tri-ethylene glycol (TEG)"
  modified_base (1)..(1): bicyclic nucleic acid (BNA)
  modified_base (2)..(2): bicyclic nucleic acid (BNA)
  modified_base (18)..(18): bicyclic nucleic acid (BNA)
  modified_base (19)..(19): bicyclic nucleic acid (BNA)
  source: /note="3' tri-ethylene glycol (TEG)"
cagucgguaaguucugucc

SEQ ID NO: 12449 - DNA, 18 bp, Artificial Sequence
  source: /note="Description of Artificial Sequence: Synthetic oligonucleotide"
  source: /note="Description of Combined DNA/RNA Molecule: Synthetic oligonucleotide"
  source: /note="DNA/RNA"
  source: /note="5' tri-ethylene glycol (TEG)"
  modified_base (1)..(1): bicyclic nucleic acid (BNA)
  modified_base (2)..(2): bicyclic nucleic acid (BNA)
  modified_base (17)..(17): bicyclic nucleic acid (BNA)
  modified_base (18)..(18): bicyclic nucleic acid (BNA)
  source: /note="3' tri-ethylene glycol (TEG)"
cagucgguaaguucugtc

SEQ ID NO: 12450 - DNA, 17 bp, Artificial Sequence
  source: /note="Description of Artificial Sequence: Synthetic oligonucleotide"
  source: /note="Description of Combined DNA/RNA Molecule: Synthetic oligonucleotide"
  source: /note="DNA/RNA"
  source: /note="5' tri-ethylene glycol (TEG)"
  modified_base (1)..(1): bicyclic nucleic acid (BNA)
  modified_base (2)..(2): bicyclic nucleic acid (BNA)
  modified_base (16)..(16): bicyclic nucleic acid (BNA)
  modified_base (17)..(17): bicyclic nucleic acid (BNA)
  source: /note="3' tri-ethylene glycol (TEG)"
cagucgguaaguucugt

SEQ ID NO: 12451 - DNA, 16 bp, Artificial Sequence
  source: /note="Description of Artificial Sequence: Synthetic oligonucleotide"
  source: /note="Description of Combined DNA/RNA Molecule: Synthetic oligonucleotide"
  source: /note="DNA/RNA"
  source: /note="5' tri-ethylene glycol (TEG)"
  modified_base (1)..(1): bicyclic nucleic acid (BNA)
  modified_base (2)..(2): bicyclic nucleic acid (BNA)
  modified_base (15)..(15): bicyclic nucleic acid (BNA)
  modified_base (16)..(16): bicyclic nucleic acid (BNA)
  source: /note="3' tri-ethylene glycol (TEG)"
cagucgguaaguuctg

SEQ ID NO: 12452 - DNA, 15 bp, Artificial Sequence
  source: /note="Description of Artificial Sequence: Synthetic oligonucleotide"
  source: /note="Description of Combined DNA/RNA Molecule: Synthetic oligonucleotide"
  source: /note="DNA/RNA"
  source: /note="5' tri-ethylene glycol (TEG)"
  modified_base (1)..(1): bicyclic nucleic acid (BNA)
  modified_base (2)..(2): bicyclic nucleic acid (BNA)
  modified_base (14)..(14): bicyclic nucleic acid (BNA)
  modified_base (15)..(15): bicyclic nucleic acid (BNA)
  source: /note="3' tri-ethylene glycol (TEG)"
cagucgguaaguuct

SEQ ID NO: 12453 - DNA, 14 bp, Artificial Sequence
  source: /note="Description of Artificial Sequence: Synthetic oligonucleotide"
  source: /note="Description of Combined DNA/RNA Molecule: Synthetic oligonucleotide"
  source: /note="DNA/RNA"
  source: /note="5' tri-ethylene glycol (TEG)"
  modified_base (1)..(1): bicyclic nucleic acid (BNA)
  modified_base (2)..(2): bicyclic nucleic acid (BNA)
  modified_base (13)..(13): bicyclic nucleic acid (BNA)
  modified_base (14)..(14): bicyclic nucleic acid (BNA)
  source: /note="3' tri-ethylene glycol (TEG)"
cagucgguaagutc

SEQ ID NO: 12454 - DNA, 13 bp, Artificial Sequence
  source: /note="Description of Artificial Sequence: Synthetic oligonucleotide"
  source: /note="Description of Combined DNA/RNA Molecule: Synthetic oligonucleotide"
  source: /note="DNA/RNA"
  source: /note="5' tri-ethylene glycol (TEG)"
  modified_base (1)..(1): bicyclic nucleic acid (BNA)
  modified_base (2)..(2): bicyclic nucleic acid (BNA)
  modified_base (12)..(12): bicyclic nucleic acid (BNA)
  modified_base (13)..(13): bicyclic nucleic acid (BNA)
  source: /note="3' tri-ethylene glycol (TEG)"
cagucgguaagtt

SEQ ID NO: 12455 - DNA, 12 bp, Artificial Sequence
  source: /note="Description of Artificial Sequence: Synthetic oligonucleotide"
  source: /note="Description of Combined DNA/RNA Molecule: Synthetic oligonucleotide"
  source: /note="DNA/RNA"
  source: /note="5' tri-ethylene glycol (TEG)"
  modified_base (1)..(1): bicyclic nucleic acid (BNA)
  modified_base (2)..(2): bicyclic nucleic acid (BNA)
  modified_base (11)..(11): bicyclic nucleic acid (BNA)
  modified_base (12)..(12): bicyclic nucleic acid (BNA)
  source: /note="3' tri-ethylene glycol (TEG)"
cagucgguaagt

SEQ ID NO: 12456 - RNA, 20 nt, Artificial Sequence
  source: /note="Description of Artificial Sequence: Synthetic oligonucleotide"
  source: /note="RNA"
  source: /note="5' tri-ethylene glycol (TEG)"
  modified_base (1)..(1): bicyclic nucleic acid (BNA)
  modified_base (2)..(2): bicyclic nucleic acid (BNA)
  modified_base (19)..(19): bicyclic nucleic acid (BNA)
  modified_base (20)..(20): bicyclic nucleic acid (BNA)
  source: /note="3' tri-ethylene glycol (TEG)"
ccagucgguaaguucugucc

SEQ ID NO: 12457 - DNA, 19 bp, Artificial Sequence
  source: /note="Description of Artificial Sequence: Synthetic oligonucleotide"
  source: /note="Description of Combined DNA/RNA Molecule: Synthetic oligonucleotide"
  source: /note="DNA/RNA"
  source: /note="5' tri-ethylene glycol (TEG)"
  modified_base (1)..(1): bicyclic nucleic acid (BNA)
  modified_base (2)..(2): bicyclic nucleic acid (BNA)
  modified_base (18)..(18): bicyclic nucleic acid (BNA)
  modified_base (19)..(19): bicyclic nucleic acid (BNA)
  source: /note="3' tri-ethylene glycol (TEG)"
ccagucgguaaguucugtc

SEQ ID NO: 12458 - DNA, 18 bp, Artificial Sequence
  source: /note="Description of Artificial Sequence: Synthetic oligonucleotide"
  source: /note="Description of Combined DNA/RNA Molecule: Synthetic oligonucleotide"
  source: /note="DNA/RNA"
  source: /note="5' tri-ethylene glycol (TEG)"
  modified_base (1)..(1): bicyclic nucleic acid (BNA)
  modified_base (2)..(2): bicyclic nucleic acid (BNA)
  modified_base (17)..(17): bicyclic nucleic acid (BNA)
  modified_base (18)..(18): bicyclic nucleic acid (BNA)
  source: /note="3' tri-ethylene glycol (TEG)"
ccagucgguaaguucugt

SEQ ID NO: 12459 - DNA, 17 bp, Artificial Sequence
  source: /note="Description of Artificial Sequence: Synthetic oligonucleotide"
  source: /note="Description of Combined DNA/RNA Molecule: Synthetic oligonucleotide"
  source: /note="DNA/RNA"
  source: /note="5' tri-ethylene glycol (TEG)"
  modified_base (1)..(1): bicyclic nucleic acid (BNA)
  modified_base (2)..(2): bicyclic nucleic acid (BNA)
  modified_base (16)..(16): bicyclic nucleic acid (BNA)
  modified_base (17)..(17): bicyclic nucleic acid (BNA)
  source: /note="3' tri-ethylene glycol (TEG)"
ccagucgguaaguuctg

SEQ ID NO: 12460 - DNA, 16 bp, Artificial Sequence
  source: /note="Description of Artificial Sequence: Synthetic oligonucleotide"
  source: /note="Description of Combined DNA/RNA Molecule: Synthetic oligonucleotide"
  source: /note="DNA/RNA"
  source: /note="5' tri-ethylene glycol (TEG)"
  modified_base (1)..(1): bicyclic nucleic acid (BNA)
  modified_base (2)..(2): bicyclic nucleic acid (BNA)
  modified_base (15)..(15): bicyclic nucleic acid (BNA)
  modified_base (16)..(16): bicyclic nucleic acid (BNA)
  source: /note="3' tri-ethylene glycol (TEG)"
ccagucgguaaguuct

SEQ ID NO: 12461 - DNA, 15 bp, Artificial Sequence
  source: /note="Description of Artificial Sequence: Synthetic oligonucleotide"
  source: /note="Description of Combined DNA/RNA Molecule: Synthetic oligonucleotide"
  source: /note="DNA/RNA"
  source: /note="5' tri-ethylene glycol (TEG)"
  modified_base (1)..(1): bicyclic nucleic acid (BNA)
  modified_base (2)..(2): bicyclic nucleic acid (BNA)
  modified_base (14)..(14): bicyclic nucleic acid (BNA)
  modified_base (15)..(15): bicyclic nucleic acid (BNA)
  source: /note="3' tri-ethylene glycol (TEG)"
ccagucgguaagutc

SEQ ID NO: 12462 - DNA, 14 bp, Artificial Sequence
  source: /note="Description of Artificial Sequence: Synthetic oligonucleotide"
  source: /note="Description of Combined DNA/RNA Molecule: Synthetic oligonucleotide"
  source: /note="DNA/RNA"
  source: /note="5' tri-ethylene glycol (TEG)"
  modified_base (1)..(1): bicyclic nucleic acid (BNA)
  modified_base (2)..(2): bicyclic nucleic acid (BNA)
  modified_base (13)..(13): bicyclic nucleic acid (BNA)
  modified_base (14)..(14): bicyclic nucleic acid (BNA)
  source: /note="3' tri-ethylene glycol (TEG)"
ccagucgguaagtt

SEQ ID NO: 12463 - DNA, 13 bp, Artificial Sequence
  source: /note="Description of Artificial Sequence: Synthetic oligonucleotide"
  source: /note="Description of Combined DNA/RNA Molecule: Synthetic oligonucleotide"
  source: /note="DNA/RNA"
  source: /note="5' tri-ethylene glycol (TEG)"
  modified_base (1)..(1): bicyclic nucleic acid (BNA)
  modified_base (2)..(2): bicyclic nucleic acid (BNA)
  modified_base (12)..(12): bicyclic nucleic acid (BNA)
  modified_base (13)..(13): bicyclic nucleic acid (BNA)
  source: /note="3' tri-ethylene glycol (TEG)"
ccagucgguaagt

SEQ ID NO: 12464 - DNA, 20 bp, Artificial Sequence
  source: /note="Description of Artificial Sequence: Synthetic oligonucleotide"
  source: /note="Description of Combined DNA/RNA Molecule: Synthetic oligonucleotide"
  source: /note="DNA/RNA"
  source: /note="5' tri-ethylene glycol (TEG)"
  modified_base (1)..(1): bicyclic nucleic acid (BNA)
  modified_base (2)..(2): bicyclic nucleic acid (BNA)
  modified_base (19)..(19): bicyclic nucleic acid (BNA)
  modified_base (20)..(20): bicyclic nucleic acid (BNA)
  source: /note="3' tri-ethylene glycol (TEG)"
gccagucgguaaguucugtc

SEQ ID NO: 12465 - DNA, 19 bp, Artificial Sequence
  source: /note="Description of Artificial Sequence: Synthetic oligonucleotide"
  source: /note="Description of Combined DNA/RNA Molecule: Synthetic oligonucleotide"
  source: /note="DNA/RNA"
  source: /note="5' tri-ethylene glycol (TEG)"
  modified_base (1)..(1): bicyclic nucleic acid (BNA)
  modified_base (2)..(2): bicyclic nucleic acid (BNA)
  modified_base (18)..(18): bicyclic nucleic acid (BNA)
  modified_base (19)..(19): bicyclic nucleic acid (BNA)
  source: /note="3' tri-ethylene glycol (TEG)"
gccagucgguaaguucugt

SEQ ID NO: 12466 - DNA, 18 bp, Artificial Sequence
  source: /note="Description of Artificial Sequence: Synthetic oligonucleotide"
  source: /note="Description of Combined DNA/RNA Molecule: Synthetic oligonucleotide"
  source: /note="DNA/RNA"
  source: /note="5' tri-ethylene glycol (TEG)"
  modified_base (1)..(1): bicyclic nucleic acid (BNA)
  modified_base (2)..(2): bicyclic nucleic acid (BNA)
  modified_base (17)..(17): bicyclic nucleic acid (BNA)
  modified_base (18)..(18): bicyclic nucleic acid (BNA)
  source: /note="3' tri-ethylene glycol (TEG)"
gccagucgguaaguuctg

SEQ ID NO: 12467 - DNA, 17 bp, Artificial Sequence
  source: /note="Description of Artificial Sequence: Synthetic oligonucleotide"
  source: /note="Description of Combined DNA/RNA Molecule: Synthetic oligonucleotide"
  source: /note="DNA/RNA"
  source: /note="5' tri-ethylene glycol (TEG)"
  modified_base (1)..(1): bicyclic nucleic acid (BNA)
  modified_base (2)..(2): bicyclic nucleic acid (BNA)
  modified_base (16)..(16): bicyclic nucleic acid (BNA)
  modified_base (17)..(17): bicyclic nucleic acid (BNA)
  source: /note="3' tri-ethylene glycol (TEG)"
gccagucgguaaguuct

SEQ ID NO: 12468 - DNA, 16 bp, Artificial Sequence
  source: /note="Description of Artificial Sequence: Synthetic oligonucleotide"
  source: /note="Description of Combined DNA/RNA Molecule: Synthetic oligonucleotide"
  source: /note="DNA/RNA"
  source: /note="5' tri-ethylene glycol (TEG)"
  modified_base (1)..(1): bicyclic nucleic acid (BNA)
  modified_base (2)..(2): bicyclic nucleic acid (BNA)
  modified_base (15)..(15): bicyclic nucleic acid (BNA)
  modified_base (16)..(16): bicyclic nucleic acid (BNA)
  source: /note="3' tri-ethylene glycol (TEG)"
gccagucgguaagutc

SEQ ID NO: 12469 - DNA, 15 bp, Artificial Sequence
  source: /note="Description of Artificial Sequence: Synthetic oligonucleotide"
  source: /note="Description of Combined DNA/RNA Molecule: Synthetic oligonucleotide"
  source: /note="DNA/RNA"
  source: /note="5' tri-ethylene glycol (TEG)"
  modified_base (1)..(1): bicyclic nucleic acid (BNA)
  modified_base (2)..(2): bicyclic nucleic acid (BNA)
  modified_base (14)..(14): bicyclic nucleic acid (BNA)
  modified_base (15)..(15): bicyclic nucleic acid (BNA)
  source: /note="3' tri-ethylene glycol (TEG)"
gccagucgguaagtt

SEQ ID NO: 12470 - DNA, 14 bp, Artificial Sequence
  source: /note="Description of Artificial Sequence: Synthetic oligonucleotide"
  source: /note="Description of Combined DNA/RNA Molecule: Synthetic oligonucleotide"
  source: /note="DNA/RNA"
  source: /note="5' tri-ethylene glycol (TEG)"
  modified_base (1)..(1): bicyclic nucleic acid (BNA)
  modified_base (2)..(2): bicyclic nucleic acid (BNA)
  modified_base (13)..(13): bicyclic nucleic acid (BNA)
  modified_base (14)..(14): bicyclic nucleic acid (BNA)
  source: /note="3' tri-ethylene glycol (TEG)"
gccagucgguaagt

SEQ ID NO: 12471 - DNA, 20 bp, Artificial Sequence
  source: /note="Description of Artificial Sequence: Synthetic oligonucleotide"
  source: /note="Description of Combined DNA/RNA Molecule: Synthetic oligonucleotide"
  source: /note="DNA/RNA"
  source: /note="5' tri-ethylene glycol (TEG)"
  modified_base (1)..(1): bicyclic nucleic acid (BNA)
  modified_base (2)..(2): bicyclic nucleic acid (BNA)
  modified_base (19)..(19): bicyclic nucleic acid (BNA)
  modified_base (20)..(20): bicyclic nucleic acid (BNA)
  source: /note="3' tri-ethylene glycol (TEG)"
tcaaggaagauggcauuuct

SEQ ID NO: 12472 - DNA, 22 bp, Artificial Sequence
  source: /note="Description of Artificial Sequence: Synthetic oligonucleotide"
  source: /note="Description of Combined DNA/RNA Molecule: Synthetic oligonucleotide"
  source: /note="DNA/RNA"
  source: /note="5' tri-ethylene glycol (TEG)"
  modified_base (1)..(1): bicyclic nucleic acid (BNA)
  modified_base (2)..(2): bicyclic nucleic acid (BNA)
  modified_base (21)..(21): bicyclic nucleic acid (BNA)
  modified_base (22)..(22): bicyclic nucleic acid (BNA)
  source: /note="3' tri-ethylene glycol (TEG)"
tcaaggaagauggcauuucuag

SEQ ID NO: 12473 - DNA, 16 bp, Artificial Sequence
  source: /note="Description of Artificial Sequence: Synthetic oligonucleotide"
  source: /note="Description of Combined DNA/RNA Molecule: Synthetic oligonucleotide"
  source: /note="DNA/RNA"
  source: /note="5' tri-ethylene glycol (TEG)"
  modified_base (1)..(1): bicyclic nucleic acid (BNA)
  modified_base (2)..(2): bicyclic nucleic acid (BNA)
  modified_base (15)..(15): bicyclic nucleic acid (BNA)
  modified_base (16)..(16): bicyclic nucleic acid (BNA)
  source: /note="3' tri-ethylene glycol (TEG)"
tcaaggaagauggcat

SEQ ID NO: 12474 - DNA, 15 bp, Artificial Sequence
  source: /note="Description of Artificial Sequence: Synthetic oligonucleotide"
  source: /note="Description of Combined DNA/RNA Molecule: Synthetic oligonucleotide"
  source: /note="DNA/RNA"
  source: /note="5' tri-ethylene glycol (TEG)"
  modified_base (1)..(1): bicyclic nucleic acid (BNA)
  modified_base (2)..(2): bicyclic nucleic acid (BNA)
  modified_base (14)..(14): bicyclic nucleic acid (BNA)
  modified_base (15)..(15): bicyclic nucleic acid (BNA)
  source: /note="3' tri-ethylene glycol (TEG)"
gaagauggcauuuct

SEQ ID NO: 12475 - DNA, 21 bp, Artificial Sequence
  source: /note="Description of Artificial Sequence: Synthetic oligonucleotide"
  source: /note="Description of Combined DNA/RNA Molecule: Synthetic oligonucleotide"
  source: /note="DNA/RNA"
  source: /note="5' tri-ethylene glycol (TEG)"
  modified_base (1)..(1): bicyclic nucleic acid (BNA)
  modified_base (2)..(2): bicyclic nucleic acid (BNA)
  modified_base (20)..(20): bicyclic nucleic acid (BNA)
  modified_base (21)..(21): bicyclic nucleic acid (BNA)
  source: /note="3' tri-ethylene glycol (TEG)"
tcaaggaagauggcauuucta

SEQ ID NO: 12476 - DNA, 19 bp, Artificial Sequence
  source: /note="Description of Artificial Sequence: Synthetic oligonucleotide"
  source: /note="Description of Combined DNA/RNA Molecule: Synthetic oligonucleotide"
  source: /note="DNA/RNA"
  source: /note="5' tri-ethylene glycol (TEG)"
  modified_base (1)..(1): bicyclic nucleic acid (BNA)
  modified_base (2)..(2): bicyclic nucleic acid (BNA)
  modified_base (18)..(18): bicyclic nucleic acid (BNA)
  modified_base (19)..(19): bicyclic nucleic acid (BNA)
  source: /note="3' tri-ethylene glycol (TEG)"
tcaaggaagauggcauutc

SEQ ID NO: 12477 - DNA, 18 bp, Artificial Sequence
  source: /note="Description of Artificial Sequence: Synthetic oligonucleotide"
  source: /note="Description of Combined DNA/RNA Molecule: Synthetic oligonucleotide"
  source: /note="DNA/RNA"
  source: /note="5' tri-ethylene glycol (TEG)"
  modified_base (1)..(1): bicyclic nucleic acid (BNA)
  modified_base (2)..(2): bicyclic nucleic acid (BNA)
  modified_base (17)..(17): bicyclic nucleic acid (BNA)
  modified_base (18)..(18): bicyclic nucleic acid (BNA)
  source: /note="3' tri-ethylene glycol (TEG)"
tcaaggaagauggcautt

SEQ ID NO: 12478 - DNA, 17 bp, Artificial Sequence
  source: /note="Description of Artificial Sequence: Synthetic oligonucleotide"
  source: /note="Description of Combined DNA/RNA Molecule: Synthetic oligonucleotide"
  source: /note="DNA/RNA"
  source: /note="5' tri-ethylene glycol (TEG)"
  modified_base (1)..(1): bicyclic nucleic acid (BNA)
  modified_base (2)..(2): bicyclic nucleic acid (BNA)
  modified_base (16)..(16): bicyclic nucleic acid (BNA)
  modified_base (17)..(17): bicyclic nucleic acid (BNA)
  source: /note="3' tri-ethylene glycol (TEG)"
tcaaggaagauggcatt

SEQ ID NO: 12479 - DNA, 15 bp, Artificial Sequence
  source: /note="Description of Artificial Sequence: Synthetic oligonucleotide"
  source: /note="Description of Combined DNA/RNA Molecule: Synthetic oligonucleotide"
  source: /note="DNA/RNA"
  source: /note="5' tri-ethylene glycol (TEG)"
  modified_base (1)..(1): bicyclic nucleic acid (BNA)
  modified_base (2)..(2): bicyclic nucleic acid (BNA)
  modified_base (14)..(14): bicyclic nucleic acid (BNA)
  modified_base (15)..(15): bicyclic nucleic acid (BNA)
  source: /note="3' tri-ethylene glycol (TEG)"
tcaaggaagauggca

SEQ ID NO: 12480 - DNA, 14 bp, Artificial Sequence
  source: /note="Description of Artificial Sequence: Synthetic oligonucleotide"
  source: /note="Description of Combined DNA/RNA Molecule: Synthetic oligonucleotide"
  source: /note="DNA/RNA"
  source: /note="5' tri-ethylene glycol (TEG)"
  modified_base (1)..(1): bicyclic nucleic acid (BNA)
  modified_base (2)..(2): bicyclic nucleic acid (BNA)
  modified_base (13)..(13): bicyclic nucleic acid (BNA)
  modified_base (14)..(14): bicyclic nucleic acid (BNA)
  source: /note="3' tri-ethylene glycol (TEG)"
tcaaggaagauggc

SEQ ID NO: 12481 - DNA, 13 bp, Artificial Sequence
  source: /note="Description of Artificial Sequence: Synthetic oligonucleotide"
  source: /note="Description of Combined DNA/RNA Molecule: Synthetic oligonucleotide"
  source: /note="DNA/RNA"
  source: /note="5' tri-ethylene glycol (TEG)"
  modified_base (1)..(1): bicyclic nucleic acid (BNA)
  modified_base (2)..(2): bicyclic nucleic acid (BNA)
  modified_base (12)..(12): bicyclic nucleic acid (BNA)
  modified_base (13)..(13): bicyclic nucleic acid (BNA)
  source: /note="3' tri-ethylene glycol (TEG)"
tcaaggaagaugg

SEQ ID NO: 12482 - DNA, 12 bp, Artificial Sequence
  source: /note="Description of Artificial Sequence: Synthetic oligonucleotide"
  source: /note="DNA/RNA"
  source: /note="5' tri-ethylene glycol (TEG)"
  modified_base (1)..(1): bicyclic nucleic acid (BNA)
  modified_base (2)..(2): bicyclic nucleic acid (BNA)
  modified_base (11)..(11): bicyclic nucleic acid (BNA)
  modified_base (12)..(12): bicyclic nucleic acid (BNA)
  source: /note="3' tri-ethylene glycol (TEG)"
tcaaggaagatg

SEQ ID NO: 12483 - DNA, 11 bp, Artificial Sequence
  source: /note="Description of Artificial Sequence: Synthetic oligonucleotide"
  source: /note="DNA/RNA"
  source: /note="5' tri-ethylene glycol (TEG)"
  modified_base (1)..(1): bicyclic nucleic acid (BNA)
  modified_base (2)..(2): bicyclic nucleic acid (BNA)
  modified_base (10)..(10): bicyclic nucleic acid (BNA)
  modified_base (11)..(11): bicyclic nucleic acid (BNA)
  source: /note="3' tri-ethylene glycol (TEG)"
tcaaggaagat

SEQ ID NO: 12484 - DNA, 10 bp, Artificial Sequence
  source: /note="Description of Artificial Sequence: Synthetic oligonucleotide"
  source: /note="DNA/RNA"
  source: /note="5' tri-ethylene glycol (TEG)"
  modified_base (1)..(1): bicyclic nucleic acid (BNA)
  modified_base (2)..(2): bicyclic nucleic acid (BNA)
  modified_base (9)..(9): bicyclic nucleic acid (BNA)
  modified_base (10)..(10): bicyclic nucleic acid (BNA)
  source: /note="3' tri-ethylene glycol (TEG)"
tcaaggaaga

SEQ ID NO: 12485 - DNA, 9 bp, Artificial Sequence
  source: /note="Description of Artificial Sequence: Synthetic oligonucleotide"
  source: /note="DNA/RNA"
  source: /note="5' tri-ethylene glycol (TEG)"
  modified_base (1)..(1): bicyclic nucleic acid (BNA)
  modified_base (2)..(2): bicyclic nucleic acid (BNA)
  modified_base (8)..(8): bicyclic nucleic acid (BNA)
  modified_base (9)..(9): bicyclic nucleic acid (BNA)
  source: /note="3' tri-ethylene glycol (TEG)"
tcaaggaag

SEQ ID NO: 12486 - RNA, 21 nt, Artificial Sequence
  source: /note="Description of Artificial Sequence: Synthetic oligonucleotide"
  source: /note="RNA"
  source: /note="5' tri-ethylene glycol (TEG)"
  modified_base (1)..(1): bicyclic nucleic acid (BNA)
  modified_base (2)..(2): bicyclic nucleic acid (BNA)
  modified_base (20)..(20): bicyclic nucleic acid (BNA)
  modified_base (21)..(21): bicyclic nucleic acid (BNA)
  source: /note="3' tri-ethylene glycol (TEG)"
caaggaagauggcauuucuag

SEQ ID NO: 12487 - DNA, 20 bp, Artificial Sequence
  source: /note="Description of Artificial Sequence: Synthetic oligonucleotide"
  source: /note="Description of Combined DNA/RNA Molecule: Synthetic oligonucleotide"
  source: /note="DNA/RNA"
  source: /note="5' tri-ethylene glycol (TEG)"
  modified_base (1)..(1): bicyclic nucleic acid (BNA)
  modified_base (2)..(2): bicyclic nucleic acid (BNA)
  modified_base (19)..(19): bicyclic nucleic acid (BNA)
  modified_base (20)..(20): bicyclic nucleic acid (BNA)
  source: /note="3' tri-ethylene glycol (TEG)"
caaggaagauggcauuucta

SEQ ID NO: 12488 - DNA, 19 bp, Artificial Sequence
  source: /note="Description of Artificial Sequence: Synthetic oligonucleotide"
  source: /note="Description of Combined DNA/RNA Molecule: Synthetic oligonucleotide"
  source: /note="DNA/RNA"
  source: /note="5' tri-ethylene glycol (TEG)"
  modified_base (1)..(1): bicyclic nucleic acid (BNA)
  modified_base (2)..(2): bicyclic nucleic acid (BNA)
  modified_base (18)..(18): bicyclic nucleic acid (BNA)
  modified_base (19)..(19): bicyclic nucleic acid (BNA)
  source: /note="3' tri-ethylene glycol (TEG)"
caaggaagauggcauuuct

SEQ ID NO: 12489 - DNA, 18 bp, Artificial Sequence
  source: /note="Description of Artificial Sequence: Synthetic oligonucleotide"
  source: /note="Description of Combined DNA/RNA Molecule: Synthetic oligonucleotide"
  source: /note="DNA/RNA"
  source: /note="5' tri-ethylene glycol (TEG)"
  modified_base (1)..(1): bicyclic nucleic acid (BNA)
  modified_base (2)..(2): bicyclic nucleic acid (BNA)
  modified_base (17)..(17): bicyclic nucleic acid (BNA)
  modified_base (18)..(18): bicyclic nucleic acid (BNA)
  source: /note="3' tri-ethylene glycol (TEG)"
caaggaagauggcauutc

SEQ ID NO: 12490 - DNA, 17 bp, Artificial Sequence
  source: /note="Description of Artificial Sequence: Synthetic oligonucleotide"
  source: /note="Description of Combined DNA/RNA Molecule: Synthetic oligonucleotide"
  source: /note="DNA/RNA"
  source: /note="5' tri-ethylene glycol (TEG)"
  modified_base (1)..(1): bicyclic nucleic acid (BNA)
  modified_base (2)..(2): bicyclic nucleic acid (BNA)
  modified_base (16)..(16): bicyclic nucleic acid (BNA)
  modified_base (17)..(17): bicyclic nucleic acid (BNA)
  source: /note="3' tri-ethylene glycol (TEG)"
caaggaagauggcautt

SEQ ID NO: 12491 - DNA, 16 bp, Artificial Sequence
  source: /note="Description of Artificial Sequence: Synthetic oligonucleotide"
  source: /note="Description of Combined DNA/RNA Molecule: Synthetic oligonucleotide"
  source: /note="DNA/RNA"
  source: /note="5' tri-ethylene glycol (TEG)"
  modified_base (1)..(1): bicyclic nucleic acid (BNA)
  modified_base (2)..(2): bicyclic nucleic acid (BNA)
  modified_base (15)..(15): bicyclic nucleic acid (BNA)
  modified_base (16)..(16): bicyclic nucleic acid (BNA)
  source: /note="3' tri-ethylene glycol (TEG)"
caaggaagauggcatt

SEQ ID NO: 12492 - DNA, 15 bp, Artificial Sequence
  source: /note="Description of Artificial Sequence: Synthetic oligonucleotide"
  source: /note="Description of Combined DNA/RNA Molecule: Synthetic oligonucleotide"
  source: /note="DNA/RNA"
  source: /note="5' tri-ethylene glycol (TEG)"
  modified_base (1)..(1): bicyclic nucleic acid (BNA)
  modified_base (2)..(2): bicyclic nucleic acid (BNA)
  modified_base (14)..(14): bicyclic nucleic acid (BNA)
  modified_base (15)..(15): bicyclic nucleic acid (BNA)
  source: /note="3' tri-ethylene glycol (TEG)"
caaggaagauggcat

SEQ ID NO: 12493 - RNA, 14 nt, Artificial Sequence
  source: /note="Description of Artificial Sequence: Synthetic oligonucleotide"
  source: /note="RNA"
  source: /note="5' tri-ethylene glycol (TEG)"
  modified_base (1)..(1): bicyclic nucleic acid (BNA)
  modified_base (2)..(2): bicyclic nucleic acid (BNA)
  modified_base (13)..(13): bicyclic nucleic acid (BNA)
  modified_base (14)..(14): bicyclic nucleic acid (BNA)
  source: /note="3' tri-ethylene glycol (TEG)"
caaggaagauggca

SEQ ID NO: 12494 - RNA, 13 nt, Artificial Sequence
  source: /note="Description of Artificial Sequence: Synthetic oligonucleotide"
  source: /note="RNA"
  source: /note="5' tri-ethylene glycol (TEG)"
  modified_base (1)..(1): bicyclic nucleic acid (BNA)
  modified_base (2)..(2): bicyclic nucleic acid (BNA)
  modified_base (12)..(12): bicyclic nucleic acid (BNA)
  modified_base (13)..(13): bicyclic nucleic acid (BNA)
  source: /note="3' tri-ethylene glycol (TEG)"
caaggaagauggc

SEQ ID NO: 12495 - RNA, 12 nt, Artificial Sequence
  source: /note="Description of Artificial Sequence: Synthetic oligonucleotide"
  source: /note="RNA"
  source: /note="5' tri-ethylene glycol (TEG)"
  modified_base (1)..(1): bicyclic nucleic acid (BNA)
  modified_base (2)..(2): bicyclic nucleic acid (BNA)
  modified_base (11)..(11): bicyclic nucleic acid (BNA)
  modified_base (12)..(12): bicyclic nucleic acid (BNA)
  source: /note="3' tri-ethylene glycol (TEG)"
caaggaagaugg

SEQ ID NO: 12496 - DNA, 11 bp, Artificial Sequence
  source: /note="Description of Artificial Sequence: Synthetic oligonucleotide"
  source: /note="DNA/RNA"
  source: /note="5' tri-ethylene glycol (TEG)"
  modified_base (1)..(1): bicyclic nucleic acid (BNA)
  modified_base (2)..(2): bicyclic nucleic acid (BNA)
  modified_base (10)..(10): bicyclic nucleic acid (BNA)
  modified_base (11)..(11): bicyclic nucleic acid (BNA)
  source: /note="3' tri-ethylene glycol (TEG)"
caaggaagatg

SEQ ID NO: 12497 - DNA, 10 bp, Artificial Sequence
  source: /note="Description of Artificial Sequence: Synthetic oligonucleotide"
  source: /note="DNA/RNA"
  source: /note="5' tri-ethylene glycol (TEG)"
  modified_base (1)..(1): bicyclic nucleic acid (BNA)
  modified_base (2)..(2): bicyclic nucleic acid (BNA)
  modified_base (9)..(9): bicyclic nucleic acid (BNA)
  modified_base (10)..(10): bicyclic nucleic acid (BNA)
  source: /note="3' tri-ethylene glycol (TEG)"
caaggaagat

SEQ ID NO: 12498 - RNA, 9 nt, Artificial Sequence
  source: /note="Description of Artificial Sequence: Synthetic oligonucleotide"
  source: /note="RNA/Antisense Oligonucleotide"
  source: /note="5' tri-ethylene glycol (TEG)"
  modified_base (1)..(1): bicyclic nucleic acid (BNA)
  modified_base (2)..(2): bicyclic nucleic acid (BNA)
  modified_base (8)..(8): bicyclic nucleic acid (BNA)
  modified_base (9)..(9): bicyclic nucleic acid (BNA)
  source: /note="3' tri-ethylene glycol (TEG)"
caaggaaga

SEQ ID NO: 12499 - RNA, 8 nt, Artificial Sequence
  source: /note="Description of Artificial Sequence: Synthetic oligonucleotide"
  source: /note="RNA/Antisense Oligonucleotide"
  source: /note="5' tri-ethylene glycol (TEG)"
  modified_base (1)..(1): bicyclic nucleic acid (BNA)
  modified_base (2)..(2): bicyclic nucleic acid (BNA)
  modified_base (7)..(7): bicyclic nucleic acid (BNA)
  modified_base (8)..(8): bicyclic nucleic acid (BNA)
  source: /note="3' tri-ethylene glycol (TEG)"
caaggaag

SEQ ID NO: 12500 - RNA, 20 nt, Artificial Sequence
  source: /note="Description of Artificial Sequence: Synthetic oligonucleotide"
  source: /note="RNA"
  source: /note="5' tri-ethylene glycol (TEG)"
  modified_base (1)..(1): bicyclic nucleic acid (BNA)
  modified_base (2)..(2): bicyclic nucleic acid (BNA)
  modified_base (19)..(19): bicyclic nucleic acid (BNA)
  modified_base (20)..(20): bicyclic nucleic acid (BNA)
  source: /note="3' tri-ethylene glycol (TEG)"
aaggaagauggcauuucuag

SEQ ID NO: 12501 - DNA, 19 bp, Artificial Sequence
  source: /note="Description of Artificial Sequence: Synthetic oligonucleotide"
  source: /note="Description of Combined DNA/RNA Molecule: Synthetic oligonucleotide"
  source: /note="DNA/RNA"
  source: /note="5' tri-ethylene glycol (TEG)"
  modified_base (1)..(1): bicyclic nucleic acid (BNA)
  modified_base (2)..(2): bicyclic nucleic acid (BNA)
  modified_base (18)..(18): bicyclic nucleic acid (BNA)
  modified_base (19)..(19): bicyclic nucleic acid (BNA)
  source: /note="3' tri-ethylene glycol (TEG)"
aaggaagauggcauuucta

SEQ ID NO: 12502 - DNA, 18 bp, Artificial Sequence
  source: /note="Description of Artificial Sequence: Synthetic oligonucleotide"
  source: /note="Description of Combined DNA/RNA Molecule: Synthetic oligonucleotide"
  source: /note="DNA/RNA"
  source: /note="5' tri-ethylene glycol (TEG)"
  modified_base (1)..(1): bicyclic nucleic acid (BNA)
  modified_base (2)..(2): bicyclic nucleic acid (BNA)
  modified_base (17)..(17): bicyclic nucleic acid (BNA)
  modified_base (18)..(18): bicyclic nucleic acid (BNA)
  source: /note="3' tri-ethylene glycol (TEG)"
aaggaagauggcauuuct

SEQ ID NO: 12503 - DNA, 17 bp, Artificial Sequence
  source: /note="Description of Artificial Sequence: Synthetic oligonucleotide"
  source: /note="Description of Combined DNA/RNA Molecule: Synthetic oligonucleotide"
  source: /note="DNA/RNA"
  source: /note="5' tri-ethylene glycol (TEG)"
  modified_base (1)..(1): bicyclic nucleic acid (BNA)
  modified_base (2)..(2): bicyclic nucleic acid (BNA)
  modified_base (16)..(16): bicyclic nucleic acid (BNA)
  modified_base (17)..(17): bicyclic nucleic acid (BNA)
  source: /note="3' tri-ethylene glycol (TEG)"
aaggaagauggcauutc

SEQ ID NO: 12504 - DNA, 16 bp, Artificial Sequence
  source: /note="Description of Artificial Sequence: Synthetic oligonucleotide"
  source: /note="Description of Combined DNA/RNA Molecule: Synthetic oligonucleotide"
  source: /note="DNA/RNA"
  source: /note="5' tri-ethylene glycol (TEG)"
  modified_base (1)..(1): bicyclic nucleic acid (BNA)
  modified_base (2)..(2): bicyclic nucleic acid (BNA)
  modified_base (15)..(15): bicyclic nucleic acid (BNA)
  modified_base (16)..(16): bicyclic nucleic acid (BNA)
  source: /note="3' tri-ethylene glycol (TEG)"
aaggaagauggcautt

SEQ ID NO: 12505 - DNA, 15 bp, Artificial Sequence
  source: /note="Description of Artificial Sequence: Synthetic oligonucleotide"
  source: /note="Description of Combined DNA/RNA Molecule: Synthetic oligonucleotide"
  source: /note="DNA/RNA"
  source: /note="5' tri-ethylene glycol (TEG)"
  modified_base (1)..(1): bicyclic nucleic acid (BNA)
  modified_base (2)..(2): bicyclic nucleic acid (BNA)
  modified_base (14)..(14): bicyclic nucleic acid (BNA)
  modified_base (15)..(15): bicyclic nucleic acid (BNA)
  source: /note="3' tri-ethylene glycol (TEG)"
aaggaagauggcatt

SEQ ID NO: 12506 - DNA, 14 bp, Artificial Sequence
  source: /note="Description of Artificial Sequence: Synthetic oligonucleotide"
  source: /note="Description of Combined DNA/RNA Molecule: Synthetic oligonucleotide"
  source: /note="DNA/RNA"
  source: /note="5' tri-ethylene glycol (TEG)"
  modified_base (1)..(1): bicyclic nucleic acid (BNA)
  modified_base (2)..(2): bicyclic nucleic acid (BNA)
  modified_base (13)..(13): bicyclic nucleic acid (BNA)
  modified_base (14)..(14): bicyclic nucleic acid (BNA)
  source: /note="3' tri-ethylene glycol (TEG)"
aaggaagauggcat

SEQ ID NO: 12507 - RNA, 13 nt, Artificial Sequence
  source: /note="Description of Artificial Sequence: Synthetic oligonucleotide"
  source: /note="RNA"
  source: /note="5' tri-ethylene glycol (TEG)"
  modified_base (1)..(1): bicyclic nucleic acid (BNA)
  modified_base (2)..(2): bicyclic nucleic acid (BNA)
  modified_base (12)..(12): bicyclic nucleic acid (BNA)
  modified_base (13)..(13): bicyclic nucleic acid (BNA)
  source: /note="3' tri-ethylene glycol (TEG)"
aaggaagauggca

SEQ ID NO: 12508 - RNA, 12 nt, Artificial Sequence
  source: /note="Description of Artificial Sequence: Synthetic oligonucleotide"
  source: /note="RNA"
  source: /note="5' tri-ethylene glycol (TEG)"
  modified_base (1)..(1): bicyclic nucleic acid (BNA)
  modified_base (2)..(2): bicyclic nucleic acid (BNA)
  modified_base (11)..(11): bicyclic nucleic acid (BNA)
  modified_base (12)..(12): bicyclic nucleic acid (BNA)
  source: /note="3' tri-ethylene glycol (TEG)"
aaggaagauggc

SEQ ID NO: 12509 - RNA, 11 nt, Artificial Sequence
  source: /note="Description of Artificial Sequence: Synthetic oligonucleotide"
  source: /note="RNA"
  source: /note="5' tri-ethylene glycol (TEG)"
  modified_base (1)..(1): bicyclic nucleic acid (BNA)
  modified_base (2)..(2): bicyclic nucleic acid (BNA)
  modified_base (10)..(10): bicyclic nucleic acid (BNA)
  modified_base (11)..(11): bicyclic nucleic acid (BNA)
  source: /note="3' tri-ethylene glycol (TEG)"
aaggaagaugg

SEQ ID NO: 12510 - DNA, 10 bp, Artificial Sequence
  source: /note="Description of Artificial Sequence: Synthetic oligonucleotide"
  source: /note="DNA/RNA"
  source: /note="5' tri-ethylene glycol (TEG)"
  modified_base (1)..(1): bicyclic nucleic acid (BNA)
  modified_base (2)..(2): bicyclic nucleic acid (BNA)
  modified_base (9)..(9): bicyclic nucleic acid (BNA)
  modified_base (10)..(10): bicyclic nucleic acid (BNA)
  source: /note="3' tri-ethylene glycol (TEG)"
aaggaagatg

SEQ ID NO: 12511 - DNA, 9 bp, Artificial Sequence
  source: /note="Description of Artificial Sequence: Synthetic oligonucleotide"
  source: /note="DNA/RNA"
  source: /note="5' tri-ethylene glycol (TEG)"
  modified_base (1)..(1): bicyclic nucleic acid (BNA)
  modified_base (2)..(2): bicyclic nucleic acid (BNA)
  modified_base (8)..(8): bicyclic nucleic acid (BNA)
  modified_base (9)..(9): bicyclic nucleic acid (BNA)
  source: /note="3' tri-ethylene glycol (TEG)"
aaggaagat

SEQ ID NO: 12512 - RNA, 8 nt, Artificial Sequence
  source: /note="Description of Artificial Sequence: Synthetic oligonucleotide"
  source: /note="RNA/Antisense Oligonucleotide"
  source: /note="5' tri-ethylene glycol (TEG)"
  modified_base (1)..(1): bicyclic nucleic acid (BNA)
  modified_base (2)..(2): bicyclic nucleic acid (BNA)
  modified_base (7)..(7): bicyclic nucleic acid (BNA)
  modified_base (8)..(8): bicyclic nucleic acid (BNA)
  source: /note="3' tri-ethylene glycol (TEG)"
aaggaaga

SEQ ID NO: 12513 - RNA, 19 nt, Artificial Sequence
  source: /note="Description of Artificial Sequence: Synthetic oligonucleotide"
  source: /note="RNA"
  source: /note="5' tri-ethylene glycol (TEG)"
  modified_base (1)..(1): bicyclic nucleic acid (BNA)
  modified_base (2)..(2): bicyclic nucleic acid (BNA)
  modified_base (18)..(18): bicyclic nucleic acid (BNA)
  modified_base (19)..(19): bicyclic nucleic acid (BNA)
  source: /note="3' tri-ethylene glycol (TEG)"
aggaagauggcauuucuag

SEQ ID NO: 12514 - DNA, 18 bp, Artificial Sequence
  source: /note="Description of Artificial Sequence: Synthetic oligonucleotide"
  source: /note="Description of Combined DNA/RNA Molecule: Synthetic oligonucleotide"
  source: /note="DNA/RNA"
  source: /note="5' tri-ethylene glycol (TEG)"
  modified_base (1)..(1): bicyclic nucleic acid (BNA)
  modified_base (2)..(2): bicyclic nucleic acid (BNA)
  modified_base (17)..(17): bicyclic nucleic acid (BNA)
  modified_base (18)..(18): bicyclic nucleic acid (BNA)
  source: /note="3' tri-ethylene glycol (TEG)"
aggaagauggcauuucta

SEQ ID NO: 12515 - DNA, 17 bp, Artificial Sequence
  source: /note="Description of Artificial Sequence: Synthetic oligonucleotide"
  source: /note="Description of Combined DNA/RNA Molecule: Synthetic oligonucleotide"
  source: /note="DNA/RNA"
  source: /note="5' tri-ethylene glycol (TEG)"
  modified_base (1)..(1): bicyclic nucleic acid (BNA)
  modified_base (2)..(2): bicyclic nucleic acid (BNA)
  modified_base (16)..(16): bicyclic nucleic acid (BNA)
  modified_base (17)..(17): bicyclic nucleic acid (BNA)
  source: /note="3' tri-ethylene glycol (TEG)"
aggaagauggcauuuct

SEQ ID NO: 12516 - DNA, 16 bp, Artificial Sequence
  source: /note="Description of Artificial Sequence: Synthetic oligonucleotide"
  source: /note="Description of Combined DNA/RNA Molecule: Synthetic oligonucleotide"
  source: /note="DNA/RNA"
  source: /note="5' tri-ethylene glycol (TEG)"
  modified_base (1)..(1): bicyclic nucleic acid (BNA)
  modified_base (2)..(2): bicyclic nucleic acid (BNA)
  modified_base (15)..(15): bicyclic nucleic acid (BNA)
  modified_base (16)..(16): bicyclic nucleic acid (BNA)
  source: /note="3' tri-ethylene glycol (TEG)"
aggaagauggcauutc

SEQ ID NO: 12517 - DNA, 15 bp, Artificial Sequence
  source: /note="Description of Artificial Sequence: Synthetic oligonucleotide"
  source: /note="Description of Combined DNA/RNA Molecule: Synthetic oligonucleotide"
  source: /note="DNA/RNA"
  source: /note="5' tri-ethylene glycol (TEG)"
  modified_base (1)..(1): bicyclic nucleic acid (BNA)
  modified_base (2)..(2): bicyclic nucleic acid (BNA)
  modified_base (14)..(14): bicyclic nucleic acid (BNA)
  modified_base (15)..(15): bicyclic nucleic acid (BNA)
  source: /note="3' tri-ethylene glycol (TEG)"
aggaagauggcautt

SEQ ID NO: 12518 - DNA, 14 bp, Artificial Sequence
  source: /note="Description of Artificial Sequence: Synthetic oligonucleotide"
  source: /note="Description of Combined DNA/RNA Molecule: Synthetic oligonucleotide"
  source: /note="DNA/RNA"
  source: /note="5' tri-ethylene glycol (TEG)"
  modified_base (1)..(1): bicyclic nucleic acid (BNA)
  modified_base (2)..(2): bicyclic nucleic acid (BNA)
  modified_base (13)..(13): bicyclic nucleic acid (BNA)
  modified_base (14)..(14): bicyclic nucleic acid (BNA)
  source: /note="3' tri-ethylene glycol (TEG)"
aggaagauggcatt

SEQ ID NO: 12519 - DNA, 13 bp, Artificial Sequence
  source: /note="Description of Artificial Sequence: Synthetic oligonucleotide"
  source: /note="Description of Combined DNA/RNA Molecule: Synthetic oligonucleotide"
  source: /note="DNA/RNA"
  source: /note="5' tri-ethylene glycol (TEG)"
  modified_base (1)..(1): bicyclic nucleic acid (BNA)
  modified_base (2)..(2): bicyclic nucleic acid (BNA)
  modified_base (12)..(12): bicyclic nucleic acid (BNA)
  modified_base (13)..(13): bicyclic nucleic acid (BNA)
  source: /note="3' tri-ethylene glycol (TEG)"
aggaagauggcat

SEQ ID NO: 12520 - RNA, 12 nt, Artificial Sequence
  source: /note="Description of Artificial Sequence: Synthetic oligonucleotide"
  source: /note="RNA"
  source: /note="5' tri-ethylene glycol (TEG)"
  modified_base (1)..(1): bicyclic nucleic acid (BNA)
  modified_base (2)..(2): bicyclic nucleic acid (BNA)
  modified_base (11)..(11): bicyclic nucleic acid (BNA)
  modified_base (12)..(12): bicyclic nucleic acid (BNA)
  source: /note="3' tri-ethylene glycol (TEG)"
aggaagauggca

SEQ ID NO: 12521 - RNA, 10 nt, Artificial Sequence
  source: /note="Description of Artificial Sequence: Synthetic oligonucleotide"
  source: /note="RNA"
  source: /note="5' tri-ethylene glycol (TEG)"
  modified_base (1)..(1): bicyclic nucleic acid (BNA)
  modified_base (2)..(2): bicyclic nucleic acid (BNA)
  modified_base (9)..(9): bicyclic nucleic acid (BNA)
  modified_base (10)..(10): bicyclic nucleic acid (BNA)
  source: /note="3' tri-ethylene glycol (TEG)"
aggaagaugg

SEQ ID NO: 12522 - DNA, 9 bp, Artificial Sequence
  source: /note="Description of Artificial Sequence: Synthetic oligonucleotide"
  source: /note="DNA/RNA"
  source: /note="5' tri-ethylene glycol (TEG)"
  modified_base (1)..(1): bicyclic nucleic acid (BNA)
  modified_base (2)..(2): bicyclic nucleic acid (BNA)
  modified_base (8)..(8): bicyclic nucleic acid (BNA)
  modified_base (9)..(9): bicyclic nucleic acid (BNA)
  source: /note="3' tri-ethylene glycol (TEG)"
aggaagatg

SEQ ID NO: 12523 - DNA, 8 bp, Artificial Sequence
  source: /note="Description of Artificial Sequence: Synthetic oligonucleotide"
  source: /note="DNA/RNA"
  source: /note="5' tri-ethylene glycol (TEG)"
  modified_base (1)..(1): bicyclic nucleic acid (BNA)
  modified_base (2)..(2): bicyclic nucleic acid (BNA)
  modified_base (7)..(7): bicyclic nucleic acid (BNA)
  modified_base (8)..(8): bicyclic nucleic acid (BNA)
  source: /note="3' tri-ethylene glycol (TEG)"
aggaagat

SEQ ID NO: 12524 - RNA, 18 nt, Artificial Sequence
  source: /note="Description of Artificial Sequence: Synthetic oligonucleotide"
  source: /note="RNA"
  source: /note="5' tri-ethylene glycol (TEG)"
  modified_base (1)..(1): bicyclic nucleic acid (BNA)
  modified_base (2)..(2): bicyclic nucleic acid (BNA)
  modified_base (17)..(17): bicyclic nucleic acid (BNA)
  modified_base (18)..(18): bicyclic nucleic acid (BNA)
  source: /note="3' tri-ethylene glycol (TEG)"
ggaagauggcauuucuag

SEQ ID NO: 12525 - DNA, 17 bp, Artificial Sequence
  source: /note="Description of Artificial Sequence: Synthetic oligonucleotide"
  source: /note="Description of Combined DNA/RNA Molecule: Synthetic oligonucleotide"
  source: /note="DNA/RNA"
  source: /note="5' tri-ethylene glycol (TEG)"
  modified_base (1)..(1): bicyclic nucleic acid (BNA)
  modified_base (2)..(2): bicyclic nucleic acid (BNA)
  modified_base (16)..(16): bicyclic nucleic acid (BNA)
  modified_base (17)..(17): bicyclic nucleic acid (BNA)
  source: /note="3' tri-ethylene glycol (TEG)"
ggaagauggcauuucta

SEQ ID NO: 12526 - DNA, 16 bp, Artificial Sequence
  source: /note="Description of Artificial Sequence: Synthetic oligonucleotide"
  source: /note="Description of Combined DNA/RNA Molecule: Synthetic oligonucleotide"
  source: /note="DNA/RNA"
  source: /note="5' tri-ethylene glycol (TEG)"
  modified_base (1)..(1): bicyclic nucleic acid (BNA)
  modified_base (2)..(2): bicyclic nucleic acid (BNA)
  modified_base (15)..(15): bicyclic nucleic acid (BNA)
  modified_base (16)..(16): bicyclic nucleic acid (BNA)
  source: /note="3' tri-ethylene glycol (TEG)"
ggaagauggcauuuct

SEQ ID NO: 12527 - DNA, 15 bp, Artificial Sequence
  source: /note="Description of Artificial Sequence: Synthetic oligonucleotide"
  source: /note="Description of Combined DNA/RNA Molecule: Synthetic oligonucleotide"
  source: /note="DNA/RNA"
  source: /note="5' tri-ethylene glycol (TEG)"
  modified_base (1)..(1): bicyclic nucleic acid (BNA)
  modified_base (2)..(2): bicyclic nucleic acid (BNA)
  modified_base (14)..(14): bicyclic nucleic acid (BNA)
  modified_base (15)..(15): bicyclic nucleic acid (BNA)
  source: /note="3' tri-ethylene glycol (TEG)"
ggaagauggcauutc

SEQ ID NO: 12528 - DNA, 14 bp, Artificial Sequence
  source: /note="Description of Artificial Sequence: Synthetic oligonucleotide"
  source: /note="Description of Combined DNA/RNA Molecule: Synthetic oligonucleotide"
  source: /note="DNA/RNA"
  source: /note="5' tri-ethylene glycol (TEG)"
  modified_base (1)..(1): bicyclic nucleic acid (BNA)
  modified_base (2)..(2): bicyclic nucleic acid (BNA)
  modified_base (13)..(13): bicyclic nucleic acid (BNA)
  modified_base (14)..(14): bicyclic nucleic acid (BNA)
  source: /note="3' tri-ethylene glycol (TEG)"
ggaagauggcautt

SEQ ID NO: 12529 - DNA, 13 bp, Artificial Sequence
  source: /note="Description of Artificial Sequence: Synthetic oligonucleotide"
  source: /note="Description of Combined DNA/RNA Molecule: Synthetic oligonucleotide"
  source: /note="DNA/RNA"
  source: /note="5' tri-ethylene glycol (TEG)"
  modified_base (1)..(1): bicyclic nucleic acid (BNA)
  modified_base (2)..(2): bicyclic nucleic acid (BNA)
  modified_base (12)..(12): bicyclic nucleic acid (BNA)
  modified_base (13)..(13): bicyclic nucleic acid (BNA)
  source: /note="3' tri-ethylene glycol (TEG)"
ggaagauggcatt

SEQ ID NO: 12530 - DNA, 12 bp, Artificial Sequence
  source: /note="Description of Artificial Sequence: Synthetic oligonucleotide"
  source: /note="Description of Combined DNA/RNA Molecule: Synthetic oligonucleotide"
  source: /note="DNA/RNA"
  source: /note="5' tri-ethylene glycol (TEG)"
  modified_base (1)..(1): bicyclic nucleic acid (BNA)
  modified_base (2)..(2): bicyclic nucleic acid (BNA)
  modified_base (11)..(11): bicyclic nucleic acid (BNA)
  modified_base (12)..(12): bicyclic nucleic acid (BNA)
  source: /note="3' tri-ethylene glycol (TEG)"
ggaagauggcat

SEQ ID NO: 12531 - RNA, 11 nt, Artificial Sequence
  source: /note="Description of Artificial Sequence: Synthetic oligonucleotide"
  source: /note="RNA"
  source: /note="5' tri-ethylene glycol (TEG)"
  modified_base (1)..(1): bicyclic nucleic acid (BNA)
  modified_base (2)..(2): bicyclic nucleic acid (BNA)
  modified_base (10)..(10): bicyclic nucleic acid (BNA)
  modified_base (11)..(11): bicyclic nucleic acid (BNA)
  source: /note="3' tri-ethylene glycol (TEG)"
ggaagauggca

SEQ ID NO: 12532 - RNA, 10 nt, Artificial Sequence
  source: /note="Description of Artificial Sequence: Synthetic oligonucleotide"
  source: /note="RNA"
  source: /note="5' tri-ethylene glycol (TEG)"
  modified_base (1)..(1): bicyclic nucleic acid (BNA)
  modified_base (2)..(2): bicyclic nucleic acid (BNA)
  modified_base (9)..(9): bicyclic nucleic acid (BNA)
  modified_base (10)..(10): bicyclic nucleic acid (BNA)
  source: /note="3' tri-ethylene glycol (TEG)"
ggaagauggc

SEQ ID NO: 12533 - DNA, 8 bp, Artificial Sequence
  source: /note="Description of Artificial Sequence: Synthetic oligonucleotide"
  source: /note="DNA/RNA"
  source: /note="5' tri-ethylene glycol (TEG)"
  modified_base (1)..(1): bicyclic nucleic acid (BNA)
  modified_base (2)..(2): bicyclic nucleic acid (BNA)
  modified_base (7)..(7): bicyclic nucleic acid (BNA)
  modified_base (8)..(8): bicyclic nucleic acid (BNA)
  source: /note="3' tri-ethylene glycol (TEG)"
ggaagatg

SEQ ID NO: 12534 - RNA, 17 nt, Artificial Sequence
  source: /note="Description of Artificial Sequence: Synthetic oligonucleotide"
  source: /note="RNA"
  source: /note="5' tri-ethylene glycol (TEG)"
  modified_base (1)..(1): bicyclic nucleic acid (BNA)
  modified_base (2)..(2): bicyclic nucleic acid (BNA)
  modified_base (16)..(16): bicyclic nucleic acid (BNA)
  modified_base (17)..(17): bicyclic nucleic acid (BNA)
  source: /note="3' tri-ethylene glycol (TEG)"
gaagauggcauuucuag

SEQ ID NO: 12535 - DNA, 16 bp, Artificial Sequence
  source: /note="Description of Artificial Sequence: Synthetic oligonucleotide"
  source: /note="Description of Combined DNA/RNA Molecule: Synthetic oligonucleotide"
  source: /note="DNA/RNA"
  source: /note="5' tri-ethylene glycol (TEG)"
  modified_base (1)..(1): bicyclic nucleic acid (BNA)
  modified_base (2)..(2): bicyclic nucleic acid (BNA)
  modified_base (15)..(15): bicyclic nucleic acid (BNA)
  modified_base (16)..(16): bicyclic nucleic acid (BNA)
  source: /note="3' tri-ethylene glycol (TEG)"
gaagauggcauuucta

SEQ ID NO: 12536 - DNA, 14 bp, Artificial Sequence
  source: /note="Description of Artificial Sequence: Synthetic oligonucleotide"
  source: /note="Description of Combined DNA/RNA Molecule: Synthetic oligonucleotide"
  source: /note="DNA/RNA"
  source: /note="5' tri-ethylene glycol (TEG)"
  modified_base (1)..(1): bicyclic nucleic acid (BNA)
  modified_base (2)..(2): bicyclic nucleic acid (BNA)
  modified_base (13)..(13): bicyclic nucleic acid (BNA)
  modified_base (14)..(14): bicyclic nucleic acid (BNA)
  source: /note="3' tri-ethylene glycol (TEG)"
gaagauggcauutc

SEQ ID NO: 12537 - DNA, 13 bp, Artificial Sequence
  source: /note="Description of Artificial Sequence: Synthetic oligonucleotide"
  source: /note="Description of Combined DNA/RNA Molecule: Synthetic oligonucleotide"
  source: /note="DNA/RNA"
  source: /note="5' tri-ethylene glycol (TEG)"
  modified_base (1)..(1): bicyclic nucleic acid (BNA)
  modified_base (2)..(2): bicyclic nucleic acid (BNA)
  modified_base (12)..(12): bicyclic nucleic acid (BNA)
  modified_base (13)..(13): bicyclic nucleic acid (BNA)
  source: /note="3' tri-ethylene glycol (TEG)"
gaagauggcautt

SEQ ID NO: 12538 - DNA, 12 bp, Artificial Sequence
  source: /note="Description of Artificial Sequence: Synthetic oligonucleotide"
  source: /note="Description of Combined DNA/RNA Molecule: Synthetic oligonucleotide"
  source: /note="DNA/RNA"
  source: /note="5' tri-ethylene glycol (TEG)"
  modified_base (1)..(1): bicyclic nucleic acid (BNA)
  modified_base (2)..(2): bicyclic nucleic acid (BNA)
  modified_base (11)..(11): bicyclic nucleic acid (BNA)
  modified_base (12)..(12): bicyclic nucleic acid (BNA)
  source: /note="3' tri-ethylene glycol (TEG)"
gaagauggcatt

SEQ ID NO: 12539 - DNA, 11 bp, Artificial Sequence
  source: /note="Description of Artificial Sequence: Synthetic oligonucleotide"
  source: /note="Description of Combined DNA/RNA Molecule: Synthetic oligonucleotide"
  source: /note="DNA/RNA"
  source: /note="5' tri-ethylene glycol (TEG)"
  modified_base (1)..(1): bicyclic nucleic acid (BNA)
  modified_base (2)..(2): bicyclic nucleic acid (BNA)
  modified_base (10)..(10): bicyclic nucleic acid (BNA)
  modified_base (11)..(11): bicyclic nucleic acid (BNA)
  source: /note="3' tri-ethylene glycol (TEG)"
gaagauggcat

SEQ ID NO: 12540 - RNA, 10 nt, Artificial Sequence
  source: /note="Description of Artificial Sequence: Synthetic oligonucleotide"
  source: /note="RNA"
  source: /note="5' tri-ethylene glycol (TEG)"
  modified_base (1)..(1): bicyclic nucleic acid (BNA)
  modified_base (2)..(2): bicyclic nucleic acid (BNA)
  modified_base (9)..(9): bicyclic nucleic acid (BNA)
  modified_base (10)..(10): bicyclic nucleic acid (BNA)
  source: /note="3' tri-ethylene glycol (TEG)"
gaagauggca

SEQ ID NO: 12541 - RNA, 9 nt, Artificial Sequence
  source: /note="Description of Artificial Sequence: Synthetic oligonucleotide"
  source: /note="RNA"
  source: /note="5' tri-ethylene glycol (TEG)"
  modified_base (1)..(1): bicyclic nucleic acid (BNA)
  modified_base (2)..(2): bicyclic nucleic acid (BNA)
  modified_base (8)..(8): bicyclic nucleic acid (BNA)
  modified_base (9)..(9): bicyclic nucleic acid (BNA)
  source: /note="3' tri-ethylene glycol (TEG)"
gaagauggc

SEQ ID NO: 12542 - RNA, 8 nt, Artificial Sequence
  source: /note="Description of Artificial Sequence: Synthetic oligonucleotide"
  source: /note="RNA"
  source: /note="5' tri-ethylene glycol (TEG)"
  modified_base (1)..(1): bicyclic nucleic acid (BNA)
  modified_base (2)..(2): bicyclic nucleic acid (BNA)
  modified_base (7)..(7): bicyclic nucleic acid (BNA)
  modified_base (8)..(8): bicyclic nucleic acid (BNA)
  source: /note="3' tri-ethylene glycol (TEG)"
gaagaugg

SEQ ID NO: 12543 - RNA, 16 nt, Artificial Sequence
  source: /note="Description of Artificial Sequence: Synthetic oligonucleotide"
  source: /note="RNA"
  source: /note="5' tri-ethylene glycol (TEG)"
  modified_base (1)..(1): bicyclic nucleic acid (BNA)
  modified_base (2)..(2): bicyclic nucleic acid (BNA)
  modified_base (15)..(15): bicyclic nucleic acid (BNA)
  modified_base (16)..(16): bicyclic nucleic acid (BNA)
  source: /note="3' tri-ethylene glycol (TEG)"
aagauggcauuucuag

SEQ ID NO: 12544 - DNA, 15 bp, Artificial Sequence
  source: /note="Description of Artificial Sequence: Synthetic oligonucleotide"
  source: /note="Description of Combined DNA/RNA Molecule: Synthetic oligonucleotide"
  source: /note="DNA/RNA"
  source: /note="5' tri-ethylene glycol (TEG)"
  modified_base (1)..(1): bicyclic nucleic acid (BNA)
  modified_base (2)..(2): bicyclic nucleic acid (BNA)
  modified_base (14)..(14): bicyclic nucleic acid (BNA)
  modified_base (15)..(15): bicyclic nucleic acid (BNA)
  source: /note="3' tri-ethylene glycol (TEG)"
aagauggcauuucta

SEQ ID NO: 12545 - DNA, 14 bp, Artificial Sequence
  source: /note="Description of Artificial Sequence: Synthetic oligonucleotide"
  source: /note="Description of Combined DNA/RNA Molecule: Synthetic oligonucleotide"
  source: /note="DNA/RNA"
  source: /note="5' tri-ethylene glycol (TEG)"
  modified_base (1)..(1): bicyclic nucleic acid (BNA)
  modified_base (2)..(2): bicyclic nucleic acid (BNA)
  modified_base (13)..(13): bicyclic nucleic acid (BNA)
  modified_base (14)..(14): bicyclic nucleic acid (BNA)
  source: /note="3' tri-ethylene glycol (TEG)"
aagauggcauuuct

SEQ ID NO: 12546 - DNA, 13 bp, Artificial Sequence
  source: /note="Description of Artificial Sequence: Synthetic oligonucleotide"
  source: /note="Description of Combined DNA/RNA Molecule: Synthetic oligonucleotide"
  source: /note="DNA/RNA"
  source: /note="5' tri-ethylene glycol (TEG)"
  modified_base (1)..(1): bicyclic nucleic acid (BNA)
  modified_base (2)..(2): bicyclic nucleic acid (BNA)
  modified_base (12)..(12): bicyclic nucleic acid (BNA)
  modified_base (13)..(13): bicyclic nucleic acid (BNA)
  source: /note="3' tri-ethylene glycol (TEG)"
aagauggcauutc

SEQ ID NO: 12547 - DNA, 12 bp, Artificial Sequence
  source: /note="Description of Artificial Sequence: Synthetic oligonucleotide"
  source: /note="Description of Combined DNA/RNA Molecule: Synthetic oligonucleotide"
  source: /note="DNA/RNA"
  source: /note="5' tri-ethylene glycol (TEG)"
  modified_base (1)..(1): bicyclic nucleic acid (BNA)
  modified_base (2)..(2): bicyclic nucleic acid (BNA)
  modified_base (11)..(11): bicyclic nucleic acid (BNA)
  modified_base (12)..(12): bicyclic nucleic acid (BNA)
  source: /note="3' tri-ethylene glycol (TEG)"
aagauggcautt

SEQ ID NO: 12548 - DNA, 11 bp, Artificial Sequence
  source: /note="Description of Artificial Sequence: Synthetic oligonucleotide"
  source: /note="Description of Combined DNA/RNA Molecule: Synthetic oligonucleotide"
  source: /note="DNA/RNA"
  source: /note="5' tri-ethylene glycol (TEG)"
  modified_base (1)..(1): bicyclic nucleic acid (BNA)
  modified_base (2)..(2): bicyclic nucleic acid (BNA)
  modified_base (10)..(10): bicyclic nucleic acid (BNA)
  modified_base (11)..(11): bicyclic nucleic acid (BNA)
  source: /note="3' tri-ethylene glycol (TEG)"
aagauggcatt

SEQ ID NO: 12549 - DNA, 10 bp, Artificial Sequence
  source: /note="Description of Artificial Sequence: Synthetic oligonucleotide"
  source: /note="Description of Combined DNA/RNA Molecule: Synthetic oligonucleotide"
  source: /note="DNA/RNA"
  source: /note="5' tri-ethylene glycol (TEG)"
  modified_base (1)..(1): bicyclic nucleic acid (BNA)
  modified_base (2)..(2): bicyclic nucleic acid (BNA)
  modified_base (9)..(9): bicyclic nucleic acid (BNA)
  modified_base (10)..(10): bicyclic nucleic acid (BNA)
  source: /note="3' tri-ethylene glycol (TEG)"
aagauggcat

SEQ ID NO: 12550 - RNA, 9 nt, Artificial Sequence
  source: /note="Description of Artificial Sequence: Synthetic oligonucleotide"
  source: /note="RNA"
  source: /note="5' tri-ethylene glycol (TEG)"
  modified_base (1)..(1): bicyclic nucleic acid (BNA)
  modified_base (2)..(2): bicyclic nucleic acid (BNA)
  modified_base (8)..(8): bicyclic nucleic acid (BNA)
  modified_base (9)..(9): bicyclic nucleic acid (BNA)
  source: /note="3' tri-ethylene glycol (TEG)"
aagauggca

SEQ ID NO: 12551 - RNA, 8 nt, Artificial Sequence
  source: /note="Description of Artificial Sequence: Synthetic oligonucleotide"
  source: /note="RNA"
  source: /note="5' tri-ethylene glycol (TEG)"
  modified_base (1)..(1): bicyclic nucleic acid (BNA)
  modified_base (2)..(2): bicyclic nucleic acid (BNA)
  modified_base (7)..(7): bicyclic nucleic acid (BNA)
  modified_base (8)..(8): bicyclic nucleic acid (BNA)
  source: /note="3' tri-ethylene glycol (TEG)"
aagauggc

SEQ ID NO: 12552 - RNA, 15 nt, Artificial Sequence
  source: /note="Description of Artificial Sequence: Synthetic oligonucleotide"
  source: /note="RNA"
  source: /note="5' tri-ethylene glycol (TEG)"
  modified_base (1)..(1): bicyclic nucleic acid (BNA)
  modified_base (2)..(2): bicyclic nucleic acid (BNA)
  modified_base (14)..(14): bicyclic nucleic acid (BNA)
  modified_base (15)..(15): bicyclic nucleic acid (BNA)
  source: /note="3' tri-ethylene glycol (TEG)"
agauggcauuucuag

SEQ ID NO: 12553 - DNA, 14 bp, Artificial Sequence
  source: /note="Description of Artificial Sequence: Synthetic oligonucleotide"
  source: /note="Description of Combined DNA/RNA Molecule: Synthetic oligonucleotide"
  source: /note="DNA/RNA"
  source: /note="5' tri-ethylene glycol (TEG)"
  modified_base (1)..(1): bicyclic nucleic acid (BNA)
  modified_base (2)..(2): bicyclic nucleic acid (BNA)
  modified_base (13)..(13): bicyclic nucleic acid (BNA)
  modified_base (14)..(14): bicyclic nucleic acid (BNA)
  source: /note="3' tri-ethylene glycol (TEG)"
agauggcauuucta

SEQ ID NO: 12554 - DNA, 13 bp, Artificial Sequence
  source: /note="Description of Artificial Sequence: Synthetic oligonucleotide"
  source: /note="Description of Combined DNA/RNA Molecule: Synthetic oligonucleotide"
  source: /note="DNA/RNA"
  source: /note="5' tri-ethylene glycol (TEG)"
  modified_base (1)..(1): bicyclic nucleic acid (BNA)
  modified_base (2)..(2): bicyclic nucleic acid (BNA)
  modified_base (12)..(12): bicyclic nucleic acid (BNA)
  modified_base (13)..(13): bicyclic nucleic acid (BNA)
  source: /note="3' tri-ethylene glycol (TEG)"
agauggcauuuct

SEQ ID NO: 12555 - DNA, 12 bp, Artificial Sequence
  source: /note="Description of Artificial Sequence: Synthetic oligonucleotide"
  source: /note="Description of Combined DNA/RNA Molecule: Synthetic oligonucleotide"
  source: /note="DNA/RNA"
  source: /note="5' tri-ethylene glycol (TEG)"
  modified_base (1)..(1): bicyclic nucleic acid (BNA)
  modified_base (2)..(2): bicyclic nucleic acid (BNA)
  modified_base (11)..(11): bicyclic nucleic acid (BNA)
  modified_base (12)..(12): bicyclic nucleic acid (BNA)
  source: /note="3' tri-ethylene glycol (TEG)"
agauggcauutc

SEQ ID NO: 12556 - DNA, 11 bp, Artificial Sequence
  source: /note="Description of Artificial Sequence: Synthetic oligonucleotide"
  source: /note="Description of Combined DNA/RNA Molecule: Synthetic oligonucleotide"
  source: /note="DNA/RNA"
  source: /note="5' tri-ethylene glycol (TEG)"
  modified_base (1)..(1): bicyclic nucleic acid (BNA)
  modified_base (2)..(2): bicyclic nucleic acid (BNA)
  modified_base (10)..(10): bicyclic nucleic acid (BNA)
  modified_base (11)..(11): bicyclic nucleic acid (BNA)
  source: /note="3' tri-ethylene glycol (TEG)"
agauggcautt

SEQ ID NO: 12557 - DNA, 10 bp, Artificial Sequence
  source: /note="Description of Artificial Sequence: Synthetic oligonucleotide"
  source: /note="Description of Combined DNA/RNA Molecule: Synthetic oligonucleotide"
  source: /note="DNA/RNA"
  source: /note="5' tri-ethylene glycol (TEG)"
  modified_base (1)..(1): bicyclic nucleic acid (BNA)
  modified_base (2)..(2): bicyclic nucleic acid (BNA)
  modified_base (9)..(9): bicyclic nucleic acid (BNA)
  modified_base (10)..(10): bicyclic nucleic acid (BNA)
  source: /note="3' tri-ethylene glycol (TEG)"
agauggcatt

SEQ ID NO: 12558 - DNA, 9 bp, Artificial Sequence
  source: /note="Description of Artificial Sequence: Synthetic oligonucleotide"
  source: /note="Description of Combined DNA/RNA Molecule: Synthetic oligonucleotide"
  source: /note="DNA/RNA"
  source: /note="5' tri-ethylene glycol (TEG)"
  modified_base (1)..(1): bicyclic nucleic acid (BNA)
  modified_base (2)..(2): bicyclic nucleic acid (BNA)
  modified_base (8)..(8): bicyclic nucleic acid (BNA)
  modified_base (9)..(9): bicyclic nucleic acid (BNA)
  source: /note="3' tri-ethylene glycol (TEG)"
agauggcat

SEQ ID NO: 12559 - RNA, 8 nt, Artificial Sequence
  source: /note="Description of Artificial Sequence: Synthetic oligonucleotide"
  source: /note="RNA"
  source: /note="5' tri-ethylene glycol (TEG)"
  modified_base (1)..(1): bicyclic nucleic acid (BNA)
  modified_base (2)..(2): bicyclic nucleic acid (BNA)
  modified_base (7)..(7): bicyclic nucleic acid (BNA)
  modified_base (8)..(8): bicyclic nucleic acid (BNA)
  source: /note="3' tri-ethylene glycol (TEG)"
agauggca

SEQ ID NO: 12560 - DNA, 30 bp, Artificial Sequence; identical to SEQ ID NO: 8204
  source: /note="Description of Artificial Sequence: Synthetic oligonucleotide"
  source: /note="Description of Combined DNA/RNA Molecule: Synthetic oligonucleotide"
  source: /note="DNA/RNA"
  source: /note="5' tri-ethylene glycol (TEG)"
  modified_base (1)..(1): bicyclic nucleic acid (BNA)
  modified_base (2)..(2): bicyclic nucleic acid (BNA)
  modified_base (29)..(29): bicyclic nucleic acid (BNA)
  modified_base (30)..(30): bicyclic nucleic acid (BNA)
  source: /note="3' tri-ethylene glycol (TEG)"

SEQ ID NO: 12561 - DNA, 29 bp, Artificial Sequence
  source: /note="Description of Artificial Sequence: Synthetic oligonucleotide"
  source: /note="Description of Combined DNA/RNA Molecule: Synthetic oligonucleotide"
  source: /note="DNA/RNA"
  source: /note="5' tri-ethylene glycol (TEG)"
  modified_base (1)..(1): bicyclic nucleic acid (BNA)
  modified_base (2)..(2): bicyclic nucleic acid (BNA)
  modified_base (28)..(28): bicyclic nucleic acid (BNA)
  modified_base (29)..(29): bicyclic nucleic acid (BNA)
  source: /note="3' tri-ethylene glycol (TEG)"
ctccaacaucaaggaagauggcauuucta

SEQ ID NO: 12562 - DNA, 28 bp, Artificial Sequence
  source: /note="Description of Artificial Sequence: Synthetic oligonucleotide"
  source: /note="Description of Combined DNA/RNA Molecule: Synthetic oligonucleotide"
  source: /note="DNA/RNA"
  source: /note="5' tri-ethylene glycol (TEG)"
  modified_base (1)..(1): bicyclic nucleic acid (BNA)
  modified_base (2)..(2): bicyclic nucleic acid (BNA)
  modified_base (27)..(27): bicyclic nucleic acid (BNA)
  modified_base (28)..(28): bicyclic nucleic acid (BNA)
  source: /note="3' tri-ethylene glycol (TEG)"
ctccaacaucaaggaagauggcauuuct

SEQ ID NO: 12563 - DNA, 27 bp, Artificial Sequence
  source: /note="Description of Artificial Sequence: Synthetic oligonucleotide"
  source: /note="Description of Combined DNA/RNA Molecule: Synthetic oligonucleotide"
  source: /note="DNA/RNA"
  source: /note="5' tri-ethylene glycol (TEG)"
  modified_base (1)..(1): bicyclic nucleic acid (BNA)
  modified_base (2)..(2): bicyclic nucleic acid (BNA)
  modified_base (26)..(26): bicyclic nucleic acid (BNA)
  modified_base (27)..(27): bicyclic nucleic acid (BNA)
  source: /note="3' tri-ethylene glycol (TEG)"
ctccaacaucaaggaagauggcauutc

SEQ ID NO: 12564 - DNA, 26 bp, Artificial Sequence
  source: /note="Description of Artificial Sequence: Synthetic oligonucleotide"
  source: /note="Description of Combined DNA/RNA Molecule: Synthetic oligonucleotide"
  source: /note="DNA/RNA"
  source: /note="5' tri-ethylene glycol (TEG)"
  modified_base (1)..(1): bicyclic nucleic acid (BNA)
  modified_base (2)..(2): bicyclic nucleic acid (BNA)
  modified_base (25)..(25): bicyclic nucleic acid (BNA)
  modified_base (26)..(26): bicyclic nucleic acid (BNA)
  source: /note="3' tri-ethylene glycol (TEG)"
ctccaacaucaaggaagauggcautt

SEQ ID NO: 12565 - DNA, 25 bp, Artificial Sequence
  source: /note="Description of Artificial Sequence: Synthetic oligonucleotide"
  source: /note="Description of Combined DNA/RNA Molecule: Synthetic oligonucleotide"
  source: /note="DNA/RNA"
  source: /note="5' tri-ethylene glycol (TEG)"
  modified_base (1)..(1): bicyclic nucleic acid (BNA)
  modified_base (2)..(2): bicyclic nucleic acid (BNA)
  modified_base (24)..(24): bicyclic nucleic acid (BNA)
  modified_base (25)..(25): bicyclic nucleic acid (BNA)
  source: /note="3' tri-ethylene glycol (TEG)"
ctccaacaucaaggaagauggcatt

SEQ ID NO: 12566 - DNA, 24 bp, Artificial Sequence
  source: /note="Description of Artificial Sequence: Synthetic oligonucleotide"
  source: /note="Description of Combined DNA/RNA Molecule: Synthetic oligonucleotide"
  source: /note="DNA/RNA"
  source: /note="5' tri-ethylene glycol (TEG)"
  modified_base (1)..(1): bicyclic nucleic acid (BNA)
  modified_base (2)..(2): bicyclic nucleic acid (BNA)
  modified_base (23)..(23): bicyclic nucleic acid (BNA)
  modified_base (24)..(24): bicyclic nucleic acid (BNA)
  source: /note="3' tri-ethylene glycol (TEG)"
ctccaacaucaaggaagauggcat

SEQ ID NO: 12567 - DNA, 23 bp, Artificial Sequence
  source: /note="Description of Artificial Sequence: Synthetic oligonucleotide"
  source: /note="Description of Combined DNA/RNA Molecule: Synthetic oligonucleotide"
  source: /note="DNA/RNA"
  source: /note="5' tri-ethylene glycol (TEG)"
  modified_base (1)..(1): bicyclic nucleic acid (BNA)
  modified_base (2)..(2): bicyclic nucleic acid (BNA)
  modified_base (22)..(22): bicyclic nucleic acid (BNA)
  modified_base (23)..(23): bicyclic nucleic acid (BNA)
  source: /note="3' tri-ethylene glycol (TEG)"
ctccaacaucaaggaagauggca

SEQ ID NO: 12568 - DNA, 22 bp, Artificial Sequence
  source: /note="Description of Artificial Sequence: Synthetic oligonucleotide"
  source: /note="Description of Combined DNA/RNA Molecule: Synthetic oligonucleotide"
  source: /note="DNA/RNA"
  source: /note="5' tri-ethylene glycol (TEG)"
  modified_base (1)..(1): bicyclic nucleic acid (BNA)
  modified_base (2)..(2): bicyclic nucleic acid (BNA)
  modified_base (21)..(21): bicyclic nucleic acid (BNA)
  modified_base (22)..(22): bicyclic nucleic acid (BNA)
  source: /note="3' tri-ethylene glycol (TEG)"
ctccaacaucaaggaagauggc

SEQ ID NO: 12569 - DNA, 21 bp, Artificial Sequence
  source: /note="Description of Artificial Sequence: Synthetic oligonucleotide"
  source: /note="Description of Combined DNA/RNA Molecule: Synthetic oligonucleotide"
  source: /note="DNA/RNA"
  source: /note="5' tri-ethylene glycol (TEG)"
  modified_base (1)..(1): bicyclic nucleic acid (BNA)
  modified_base (2)..(2): bicyclic nucleic acid (BNA)
  modified_base (20)..(20): bicyclic nucleic acid (BNA)
  modified_base (21)..(21): bicyclic nucleic acid (BNA)
  source: /note="3' tri-ethylene glycol (TEG)"
ctccaacaucaaggaagaugg

SEQ ID NO: 12570 - DNA, 20 bp, Artificial Sequence
  source: /note="Description of Artificial Sequence: Synthetic oligonucleotide"
  source: /note="Description of Combined DNA/RNA Molecule: Synthetic oligonucleotide"
  source: /note="DNA/RNA"
  source: /note="5' tri-ethylene glycol (TEG)"
  modified_base (1)..(1): bicyclic nucleic acid (BNA)
  modified_base (2)..(2): bicyclic nucleic acid (BNA)
  modified_base (19)..(19): bicyclic nucleic acid (BNA)
  modified_base (20)..(20): bicyclic nucleic acid (BNA)
  source: /note="3' tri-ethylene glycol (TEG)"
ctccaacaucaaggaagatg

SEQ ID NO: 12571 - DNA, 19 bp, Artificial Sequence
  source: /note="Description of Artificial Sequence: Synthetic oligonucleotide"
  source: /note="Description of Combined DNA/RNA Molecule: Synthetic oligonucleotide"
  source: /note="DNA/RNA"
  source: /note="5' tri-ethylene glycol (TEG)"
  modified_base (1)..(1): bicyclic nucleic acid (BNA)
  modified_base (2)..(2): bicyclic nucleic acid (BNA)
  modified_base (18)..(18): bicyclic nucleic acid (BNA)
  modified_base (19)..(19): bicyclic nucleic acid (BNA)
  source: /note="3' tri-ethylene glycol (TEG)"
ctccaacaucaaggaagat

SEQ ID NO: 12572 - DNA, 18 bp, Artificial Sequence
  source: /note="Description of Artificial Sequence: Synthetic oligonucleotide"
  source: /note="Description of Combined DNA/RNA Molecule: Synthetic oligonucleotide"
  source: /note="DNA/RNA"
  source: /note="5' tri-ethylene glycol (TEG)"
  modified_base (1)..(1): bicyclic nucleic acid (BNA)
  modified_base (2)..(2): bicyclic nucleic acid (BNA)
  modified_base (17)..(17): bicyclic nucleic acid (BNA)
  modified_base (18)..(18): bicyclic nucleic acid (BNA)
  source: /note="3' tri-ethylene glycol (TEG)"
ctccaacaucaaggaaga

SEQ ID NO: 12573 - DNA, 17 bp, Artificial Sequence
  source: /note="Description of Artificial Sequence: Synthetic oligonucleotide"
  source: /note="Description of Combined DNA/RNA Molecule: Synthetic oligonucleotide"
  source: /note="DNA/RNA"
  source: /note="5' tri-ethylene glycol (TEG)"
  modified_base (1)..(1): bicyclic nucleic acid (BNA)
  modified_base (2)..(2): bicyclic nucleic acid (BNA)
  modified_base (16)..(16): bicyclic nucleic acid (BNA)
  modified_base (17)..(17): bicyclic nucleic acid (BNA)
  source: /note="3' tri-ethylene glycol (TEG)"
ctccaacaucaaggaag

SEQ ID NO: 12574 - DNA, 29 bp, Artificial Sequence
  source: /note="Description of Artificial Sequence: Synthetic oligonucleotide"
  source: /note="Description of Combined DNA/RNA Molecule: Synthetic oligonucleotide"
  source: /note="DNA/RNA"
  source: /note="5' tri-ethylene glycol (TEG)"
  modified_base (1)..(1): bicyclic nucleic acid (BNA)
  modified_base (2)..(2): bicyclic nucleic acid (BNA)
  modified_base (28)..(28): bicyclic nucleic acid (BNA)
  modified_base (29)..(29): bicyclic nucleic acid (BNA)
  source: /note="3' tri-ethylene glycol (TEG)"
tccaacaucaaggaagauggcauuucuag

SEQ ID NO: 12575 - DNA, 28 bp, Artificial Sequence
  source: /note="Description of Artificial Sequence: Synthetic oligonucleotide"
  source: /note="Description of Combined DNA/RNA Molecule: Synthetic oligonucleotide"
  source: /note="DNA/RNA"
  source: /note="5' tri-ethylene glycol (TEG)"
  modified_base (1)..(1): bicyclic nucleic acid (BNA)
  modified_base (2)..(2): bicyclic nucleic acid (BNA)
  modified_base (27)..(27): bicyclic nucleic acid (BNA)
  modified_base (28)..(28): bicyclic nucleic acid (BNA)
  source: /note="3' tri-ethylene glycol (TEG)"
tccaacaucaaggaagauggcauuucta

SEQ ID NO: 12576 - DNA, 27 bp, Artificial Sequence
  source: /note="Description of Artificial Sequence: Synthetic oligonucleotide"
  source: /note="Description of Combined DNA/RNA Molecule: Synthetic oligonucleotide"
  source: /note="DNA/RNA"
  source: /note="5' tri-ethylene glycol (TEG)"
  modified_base (1)..(1): bicyclic nucleic acid (BNA)
  modified_base (2)..(2): bicyclic nucleic acid (BNA)
  modified_base (26)..(26): bicyclic nucleic acid (BNA)
  modified_base (27)..(27): bicyclic nucleic acid (BNA)
  source: /note="3' tri-ethylene glycol (TEG)"
tccaacaucaaggaagauggcauuuct

SEQ ID NO: 12577 - DNA, 26 bp, Artificial Sequence
  source: /note="Description of Artificial Sequence: Synthetic oligonucleotide"
  source: /note="Description of Combined DNA/RNA Molecule: Synthetic oligonucleotide"
  source: /note="DNA/RNA"
  source: /note="5' tri-ethylene glycol (TEG)"
  modified_base (1)..(1): bicyclic nucleic acid (BNA)
  modified_base (2)..(2): bicyclic nucleic acid (BNA)
  modified_base (25)..(25): bicyclic nucleic acid (BNA)
  modified_base (26)..(26): bicyclic nucleic acid (BNA)
  source: /note="3' tri-ethylene glycol (TEG)"
tccaacaucaaggaagauggcauutc

SEQ ID NO: 12578 - DNA, 25 bp, Artificial Sequence
  source: /note="Description of Artificial Sequence: Synthetic oligonucleotide"
  source: /note="Description of Combined DNA/RNA Molecule: Synthetic oligonucleotide"
  source: /note="DNA/RNA"
  source: /note="5' tri-ethylene glycol (TEG)"
  modified_base (1)..(1): bicyclic nucleic acid (BNA)
  modified_base (2)..(2): bicyclic nucleic acid (BNA)
  modified_base (24)..(24): bicyclic nucleic acid (BNA)
  modified_base (25)..(25): bicyclic nucleic acid (BNA)
  source: /note="3' tri-ethylene glycol (TEG)"
tccaacaucaaggaagauggcautt

SEQ ID NO: 12579 - DNA, 24 bp, Artificial Sequence
  source: /note="Description of Artificial Sequence: Synthetic oligonucleotide"
  source: /note="Description of Combined DNA/RNA Molecule: Synthetic oligonucleotide"
  source: /note="DNA/RNA"
  source: /note="5' tri-ethylene glycol (TEG)"
  modified_base (1)..(1): bicyclic nucleic acid (BNA)
  modified_base (2)..(2): bicyclic nucleic acid (BNA)
  modified_base (23)..(23): bicyclic nucleic acid (BNA)
  modified_base (24)..(24): bicyclic nucleic acid (BNA)
  source: /note="3' tri-ethylene glycol (TEG)"
tccaacaucaaggaagauggcatt

SEQ ID NO: 12580 - DNA, 23 bp, Artificial Sequence
  source: /note="Description of Artificial Sequence: Synthetic oligonucleotide"
  source: /note="Description of Combined DNA/RNA Molecule: Synthetic oligonucleotide"
  source: /note="DNA/RNA"
  source: /note="5' tri-ethylene glycol (TEG)"
  modified_base (1)..(1): bicyclic nucleic acid (BNA)
  modified_base (2)..(2): bicyclic nucleic acid (BNA)
  modified_base (22)..(22): bicyclic nucleic acid (BNA)
  modified_base (23)..(23): bicyclic nucleic acid (BNA)
  source: /note="3' tri-ethylene glycol (TEG)"
tccaacaucaaggaagauggcat

SEQ ID NO: 12581 - DNA, 22 bp, Artificial Sequence
  source: /note="Description of Artificial Sequence: Synthetic oligonucleotide"
  source: /note="Description of Combined DNA/RNA Molecule: Synthetic oligonucleotide"
  source: /note="DNA/RNA"
  source: /note="5' tri-ethylene glycol (TEG)"
  modified_base (1)..(1): bicyclic nucleic acid (BNA)
  modified_base (2)..(2): bicyclic nucleic acid (BNA)
  modified_base (21)..(21): bicyclic nucleic acid (BNA)
  modified_base (22)..(22): bicyclic nucleic acid (BNA)
  source: /note="3' tri-ethylene glycol (TEG)"
tccaacaucaaggaagauggca

SEQ ID NO: 12582 - DNA, 21 bp, Artificial Sequence
  source: /note="Description of Artificial Sequence: Synthetic oligonucleotide"
  source: /note="Description of Combined DNA/RNA Molecule: Synthetic oligonucleotide"
  source: /note="DNA/RNA"
  source: /note="5' tri-ethylene glycol (TEG)"
  modified_base (1)..(1): bicyclic nucleic acid (BNA)
  modified_base (2)..(2): bicyclic nucleic acid (BNA)
  modified_base (20)..(20): bicyclic nucleic acid (BNA)
  modified_base (21)..(21): bicyclic nucleic acid (BNA)
  source: /note="3' tri-ethylene glycol (TEG)"
tccaacaucaaggaagauggc

SEQ ID NO: 12583 - DNA, 20 bp, Artificial Sequence
  source: /note="Description of Artificial Sequence: Synthetic oligonucleotide"
  source: /note="Description of Combined DNA/RNA Molecule: Synthetic oligonucleotide"
  source: /note="DNA/RNA"
  source: /note="5' tri-ethylene glycol (TEG)"
  modified_base (1)..(1): bicyclic nucleic acid (BNA)
  modified_base (2)..(2): bicyclic nucleic acid (BNA)
  modified_base (19)..(19): bicyclic nucleic acid (BNA)
  modified_base (20)..(20): bicyclic nucleic acid (BNA)
  source: /note="3' tri-ethylene glycol (TEG)"
tccaacaucaaggaagaugg

SEQ ID NO: 12584 - DNA, 19 bp, Artificial Sequence
  source: /note="Description of Artificial Sequence: Synthetic oligonucleotide"
  source: /note="Description of Combined DNA/RNA Molecule: Synthetic oligonucleotide"
  source: /note="DNA/RNA"
  source: /note="5' tri-ethylene glycol (TEG)"
  modified_base (1)..(1): bicyclic nucleic acid (BNA)
  modified_base (2)..(2): bicyclic nucleic acid (BNA)
  modified_base (18)..(18): bicyclic nucleic acid (BNA)
  modified_base (19)..(19): bicyclic nucleic acid (BNA)
  source: /note="3' tri-ethylene glycol (TEG)"
tccaacaucaaggaagatg

SEQ ID NO: 12585 - DNA, 18 bp, Artificial Sequence
  source: /note="Description of Artificial Sequence: Synthetic oligonucleotide"
  source: /note="Description of Combined DNA/RNA Molecule: Synthetic oligonucleotide"
  source: /note="DNA/RNA"
  source: /note="5' tri-ethylene glycol (TEG)"
  modified_base (1)..(1): bicyclic nucleic acid (BNA)
  modified_base (2)..(2): bicyclic nucleic acid (BNA)
  modified_base (17)..(17): bicyclic nucleic acid (BNA)
  modified_base (18)..(18): bicyclic nucleic acid (BNA)
  source: /note="3' tri-ethylene glycol (TEG)"
tccaacaucaaggaagat

SEQ ID NO: 12586 - DNA, 17 bp, Artificial Sequence
  source: /note="Description of Artificial Sequence: Synthetic oligonucleotide"
  source: /note="Description of Combined DNA/RNA Molecule: Synthetic oligonucleotide"
  source: /note="DNA/RNA"
  source: /note="5' tri-ethylene glycol (TEG)"
  modified_base (1)..(1): bicyclic nucleic acid (BNA)
  modified_base (2)..(2): bicyclic nucleic acid (BNA)
  modified_base (16)..(16): bicyclic nucleic acid (BNA)
  modified_base (17)..(17): bicyclic nucleic acid (BNA)
  source: /note="3' tri-ethylene glycol (TEG)"
tccaacaucaaggaaga

SEQ ID NO: 12587 - DNA, 16 bp, Artificial Sequence
  source: /note="Description of Artificial Sequence: Synthetic oligonucleotide"
  source: /note="Description of Combined DNA/RNA Molecule: Synthetic oligonucleotide"
  source: /note="DNA/RNA"
  source: /note="5' tri-ethylene glycol (TEG)"
  modified_base (1)..(1): bicyclic nucleic acid (BNA)
  modified_base (2)..(2): bicyclic nucleic acid (BNA)
  modified_base (15)..(15): bicyclic nucleic acid (BNA)
  modified_base (16)..(16): bicyclic nucleic acid (BNA)
  source: /note="3' tri-ethylene glycol (TEG)"
tccaacaucaaggaag

SEQ ID NO: 12588 - RNA, 28 nt, Artificial Sequence
  source: /note="Description of Artificial Sequence: Synthetic oligonucleotide"
  source: /note="RNA"
  source: /note="5' tri-ethylene glycol (TEG)"
  modified_base (1)..(1): bicyclic nucleic acid (BNA)
  modified_base (2)..(2): bicyclic nucleic acid (BNA)
  modified_base (27)..(27): bicyclic nucleic acid (BNA)
  modified_base (28)..(28): bicyclic nucleic acid (BNA)
  source: /note="3' tri-ethylene glycol (TEG)"
ccaacaucaaggaagauggcauuucuag

SEQ ID NO: 12589 - DNA, 27 bp, Artificial Sequence
  source: /note="Description of Artificial Sequence: Synthetic oligonucleotide"
  source: /note="Description of Combined DNA/RNA Molecule: Synthetic oligonucleotide"
  source: /note="DNA/RNA"
  source: /note="5' tri-ethylene glycol (TEG)"
  modified_base (1)..(1): bicyclic nucleic acid (BNA)
  modified_base (2)..(2): bicyclic nucleic acid (BNA)
  modified_base (26)..(26): bicyclic nucleic acid (BNA)
  modified_base (27)..(27): bicyclic nucleic acid (BNA)
  source: /note="3' tri-ethylene glycol (TEG)"
ccaacaucaaggaagauggcauuucta

SEQ ID NO: 12590 - DNA, 26 bp, Artificial Sequence
  source: /note="Description of Artificial Sequence: Synthetic oligonucleotide"
  source: /note="Description of Combined DNA/RNA Molecule: Synthetic oligonucleotide"
  source: /note="DNA/RNA"
  source: /note="5' tri-ethylene glycol (TEG)"
  modified_base (1)..(1): bicyclic nucleic acid (BNA)
  modified_base (2)..(2): bicyclic nucleic acid (BNA)
  modified_base (25)..(25): bicyclic nucleic acid (BNA)
  modified_base (26)..(26): bicyclic nucleic acid (BNA)
  source: /note="3' tri-ethylene glycol (TEG)"
ccaacaucaaggaagauggcauuuct

SEQ ID NO: 12591 - DNA, 25 bp, Artificial Sequence
  source: /note="Description of Artificial Sequence: Synthetic oligonucleotide"
  source: /note="Description of Combined DNA/RNA Molecule: Synthetic oligonucleotide"
  source: /note="DNA/RNA"
  source: /note="5' tri-ethylene glycol (TEG)"
  modified_base (1)..(1): bicyclic nucleic acid (BNA)
  modified_base (2)..(2): bicyclic nucleic acid (BNA)
  modified_base (24)..(24): bicyclic nucleic acid (BNA)
  modified_base (25)..(25): bicyclic nucleic acid (BNA)
  source: /note="3' tri-ethylene glycol (TEG)"
ccaacaucaaggaagauggcauutc

SEQ ID NO: 12592 - DNA, 24 bp, Artificial Sequence
  source: /note="Description of Artificial Sequence: Synthetic oligonucleotide"
  source: /note="Description of Combined DNA/RNA Molecule: Synthetic oligonucleotide"
  source: /note="DNA/RNA"
  source: /note="5' tri-ethylene glycol (TEG)"
  modified_base (1)..(1): bicyclic nucleic acid (BNA)
  modified_base (2)..(2): bicyclic nucleic acid (BNA)
  modified_base (23)..(23): bicyclic nucleic acid (BNA)
  modified_base (24)..(24): bicyclic nucleic acid (BNA)
  source: /note="3' tri-ethylene glycol (TEG)"
ccaacaucaaggaagauggcautt

SEQ ID NO: 12593 - DNA, 23 bp, Artificial Sequence
  source: /note="Description of Artificial Sequence: Synthetic oligonucleotide"
  source: /note="Description of Combined DNA/RNA Molecule: Synthetic oligonucleotide"
  source: /note="DNA/RNA"
  source: /note="5' tri-ethylene glycol (TEG)"
  modified_base (1)..(1): bicyclic nucleic acid (BNA)
  modified_base (2)..(2): bicyclic nucleic acid (BNA)
  modified_base (22)..(22): bicyclic nucleic acid (BNA)
  modified_base (23)..(23): bicyclic nucleic acid (BNA)
  source: /note="3' tri-ethylene glycol (TEG)"
ccaacaucaaggaagauggcatt

SEQ ID NO: 12594 - DNA, 22 bp, Artificial Sequence
  source: /note="Description of Artificial Sequence: Synthetic oligonucleotide"
  source: /note="Description of Combined DNA/RNA Molecule: Synthetic oligonucleotide"
  source: /note="DNA/RNA"
  source: /note="5' tri-ethylene glycol (TEG)"
  modified_base (1)..(1): bicyclic nucleic acid (BNA)
  modified_base (2)..(2): bicyclic nucleic acid (BNA)
  modified_base (21)..(21): bicyclic nucleic acid (BNA)
  modified_base (22)..(22): bicyclic nucleic acid (BNA)
  source: /note="3' tri-ethylene glycol (TEG)"
ccaacaucaaggaagauggcat

SEQ ID NO: 12595 - RNA, 21 nt, Artificial Sequence
  source: /note="Description of Artificial Sequence: Synthetic oligonucleotide"
  source: /note="RNA"
  source: /note="5' tri-ethylene glycol (TEG)"
  modified_base (1)..(1): bicyclic nucleic acid (BNA)
  modified_base (2)..(2): bicyclic nucleic acid (BNA)
  modified_base (20)..(20): bicyclic nucleic acid (BNA)
  modified_base (21)..(21): bicyclic nucleic acid (BNA)
  source: /note="3' tri-ethylene glycol (TEG)"
ccaacaucaaggaagauggca

SEQ ID NO: 12596 - RNA, 20 nt, Artificial Sequence
  source: /note="Description of Artificial Sequence: Synthetic oligonucleotide"
  source: /note="RNA"
  source: /note="5' tri-ethylene glycol (TEG)"
  modified_base (1)..(1): bicyclic nucleic acid (BNA)
  modified_base (2)..(2): bicyclic nucleic acid (BNA)
  modified_base (19)..(19): bicyclic nucleic acid (BNA)
  modified_base (20)..(20): bicyclic nucleic acid (BNA)
  source: /note="3' tri-ethylene glycol (TEG)"
ccaacaucaaggaagauggc

SEQ ID NO: 12597 - RNA, 19 nt, Artificial Sequence
  source: /note="Description of Artificial Sequence: Synthetic oligonucleotide"
  source: /note="RNA"
  source: /note="5' tri-ethylene glycol (TEG)"
  modified_base (1)..(1): bicyclic nucleic acid (BNA)
  modified_base (2)..(2): bicyclic nucleic acid (BNA)
  modified_base (18)..(18): bicyclic nucleic acid (BNA)
  modified_base (19)..(19): bicyclic nucleic acid (BNA)
  source: /note="3' tri-ethylene glycol (TEG)"
ccaacaucaaggaagaugg

SEQ ID NO: 12598 - DNA, 18 bp, Artificial Sequence
  source: /note="Description of Artificial Sequence: Synthetic oligonucleotide"
  source: /note="Description of Combined DNA/RNA Molecule: Synthetic oligonucleotide"
  source: /note="DNA/RNA"
  source: /note="5' tri-ethylene glycol (TEG)"
  modified_base (1)..(1): bicyclic nucleic acid (BNA)
  modified_base (2)..(2): bicyclic nucleic acid (BNA)
  modified_base (17)..(17): bicyclic nucleic acid (BNA)
  modified_base (18)..(18): bicyclic nucleic acid (BNA)
  source: /note="3' tri-ethylene glycol (TEG)"
ccaacaucaaggaagatg

SEQ ID NO: 12599 - DNA, 17 bp, Artificial Sequence
  source: /note="Description of Artificial Sequence: Synthetic oligonucleotide"
  source: /note="Description of Combined DNA/RNA Molecule: Synthetic oligonucleotide"
  source: /note="DNA/RNA"
  source: /note="5' tri-ethylene glycol (TEG)"
  modified_base (1)..(1): bicyclic nucleic acid (BNA)
  modified_base (2)..(2): bicyclic nucleic acid (BNA)
  modified_base (16)..(16): bicyclic nucleic acid (BNA)
  modified_base (17)..(17): bicyclic nucleic acid (BNA)
  source: /note="3' tri-ethylene glycol (TEG)"
ccaacaucaaggaagat

SEQ ID NO: 12600 - RNA, 16 nt, Artificial Sequence
  source: /note="Description of Artificial Sequence: Synthetic oligonucleotide"
  source: /note="RNA"
  source: /note="5' tri-ethylene glycol (TEG)"
  modified_base (1)..(1): bicyclic nucleic acid (BNA)
  modified_base (2)..(2): bicyclic nucleic acid (BNA)
  modified_base (15)..(15): bicyclic nucleic acid (BNA)
  modified_base (16)..(16): bicyclic nucleic acid (BNA)
  source: /note="3' tri-ethylene glycol (TEG)"
ccaacaucaaggaaga

SEQ ID NO: 12601 - RNA, 15 nt, Artificial Sequence
  source: /note="Description of Artificial Sequence: Synthetic oligonucleotide"
  source: /note="RNA"
  source: /note="5' tri-ethylene glycol (TEG)"
  modified_base (1)..(1): bicyclic nucleic acid (BNA)
  modified_base (2)..(2): bicyclic nucleic acid (BNA)
  modified_base (14)..(14): bicyclic nucleic acid (BNA)
  modified_base (15)..(15): bicyclic nucleic acid (BNA)
  source: /note="3' tri-ethylene glycol (TEG)"
ccaacaucaaggaag

SEQ ID NO: 12602 - RNA, 27 nt, Artificial Sequence
  source: /note="Description of Artificial Sequence: Synthetic oligonucleotide"
  source: /note="RNA"
  source: /note="5' tri-ethylene glycol (TEG)"
  modified_base (1)..(1): bicyclic nucleic acid (BNA)
  modified_base (2)..(2): bicyclic nucleic acid (BNA)
  modified_base (26)..(26): bicyclic nucleic acid (BNA)
  modified_base (27)..(27): bicyclic nucleic acid (BNA)
  source: /note="3' tri-ethylene glycol (TEG)"
caacaucaaggaagauggcauuucuag

SEQ ID NO: 12603 - DNA, 26 bp, Artificial Sequence
  source: /note="Description of Artificial Sequence: Synthetic oligonucleotide"
  source: /note="Description of Combined DNA/RNA Molecule: Synthetic oligonucleotide"
  source: /note="DNA/RNA"
  source: /note="5' tri-ethylene glycol (TEG)"
  modified_base (1)..(1): bicyclic nucleic acid (BNA)
  modified_base (2)..(2): bicyclic nucleic acid (BNA)
  modified_base (25)..(25): bicyclic nucleic acid (BNA)
  modified_base (26)..(26): bicyclic nucleic acid (BNA)
  source: /note="3' tri-ethylene glycol (TEG)"
caacaucaaggaagauggcauuucta

SEQ ID NO: 12604 - DNA, 25 bp, Artificial Sequence
  source: /note="Description of Artificial Sequence: Synthetic oligonucleotide"
  source: /note="Description of Combined DNA/RNA Molecule: Synthetic oligonucleotide"
  source: /note="DNA/RNA"
  source: /note="5' tri-ethylene glycol (TEG)"
  modified_base (1)..(1): bicyclic nucleic acid (BNA)
  modified_base (2)..(2): bicyclic nucleic acid (BNA)
  modified_base (24)..(24): bicyclic nucleic acid (BNA)
  modified_base (25)..(25): bicyclic nucleic acid (BNA)
  source: /note="3' tri-ethylene glycol (TEG)"
caacaucaaggaagauggcauuuct

SEQ ID NO: 12605 - DNA, 24 bp, Artificial Sequence
  source: /note="Description of Artificial Sequence: Synthetic oligonucleotide"
  source: /note="Description of Combined DNA/RNA Molecule: Synthetic oligonucleotide"
  source: /note="DNA/RNA"
  source: /note="5' tri-ethylene glycol (TEG)"
  modified_base (1)..(1): bicyclic nucleic acid (BNA)
  modified_base (2)..(2): bicyclic nucleic acid (BNA)
  modified_base (23)..(23): bicyclic nucleic acid (BNA)
  modified_base (24)..(24): bicyclic nucleic acid (BNA)
  source: /note="3' tri-ethylene glycol (TEG)"
caacaucaaggaagauggcauutc

SEQ ID NO: 12606 - DNA, 23 bp, Artificial Sequence
  source: /note="Description of Artificial Sequence: Synthetic oligonucleotide"
  source: /note="Description of Combined DNA/RNA Molecule: Synthetic oligonucleotide"
  source: /note="DNA/RNA"
  source: /note="5' tri-ethylene glycol (TEG)"
  modified_base (1)..(1): bicyclic nucleic acid (BNA)
  modified_base (2)..(2): bicyclic nucleic acid (BNA)
  modified_base (22)..(22): bicyclic nucleic acid (BNA)
  modified_base (23)..(23): bicyclic nucleic acid (BNA)
  source: /note="3' tri-ethylene glycol (TEG)"
caacaucaaggaagauggcautt

SEQ ID NO: 12607 - DNA, 22 bp, Artificial Sequence
  source: /note="Description of Artificial Sequence: Synthetic oligonucleotide"
  source: /note="Description of Combined DNA/RNA Molecule: Synthetic oligonucleotide"
  source: /note="DNA/RNA"
  source: /note="5' tri-ethylene glycol (TEG)"
  modified_base (1)..(1): bicyclic nucleic acid (BNA)
  modified_base (2)..(2): bicyclic nucleic acid (BNA)
  modified_base (21)..(21): bicyclic nucleic acid (BNA)
  modified_base (22)..(22): bicyclic nucleic acid (BNA)
  source: /note="3' tri-ethylene glycol (TEG)"
caacaucaaggaagauggcatt

SEQ ID NO: 12608 - DNA, 21 bp, Artificial Sequence
  source: /note="Description of Artificial Sequence: Synthetic oligonucleotide"
  source: /note="Description of Combined DNA/RNA Molecule: Synthetic oligonucleotide"
  source: /note="DNA/RNA"
  source: /note="5' tri-ethylene glycol (TEG)"
  modified_base (1)..(1): bicyclic nucleic acid (BNA)
  modified_base (2)..(2): bicyclic nucleic acid (BNA)
  modified_base (20)..(20): bicyclic nucleic acid (BNA)
  modified_base (21)..(21): bicyclic nucleic acid (BNA)
  source: /note="3' tri-ethylene glycol (TEG)"
caacaucaaggaagauggcat

SEQ ID NO: 12609 - RNA, 20 nt, Artificial Sequence
  source: /note="Description of Artificial Sequence: Synthetic oligonucleotide"
  source: /note="RNA"
  source: /note="5' tri-ethylene glycol (TEG)"
  modified_base (1)..(1): bicyclic nucleic acid (BNA)
  modified_base (2)..(2): bicyclic nucleic acid (BNA)
  modified_base (19)..(19): bicyclic nucleic acid (BNA)
  modified_base (20)..(20): bicyclic nucleic acid (BNA)
  source: /note="3' tri-ethylene glycol (TEG)"
caacaucaaggaagauggca

SEQ ID NO: 12610 - RNA, 19 nt, Artificial Sequence
  source: /note="Description of Artificial Sequence: Synthetic oligonucleotide"
  source: /note="RNA"
  source: /note="5' tri-ethylene glycol (TEG)"
  modified_base (1)..(1): bicyclic nucleic acid (BNA)
  modified_base (2)..(2): bicyclic nucleic acid (BNA)
  modified_base (18)..(18): bicyclic nucleic acid (BNA)
  modified_base (19)..(19): bicyclic nucleic acid (BNA)
  source: /note="3' tri-ethylene glycol (TEG)"
caacaucaaggaagauggc

SEQ ID NO: 12611 - RNA, 18 nt, Artificial Sequence
  source: /note="Description of Artificial Sequence: Synthetic oligonucleotide"
  source: /note="RNA"
  source: /note="5' tri-ethylene glycol (TEG)"
  modified_base (1)..(1): bicyclic nucleic acid (BNA)
  modified_base (2)..(2): bicyclic nucleic acid (BNA)
  modified_base (17)..(17): bicyclic nucleic acid (BNA)
  modified_base (18)..(18): bicyclic nucleic acid (BNA)
  source: /note="3' tri-ethylene glycol (TEG)"
caacaucaaggaagaugg

SEQ ID NO: 12612 - DNA, 17 bp, Artificial Sequence
  source: /note="Description of Artificial Sequence: Synthetic oligonucleotide"
  source: /note="Description of Combined DNA/RNA Molecule: Synthetic oligonucleotide"
  source: /note="DNA/RNA"
  source: /note="5' tri-ethylene glycol (TEG)"
  modified_base (1)..(1): bicyclic nucleic acid (BNA)
  modified_base (2)..(2): bicyclic nucleic acid (BNA)
  modified_base (16)..(16): bicyclic nucleic acid (BNA)
  modified_base (17)..(17): bicyclic nucleic acid (BNA)
  source: /note="3' tri-ethylene glycol (TEG)"
caacaucaaggaagatg

SEQ ID NO: 12613 - DNA, 16 bp, Artificial Sequence
  source: /note="Description of Artificial Sequence: Synthetic oligonucleotide"
  source: /note="Description of Combined DNA/RNA Molecule: Synthetic oligonucleotide"
  source: /note="DNA/RNA"
  source: /note="5' tri-ethylene glycol (TEG)"
  modified_base (1)..(1): bicyclic nucleic acid (BNA)
  modified_base (2)..(2): bicyclic nucleic acid (BNA)
  modified_base (15)..(15): bicyclic nucleic acid (BNA)
  modified_base (16)..(16): bicyclic nucleic acid (BNA)
  source: /note="3' tri-ethylene glycol (TEG)"
caacaucaaggaagat

SEQ ID NO: 12614 - RNA, 15 nt, Artificial Sequence
  source: /note="Description of Artificial Sequence: Synthetic oligonucleotide"
  source: /note="RNA"
  source: /note="5' tri-ethylene glycol (TEG)"
  modified_base (1)..(1): bicyclic nucleic acid (BNA)
  modified_base (2)..(2): bicyclic nucleic acid (BNA)
  modified_base (14)..(14): bicyclic nucleic acid (BNA)
  modified_base (15)..(15): bicyclic nucleic acid (BNA)
  source: /note="3' tri-ethylene glycol (TEG)"
caacaucaaggaaga

SEQ ID NO: 12615 - RNA, 14 nt, Artificial Sequence
  source: /note="Description of Artificial Sequence: Synthetic oligonucleotide"
  source: /note="RNA"
  source: /note="5' tri-ethylene glycol (TEG)"
  modified_base (1)..(1): bicyclic nucleic acid (BNA)
  modified_base (2)..(2): bicyclic nucleic acid (BNA)
  modified_base (13)..(13): bicyclic nucleic acid (BNA)
  modified_base (14)..(14): bicyclic nucleic acid (BNA)
  source: /note="3' tri-ethylene glycol (TEG)"
caacaucaaggaag

SEQ ID NO: 12616 - RNA, 26 nt, Artificial Sequence
  source: /note="Description of Artificial Sequence: Synthetic oligonucleotide"
  source: /note="RNA"
  source: /note="5' tri-ethylene glycol (TEG)"
  modified_base (1)..(1): bicyclic nucleic acid (BNA)
  modified_base (2)..(2): bicyclic nucleic acid (BNA)
  modified_base (25)..(25): bicyclic nucleic acid (BNA)
  modified_base (26)..(26): bicyclic nucleic acid (BNA)
  source: /note="3' tri-ethylene glycol (TEG)"
aacaucaaggaagauggcauuucuag

SEQ ID NO: 12617 - DNA, 25 bp, Artificial Sequence
  source: /note="Description of Artificial Sequence: Synthetic oligonucleotide"
  source: /note="Description of Combined DNA/RNA Molecule: Synthetic oligonucleotide"
  source: /note="DNA/RNA"
  source: /note="5' tri-ethylene glycol (TEG)"
  modified_base (1)..(1): bicyclic nucleic acid (BNA)
  modified_base (2)..(2): bicyclic nucleic acid (BNA)
  modified_base (24)..(24): bicyclic nucleic acid (BNA)
  modified_base (25)..(25): bicyclic nucleic acid (BNA)
  source: /note="3' tri-ethylene glycol (TEG)"
aacaucaaggaagauggcauuucta

SEQ ID NO: 12618 - DNA, 24 bp, Artificial Sequence
  source: /note="Description of Artificial Sequence: Synthetic oligonucleotide"
  source: /note="Description of Combined DNA/RNA Molecule: Synthetic oligonucleotide"
  source: /note="DNA/RNA"
  source: /note="5' tri-ethylene glycol (TEG)"
  modified_base (1)..(1): bicyclic nucleic acid (BNA)
  modified_base (2)..(2): bicyclic nucleic acid (BNA)
  modified_base (23)..(23): bicyclic nucleic acid (BNA)
  modified_base (24)..(24): bicyclic nucleic acid (BNA)
  source: /note="3' tri-ethylene glycol (TEG)"
aacaucaaggaagauggcauuuct

SEQ ID NO: 12619 - DNA, 23 bp, Artificial Sequence
  source: /note="Description of Artificial Sequence: Synthetic oligonucleotide"
  source: /note="Description of Combined DNA/RNA Molecule: Synthetic oligonucleotide"
  source: /note="DNA/RNA"
  source: /note="5' tri-ethylene glycol (TEG)"
  modified_base (1)..(1): bicyclic nucleic acid (BNA)
  modified_base (2)..(2): bicyclic nucleic acid (BNA)
  modified_base (22)..(22): bicyclic nucleic acid (BNA)
  modified_base (23)..(23): bicyclic nucleic acid (BNA)
  source: /note="3' tri-ethylene glycol (TEG)"
aacaucaaggaagauggcauutc

SEQ ID NO: 12620 - DNA, 22 bp, Artificial Sequence
  source: /note="Description of Artificial Sequence: Synthetic oligonucleotide"
  source: /note="Description of Combined DNA/RNA Molecule: Synthetic oligonucleotide"
  source: /note="DNA/RNA"
  source: /note="5' tri-ethylene glycol (TEG)"
  modified_base (1)..(1): bicyclic nucleic acid (BNA)
  modified_base (2)..(2): bicyclic nucleic acid (BNA)
  modified_base (21)..(21): bicyclic nucleic acid (BNA)
  modified_base (22)..(22): bicyclic nucleic acid (BNA)
  source: /note="3' tri-ethylene glycol (TEG)"
aacaucaaggaagauggcautt

SEQ ID NO: 12621 - DNA, 21 bp, Artificial Sequence
  source: /note="Description of Artificial Sequence: Synthetic oligonucleotide"
  source: /note="Description of Combined DNA/RNA Molecule: Synthetic oligonucleotide"
  source: /note="DNA/RNA"
  source: /note="5' tri-ethylene glycol (TEG)"
  modified_base (1)..(1): bicyclic nucleic acid (BNA)
  modified_base (2)..(2): bicyclic nucleic acid (BNA)
  modified_base (20)..(20): bicyclic nucleic acid (BNA)
  modified_base (21)..(21): bicyclic nucleic acid (BNA)
  source: /note="3' tri-ethylene glycol (TEG)"
aacaucaaggaagauggcatt

SEQ ID NO: 12622 - DNA, 20 bp, Artificial Sequence
  source: /note="Description of Artificial Sequence: Synthetic oligonucleotide"
  source: /note="Description of Combined DNA/RNA Molecule: Synthetic oligonucleotide"
  source: /note="DNA/RNA"
  source: /note="5' tri-ethylene glycol (TEG)"
  modified_base (1)..(1): bicyclic nucleic acid (BNA)
  modified_base (2)..(2): bicyclic nucleic acid (BNA)
  modified_base (19)..(19): bicyclic nucleic acid (BNA)
  modified_base (20)..(20): bicyclic nucleic acid (BNA)
  source: /note="3' tri-ethylene glycol (TEG)"
aacaucaaggaagauggcat

SEQ ID NO: 12623 - RNA, 19 nt, Artificial Sequence
  source: /note="Description of Artificial Sequence: Synthetic oligonucleotide"
  source: /note="RNA"
  source: /note="5' tri-ethylene glycol (TEG)"
  modified_base (1)..(1): bicyclic nucleic acid (BNA)
  modified_base (2)..(2): bicyclic nucleic acid (BNA)
  modified_base (18)..(18): bicyclic nucleic acid (BNA)
  modified_base (19)..(19): bicyclic nucleic acid (BNA)
  source: /note="3' tri-ethylene glycol (TEG)"
aacaucaaggaagauggca

SEQ ID NO: 12624 - RNA, 18 nt, Artificial Sequence
  source: /note="Description of Artificial Sequence: Synthetic oligonucleotide"
  source: /note="RNA"
  source: /note="5' tri-ethylene glycol (TEG)"
  modified_base (1)..(1): bicyclic nucleic acid (BNA)
  modified_base (2)..(2): bicyclic nucleic acid (BNA)
  modified_base (17)..(17): bicyclic nucleic acid (BNA)
  modified_base (18)..(18): bicyclic nucleic acid (BNA)
  source: /note="3' tri-ethylene glycol (TEG)"
aacaucaaggaagauggc

SEQ ID NO: 12625 - RNA, 17 nt, Artificial Sequence
  source: /note="Description of Artificial Sequence: Synthetic oligonucleotide"
  source: /note="RNA"
  source: /note="5' tri-ethylene glycol (TEG)"
  modified_base (1)..(1): bicyclic nucleic acid (BNA)
  modified_base (2)..(2): bicyclic nucleic acid (BNA)
  modified_base (16)..(16): bicyclic nucleic acid (BNA)
  modified_base (17)..(17): bicyclic nucleic acid (BNA)
  source: /note="3' tri-ethylene glycol (TEG)"
aacaucaaggaagaugg

SEQ ID NO: 12626 - DNA, 16 bp, Artificial Sequence
  source: /note="Description of Artificial Sequence: Synthetic oligonucleotide"
  source: /note="Description of Combined DNA/RNA Molecule: Synthetic oligonucleotide"
  source: /note="DNA/RNA"
  source: /note="5' tri-ethylene glycol (TEG)"
  modified_base (1)..(1): bicyclic nucleic acid (BNA)
  modified_base (2)..(2): bicyclic nucleic acid (BNA)
  modified_base (15)..(15): bicyclic nucleic acid (BNA)
  modified_base (16)..(16): bicyclic nucleic acid (BNA)
  source: /note="3' tri-ethylene glycol (TEG)"
aacaucaaggaagatg

SEQ ID NO: 12627 - DNA, 15 bp, Artificial Sequence
  source: /note="Description of Artificial Sequence: Synthetic oligonucleotide"
  source: /note="Description of Combined DNA/RNA Molecule: Synthetic oligonucleotide"
  source: /note="DNA/RNA"
  source: /note="5' tri-ethylene glycol (TEG)"
  modified_base (1)..(1): bicyclic nucleic acid (BNA)
  modified_base (2)..(2): bicyclic nucleic acid (BNA)
  modified_base (14)..(14): bicyclic nucleic acid (BNA)
  modified_base (15)..(15): bicyclic nucleic acid (BNA)
  source: /note="3' tri-ethylene glycol (TEG)"
aacaucaaggaagat

SEQ ID NO: 12628 - RNA, 14 nt, Artificial Sequence
  source: /note="Description of Artificial Sequence: Synthetic oligonucleotide"
  source: /note="RNA"
  source: /note="5' tri-ethylene glycol (TEG)"
  modified_base (1)..(1): bicyclic nucleic acid (BNA)
  modified_base (2)..(2): bicyclic nucleic acid (BNA)
  modified_base (13)..(13): bicyclic nucleic acid (BNA)
  modified_base (14)..(14): bicyclic nucleic acid (BNA)
  source: /note="3' tri-ethylene glycol (TEG)"
aacaucaaggaaga

SEQ ID NO: 12629 - RNA, 13 nt, Artificial Sequence
  source: /note="Description of Artificial Sequence: Synthetic oligonucleotide"
  source: /note="RNA"
  source: /note="5' tri-ethylene glycol (TEG)"
  modified_base (1)..(1): bicyclic nucleic acid (BNA)
  modified_base (2)..(2): bicyclic nucleic acid (BNA)
  modified_base (12)..(12): bicyclic nucleic acid (BNA)
  modified_base (13)..(13): bicyclic nucleic acid (BNA)
  source: /note="3' tri-ethylene glycol (TEG)"
aacaucaaggaag

SEQ ID NO: 12630 - RNA, 25 nt, Artificial Sequence
  source: /note="Description of Artificial Sequence: Synthetic oligonucleotide"
  source: /note="RNA"
  source: /note="5' tri-ethylene glycol (TEG)"
  modified_base (1)..(1): bicyclic nucleic acid (BNA)
  modified_base (2)..(2): bicyclic nucleic acid (BNA)
  modified_base (24)..(24): bicyclic nucleic acid (BNA)
  modified_base (25)..(25): bicyclic nucleic acid (BNA)
  source: /note="3' tri-ethylene glycol (TEG)"
acaucaaggaagauggcauuucuag

SEQ ID NO: 12631 - DNA, 24 bp, Artificial Sequence
  source: /note="Description of Artificial Sequence: Synthetic oligonucleotide"
  source: /note="Description of Combined DNA/RNA Molecule: Synthetic oligonucleotide"
  source: /note="DNA/RNA"
  source: /note="5' tri-ethylene glycol (TEG)"
  modified_base (1)..(1): bicyclic nucleic acid (BNA)
  modified_base (2)..(2): bicyclic nucleic acid (BNA)
  modified_base (23)..(23): bicyclic nucleic acid (BNA)
  modified_base (24)..(24): bicyclic nucleic acid (BNA)
  source: /note="3' tri-ethylene glycol (TEG)"
acaucaaggaagauggcauuucta

SEQ ID NO: 12632 - DNA, 23 bp, Artificial Sequence
  source: /note="Description of Artificial Sequence: Synthetic oligonucleotide"
  source: /note="Description of Combined DNA/RNA Molecule: Synthetic oligonucleotide"
  source: /note="DNA/RNA"
  source: /note="5' tri-ethylene glycol (TEG)"
  modified_base (1)..(1): bicyclic nucleic acid (BNA)
  modified_base (2)..(2): bicyclic nucleic acid (BNA)
  modified_base (22)..(22): bicyclic nucleic acid (BNA)
  modified_base (23)..(23): bicyclic nucleic acid (BNA)
  source: /note="3' tri-ethylene glycol (TEG)"
acaucaaggaagauggcauuuct

SEQ ID NO: 12633 - DNA, 22 bp, Artificial Sequence
  source: /note="Description of Artificial Sequence: Synthetic oligonucleotide"
  source: /note="Description of Combined DNA/RNA Molecule: Synthetic oligonucleotide"
  source: /note="DNA/RNA"
  source: /note="5' tri-ethylene glycol (TEG)"
  modified_base (1)..(1): bicyclic nucleic acid (BNA)
  modified_base (2)..(2): bicyclic nucleic acid (BNA)
  modified_base (21)..(21): bicyclic nucleic acid (BNA)
  modified_base (22)..(22): bicyclic nucleic acid (BNA)
  source: /note="3' tri-ethylene glycol (TEG)"
acaucaaggaagauggcauutc

SEQ ID NO: 12634 - DNA, 21 bp, Artificial Sequence
  source: /note="Description of Artificial Sequence: Synthetic oligonucleotide"
  source: /note="Description of Combined DNA/RNA Molecule: Synthetic oligonucleotide"
  source: /note="DNA/RNA"
  source: /note="5' tri-ethylene glycol (TEG)"
  modified_base (1)..(1): bicyclic nucleic acid (BNA)
  modified_base (2)..(2): bicyclic nucleic acid (BNA)
  modified_base (20)..(20): bicyclic nucleic acid (BNA)
  modified_base (21)..(21): bicyclic nucleic acid (BNA)
  source: /note="3' tri-ethylene glycol (TEG)"
acaucaaggaagauggcautt

SEQ ID NO: 12635 - DNA, 20 bp, Artificial Sequence
  source: /note="Description of Artificial Sequence: Synthetic oligonucleotide"
  source: /note="Description of Combined DNA/RNA Molecule: Synthetic oligonucleotide"
  source: /note="DNA/RNA"
  source: /note="5' tri-ethylene glycol (TEG)"
  modified_base (1)..(1): bicyclic nucleic acid (BNA)
  modified_base (2)..(2): bicyclic nucleic acid (BNA)
  modified_base (19)..(19): bicyclic nucleic acid (BNA)
  modified_base (20)..(20): bicyclic nucleic acid (BNA)
  source: /note="3' tri-ethylene glycol (TEG)"
acaucaaggaagauggcatt

SEQ ID NO: 12636 - DNA, 19 bp, Artificial Sequence
  source: /note="Description of Artificial Sequence: Synthetic oligonucleotide"
  source: /note="Description of Combined DNA/RNA Molecule: Synthetic oligonucleotide"
  source: /note="DNA/RNA"
  source: /note="5' tri-ethylene glycol (TEG)"
  modified_base (1)..(1): bicyclic nucleic acid (BNA)
  modified_base (2)..(2): bicyclic nucleic acid (BNA)
  modified_base (18)..(18): bicyclic nucleic acid (BNA)
  modified_base (19)..(19): bicyclic nucleic acid (BNA)
  source: /note="3' tri-ethylene glycol (TEG)"
acaucaaggaagauggcat

SEQ ID NO: 12637 - RNA, 18 nt, Artificial Sequence
  source: /note="Description of Artificial Sequence: Synthetic oligonucleotide"
  source: /note="RNA"
  source: /note="5' tri-ethylene glycol (TEG)"
  modified_base (1)..(1): bicyclic nucleic acid (BNA)
  modified_base (2)..(2): bicyclic nucleic acid (BNA)
  modified_base (17)..(17): bicyclic nucleic acid (BNA)
  modified_base (18)..(18): bicyclic nucleic acid (BNA)
  source: /note="3' tri-ethylene glycol (TEG)"
acaucaaggaagauggca

SEQ ID NO: 12638 - RNA, 17 nt, Artificial Sequence
  source: /note="Description of Artificial Sequence: Synthetic oligonucleotide"
  source: /note="RNA"
  source: /note="5' tri-ethylene glycol (TEG)"
  modified_base (1)..(1): bicyclic nucleic acid (BNA)
  modified_base (2)..(2): bicyclic nucleic acid (BNA)
  modified_base (16)..(16): bicyclic nucleic acid (BNA)
  modified_base (17)..(17): bicyclic nucleic acid (BNA)
  source: /note="3' tri-ethylene glycol (TEG)"
acaucaaggaagauggc

SEQ ID NO: 12639 - RNA, 16 nt, Artificial Sequence
  source: /note="Description of Artificial Sequence: Synthetic oligonucleotide"
  source: /note="RNA"
  source: /note="5' tri-ethylene glycol (TEG)"
  modified_base (1)..(1): bicyclic nucleic acid (BNA)
  modified_base (2)..(2): bicyclic nucleic acid (BNA)
  modified_base (15)..(15): bicyclic nucleic acid (BNA)
  modified_base (16)..(16): bicyclic nucleic acid (BNA)
  source: /note="3' tri-ethylene glycol (TEG)"
acaucaaggaagaugg

SEQ ID NO: 12640 - DNA, 15 bp, Artificial Sequence
  source: /note="Description of Artificial Sequence: Synthetic oligonucleotide"
  source: /note="Description of Combined DNA/RNA Molecule: Synthetic oligonucleotide"
  source: /note="DNA/RNA"
  source: /note="5' tri-ethylene glycol (TEG)"
  modified_base (1)..(1): bicyclic nucleic acid (BNA)
  modified_base (2)..(2): bicyclic nucleic acid (BNA)
  modified_base (14)..(14): bicyclic nucleic acid (BNA)
  modified_base (15)..(15): bicyclic nucleic acid (BNA)
  source: /note="3' tri-ethylene glycol (TEG)"
acaucaaggaagatg

SEQ ID NO: 12641 - DNA, 14 bp, Artificial Sequence
  source: /note="Description of Artificial Sequence: Synthetic oligonucleotide"
  source: /note="Description of Combined DNA/RNA Molecule: Synthetic oligonucleotide"
  source: /note="DNA/RNA"
  source: /note="5' tri-ethylene glycol (TEG)"
  modified_base (1)..(1): bicyclic nucleic acid (BNA)
  modified_base (2)..(2): bicyclic nucleic acid (BNA)
  modified_base (13)..(13): bicyclic nucleic acid (BNA)
  modified_base (14)..(14): bicyclic nucleic acid (BNA)
  source: /note="3' tri-ethylene glycol (TEG)"
acaucaaggaagat

SEQ ID NO: 12642 - RNA, 13 nt, Artificial Sequence
  source: /note="Description of Artificial Sequence: Synthetic oligonucleotide"
  source: /note="RNA"
  source: /note="5' tri-ethylene glycol (TEG)"
  modified_base (1)..(1): bicyclic nucleic acid (BNA)
  modified_base (2)..(2): bicyclic nucleic acid (BNA)
  modified_base (12)..(12): bicyclic nucleic acid (BNA)
  modified_base (13)..(13): bicyclic nucleic acid (BNA)
  source: /note="3' tri-ethylene glycol (TEG)"
acaucaaggaaga

SEQ ID NO: 12643 - RNA, 12 nt, Artificial Sequence
  source: /note="Description of Artificial Sequence: Synthetic oligonucleotide"
  source: /note="RNA"
  source: /note="5' tri-ethylene glycol (TEG)"
  modified_base (1)..(1): bicyclic nucleic acid (BNA)
  modified_base (2)..(2): bicyclic nucleic acid (BNA)
  modified_base (11)..(11): bicyclic nucleic acid (BNA)
  modified_base (12)..(12): bicyclic nucleic acid (BNA)
  source: /note="3' tri-ethylene glycol (TEG)"
acaucaaggaag

SEQ ID NO: 12644 - RNA, 24 nt, Artificial Sequence
  source: /note="Description of Artificial Sequence: Synthetic oligonucleotide"
  source: /note="RNA"
  source: /note="5' tri-ethylene glycol (TEG)"
  modified_base (1)..(1): bicyclic nucleic acid (BNA)
  modified_base (2)..(2): bicyclic nucleic acid (BNA)
  modified_base (23)..(23): bicyclic nucleic acid (BNA)
  modified_base (24)..(24): bicyclic nucleic acid (BNA)
  source: /note="3' tri-ethylene glycol (TEG)"
caucaaggaagauggcauuucuag

SEQ ID NO: 12645 - DNA, 23 bp, Artificial Sequence
  source: /note="Description of Artificial Sequence: Synthetic oligonucleotide"
  source: /note="Description of Combined DNA/RNA Molecule: Synthetic oligonucleotide"
  source: /note="DNA/RNA"
  source: /note="5' tri-ethylene glycol (TEG)"
  modified_base (1)..(1): bicyclic nucleic acid (BNA)
  modified_base (2)..(2): bicyclic nucleic acid (BNA)
  modified_base (22)..(22): bicyclic nucleic acid (BNA)
  modified_base (23)..(23): bicyclic nucleic acid (BNA)
  source: /note="3' tri-ethylene glycol (TEG)"
caucaaggaagauggcauuucta

SEQ ID NO: 12646 - DNA, 22 bp, Artificial Sequence
  source: /note="Description of Artificial Sequence: Synthetic oligonucleotide"
  source: /note="Description of Combined DNA/RNA Molecule: Synthetic oligonucleotide"
  source: /note="DNA/RNA"
  source: /note="5' tri-ethylene glycol (TEG)"
  modified_base (1)..(1): bicyclic nucleic acid (BNA)
  modified_base (2)..(2): bicyclic nucleic acid (BNA)
  modified_base (21)..(21): bicyclic nucleic acid (BNA)
  modified_base (22)..(22): bicyclic nucleic acid (BNA)
  source: /note="3' tri-ethylene glycol (TEG)"
caucaaggaagauggcauuuct

SEQ ID NO: 12647 - DNA, 21 bp, Artificial Sequence
  source: /note="Description of Artificial Sequence: Synthetic oligonucleotide"
  source: /note="Description of Combined DNA/RNA Molecule: Synthetic oligonucleotide"
  source: /note="DNA/RNA"
  source: /note="5' tri-ethylene glycol (TEG)"
  modified_base (1)..(1): bicyclic nucleic acid (BNA)
  modified_base (2)..(2): bicyclic nucleic acid (BNA)
  modified_base (20)..(20): bicyclic nucleic acid (BNA)
  modified_base (21)..(21): bicyclic nucleic acid (BNA)
  source: /note="3' tri-ethylene glycol (TEG)"
caucaaggaagauggcauutc

SEQ ID NO: 12648 - DNA, 20 bp, Artificial Sequence
  source: /note="Description of Artificial Sequence: Synthetic oligonucleotide"
  source: /note="Description of Combined DNA/RNA Molecule: Synthetic oligonucleotide"
  source: /note="DNA/RNA"
  source: /note="5' tri-ethylene glycol (TEG)"
  modified_base (1)..(1): bicyclic nucleic acid (BNA)
  modified_base (2)..(2): bicyclic nucleic acid (BNA)
  modified_base (19)..(19): bicyclic nucleic acid (BNA)
  modified_base (20)..(20): bicyclic nucleic acid (BNA)
  source: /note="3' tri-ethylene glycol (TEG)"
caucaaggaagauggcautt

SEQ ID NO: 12649 - DNA, 19 bp, Artificial Sequence
  source: /note="Description of Artificial Sequence: Synthetic oligonucleotide"
  source: /note="Description of Combined DNA/RNA Molecule: Synthetic oligonucleotide"
  source: /note="DNA/RNA"
  source: /note="5' tri-ethylene glycol (TEG)"
  modified_base (1)..(1): bicyclic nucleic acid (BNA)
  modified_base (2)..(2): bicyclic nucleic acid (BNA)
  modified_base (18)..(18): bicyclic nucleic acid (BNA)
  modified_base (19)..(19): bicyclic nucleic acid (BNA)
  source: /note="3' tri-ethylene glycol (TEG)"
caucaaggaagauggcatt

SEQ ID NO: 12650 - DNA, 18 bp, Artificial Sequence
  source: /note="Description of Artificial Sequence: Synthetic oligonucleotide"
  source: /note="Description of Combined DNA/RNA Molecule: Synthetic oligonucleotide"
  source: /note="DNA/RNA"
  source: /note="5' tri-ethylene glycol (TEG)"
  modified_base (1)..(1): bicyclic nucleic acid (BNA)
  modified_base (2)..(2): bicyclic nucleic acid (BNA)
  modified_base (17)..(17): bicyclic nucleic acid (BNA)
  modified_base (18)..(18): bicyclic nucleic acid (BNA)
  source: /note="3' tri-ethylene glycol (TEG)"
caucaaggaagauggcat

SEQ ID NO: 12651 - RNA, 17 nt, Artificial Sequence
  source: /note="Description of Artificial Sequence: Synthetic oligonucleotide"
  source: /note="RNA"
  source: /note="5' tri-ethylene glycol (TEG)"
  modified_base (1)..(1): bicyclic nucleic acid (BNA)
  modified_base (2)..(2): bicyclic nucleic acid (BNA)
  modified_base (16)..(16): bicyclic nucleic acid (BNA)
  modified_base (17)..(17): bicyclic nucleic acid (BNA)
  source: /note="3' tri-ethylene glycol (TEG)"
caucaaggaagauggca

SEQ ID NO: 12652 - RNA, 16 nt, Artificial Sequence
  source: /note="Description of Artificial Sequence: Synthetic oligonucleotide"
  source: /note="RNA"
  source: /note="5' tri-ethylene glycol (TEG)"
  modified_base (1)..(1): bicyclic nucleic acid (BNA)
  modified_base (2)..(2): bicyclic nucleic acid (BNA)
  modified_base (15)..(15): bicyclic nucleic acid (BNA)
  modified_base (16)..(16): bicyclic nucleic acid (BNA)
  source: /note="3' tri-ethylene glycol (TEG)"
caucaaggaagauggc

SEQ ID NO: 12653 - RNA, 15 nt, Artificial Sequence
  source: /note="Description of Artificial Sequence: Synthetic oligonucleotide"
  source: /note="RNA"
  source: /note="5' tri-ethylene glycol (TEG)"
  modified_base (1)..(1): bicyclic nucleic acid (BNA)
  modified_base (2)..(2): bicyclic nucleic acid (BNA)
  modified_base (14)..(14): bicyclic nucleic acid (BNA)
  modified_base (15)..(15): bicyclic nucleic acid (BNA)
  source: /note="3' tri-ethylene glycol (TEG)"
caucaaggaagaugg

SEQ ID NO: 12654 - DNA, 14 bp, Artificial Sequence
  source: /note="Description of Artificial Sequence: Synthetic oligonucleotide"
  source: /note="Description of Combined DNA/RNA Molecule: Synthetic oligonucleotide"
  source: /note="DNA/RNA"
  source: /note="5' tri-ethylene glycol (TEG)"
  modified_base (1)..(1): bicyclic nucleic acid (BNA)
  modified_base (2)..(2): bicyclic nucleic acid (BNA)
  modified_base (13)..(13): bicyclic nucleic acid (BNA)
  modified_base (14)..(14): bicyclic nucleic acid (BNA)
  source: /note="3' tri-ethylene glycol (TEG)"
caucaaggaagatg

SEQ ID NO: 12655 - DNA, 13 bp, Artificial Sequence
  source: /note="Description of Artificial Sequence: Synthetic oligonucleotide"
  source: /note="Description of Combined DNA/RNA Molecule: Synthetic oligonucleotide"
  source: /note="DNA/RNA"
  source: /note="5' tri-ethylene glycol (TEG)"
  modified_base (1)..(1): bicyclic nucleic acid (BNA)
  modified_base (2)..(2): bicyclic nucleic acid (BNA)
  modified_base (12)..(12): bicyclic nucleic acid (BNA)
  modified_base (13)..(13): bicyclic nucleic acid (BNA)
  source: /note="3' tri-ethylene glycol (TEG)"
caucaaggaagat

SEQ ID NO: 12656 - RNA, 12 nt, Artificial Sequence
  source: /note="Description of Artificial Sequence: Synthetic oligonucleotide"
  source: /note="RNA"
  source: /note="5' tri-ethylene glycol (TEG)"
  modified_base (1)..(1): bicyclic nucleic acid (BNA)
  modified_base (2)..(2): bicyclic nucleic acid (BNA)
  modified_base (11)..(11): bicyclic nucleic acid (BNA)
  modified_base (12)..(12): bicyclic nucleic acid (BNA)
  source: /note="3' tri-ethylene glycol (TEG)"
caucaaggaaga

SEQ ID NO: 12657 - RNA, 11 nt, Artificial Sequence
  source: /note="Description of Artificial Sequence: Synthetic oligonucleotide"
  source: /note="RNA"
  source: /note="5' tri-ethylene glycol (TEG)"
  modified_base (1)..(1): bicyclic nucleic acid (BNA)
  modified_base (2)..(2): bicyclic nucleic acid (BNA)
  modified_base (10)..(10): bicyclic nucleic acid (BNA)
  modified_base (11)..(11): bicyclic nucleic acid (BNA)
  source: /note="3' tri-ethylene glycol (TEG)"
caucaaggaag

SEQ ID NO: 12658 - DNA, 23 bp, Artificial Sequence
  source: /note="Description of Artificial Sequence: Synthetic oligonucleotide"
  source: /note="Description of Combined DNA/RNA Molecule: Synthetic oligonucleotide"
  source: /note="DNA/RNA"
  source: /note="5' tri-ethylene glycol (TEG)"
  modified_base (1)..(1): bicyclic nucleic acid (BNA)
  modified_base (2)..(2): bicyclic nucleic acid (BNA)
  modified_base (22)..(22): bicyclic nucleic acid (BNA)
  modified_base (23)..(23): bicyclic nucleic acid (BNA)
  source: /note="3' tri-ethylene glycol (TEG)"
atcaaggaagauggcauuucuag

SEQ ID NO: 12659 - DNA, 22 bp, Artificial Sequence
  source: /note="Description of Artificial Sequence: Synthetic oligonucleotide"
  source: /note="Description of Combined DNA/RNA Molecule: Synthetic oligonucleotide"
  source: /note="DNA/RNA"
  source: /note="5' tri-ethylene glycol (TEG)"
  modified_base (1)..(1): bicyclic nucleic acid (BNA)
  modified_base (2)..(2): bicyclic nucleic acid (BNA)
  modified_base (21)..(21): bicyclic nucleic acid (BNA)
  modified_base (22)..(22): bicyclic nucleic acid (BNA)
  source: /note="3' tri-ethylene glycol (TEG)"
atcaaggaagauggcauuucta

SEQ ID NO: 12660 - DNA, 21 bp, Artificial Sequence
  source: /note="Description of Artificial Sequence: Synthetic oligonucleotide"
  source: /note="Description of Combined DNA/RNA Molecule: Synthetic oligonucleotide"
  source: /note="DNA/RNA"
  source: /note="5' tri-ethylene glycol (TEG)"
  modified_base (1)..(1): bicyclic nucleic acid (BNA)
  modified_base (2)..(2): bicyclic nucleic acid (BNA)
  modified_base (20)..(20): bicyclic nucleic acid (BNA)
  modified_base (21)..(21): bicyclic nucleic acid (BNA)
  source: /note="3' tri-ethylene glycol (TEG)"
atcaaggaagauggcauuuct

SEQ ID NO: 12661 - DNA, 20 bp, Artificial Sequence
  source: /note="Description of Artificial Sequence: Synthetic oligonucleotide"
  source: /note="Description of Combined DNA/RNA Molecule: Synthetic oligonucleotide"
  source: /note="DNA/RNA"
  source: /note="5' tri-ethylene glycol (TEG)"
  modified_base (1)..(1): bicyclic nucleic acid (BNA)
  modified_base (2)..(2): bicyclic nucleic acid (BNA)
  modified_base (19)..(19): bicyclic nucleic acid (BNA)
  modified_base (20)..(20): bicyclic nucleic acid (BNA)
  source: /note="3' tri-ethylene glycol (TEG)"
atcaaggaagauggcauutc

SEQ ID NO: 12662 - DNA, 19 bp, Artificial Sequence
  source: /note="Description of Artificial Sequence: Synthetic oligonucleotide"
  source: /note="Description of Combined DNA/RNA Molecule: Synthetic oligonucleotide"
  source: /note="DNA/RNA"
  source: /note="5' tri-ethylene glycol (TEG)"
  modified_base (1)..(1): bicyclic nucleic acid (BNA)
  modified_base (2)..(2): bicyclic nucleic acid (BNA)
  modified_base (18)..(18): bicyclic nucleic acid (BNA)
  modified_base (19)..(19): bicyclic nucleic acid (BNA)
  source: /note="3' tri-ethylene glycol (TEG)"
atcaaggaagauggcautt

SEQ ID NO: 12663 - DNA, 18 bp, Artificial Sequence
  source: /note="Description of Artificial Sequence: Synthetic oligonucleotide"
  source: /note="Description of Combined DNA/RNA Molecule: Synthetic oligonucleotide"
  source: /note="DNA/RNA"
  source: /note="5' tri-ethylene glycol (TEG)"
  modified_base (1)..(1): bicyclic nucleic acid (BNA)
  modified_base (2)..(2): bicyclic nucleic acid (BNA)
  modified_base (17)..(17): bicyclic nucleic acid (BNA)
  modified_base (18)..(18): bicyclic nucleic acid (BNA)
  source: /note="3' tri-ethylene glycol (TEG)"
atcaaggaagauggcatt

SEQ ID NO: 12664 - DNA, 17 bp, Artificial Sequence
  source: /note="Description of Artificial Sequence: Synthetic oligonucleotide"
  source: /note="Description of Combined DNA/RNA Molecule: Synthetic oligonucleotide"
  source: /note="DNA/RNA"
  source: /note="5' tri-ethylene glycol (TEG)"
  modified_base (1)..(1): bicyclic nucleic acid (BNA)
  modified_base (2)..(2): bicyclic nucleic acid (BNA)
  modified_base (16)..(16): bicyclic nucleic acid (BNA)
  modified_base (17)..(17): bicyclic nucleic acid (BNA)
  source: /note="3' tri-ethylene glycol (TEG)"
atcaaggaagauggcat

SEQ ID NO: 12665 - DNA, 16 bp, Artificial Sequence
  source: /note="Description of Artificial Sequence: Synthetic oligonucleotide"
  source: /note="Description of Combined DNA/RNA Molecule: Synthetic oligonucleotide"
  source: /note="DNA/RNA"
  source: /note="5' tri-ethylene glycol (TEG)"
  modified_base (1)..(1): bicyclic nucleic acid (BNA)
  modified_base (2)..(2): bicyclic nucleic acid (BNA)
  modified_base (15)..(15): bicyclic nucleic acid (BNA)
  modified_base (16)..(16): bicyclic nucleic acid (BNA)
  source: /note="3' tri-ethylene glycol (TEG)"
atcaaggaagauggca

SEQ ID NO: 12666 - DNA, 15 bp, Artificial Sequence
  source: /note="Description of Artificial Sequence: Synthetic oligonucleotide"
  source: /note="Description of Combined DNA/RNA Molecule: Synthetic oligonucleotide"
  source: /note="DNA/RNA"
  source: /note="5' tri-ethylene glycol (TEG)"
  modified_base (1)..(1): bicyclic nucleic acid (BNA)
  modified_base (2)..(2): bicyclic nucleic acid (BNA)
  modified_base (14)..(14): bicyclic nucleic acid (BNA)
  modified_base (15)..(15): bicyclic nucleic acid (BNA)
  source: /note="3' tri-ethylene glycol (TEG)"
atcaaggaagauggc

SEQ ID NO: 12667 - DNA, 14 bp, Artificial Sequence
  source: /note="Description of Artificial Sequence: Synthetic oligonucleotide"
  source: /note="Description of Combined DNA/RNA Molecule: Synthetic oligonucleotide"
  source: /note="DNA/RNA"
  source: /note="5' tri-ethylene glycol (TEG)"
  modified_base (1)..(1): bicyclic nucleic acid (BNA)
  modified_base (2)..(2): bicyclic nucleic acid (BNA)
  modified_base (13)..(13): bicyclic nucleic acid (BNA)
  modified_base (14)..(14): bicyclic nucleic acid (BNA)
  source: /note="3' tri-ethylene glycol (TEG)"
atcaaggaagaugg

SEQ ID NO: 12668 - DNA, 13 bp, Artificial Sequence
  source: /note="Description of Artificial Sequence: Synthetic oligonucleotide"
  source: /note="DNA/RNA"
  source: /note="5' tri-ethylene glycol (TEG)"
  modified_base (1)..(1): bicyclic nucleic acid (BNA)
  modified_base (2)..(2): bicyclic nucleic acid (BNA)
  modified_base (12)..(12): bicyclic nucleic acid (BNA)
  modified_base (13)..(13): bicyclic nucleic acid (BNA)
  source: /note="3' tri-ethylene glycol (TEG)"
atcaaggaagatg

SEQ ID NO: 12669 - DNA, 12 bp, Artificial Sequence
  source: /note="Description of Artificial Sequence: Synthetic oligonucleotide"
  source: /note="DNA/RNA"
  source: /note="5' tri-ethylene glycol (TEG)"
  modified_base (1)..(1): bicyclic nucleic acid (BNA)
  modified_base (2)..(2): bicyclic nucleic acid (BNA)
  modified_base (11)..(11): bicyclic nucleic acid (BNA)
  modified_base (12)..(12): bicyclic nucleic acid (BNA)
  source: /note="3' tri-ethylene glycol (TEG)"
atcaaggaagat

SEQ ID NO: 12670 - DNA, 11 bp, Artificial Sequence
  source: /note="Description of Artificial Sequence: Synthetic oligonucleotide"
  source: /note="DNA/RNA"
  source: /note="5' tri-ethylene glycol (TEG)"
  modified_base (1)..(1): bicyclic nucleic acid (BNA)
  modified_base (2)..(2): bicyclic nucleic acid (BNA)
  modified_base (10)..(10): bicyclic nucleic acid (BNA)
  modified_base (11)..(11): bicyclic nucleic acid (BNA)
  source: /note="3' tri-ethylene glycol (TEG)"
atcaaggaaga

SEQ ID NO: 12671 - DNA, 10 bp, Artificial Sequence
  source: /note="Description of Artificial Sequence: Synthetic oligonucleotide"
  source: /note="DNA/RNA"
  source: /note="5' tri-ethylene glycol (TEG)"
  modified_base (1)..(1): bicyclic nucleic acid (BNA)
  modified_base (2)..(2): bicyclic nucleic acid (BNA)
  modified_base (9)..(9): bicyclic nucleic acid (BNA)
  modified_base (10)..(10): bicyclic nucleic acid (BNA)
  source: /note="3' tri-ethylene glycol (TEG)"
atcaaggaag

SEQ ID NO: 12672 - DNA, 23 bp, Artificial Sequence
  source: /note="Description of Artificial Sequence: Synthetic oligonucleotide"
  source: /note="Description of Combined DNA/RNA Molecule: Synthetic oligonucleotide"
  source: /note="DNA/RNA"
  source: /note="5' tri-ethylene glycol (TEG)"
  modified_base (1)..(1): bicyclic nucleic acid (BNA)
  modified_base (2)..(2): bicyclic nucleic acid (BNA)
  modified_base (22)..(22): bicyclic nucleic acid (BNA)
  modified_base (23)..(23): bicyclic nucleic acid (BNA)
  source: /note="3' tri-ethylene glycol (TEG)"
ccagagcagguaccuccaacatc

SEQ ID NO: 12673 - RNA, 18 nt, Artificial Sequence
  source: /note="Description of Artificial Sequence: Synthetic oligonucleotide"
  source: /note="RNA"
  source: /note="5' tri-ethylene glycol (TEG)"
  modified_base (1)..(1): bicyclic nucleic acid (BNA)
  modified_base (2)..(2): bicyclic nucleic acid (BNA)
  modified_base (17)..(17): bicyclic nucleic acid (BNA)
  modified_base (18)..(18): bicyclic nucleic acid (BNA)
  source: /note="3' tri-ethylene glycol (TEG)"
ccagagcagguaccucca

SEQ ID NO: 12674 - DNA, 23 bp, Artificial Sequence
  source: /note="Description of Artificial Sequence: Synthetic oligonucleotide"
  source: /note="Description of Combined DNA/RNA Molecule: Synthetic oligonucleotide"
  source: /note="DNA/RNA"
  source: /note="5' tri-ethylene glycol (TEG)"
  modified_base (1)..(1): bicyclic nucleic acid (BNA)
  modified_base (2)..(2): bicyclic nucleic acid (BNA)
  modified_base (22)..(22): bicyclic nucleic acid (BNA)
  modified_base (23)..(23): bicyclic nucleic acid (BNA)
  source: /note="3' tri-ethylene glycol (TEG)"
ccucugugauuuuauaacuugat

SEQ ID NO: 12675 - DNA, 17 bp, Artificial Sequence
  source: /note="Description of Artificial Sequence: Synthetic oligonucleotide"
  source: /note="Description of Combined DNA/RNA Molecule: Synthetic oligonucleotide"
  source: /note="DNA/RNA"
  source: /note="5' tri-ethylene glycol (TEG)"
  modified_base (1)..(1): bicyclic nucleic acid (BNA)
  modified_base (2)..(2): bicyclic nucleic acid (BNA)
  modified_base (16)..(16): bicyclic nucleic acid (BNA)
  modified_base (17)..(17): bicyclic nucleic acid (BNA)
  source: /note="3' tri-ethylene glycol (TEG)"
tcacccaccaucaccct

SEQ ID NO: 12676 - DNA, 20 bp, Artificial Sequence
  source: /note="Description of Artificial Sequence: Synthetic oligonucleotide"
  source: /note="Description of Combined DNA/RNA Molecule: Synthetic oligonucleotide"
  source: /note="DNA/RNA"
  source: /note="5' tri-ethylene glycol (TEG)"
  modified_base (1)..(1): bicyclic nucleic acid (BNA)
  modified_base (2)..(2): bicyclic nucleic acid (BNA)
  modified_base (19)..(19): bicyclic nucleic acid (BNA)
  modified_base (20)..(20): bicyclic nucleic acid (BNA)
  source: /note="3' tri-ethylene glycol (TEG)"
tgauauccucaaggucaccc

SEQ ID NO: 12677 - DNA, 22 bp, Artificial Sequence
  source: /note="Description of Artificial Sequence: Synthetic oligonucleotide"
  source: /note="Description of Combined DNA/RNA Molecule: Synthetic oligonucleotide"
  source: /note="DNA/RNA"
  source: /note="5' tri-ethylene glycol (TEG)"
  modified_base (1)..(1): bicyclic nucleic acid (BNA)
  modified_base (2)..(2): bicyclic nucleic acid (BNA)
  modified_base (21)..(21): bicyclic nucleic acid (BNA)
  modified_base (22)..(22): bicyclic nucleic acid (BNA)
  source: /note="3' tri-ethylene glycol (TEG)"
ctgcuugaugaucaucucgutg

SEQ ID NO: 12678 - DNA, 18 bp, Artificial Sequence
  source: /note="Description of Artificial Sequence: Synthetic oligonucleotide"
  source: /note="Description of Combined DNA/RNA Molecule: Synthetic oligonucleotide"
  source: /note="DNA/RNA"
  source: /note="5' tri-ethylene glycol (TEG)"
  modified_base (1)..(1): bicyclic nucleic acid (BNA)
  modified_base (2)..(2): bicyclic nucleic acid (BNA)
  modified_base (17)..(17): bicyclic nucleic acid (BNA)
  modified_base (18)..(18): bicyclic nucleic acid (BNA)
  source: /note="3' tri-ethylene glycol (TEG)"
ctgcuugaugaucauctc

SEQ ID NO: 12679 - DNA, 19 bp, Artificial Sequence
  source: /note="Description of Artificial Sequence: Synthetic oligonucleotide"
  source: /note="Description of Combined DNA/RNA Molecule: Synthetic oligonucleotide"
  source: /note="DNA/RNA"
  source: /note="5' tri-ethylene glycol (TEG)"
  modified_base (1)..(1): bicyclic nucleic acid (BNA)
  modified_base (2)..(2): bicyclic nucleic acid (BNA)
  modified_base (18)..(18): bicyclic nucleic acid (BNA)
  modified_base (19)..(19): bicyclic nucleic acid (BNA)
  source: /note="3' tri-ethylene glycol (TEG)"
gtuuccuuaguaaccacag

SEQ ID NO: 12680 - DNA, 17 bp, Artificial Sequence
  source: /note="Description of Artificial Sequence: Synthetic oligonucleotide"
  source: /note="Description of Combined DNA/RNA Molecule: Synthetic oligonucleotide"
  source: /note="DNA/RNA"
  source: /note="5' tri-ethylene glycol (TEG)"
  modified_base (1)..(1): bicyclic nucleic acid (BNA)
  modified_base (2)..(2): bicyclic nucleic acid (BNA)
  modified_base (16)..(16): bicyclic nucleic acid (BNA)
  modified_base (17)..(17): bicyclic nucleic acid (BNA)
  source: /note="3' tri-ethylene glycol (TEG)"
gtuuccuuaguaaccac

SEQ ID NO: 12681 - DNA, 20 bp, Artificial Sequence
  source: /note="Description of Artificial Sequence: Synthetic oligonucleotide"
  source: /note="Description of Combined DNA/RNA Molecule: Synthetic oligonucleotide"
  source: /note="DNA/RNA"
  modified_base (1)..(1): bicyclic nucleic acid (BNA)
  modified_base (2)..(2): 5-methyl modified nucleotide
  modified_base (14)..(14): 5-methyl modified nucleotide
  modified_base (19)..(19): 5-methyl modified nucleotide
tcaaggaagauggcauuucu

SEQ ID NO: 12682 - DNA, 22 bp, Artificial Sequence
  source: /note="Description of Artificial Sequence: Synthetic oligonucleotide"
  source: /note="Description of Combined DNA/RNA Molecule: Synthetic oligonucleotide"
  source: /note="DNA/RNA"
  modified_base (1)..(1): bicyclic nucleic acid (BNA)
  modified_base (2)..(2): 5-methyl modified nucleotide
  modified_base (14)..(14): 5-methyl modified nucleotide
  modified_base (19)..(19): 5-methyl modified nucleotide
tcaaggaagauggcauuucuag

SEQ ID NO: 12683 - RNA, 18 nt, Artificial Sequence
  source: /note="Description of Artificial Sequence: Synthetic oligonucleotide"
  source: /note="RNA"
  modified_base (1)..(1): bicyclic nucleic acid (BNA)
  modified_base (9)..(9): 5-methyl modified nucleotide
  modified_base (13)..(13): 5-methyl modified nucleotide
  modified_base (14)..(14): 5-methyl modified nucleotide
  modified_base (18)..(18): 5-methyl modified nucleotide
gguaaguucuguccaagc

SEQ ID NO: 12684 - RNA, 18 nt, Artificial Sequence
  source: /note="Description of Artificial Sequence: Synthetic oligonucleotide"
  source: /note="RNA"
  modified_base (1)..(1): bicyclic nucleic acid (BNA)
  modified_base (8)..(8): 5-methyl modified nucleotide
  modified_base (12)..(12): 5-methyl modified nucleotide
  modified_base (13)..(13): 5-methyl modified nucleotide
  modified_base (17)..(17): 5-methyl modified nucleotide
  modified_base (18)..(18): 5-methyl modified nucleotide
guaaguucuguccaagcc

SEQ ID NO: 12685 - RNA, 18 nt, Artificial Sequence
  source: /note="Description of Artificial Sequence: Synthetic oligonucleotide"
  source: /note="RNA"
  modified_base (1)..(1): bicyclic nucleic acid (BNA)
  modified_base (4)..(4): 5-methyl modified nucleotide
  modified_base (13)..(13): 5-methyl modified nucleotide
  modified_base (17)..(17): 5-methyl modified nucleotide
  modified_base (18)..(18): 5-methyl modified nucleotide
agucgguaaguucugucc

SEQ ID NO: 12686 - RNA, 18 nt, Artificial Sequence
  source: /note="Description of Artificial Sequence: Synthetic oligonucleotide"
  source: /note="RNA"
  modified_base (1)..(1): 5-methyl bicyclic nucleic acid
  modified_base (5)..(5): 5-methyl modified nucleotide
  modified_base (6)..(6): 5-methyl modified nucleotide
  modified_base (10)..(10): 5-methyl modified nucleotide
  modified_base (11)..(11): 5-methyl modified nucleotide
  modified_base (12)..(12): 5-methyl modified nucleotide
cuguccaagcccgguuga

SEQ ID NO: 12687 - DNA, 15 bp, Artificial Sequence
  source: /note="Description of Artificial Sequence: Synthetic oligonucleotide"
  source: /note="Description of Combined DNA/RNA Molecule: Synthetic oligonucleotide"
  source: /note="DNA/RNA"
  modified_base (1)..(1): bicyclic nucleic acid (BNA)
  modified_base (7)..(7): 5-methyl modified nucleotide
  modified_base (11)..(11): 5-methyl modified nucleotide
  modified_base (12)..(12): 5-methyl modified nucleotide
taaguucuguccaag

SEQ ID NO: 12688 - DNA, 20 bp, Artificial Sequence
  source: /note="Description of Artificial Sequence: Synthetic oligonucleotide"
  source: /note="Description of Combined DNA/RNA Molecule: Synthetic oligonucleotide"
  source: /note="DNA/RNA"
  modified_base (1)..(1): bicyclic nucleic acid (BNA)
  modified_base (3)..(3): 5-methyl modified nucleotide
  modified_base (7)..(7): 5-methyl modified nucleotide
  modified_base (8)..(8): 5-methyl modified nucleotide
  modified_base (12)..(12): 5-methyl modified nucleotide
  modified_base (13)..(13): 5-methyl modified nucleotide
  modified_base (14)..(14): 5-methyl modified nucleotide
tucuguccaagcccgguuga

SEQ ID NO: 12689 - DNA, 19 bp, Artificial Sequence
  source: /note="Description of Artificial Sequence: Synthetic oligonucleotide"
  source: /note="Description of Combined DNA/RNA Molecule: Synthetic oligonucleotide"
  source: /note="DNA/RNA"
  modified_base (1)..(1): bicyclic nucleic acid (BNA)
  modified_base (3)..(3): 5-methyl modified nucleotide
  modified_base (7)..(7): 5-methyl modified nucleotide
  modified_base (8)..(8): 5-methyl modified nucleotide
  modified_base (12)..(12): 5-methyl modified nucleotide
  modified_base (13)..(13): 5-methyl modified nucleotide
  modified_base (14)..(14): 5-methyl modified nucleotide
tucuguccaagcccgguug

SEQ ID NO: 12690 - DNA, 18 bp, Artificial Sequence
  source: /note="Description of Artificial Sequence: Synthetic oligonucleotide"
  source: /note="Description of Combined DNA/RNA Molecule: Synthetic oligonucleotide"
  source: /note="DNA/RNA"
  modified_base (1)..(1): bicyclic nucleic acid (BNA)
  modified_base (3)..(3): 5-methyl modified nucleotide
  modified_base (7)..(7): 5-methyl modified nucleotide
  modified_base (8)..(8): 5-methyl modified nucleotide
  modified_base (12)..(12): 5-methyl modified nucleotide
  modified_base (13)..(13): 5-methyl modified nucleotide
  modified_base (14)..(14): 5-methyl modified nucleotide
tucuguccaagcccgguu

SEQ ID NO: 12691 - DNA, 17 bp, Artificial Sequence
  source: /note="Description of Artificial Sequence: Synthetic oligonucleotide"
  source: /note="Description of Combined DNA/RNA Molecule: Synthetic oligonucleotide"
  source: /note="DNA/RNA"
  modified_base (1)..(1): bicyclic nucleic acid (BNA)
  modified_base (3)..(3): 5-methyl modified nucleotide
  modified_base (7)..(7): 5-methyl modified nucleotide
  modified_base (8)..(8): 5-methyl modified nucleotide
  modified_base (12)..(12): 5-methyl modified nucleotide
  modified_base (13)..(13): 5-methyl modified nucleotide
  modified_base (14)..(14): 5-methyl modified nucleotide
tucuguccaagcccggu

SEQ ID NO: 12692 - DNA, 16 bp, Artificial Sequence
  source: /note="Description of Artificial Sequence: Synthetic oligonucleotide"
  source: /note="Description of Combined DNA/RNA Molecule: Synthetic oligonucleotide"
  source: /note="DNA/RNA"
  modified_base (1)..(1): bicyclic nucleic acid (BNA)
  modified_base (3)..(3): 5-methyl modified nucleotide
  modified_base (7)..(7): 5-methyl modified nucleotide
  modified_base (8)..(8): 5-methyl modified nucleotide
  modified_base (12)..(12): 5-methyl modified nucleotide
  modified_base (13)..(13): 5-methyl modified nucleotide
  modified_base (14)..(14): 5-methyl modified nucleotide
tucuguccaagcccgg

SEQ ID NO: 12693 - DNA, 15 bp, Artificial Sequence
  source: /note="Description of Artificial Sequence: Synthetic oligonucleotide"
  source: /note="Description of Combined DNA/RNA Molecule: Synthetic oligonucleotide"
  source: /note="DNA/RNA"
  modified_base (1)..(1): bicyclic nucleic acid (BNA)
  modified_base (3)..(3): 5-methyl modified nucleotide
  modified_base (7)..(7): 5-methyl modified nucleotide
  modified_base (8)..(8): 5-methyl modified nucleotide
  modified_base (12)..(12): 5-methyl modified nucleotide
  modified_base (13)..(13): 5-methyl modified nucleotide
  modified_base (14)..(14): 5-methyl modified nucleotide
tucuguccaagcccg

SEQ ID NO: 12694 - DNA, 14 bp, Artificial Sequence
  source: /note="Description of Artificial Sequence: Synthetic oligonucleotide"
  source: /note="Description of Combined DNA/RNA Molecule: Synthetic oligonucleotide"
  source: /note="DNA/RNA"
  modified_base (1)..(1): bicyclic nucleic acid (BNA)
  modified_base (3)..(3): 5-methyl modified nucleotide
  modified_base (7)..(7): 5-methyl modified nucleotide
  modified_base (8)..(8): 5-methyl modified nucleotide
  modified_base (12)..(12): 5-methyl modified nucleotide
  modified_base (13)..(13): 5-methyl modified nucleotide
  modified_base (14)..(14): 5-methyl modified nucleotide
tucuguccaagccc

SEQ ID NO: 12695 - DNA, 13 bp, Artificial Sequence
  source: /note="Description of Artificial Sequence: Synthetic oligonucleotide"
  source: /note="Description of Combined DNA/RNA Molecule: Synthetic oligonucleotide"
  source: /note="DNA/RNA"
  modified_base (1)..(1): bicyclic nucleic acid (BNA)
  modified_base (3)..(3): 5-methyl modified nucleotide
  modified_base (7)..(7): 5-methyl modified nucleotide
  modified_base (8)..(8): 5-methyl modified nucleotide
  modified_base (12)..(12): 5-methyl modified nucleotide
  modified_base (13)..(13): 5-methyl modified nucleotide
tucuguccaagcc

SEQ ID NO: 12696 - DNA, 12 bp, Artificial Sequence
  source: /note="Description of Artificial Sequence: Synthetic oligonucleotide"
  source: /note="Description of Combined DNA/RNA Molecule: Synthetic oligonucleotide"
  source: /note="DNA/RNA"
  modified_base (1)..(1): bicyclic nucleic acid (BNA)
  modified_base (3)..(3): 5-methyl modified nucleotide
  modified_base (7)..(7): 5-methyl modified nucleotide
  modified_base (8)..(8): 5-methyl modified nucleotide
  modified_base (12)..(12): 5-methyl modified nucleotide
tucuguccaagc

SEQ ID NO: 12697 - DNA, 11 bp, Artificial Sequence
  source: /note="Description of Artificial Sequence: Synthetic oligonucleotide"
  source: /note="Description of Combined DNA/RNA Molecule: Synthetic oligonucleotide"
  source: /note="DNA/RNA"
  modified_base (1)..(1): bicyclic nucleic acid (BNA)
  modified_base (3)..(3): 5-methyl modified nucleotide
  modified_base (7)..(7): 5-methyl modified nucleotide
  modified_base (8)..(8): 5-methyl modified nucleotide
tucuguccaag

SEQ ID NO: 12698 - DNA, 10 bp, Artificial Sequence
  source: /note="Description of Artificial Sequence: Synthetic oligonucleotide"
  source: /note="Description of Combined DNA/RNA Molecule: Synthetic oligonucleotide"
  source: /note="DNA/RNA"
  modified_base (1)..(1): bicyclic nucleic acid (BNA)
  modified_base (3)..(3): 5-methyl modified nucleotide
  modified_base (7)..(7): 5-methyl modified nucleotide
  modified_base (8)..(8): 5-methyl modified nucleotide
tucuguccaa

SEQ ID NO: 12699 - DNA, 9 bp, Artificial Sequence
  source: /note="Description of Artificial Sequence: Synthetic oligonucleotide"
  source: /note="Description of Combined DNA/RNA Molecule: Synthetic oligonucleotide"
  source: /note="DNA/RNA"
  modified_base (1)..(1): bicyclic nucleic acid (BNA)
  modified_base (3)..(3): 5-methyl modified nucleotide
  modified_base (7)..(7): 5-methyl modified nucleotide
  modified_base (8)..(8): 5-methyl modified nucleotide
tucugucca

SEQ ID NO: 12700 - DNA, 8 bp, Artificial Sequence
  source: /note="Description of Artificial Sequence: Synthetic oligonucleotide"
  source: /note="Description of Combined DNA/RNA Molecule: Synthetic oligonucleotide"
  source: /note="DNA/RNA"
  modified_base (1)..(1): bicyclic nucleic acid (BNA)
  modified_base (3)..(3): 5-methyl modified nucleotide
  modified_base (7)..(7): 5-methyl modified nucleotide
  modified_base (8)..(8): 5-methyl modified nucleotide
tucugucc

SEQ ID NO: 12701 - DNA, 19 bp, Artificial Sequence
  source: /note="Description of Artificial Sequence: Synthetic oligonucleotide"
  source: /note="Description of Combined DNA/RNA Molecule: Synthetic oligonucleotide"
  source: /note="DNA/RNA"
  modified_base (1)..(1): bicyclic nucleic acid (BNA)
  modified_base (2)..(2): 5-methyl modified nucleotide
  modified_base (6)..(6): 5-methyl modified nucleotide
  modified_base (7)..(7): 5-methyl modified nucleotide
  modified_base (11)..(11): 5-methyl modified nucleotide
  modified_base (12)..(12): 5-methyl modified nucleotide
  modified_base (13)..(13): 5-methyl modified nucleotide
tcuguccaagcccgguuga

SEQ ID NO: 12702 - DNA, 18 bp, Artificial Sequence
  source: /note="Description of Artificial Sequence: Synthetic oligonucleotide"
  source: /note="Description of Combined DNA/RNA Molecule: Synthetic oligonucleotide"
  source: /note="DNA/RNA"
  modified_base (1)..(1): bicyclic nucleic acid (BNA)
  modified_base (2)..(2): 5-methyl modified nucleotide
  modified_base (6)..(6): 5-methyl modified nucleotide
  modified_base (7)..(7): 5-methyl modified nucleotide
  modified_base (11)..(11): 5-methyl modified nucleotide
  modified_base (12)..(12): 5-methyl modified nucleotide
  modified_base (13)..(13): 5-methyl modified nucleotide
tcuguccaagcccgguug

SEQ ID NO: 12703 - DNA, 17 bp, Artificial Sequence
  source: /note="Description of Artificial Sequence: Synthetic oligonucleotide"
  source: /note="Description of Combined DNA/RNA Molecule: Synthetic oligonucleotide"
  source: /note="DNA/RNA"
  modified_base (1)..(1): bicyclic nucleic acid (BNA)
  modified_base (2)..(2): 5-methyl modified nucleotide
  modified_base (6)..(6): 5-methyl modified nucleotide
  modified_base (7)..(7): 5-methyl modified nucleotide
  modified_base (11)..(11): 5-methyl modified nucleotide
  modified_base (12)..(12): 5-methyl modified nucleotide
  modified_base (13)..(13): 5-methyl modified nucleotide
tcuguccaagcccgguu

SEQ ID NO: 12704 - DNA, 16 bp, Artificial Sequence
  source: /note="Description of Artificial Sequence: Synthetic oligonucleotide"
  source: /note="Description of Combined DNA/RNA Molecule: Synthetic oligonucleotide"
  source: /note="DNA/RNA"
  modified_base (1)..(1): bicyclic nucleic acid (BNA)
  modified_base (2)..(2): 5-methyl modified nucleotide
  modified_base (6)..(6): 5-methyl modified nucleotide
  modified_base (7)..(7): 5-methyl modified nucleotide
  modified_base (11)..(11): 5-methyl modified nucleotide
  modified_base (12)..(12): 5-methyl modified nucleotide
  modified_base (13)..(13): 5-methyl modified nucleotide
tcuguccaagcccggu

SEQ ID NO: 12705 - DNA, 15 bp, Artificial Sequence
  source: /note="Description of Artificial Sequence: Synthetic oligonucleotide"
  source: /note="Description of Combined DNA/RNA Molecule: Synthetic oligonucleotide"
  source: /note="DNA/RNA"
  modified_base (1)..(1): bicyclic nucleic acid (BNA)
  modified_base (2)..(2): 5-methyl modified nucleotide
  modified_base (6)..(6): 5-methyl modified nucleotide
  modified_base (7)..(7): 5-methyl modified nucleotide
  modified_base (11)..(11): 5-methyl modified nucleotide
  modified_base (12)..(12): 5-methyl modified nucleotide
  modified_base (13)..(13): 5-methyl modified nucleotide
tcuguccaagcccgg

SEQ ID NO: 12706 - DNA, 14 bp, Artificial Sequence
  source: /note="Description of Artificial Sequence: Synthetic oligonucleotide"
  source: /note="Description of Combined DNA/RNA Molecule: Synthetic oligonucleotide"
  source: /note="DNA/RNA"
  modified_base (1)..(1): bicyclic nucleic acid (BNA)
  modified_base (2)..(2): 5-methyl modified nucleotide
  modified_base (6)..(6): 5-methyl modified nucleotide
  modified_base (7)..(7): 5-methyl modified nucleotide
  modified_base (11)..(11): 5-methyl modified nucleotide
  modified_base (12)..(12): 5-methyl modified nucleotide
  modified_base (13)..(13): 5-methyl modified nucleotide
tcuguccaagcccg

SEQ ID NO: 12707 - DNA, 13 bp, Artificial Sequence
  source: /note="Description of Artificial Sequence: Synthetic oligonucleotide"
  source: /note="Description of Combined DNA/RNA Molecule: Synthetic oligonucleotide"
  source: /note="DNA/RNA"
  modified_base (1)..(1): bicyclic nucleic acid (BNA)
  modified_base (2)..(2): 5-methyl modified nucleotide
  modified_base (6)..(6): 5-methyl modified nucleotide
  modified_base (7)..(7): 5-methyl modified nucleotide
  modified_base (11)..(11): 5-methyl modified nucleotide
  modified_base (12)..(12): 5-methyl modified nucleotide
  modified_base (13)..(13): 5-methyl modified nucleotide
tcuguccaagccc

SEQ ID NO: 12708 - DNA, 12 bp, Artificial Sequence
  source: /note="Description of Artificial Sequence: Synthetic oligonucleotide"
  source: /note="Description of Combined DNA/RNA Molecule: Synthetic oligonucleotide"
  source: /note="DNA/RNA"
  modified_base (1)..(1): bicyclic nucleic acid (BNA)
  modified_base (2)..(2): 5-methyl modified nucleotide
  modified_base (6)..(6): 5-methyl modified nucleotide
  modified_base (7)..(7): 5-methyl modified nucleotide
  modified_base (11)..(11): 5-methyl modified nucleotide
  modified_base (12)..(12): 5-methyl modified nucleotide
tcuguccaagcc

SEQ ID NO: 12709 - DNA, 11 bp, Artificial Sequence
  source: /note="Description of Artificial Sequence: Synthetic oligonucleotide"
  source: /note="Description of Combined DNA/RNA Molecule: Synthetic oligonucleotide"
  source: /note="DNA/RNA"
  modified_base (1)..(1): bicyclic nucleic acid (BNA)
  modified_base (2)..(2): 5-methyl modified nucleotide
  modified_base (6)..(6): 5-methyl modified nucleotide
  modified_base (7)..(7): 5-methyl modified nucleotide
  modified_base (11)..(11): 5-methyl modified nucleotide
tcuguccaagc

SEQ ID NO: 12710 - DNA, 10 bp, Artificial Sequence
  source: /note="Description of Artificial Sequence: Synthetic oligonucleotide"
  source: /note="Description of Combined DNA/RNA Molecule: Synthetic oligonucleotide"
  source: /note="DNA/RNA"
  modified_base (1)..(1): bicyclic nucleic acid (BNA)
  modified_base (2)..(2): 5-methyl modified nucleotide
  modified_base (6)..(6): 5-methyl modified nucleotide
  modified_base (7)..(7): 5-methyl modified nucleotide
tcuguccaag

SEQ ID NO: 12711 - DNA, 9 bp, Artificial Sequence
  source: /note="Description of Artificial Sequence: Synthetic oligonucleotide"
  source: /note="Description of Combined DNA/RNA Molecule: Synthetic oligonucleotide"
  source: /note="DNA/RNA"
  modified_base (1)..(1): bicyclic nucleic acid (BNA)
  modified_base (2)..(2): 5-methyl modified nucleotide
  modified_base (6)..(6): 5-methyl modified nucleotide
  modified_base (7)..(7): 5-methyl modified nucleotide
tcuguccaa

SEQ ID NO: 12712 - DNA, 8 bp, Artificial Sequence
  source: /note="Description of Artificial Sequence: Synthetic oligonucleotide"
  source: /note="Description of Combined DNA/RNA Molecule: Synthetic oligonucleotide"
  source: /note="DNA/RNA"
  modified_base (1)..(1): bicyclic nucleic acid (BNA)
  modified_base (2)..(2): 5-methyl modified nucleotide
  modified_base (6)..(6): 5-methyl modified nucleotide
  modified_base (7)..(7): 5-methyl modified nucleotide
tcugucca

SEQ ID NO: 12713 - RNA, 17 nt, Artificial Sequence
  source: /note="Description of Artificial Sequence: Synthetic oligonucleotide"
  source: /note="RNA"
  modified_base (1)..(1): 5-methyl bicyclic nucleic acid
  modified_base (5)..(5): 5-methyl modified nucleotide
  modified_base (6)..(6): 5-methyl modified nucleotide
  modified_base (10)..(10): 5-methyl modified nucleotide
  modified_base (11)..(11): 5-methyl modified nucleotide
  modified_base (12)..(12): 5-methyl modified nucleotide
cuguccaagcccgguug

SEQ ID NO: 12714 - RNA, 16 nt, Artificial Sequence
  source: /note="Description of Artificial Sequence: Synthetic oligonucleotide"
  source: /note="RNA"
  modified_base (1)..(1): 5-methyl bicyclic nucleic acid
  modified_base (5)..(5): 5-methyl modified nucleotide
  modified_base (6)..(6): 5-methyl modified nucleotide
  modified_base (10)..(10): 5-methyl modified nucleotide
  modified_base (11)..(11): 5-methyl modified nucleotide
  modified_base (12)..(12): 5-methyl modified nucleotide
cuguccaagcccgguu

SEQ ID NO: 12715 - RNA, 15 nt, Artificial Sequence
  source: /note="Description of Artificial Sequence: Synthetic oligonucleotide"
  source: /note="RNA"
  modified_base (1)..(1): 5-methyl bicyclic nucleic acid
  modified_base (5)..(5): 5-methyl modified nucleotide
  modified_base (6)..(6): 5-methyl modified nucleotide
  modified_base (10)..(10): 5-methyl modified nucleotide
  modified_base (11)..(11): 5-methyl modified nucleotide
  modified_base (12)..(12): 5-methyl modified nucleotide
cuguccaagcccggu

SEQ ID NO: 12716 - RNA, 14 nt, Artificial Sequence
  source: /note="Description of Artificial Sequence: Synthetic oligonucleotide"
  source: /note="RNA"
  modified_base (1)..(1): 5-methyl bicyclic nucleic acid
  modified_base (5)..(5): 5-methyl modified nucleotide
  modified_base (6)..(6): 5-methyl modified nucleotide
  modified_base (10)..(10): 5-methyl modified nucleotide
  modified_base (11)..(11): 5-methyl modified nucleotide
  modified_base (12)..(12): 5-methyl modified nucleotide
cuguccaagcccgg

SEQ ID NO: 12717 - RNA, 13 nt, Artificial Sequence
  source: /note="Description of Artificial Sequence: Synthetic oligonucleotide"
  source: /note="RNA"
  modified_base (1)..(1): 5-methyl bicyclic nucleic acid
  modified_base (5)..(5): 5-methyl modified nucleotide
  modified_base (6)..(6): 5-methyl modified nucleotide
  modified_base (10)..(10): 5-methyl modified nucleotide
  modified_base (11)..(11): 5-methyl modified nucleotide
  modified_base (12)..(12): 5-methyl modified nucleotide
cuguccaagcccg

SEQ ID NO: 12718 - RNA, 12 nt, Artificial Sequence
  source: /note="Description of Artificial Sequence: Synthetic oligonucleotide"
  source: /note="RNA"
  modified_base (1)..(1): 5-methyl bicyclic nucleic acid
  modified_base (5)..(5): 5-methyl modified nucleotide
  modified_base (6)..(6): 5-methyl modified nucleotide
  modified_base (10)..(10): 5-methyl modified nucleotide
  modified_base (11)..(11): 5-methyl modified nucleotide
  modified_base (12)..(12): 5-methyl modified nucleotide
cuguccaagccc

SEQ ID NO: 12719 - RNA, 11 nt, Artificial Sequence
  source: /note="Description of Artificial Sequence: Synthetic oligonucleotide"
  source: /note="RNA"
  modified_base (1)..(1): 5-methyl bicyclic nucleic acid
  modified_base (5)..(5): 5-methyl modified nucleotide
  modified_base (6)..(6): 5-methyl modified nucleotide
  modified_base (10)..(10): 5-methyl modified nucleotide
  modified_base (11)..(11): 5-methyl modified nucleotide
cuguccaagcc

SEQ ID NO: 12720 - RNA, 10 nt, Artificial Sequence
  source: /note="Description of Artificial Sequence: Synthetic oligonucleotide"
  source: /note="RNA"
  modified_base (1)..(1): 5-methyl bicyclic nucleic acid
  modified_base (5)..(5): 5-methyl modified nucleotide
  modified_base (6)..(6): 5-methyl modified nucleotide
  modified_base (10)..(10): 5-methyl modified nucleotide
cuguccaagc

SEQ ID NO: 12721 - RNA, 9 nt, Artificial Sequence
  source: /note="Description of Artificial Sequence: Synthetic oligonucleotide"
  source: /note="RNA"
  modified_base (1)..(1): 5-methyl bicyclic nucleic acid
  modified_base (5)..(5): 5-methyl modified nucleotide
  modified_base (6)..(6): 5-methyl modified nucleotide
cuguccaag

SEQ ID NO: 12722 - RNA, 8 nt, Artificial Sequence
  source: /note="Description of Artificial Sequence: Synthetic oligonucleotide"
  source: /note="RNA"
  modified_base (1)..(1): 5-methyl bicyclic nucleic acid
  modified_base (5)..(5): 5-methyl modified nucleotide
  modified_base (6)..(6): 5-methyl modified nucleotide
cuguccaa

SEQ ID NO: 12723 - RNA, 20 nt, Artificial Sequence
  source: /note="Description of Artificial Sequence: Synthetic oligonucleotide"
  source: /note="RNA"
  modified_base (1)..(1): bicyclic nucleic acid (BNA)
  modified_base (4)..(4): 5-methyl modified nucleotide
  modified_base (8)..(8): 5-methyl modified nucleotide
  modified_base (9)..(9): 5-methyl modified nucleotide
  modified_base (13)..(13): 5-methyl modified nucleotide
  modified_base (14)..(14): 5-methyl modified nucleotide
  modified_base (15)..(15): 5-methyl modified nucleotide
guucuguccaagcccgguug

SEQ ID NO: 12724 - RNA, 19 nt, Artificial Sequence
  source: /note="Description of Artificial Sequence: Synthetic oligonucleotide"
  source: /note="RNA"
  modified_base (1)..(1): bicyclic nucleic acid (BNA)
  modified_base (4)..(4): 5-methyl modified nucleotide
  modified_base (8)..(8): 5-methyl modified nucleotide
  modified_base (9)..(9): 5-methyl modified nucleotide
  modified_base (13)..(13): 5-methyl modified nucleotide
  modified_base (14)..(14): 5-methyl modified nucleotide
  modified_base (15)..(15): 5-methyl modified nucleotide
guucuguccaagcccgguu

SEQ ID NO: 12725 - RNA, 18 nt, Artificial Sequence
  source: /note="Description of Artificial Sequence: Synthetic oligonucleotide"
  source: /note="RNA"
  modified_base (1)..(1): bicyclic nucleic acid (BNA)
  modified_base (4)..(4): 5-methyl modified nucleotide
  modified_base (8)..(8): 5-methyl modified nucleotide
  modified_base (9)..(9): 5-methyl modified nucleotide
  modified_base (13)..(13): 5-methyl modified nucleotide
  modified_base (14)..(14): 5-methyl modified nucleotide
  modified_base (15)..(15): 5-methyl modified nucleotide
guucuguccaagcccggu

SEQ ID NO: 12726 - RNA, 17 nt, Artificial Sequence
  source: /note="Description of Artificial Sequence: Synthetic oligonucleotide"
  source: /note="RNA"
  modified_base (1)..(1): bicyclic nucleic acid (BNA)
  modified_base (4)..(4): 5-methyl modified nucleotide
  modified_base (8)..(8): 5-methyl modified nucleotide
  modified_base (9)..(9): 5-methyl modified nucleotide
  modified_base (13)..(13): 5-methyl modified nucleotide
  modified_base (14)..(14): 5-methyl modified nucleotide
  modified_base (15)..(15): 5-methyl modified nucleotide
guucuguccaagcccgg

SEQ ID NO: 12727 - RNA, 16 nt, Artificial Sequence
  source: /note="Description of Artificial Sequence: Synthetic oligonucleotide"
  source: /note="RNA"
  modified_base (1)..(1): bicyclic nucleic acid (BNA)
  modified_base (4)..(4): 5-methyl modified nucleotide
  modified_base (8)..(8): 5-methyl modified nucleotide
  modified_base (9)..(9): 5-methyl modified nucleotide
  modified_base (13)..(13): 5-methyl modified nucleotide
  modified_base (14)..(14): 5-methyl modified nucleotide
  modified_base (15)..(15): 5-methyl modified nucleotide
guucuguccaagcccg

SEQ ID NO: 12728 - RNA, 15 nt, Artificial Sequence
  source: /note="Description of Artificial Sequence: Synthetic oligonucleotide"
  source: /note="RNA"
  modified_base (1)..(1): bicyclic nucleic acid (BNA)
  modified_base (4)..(4): 5-methyl modified nucleotide
  modified_base (8)..(8): 5-methyl modified nucleotide
  modified_base (9)..(9): 5-methyl modified nucleotide
  modified_base (13)..(13): 5-methyl modified nucleotide
  modified_base (14)..(14): 5-methyl modified nucleotide
  modified_base (15)..(15): 5-methyl modified nucleotide
guucuguccaagccc

SEQ ID NO: 12729 - RNA, 14 nt, Artificial Sequence
  source: /note="Description of Artificial Sequence: Synthetic oligonucleotide"
  source: /note="RNA"
  modified_base (1)..(1): bicyclic nucleic acid (BNA)
  modified_base (4)..(4): 5-methyl modified nucleotide
  modified_base (8)..(8): 5-methyl modified nucleotide
  modified_base (9)..(9): 5-methyl modified nucleotide
  modified_base (13)..(13): 5-methyl modified nucleotide
  modified_base (14)..(14): 5-methyl modified nucleotide
guucuguccaagcc

SEQ ID NO: 12730 - RNA, 13 nt, Artificial Sequence
  source: /note="Description of Artificial Sequence: Synthetic oligonucleotide"
  source: /note="RNA"
  modified_base (1)..(1): bicyclic nucleic acid (BNA)
  modified_base (4)..(4): 5-methyl modified nucleotide
  modified_base (8)..(8): 5-methyl modified nucleotide
  modified_base (9)..(9): 5-methyl modified nucleotide
  modified_base (13)..(13): 5-methyl modified nucleotide
guucuguccaagc

SEQ ID NO: 12731 - RNA, 12 nt, Artificial Sequence
  source: /note="Description of Artificial Sequence: Synthetic oligonucleotide"
  source: /note="RNA"
  modified_base (1)..(1): bicyclic nucleic acid (BNA)
  modified_base (4)..(4): 5-methyl modified nucleotide
  modified_base (8)..(8): 5-methyl modified nucleotide
  modified_base (9)..(9): 5-methyl modified nucleotide
guucuguccaag

SEQ ID NO: 12732 - RNA, 11 nt, Artificial Sequence
  source: /note="Description of Artificial Sequence: Synthetic oligonucleotide"
  source: /note="RNA"
  modified_base (1)..(1): bicyclic nucleic acid (BNA)
  modified_base (4)..(4): 5-methyl modified nucleotide
  modified_base (8)..(8): 5-methyl modified nucleotide
  modified_base (9)..(9): 5-methyl modified nucleotide
guucuguccaa

SEQ ID NO: 12733 - RNA, 10 nt, Artificial Sequence
  source: /note="Description of Artificial Sequence: Synthetic oligonucleotide"
  source: /note="RNA"
  modified_base (1)..(1): bicyclic nucleic acid (BNA)
  modified_base (4)..(4): 5-methyl modified nucleotide
  modified_base (8)..(8): 5-methyl modified nucleotide
  modified_base (9)..(9): 5-methyl modified nucleotide
guucugucca

SEQ ID NO: 12734 - RNA, 9 nt, Artificial Sequence
  source: /note="Description of Artificial Sequence: Synthetic oligonucleotide"
  source: /note="RNA"
  modified_base (1)..(1): bicyclic nucleic acid (BNA)
  modified_base (4)..(4): 5-methyl modified nucleotide
  modified_base (8)..(8): 5-methyl modified nucleotide
  modified_base (9)..(9): 5-methyl modified nucleotide
guucugucc

SEQ ID NO: 12735 - RNA, 8 nt, Artificial Sequence
  source: /note="Description of Artificial Sequence: Synthetic oligonucleotide"
  source: /note="RNA"
  modified_base (1)..(1): bicyclic nucleic acid (BNA)
  modified_base (4)..(4): 5-methyl modified nucleotide
  modified_base (8)..(8): 5-methyl modified nucleotide
guucuguc

SEQ ID NO: 12736 - RNA, 20 nt, Artificial Sequence
  source: /note="Description of Artificial Sequence: Synthetic oligonucleotide"
  source: /note="RNA"
  modified_base (1)..(1): bicyclic nucleic acid (BNA)
  modified_base (5)..(5): 5-methyl modified nucleotide
  modified_base (9)..(9): 5-methyl modified nucleotide
  modified_base (10)..(10): 5-methyl modified nucleotide
  modified_base (14)..(14): 5-methyl modified nucleotide
  modified_base (15)..(15): 5-methyl modified nucleotide
  modified_base (16)..(16): 5-methyl modified nucleotide
aguucuguccaagcccgguu

SEQ ID NO: 12737 - RNA, 19 nt, Artificial Sequence
  source: /note="Description of Artificial Sequence: Synthetic oligonucleotide"
  source: /note="RNA"
  modified_base (1)..(1): bicyclic nucleic acid (BNA)
  modified_base (5)..(5): 5-methyl modified nucleotide
  modified_base (9)..(9): 5-methyl modified nucleotide
  modified_base (10)..(10): 5-methyl modified nucleotide
  modified_base (14)..(14): 5-methyl modified nucleotide
  modified_base (15)..(15): 5-methyl modified nucleotide
  modified_base (16)..(16): 5-methyl modified nucleotide
aguucuguccaagcccggu

SEQ ID NO: 12738 - RNA, 18 nt, Artificial Sequence
  source: /note="Description of Artificial Sequence: Synthetic oligonucleotide"
  source: /note="RNA"
  modified_base (1)..(1): bicyclic nucleic acid (BNA)
  modified_base (5)..(5): 5-methyl modified nucleotide
  modified_base (9)..(9): 5-methyl modified nucleotide
  modified_base (10)..(10): 5-methyl modified nucleotide
  modified_base (14)..(14): 5-methyl modified nucleotide
  modified_base (15)..(15): 5-methyl modified nucleotide
  modified_base (16)..(16): 5-methyl modified nucleotide
aguucuguccaagcccgg

SEQ ID NO: 12739 - RNA, 17 nt, Artificial Sequence
  source: /note="Description of Artificial Sequence: Synthetic oligonucleotide"
  source: /note="RNA"
  modified_base (1)..(1): bicyclic nucleic acid (BNA)
  modified_base (5)..(5): 5-methyl modified nucleotide
  modified_base (9)..(9): 5-methyl modified nucleotide
  modified_base (10)..(10): 5-methyl modified nucleotide
  modified_base (14)..(14): 5-methyl modified nucleotide
  modified_base (15)..(15): 5-methyl modified nucleotide
  modified_base (16)..(16): 5-methyl modified nucleotide
aguucuguccaagcccg

SEQ ID NO: 12740 - RNA, 16 nt, Artificial Sequence
  source: /note="Description of Artificial Sequence: Synthetic oligonucleotide"
  source: /note="RNA"
  modified_base (1)..(1): bicyclic nucleic acid (BNA)
  modified_base (5)..(5): 5-methyl modified nucleotide
  modified_base (9)..(9): 5-methyl modified nucleotide
  modified_base (10)..(10): 5-methyl modified nucleotide
  modified_base (14)..(14): 5-methyl modified nucleotide
  modified_base (15)..(15): 5-methyl modified nucleotide
  modified_base (16)..(16): 5-methyl modified nucleotide
aguucuguccaagccc

SEQ ID NO: 12741 - RNA, 15 nt, Artificial Sequence
  source: /note="Description of Artificial Sequence: Synthetic oligonucleotide"
  source: /note="RNA"
  modified_base (1)..(1): bicyclic nucleic acid (BNA)
  modified_base (5)..(5): 5-methyl modified nucleotide
  modified_base (9)..(9): 5-methyl modified nucleotide
  modified_base (10)..(10): 5-methyl modified nucleotide
  modified_base (14)..(14): 5-methyl modified nucleotide
  modified_base (15)..(15): 5-methyl modified nucleotide
aguucuguccaagcc

SEQ ID NO: 12742 - RNA, 14 nt, Artificial Sequence
  source: /note="Description of Artificial Sequence: Synthetic oligonucleotide"
  source: /note="RNA"
  modified_base (1)..(1): bicyclic nucleic acid (BNA)
  modified_base (5)..(5): 5-methyl modified nucleotide
  modified_base (9)..(9): 5-methyl modified nucleotide
  modified_base (10)..(10): 5-methyl modified nucleotide
  modified_base (14)..(14): 5-methyl modified nucleotide
aguucuguccaagc

SEQ ID NO: 12743 - RNA, 13 nt, Artificial Sequence
  source: /note="Description of Artificial Sequence: Synthetic oligonucleotide"
  source: /note="RNA"
  modified_base (1)..(1): bicyclic nucleic acid (BNA)
  modified_base (5)..(5): 5-methyl modified nucleotide
  modified_base (9)..(9): 5-methyl modified nucleotide
  modified_base (10)..(10): 5-methyl modified nucleotide
aguucuguccaag

SEQ ID NO: 12744 - RNA, 12 nt, Artificial Sequence
  source: /note="Description of Artificial Sequence: Synthetic oligonucleotide"
  source: /note="RNA"
  modified_base (1)..(1): bicyclic nucleic acid (BNA)
  modified_base (5)..(5): 5-methyl modified nucleotide
  modified_base (9)..(9): 5-methyl modified nucleotide
  modified_base (10)..(10): 5-methyl modified nucleotide
aguucuguccaa

SEQ ID NO: 12745 - RNA, 11 nt, Artificial Sequence
  source: /note="Description of Artificial Sequence: Synthetic oligonucleotide"
  source: /note="RNA"
  modified_base (1)..(1): bicyclic nucleic acid (BNA)
  modified_base (5)..(5): 5-methyl modified nucleotide
  modified_base (9)..(9): 5-methyl modified nucleotide
  modified_base (10)..(10): 5-methyl modified nucleotide
aguucugucca

SEQ ID NO: 12746 - RNA, 10 nt, Artificial Sequence
  source: /note="Description of Artificial Sequence: Synthetic oligonucleotide"
  source: /note="RNA"
  modified_base (1)..(1): bicyclic nucleic acid (BNA)
  modified_base (5)..(5): 5-methyl modified nucleotide
  modified_base (9)..(9): 5-methyl modified nucleotide
  modified_base (10)..(10): 5-methyl modified nucleotide
aguucugucc

SEQ ID NO: 12747 - RNA, 9 nt, Artificial Sequence
  source: /note="Description of Artificial Sequence: Synthetic oligonucleotide"
  source: /note="RNA"
  modified_base (1)..(1): bicyclic nucleic acid (BNA)
  modified_base (5)..(5): 5-methyl modified nucleotide
  modified_base (9)..(9): 5-methyl modified nucleotide
aguucuguc

SEQ ID NO: 12748 - RNA, 8 nt, Artificial Sequence
  source: /note="Description of Artificial Sequence: Synthetic oligonucleotide"
  source: /note="RNA"
  modified_base (1)..(1): bicyclic nucleic acid (BNA)
  modified_base (5)..(5): 5-methyl modified nucleotide
aguucugu

SEQ ID NO: 12749 - RNA, 20 nt, Artificial Sequence
  source: /note="Description of Artificial Sequence: Synthetic oligonucleotide"
  source: /note="RNA"
  modified_base (1)..(1): bicyclic nucleic acid (BNA)
  modified_base (6)..(6): 5-methyl modified nucleotide
  modified_base (10)..(10): 5-methyl modified nucleotide
  modified_base (11)..(11): 5-methyl modified nucleotide
  modified_base (15)..(15): 5-methyl modified nucleotide
  modified_base (16)..(16): 5-methyl modified nucleotide
  modified_base (17)..(17): 5-methyl modified nucleotide
aaguucuguccaagcccggu

SEQ ID NO: 12750 - RNA, 19 nt, Artificial Sequence
  source: /note="Description of Artificial Sequence: Synthetic oligonucleotide"
  source: /note="RNA"
  modified_base (1)..(1): bicyclic nucleic acid (BNA)
  modified_base (6)..(6): 5-methyl modified nucleotide
  modified_base (10)..(10): 5-methyl modified nucleotide
  modified_base (11)..(11): 5-methyl modified nucleotide
  modified_base (15)..(15): 5-methyl modified nucleotide
  modified_base (16)..(16): 5-methyl modified nucleotide
  modified_base (17)..(17): 5-methyl modified nucleotide
aaguucuguccaagcccgg

SEQ ID NO: 12751 - RNA, 18 nt, Artificial Sequence
  source: /note="Description of Artificial Sequence: Synthetic oligonucleotide"
  source: /note="RNA"
  modified_base (1)..(1): bicyclic nucleic acid (BNA)
  modified_base (6)..(6): 5-methyl modified nucleotide
  modified_base (10)..(10): 5-methyl modified nucleotide
  modified_base (11)..(11): 5-methyl modified nucleotide
  modified_base (15)..(15): 5-methyl modified nucleotide
  modified_base (16)..(16): 5-methyl modified nucleotide
  modified_base (17)..(17): 5-methyl modified nucleotide
aaguucuguccaagcccg

SEQ ID NO: 12752 - RNA, 17 nt, Artificial Sequence
  source: /note="Description of Artificial Sequence: Synthetic oligonucleotide"
  source: /note="RNA"
  modified_base (1)..(1): bicyclic nucleic acid (BNA)
  modified_base (6)..(6): 5-methyl modified nucleotide
  modified_base (10)..(10): 5-methyl modified nucleotide
  modified_base (11)..(11): 5-methyl modified nucleotide
  modified_base (15)..(15): 5-methyl modified nucleotide
  modified_base (16)..(16): 5-methyl modified nucleotide
  modified_base (17)..(17): 5-methyl modified nucleotide
aaguucuguccaagccc

SEQ ID NO: 12753 - RNA, 16 nt, Artificial Sequence
  source: /note="Description of Artificial Sequence: Synthetic oligonucleotide"
  source: /note="RNA"
  modified_base (1)..(1): bicyclic nucleic acid (BNA)
  modified_base (6)..(6): 5-methyl modified nucleotide
  modified_base (10)..(10): 5-methyl modified nucleotide
  modified_base (11)..(11): 5-methyl modified nucleotide
  modified_base (15)..(15): 5-methyl modified nucleotide
  modified_base (16)..(16): 5-methyl modified nucleotide
aaguucuguccaagcc

SEQ ID NO: 12754 - RNA, 15 nt, Artificial Sequence
  source: /note="Description of Artificial Sequence: Synthetic oligonucleotide"
  source: /note="RNA"
  modified_base (1)..(1): bicyclic nucleic acid (BNA)
  modified_base (6)..(6): 5-methyl modified nucleotide
  modified_base (10)..(10): 5-methyl modified nucleotide
  modified_base (11)..(11): 5-methyl modified nucleotide
  modified_base (15)..(15): 5-methyl modified nucleotide
aaguucuguccaagc

SEQ ID NO: 12755 - RNA, 14 nt, Artificial Sequence
  source: /note="Description of Artificial Sequence: Synthetic oligonucleotide"
  source: /note="RNA"
  modified_base (1)..(1): bicyclic nucleic acid (BNA)
  modified_base (6)..(6): 5-methyl modified nucleotide
  modified_base (10)..(10): 5-methyl modified nucleotide
  modified_base (11)..(11): 5-methyl modified nucleotide
aaguucuguccaag

SEQ ID NO: 12756 - RNA, 13 nt, Artificial Sequence
  source: /note="Description of Artificial Sequence: Synthetic oligonucleotide"
  source: /note="RNA"
  modified_base (1)..(1): bicyclic nucleic acid (BNA)
  modified_base (6)..(6): 5-methyl modified nucleotide
  modified_base (10)..(10): 5-methyl modified nucleotide
  modified_base (11)..(11): 5-methyl modified nucleotide
aaguucuguccaa

SEQ ID NO: 12757 - RNA, 12 nt, Artificial Sequence
  source: /note="Description of Artificial Sequence: Synthetic oligonucleotide"
  source: /note="RNA"
  modified_base (1)..(1): bicyclic nucleic acid (BNA)
  modified_base (6)..(6): 5-methyl modified nucleotide
  modified_base (10)..(10): 5-methyl modified nucleotide
  modified_base (11)..(11): 5-methyl modified nucleotide
aaguucugucca

SEQ ID NO: 12758 - RNA, 11 nt, Artificial Sequence
  source: /note="Description of Artificial Sequence: Synthetic oligonucleotide"
  source: /note="RNA"
  modified_base (1)..(1): bicyclic nucleic acid (BNA)
  modified_base (6)..(6): 5-methyl modified nucleotide
  modified_base (10)..(10): 5-methyl modified nucleotide
  modified_base (11)..(11): 5-methyl modified nucleotide
aaguucugucc

SEQ ID NO: 12759 - RNA, 10 nt, Artificial Sequence
  source: /note="Description of Artificial Sequence: Synthetic oligonucleotide"
  source: /note="RNA"
  modified_base (1)..(1): bicyclic nucleic acid (BNA)
  modified_base (6)..(6): 5-methyl modified nucleotide
  modified_base (10)..(10): 5-methyl modified nucleotide
aaguucuguc

SEQ ID NO: 12760 - RNA, 9 nt, Artificial Sequence
  source: /note="Description of Artificial Sequence: Synthetic oligonucleotide"
  source: /note="RNA"
  modified_base (1)..(1): bicyclic nucleic acid (BNA)
  modified_base (6)..(6): 5-methyl modified nucleotide
aaguucugu

SEQ ID NO: 12761 - RNA, 8 nt, Artificial Sequence
  source: /note="Description of Artificial Sequence: Synthetic oligonucleotide"
  source: /note="RNA"
  modified_base (1)..(1): bicyclic nucleic acid (BNA)
  modified_base (6)..(6): 5-methyl modified nucleotide
aaguucug

SEQ ID NO: 12762 - DNA, 20 bp, Artificial Sequence
  source: /note="Description of Artificial Sequence: Synthetic oligonucleotide"
  source: /note="Description of Combined DNA/RNA Molecule: Synthetic oligonucleotide"
  source: /note="DNA/RNA"
  modified_base (1)..(1): bicyclic nucleic acid (BNA)
  modified_base (7)..(7): 5-methyl modified nucleotide
  modified_base (11)..(11): 5-methyl modified nucleotide
  modified_base (12)..(12): 5-methyl modified nucleotide
  modified_base (16)..(16): 5-methyl modified nucleotide
  modified_base (17)..(17): 5-methyl modified nucleotide
  modified_base (18)..(18): 5-methyl modified nucleotide
taaguucuguccaagcccgg

SEQ ID NO: 12763 - DNA, 19 bp, Artificial Sequence
  source: /note="Description of Artificial Sequence: Synthetic oligonucleotide"
  source: /note="Description of Combined DNA/RNA Molecule: Synthetic oligonucleotide"
  source: /note="DNA/RNA"
  modified_base (1)..(1): bicyclic nucleic acid (BNA)
  modified_base (7)..(7): 5-methyl modified nucleotide
  modified_base (11)..(11): 5-methyl modified nucleotide
  modified_base (12)..(12): 5-methyl modified nucleotide
  modified_base (16)..(16): 5-methyl modified nucleotide
  modified_base (17)..(17): 5-methyl modified nucleotide
  modified_base (18)..(18): 5-methyl modified nucleotide
taaguucuguccaagcccg

SEQ ID NO: 12764 - DNA, 18 bp, Artificial Sequence
  source: /note="Description of Artificial Sequence: Synthetic oligonucleotide"
  source: /note="Description of Combined DNA/RNA Molecule: Synthetic oligonucleotide"
  source: /note="DNA/RNA"
  modified_base (1)..(1): bicyclic nucleic acid (BNA)
  modified_base (7)..(7): 5-methyl modified nucleotide
  modified_base (11)..(11): 5-methyl modified nucleotide
  modified_base (12)..(12): 5-methyl modified nucleotide
  modified_base (16)..(16): 5-methyl modified nucleotide
  modified_base (17)..(17): 5-methyl modified nucleotide
  modified_base (18)..(18): 5-methyl modified nucleotide
taaguucuguccaagccc

SEQ ID NO: 12765 - DNA, 17 bp, Artificial Sequence
  source: /note="Description of Artificial Sequence: Synthetic oligonucleotide"
  source: /note="Description of Combined DNA/RNA Molecule: Synthetic oligonucleotide"
  source: /note="DNA/RNA"
  modified_base (1)..(1): bicyclic nucleic acid (BNA)
  modified_base (7)..(7): 5-methyl modified nucleotide
  modified_base (11)..(11): 5-methyl modified nucleotide
  modified_base (12)..(12): 5-methyl modified nucleotide
  modified_base (16)..(16): 5-methyl modified nucleotide
  modified_base (17)..(17): 5-methyl modified nucleotide
taaguucuguccaagcc

SEQ ID NO: 12766 - DNA, 16 bp, Artificial Sequence
  source: /note="Description of Artificial Sequence: Synthetic oligonucleotide"
  source: /note="Description of Combined DNA/RNA Molecule: Synthetic oligonucleotide"
  source: /note="DNA/RNA"
  modified_base (1)..(1): bicyclic nucleic acid (BNA)
  modified_base (7)..(7): 5-methyl modified nucleotide
  modified_base (11)..(11): 5-methyl modified nucleotide
  modified_base (12)..(12): 5-methyl modified nucleotide
  modified_base (16)..(16): 5-methyl modified nucleotide
taaguucuguccaagc

SEQ ID NO: 12767 - DNA, 14 bp, Artificial Sequence
  source: /note="Description of Artificial Sequence: Synthetic oligonucleotide"
  source: /note="Description of Combined DNA/RNA Molecule: Synthetic oligonucleotide"
  source: /note="DNA/RNA"
  modified_base (1)..(1): bicyclic nucleic acid (BNA)
  modified_base (7)..(7): 5-methyl modified nucleotide
  modified_base (11)..(11): 5-methyl modified nucleotide
  modified_base (12)..(12): 5-methyl modified nucleotide
taaguucuguccaa

SEQ ID NO: 12768 - DNA, 13 bp, Artificial Sequence
  source: /note="Description of Artificial Sequence: Synthetic oligonucleotide"
  source: /note="Description of Combined DNA/RNA Molecule: Synthetic oligonucleotide"
  source: /note="DNA/RNA"
  modified_base (1)..(1): bicyclic nucleic acid (BNA)
  modified_base (7)..(7): 5-methyl modified nucleotide
  modified_base (11)..(11): 5-methyl modified nucleotide
  modified_base (12)..(12): 5-methyl modified nucleotide
taaguucugucca

SEQ ID NO: 12769 - DNA, 12 bp, Artificial Sequence
  source: /note="Description of Artificial Sequence: Synthetic oligonucleotide"
  source: /note="Description of Combined DNA/RNA Molecule: Synthetic oligonucleotide"
  source: /note="DNA/RNA"
  modified_base (1)..(1): bicyclic nucleic acid (BNA)
  modified_base (7)..(7): 5-methyl modified nucleotide
  modified_base (11)..(11): 5-methyl modified nucleotide
  modified_base (12)..(12): 5-methyl modified nucleotide
taaguucugucc

SEQ ID NO: 12770 - DNA, 11 bp, Artificial Sequence
  source: /note="Description of Artificial Sequence: Synthetic oligonucleotide"
  source: /note="Description of Combined DNA/RNA Molecule: Synthetic oligonucleotide"
  source: /note="DNA/RNA"
  modified_base (1)..(1): bicyclic nucleic acid (BNA)
  modified_base (7)..(7): 5-methyl modified nucleotide
  modified_base (11)..(11): 5-methyl modified nucleotide
taaguucuguc

SEQ ID NO: 12771 - DNA, 10 bp, Artificial Sequence
  source: /note="Description of Artificial Sequence: Synthetic oligonucleotide"
  source: /note="Description of Combined DNA/RNA Molecule: Synthetic oligonucleotide"
  source: /note="DNA/RNA"
  modified_base (1)..(1): bicyclic nucleic acid (BNA)
  modified_base (7)..(7): 5-methyl modified nucleotide
taaguucugu

SEQ ID NO: 12772 - DNA, 9 bp, Artificial Sequence
  source: /note="Description of Artificial Sequence: Synthetic oligonucleotide"
  source: /note="Description of Combined DNA/RNA Molecule: Synthetic oligonucleotide"
  source: /note="DNA/RNA"
  modified_base (1)..(1): bicyclic nucleic acid (BNA)
  modified_base (7)..(7): 5-methyl modified nucleotide
taaguucug

SEQ ID NO: 12773 - DNA, 8 bp, Artificial Sequence
  source: /note="Description of Artificial Sequence: Synthetic oligonucleotide"
  source: /note="Description of Combined DNA/RNA Molecule: Synthetic oligonucleotide"
  source: /note="DNA/RNA"
  modified_base (1)..(1): bicyclic nucleic acid (BNA)
  modified_base (7)..(7): 5-methyl modified nucleotide
taaguucu

SEQ ID NO: 12774 - RNA, 20 nt, Artificial Sequence
  source: /note="Description of Artificial Sequence: Synthetic oligonucleotide"
  source: /note="RNA"
  modified_base (1)..(1): bicyclic nucleic acid (BNA)
  modified_base (8)..(8): 5-methyl modified nucleotide
  modified_base (12)..(12): 5-methyl modified nucleotide
  modified_base (13)..(13): 5-methyl modified nucleotide
  modified_base (17)..(17): 5-methyl modified nucleotide
  modified_base (18)..(18): 5-methyl modified nucleotide
  modified_base (19)..(19): 5-methyl modified nucleotide
guaaguucuguccaagcccg

SEQ ID NO: 12775 - RNA, 19 nt, Artificial Sequence
  source: /note="Description of Artificial Sequence: Synthetic oligonucleotide"
  source: /note="RNA"
  modified_base (1)..(1): bicyclic nucleic acid (BNA)
  modified_base (8)..(8): 5-methyl modified nucleotide
  modified_base (12)..(12): 5-methyl modified nucleotide
  modified_base (13)..(13): 5-methyl modified nucleotide
  modified_base (17)..(17): 5-methyl modified nucleotide
  modified_base (18)..(18): 5-methyl modified nucleotide
  modified_base (19)..(19): 5-methyl modified nucleotide
guaaguucuguccaagccc

SEQ ID NO: 12776 - RNA, 17 nt, Artificial Sequence
  source: /note="Description of Artificial Sequence: Synthetic oligonucleotide"
  source: /note="RNA"
  modified_base (1)..(1): bicyclic nucleic acid (BNA)
  modified_base (8)..(8): 5-methyl modified nucleotide
  modified_base (12)..(12): 5-methyl modified nucleotide
  modified_base (13)..(13): 5-methyl modified nucleotide
  modified_base (17)..(17): 5-methyl modified nucleotide
guaaguucuguccaagc

SEQ ID NO: 12777 - RNA, 16 nt, Artificial Sequence
  source: /note="Description of Artificial Sequence: Synthetic oligonucleotide"
  source: /note="RNA"
  modified_base (1)..(1): bicyclic nucleic acid (BNA)
  modified_base (8)..(8): 5-methyl modified nucleotide
  modified_base (12)..(12): 5-methyl modified nucleotide
  modified_base (13)..(13): 5-methyl modified nucleotide
guaaguucuguccaag

SEQ ID NO: 12778 - RNA, 15 nt, Artificial Sequence
  source: /note="Description of Artificial Sequence: Synthetic oligonucleotide"
  source: /note="RNA"
  modified_base (1)..(1): bicyclic nucleic acid (BNA)
  modified_base (8)..(8): 5-methyl modified nucleotide
  modified_base (12)..(12): 5-methyl modified nucleotide
  modified_base (13)..(13): 5-methyl modified nucleotide
guaaguucuguccaa

SEQ ID NO: 12779 - RNA, 14 nt, Artificial Sequence
  source: /note="Description of Artificial Sequence: Synthetic oligonucleotide"
  source: /note="RNA"
  modified_base (1)..(1): bicyclic nucleic acid (BNA)
  modified_base (8)..(8): 5-methyl modified nucleotide
  modified_base (12)..(12): 5-methyl modified nucleotide
  modified_base (13)..(13): 5-methyl modified nucleotide
guaaguucugucca

SEQ ID NO: 12780 - RNA, 13 nt, Artificial Sequence
  source: /note="Description of Artificial Sequence: Synthetic oligonucleotide"
  source: /note="RNA"
  modified_base (1)..(1): bicyclic nucleic acid (BNA)
  modified_base (8)..(8): 5-methyl modified nucleotide
  modified_base (12)..(12): 5-methyl modified nucleotide
  modified_base (13)..(13): 5-methyl modified nucleotide
guaaguucugucc

SEQ ID NO: 12781 - RNA, 12 nt, Artificial Sequence
  source: /note="Description of Artificial Sequence: Synthetic oligonucleotide"
  source: /note="RNA"
  modified_base (1)..(1): bicyclic nucleic acid (BNA)
  modified_base (8)..(8): 5-methyl modified nucleotide
  modified_base (12)..(12): 5-methyl modified nucleotide
guaaguucuguc

SEQ ID NO: 12782 - RNA, 11 nt, Artificial Sequence
  source: /note="Description of Artificial Sequence: Synthetic oligonucleotide"
  source: /note="RNA"
  modified_base (1)..(1): bicyclic nucleic acid (BNA)
  modified_base (8)..(8): 5-methyl modified nucleotide
guaaguucugu

SEQ ID NO: 12783 - RNA, 10 nt, Artificial Sequence
  source: /note="Description of Artificial Sequence: Synthetic oligonucleotide"
  source: /note="RNA"
  modified_base (1)..(1): bicyclic nucleic acid (BNA)
  modified_base (8)..(8): 5-methyl modified nucleotide
guaaguucug

SEQ ID NO: 12784 - RNA, 9 nt, Artificial Sequence
  source: /note="Description of Artificial Sequence: Synthetic oligonucleotide"
  source: /note="RNA"
  modified_base (1)..(1): bicyclic nucleic acid (BNA)
  modified_base (8)..(8): 5-methyl modified nucleotide
guaaguucu

SEQ ID NO: 12785 - RNA, 8 nt, Artificial Sequence
  source: /note="Description of Artificial Sequence: Synthetic oligonucleotide"
  source: /note="RNA"
  modified_base (1)..(1): bicyclic nucleic acid (BNA)
  modified_base (8)..(8): 5-methyl modified nucleotide
guaaguuc

SEQ ID NO: 12786 - RNA, 20 nt, Artificial Sequence
  source: /note="Description of Artificial Sequence: Synthetic oligonucleotide"
  source: /note="RNA"
  modified_base (1)..(1): bicyclic nucleic acid (BNA)
  modified_base (9)..(9): 5-methyl modified nucleotide
  modified_base (13)..(13): 5-methyl modified nucleotide
  modified_base (14)..(14): 5-methyl modified nucleotide
  modified_base (18)..(18): 5-methyl modified nucleotide
  modified_base (19)..(19): 5-methyl modified nucleotide
  modified_base (20)..(20): 5-methyl modified nucleotide
gguaaguucuguccaagccc

SEQ ID NO: 12787 - RNA, 19 nt, Artificial Sequence
  source: /note="Description of Artificial Sequence: Synthetic oligonucleotide"
  source: /note="RNA"
  modified_base (1)..(1): bicyclic nucleic acid (BNA)
  modified_base (9)..(9): 5-methyl modified nucleotide
  modified_base (13)..(13): 5-methyl modified nucleotide
  modified_base (14)..(14): 5-methyl modified nucleotide
  modified_base (18)..(18): 5-methyl modified nucleotide
  modified_base (19)..(19): 5-methyl modified nucleotide
gguaaguucuguccaagcc

SEQ ID NO: 12788 - RNA, 17 nt, Artificial Sequence
  source: /note="Description of Artificial Sequence: Synthetic oligonucleotide"
  source: /note="RNA"
  modified_base (1)..(1): bicyclic nucleic acid (BNA)
  modified_base (9)..(9): 5-methyl modified nucleotide
  modified_base (13)..(13): 5-methyl modified nucleotide
  modified_base (14)..(14): 5-methyl modified nucleotide
gguaaguucuguccaag

SEQ ID NO: 12789 - RNA, 16 nt, Artificial Sequence
  source: /note="Description of Artificial Sequence: Synthetic oligonucleotide"
  source: /note="RNA"
  modified_base (1)..(1): bicyclic nucleic acid (BNA)
  modified_base (9)..(9): 5-methyl modified nucleotide
  modified_base (13)..(13): 5-methyl modified nucleotide
  modified_base (14)..(14): 5-methyl modified nucleotide
gguaaguucuguccaa

SEQ ID NO: 12790 - RNA, 15 nt, Artificial Sequence
  source: /note="Description of Artificial Sequence: Synthetic oligonucleotide"
  source: /note="RNA"
  modified_base (1)..(1): bicyclic nucleic acid (BNA)
  modified_base (9)..(9): 5-methyl modified nucleotide
  modified_base (13)..(13): 5-methyl modified nucleotide
  modified_base (14)..(14): 5-methyl modified nucleotide
gguaaguucugucca

SEQ ID NO: 12791 - RNA, 14 nt, Artificial Sequence
  source: /note="Description of Artificial Sequence: Synthetic oligonucleotide"
  source: /note="RNA"
  modified_base (1)..(1): bicyclic nucleic acid (BNA)
  modified_base (9)..(9): 5-methyl modified nucleotide
  modified_base (13)..(13): 5-methyl modified nucleotide
  modified_base (14)..(14): 5-methyl modified nucleotide
gguaaguucugucc

SEQ ID NO: 12792 - RNA, 13 nt, Artificial Sequence
  source: /note="Description of Artificial Sequence: Synthetic oligonucleotide"
  source: /note="RNA"
  modified_base (1)..(1): bicyclic nucleic acid (BNA)
  modified_base (9)..(9): 5-methyl modified nucleotide
  modified_base (13)..(13): 5-methyl modified nucleotide
gguaaguucuguc

SEQ ID NO: 12793 - RNA, 12 nt, Artificial Sequence
  source: /note="Description of Artificial Sequence: Synthetic oligonucleotide"
  source: /note="RNA"
  modified_base (1)..(1): bicyclic nucleic acid (BNA)
  modified_base (9)..(9): 5-methyl modified nucleotide
gguaaguucugu

SEQ ID NO: 12794 - RNA, 11 nt, Artificial Sequence
  source: /note="Description of Artificial Sequence: Synthetic oligonucleotide"
  source: /note="RNA"
  modified_base (1)..(1): bicyclic nucleic acid (BNA)
  modified_base (9)..(9): 5-methyl modified nucleotide
gguaaguucug

SEQ ID NO: 12795 - RNA, 10 nt, Artificial Sequence
  source: /note="Description of Artificial Sequence: Synthetic oligonucleotide"
  source: /note="RNA"
  modified_base (1)..(1): bicyclic nucleic acid (BNA)
  modified_base (9)..(9): 5-methyl modified nucleotide
gguaaguucu

SEQ ID NO: 12796 - RNA, 9 nt, Artificial Sequence
  source: /note="Description of Artificial Sequence: Synthetic oligonucleotide"
  source: /note="RNA"
  modified_base (1)..(1): bicyclic nucleic acid (BNA)
  modified_base (9)..(9): 5-methyl modified nucleotide
gguaaguuc

SEQ ID NO: 12797 - RNA, 8 nt, Artificial Sequence
  source: /note="Description of Artificial Sequence: Synthetic oligonucleotide"
  source: /note="RNA"
  modified_base (1)..(1): bicyclic nucleic acid (BNA)
gguaaguu

SEQ ID NO: 12798 - RNA, 20 nt, Artificial Sequence
  source: /note="Description of Artificial Sequence: Synthetic oligonucleotide"
  source: /note="RNA"
  modified_base (1)..(1): 5-methyl bicyclic nucleic acid
  modified_base (10)..(10): 5-methyl modified nucleotide
  modified_base (14)..(14): 5-methyl modified nucleotide
  modified_base (15)..(15): 5-methyl modified nucleotide
  modified_base (19)..(19): 5-methyl modified nucleotide
  modified_base (20)..(20): 5-methyl modified nucleotide
cgguaaguucuguccaagcc

SEQ ID NO: 12799 - RNA, 19 nt, Artificial Sequence
  source: /note="Description of Artificial Sequence: Synthetic oligonucleotide"
  source: /note="RNA"
  modified_base (1)..(1): 5-methyl bicyclic nucleic acid
  modified_base (10)..(10): 5-methyl modified nucleotide
  modified_base (14)..(14): 5-methyl modified nucleotide
  modified_base (15)..(15): 5-methyl modified nucleotide
  modified_base (19)..(19): 5-methyl modified nucleotide
cgguaaguucuguccaagc

SEQ ID NO: 12800 - RNA, 18 nt, Artificial Sequence
  source: /note="Description of Artificial Sequence: Synthetic oligonucleotide"
  source: /note="RNA"
  modified_base (1)..(1): 5-methyl bicyclic nucleic acid
  modified_base (10)..(10): 5-methyl modified nucleotide
  modified_base (14)..(14): 5-methyl modified nucleotide
  modified_base (15)..(15): 5-methyl modified nucleotide
cgguaaguucuguccaag

SEQ ID NO: 12801 - RNA, 17 nt, Artificial Sequence
  source: /note="Description of Artificial Sequence: Synthetic oligonucleotide"
  source: /note="RNA"
  modified_base (1)..(1): 5-methyl bicyclic nucleic acid
  modified_base (10)..(10): 5-methyl modified nucleotide
  modified_base (14)..(14): 5-methyl modified nucleotide
  modified_base (15)..(15): 5-methyl modified nucleotide
cgguaaguucuguccaa

SEQ ID NO: 12802 - RNA, 16 nt, Artificial Sequence
  source: /note="Description of Artificial Sequence: Synthetic oligonucleotide"
  source: /note="RNA"
  modified_base (1)..(1): 5-methyl bicyclic nucleic acid
  modified_base (10)..(10): 5-methyl modified nucleotide
  modified_base (14)..(14): 5-methyl modified nucleotide
  modified_base (15)..(15): 5-methyl modified nucleotide
cgguaaguucugucca

SEQ ID NO: 12803 - RNA, 15 nt, Artificial Sequence
  source: /note="Description of Artificial Sequence: Synthetic oligonucleotide"
  source: /note="RNA"
  modified_base (1)..(1): 5-methyl bicyclic nucleic acid
  modified_base (10)..(10): 5-methyl modified nucleotide
  modified_base (14)..(14): 5-methyl modified nucleotide
  modified_base (15)..(15): 5-methyl modified nucleotide
cgguaaguucugucc

SEQ ID NO: 12804 - RNA, 14 nt, Artificial Sequence
  source: /note="Description of Artificial Sequence: Synthetic oligonucleotide"
  source: /note="RNA"
  modified_base (1)..(1): 5-methyl bicyclic nucleic acid
  modified_base (10)..(10): 5-methyl modified nucleotide
  modified_base (14)..(14): 5-methyl modified nucleotide
cgguaaguucuguc

SEQ ID NO: 12805 - RNA, 13 nt, Artificial Sequence
  source: /note="Description of Artificial Sequence: Synthetic oligonucleotide"
  source: /note="RNA"
  modified_base (1)..(1): 5-methyl bicyclic nucleic acid
  modified_base (10)..(10): 5-methyl modified nucleotide
cgguaaguucugu

SEQ ID NO: 12806 - RNA, 12 nt, Artificial Sequence
  source: /note="Description of Artificial Sequence: Synthetic oligonucleotide"
  source: /note="RNA"
  modified_base (1)..(1): 5-methyl bicyclic nucleic acid
  modified_base (10)..(10): 5-methyl modified nucleotide
cgguaaguucug

SEQ ID NO: 12807 - RNA, 11 nt, Artificial Sequence
  source: /note="Description of Artificial Sequence: Synthetic oligonucleotide"
  source: /note="RNA"
  modified_base (1)..(1): 5-methyl bicyclic nucleic acid
  modified_base (10)..(10): 5-methyl modified nucleotide
cgguaaguucu

SEQ ID NO: 12808 - RNA, 10 nt, Artificial Sequence
  source: /note="Description of Artificial Sequence: Synthetic oligonucleotide"
  source: /note="RNA"
  modified_base (1)..(1): 5-methyl bicyclic nucleic acid
  modified_base (10)..(10): 5-methyl modified nucleotide
cgguaaguuc

SEQ ID NO: 12809 - RNA, 9 nt, Artificial Sequence
  source: /note="Description of Artificial Sequence: Synthetic oligonucleotide"
  source: /note="RNA"
  modified_base (1)..(1): 5-methyl bicyclic nucleic acid
cgguaaguu

SEQ ID NO: 12810 - RNA, 8 nt, Artificial Sequence
  source: /note="Description of Artificial Sequence: Synthetic oligonucleotide"
  source: /note="RNA"
  modified_base (1)..(1): 5-methyl bicyclic nucleic acid
cgguaagu

SEQ ID NO: 12811 - DNA, 20 bp, Artificial Sequence
  source: /note="Description of Artificial Sequence: Synthetic oligonucleotide"
  source: /note="Description of Combined DNA/RNA Molecule: Synthetic oligonucleotide"
  source: /note="DNA/RNA"
  modified_base (1)..(1): bicyclic nucleic acid (BNA)
  modified_base (2)..(2): 5-methyl modified nucleotide
  modified_base (11)..(11): 5-methyl modified nucleotide
  modified_base (15)..(15): 5-methyl modified nucleotide
  modified_base (16)..(16): 5-methyl modified nucleotide
  modified_base (20)..(20): 5-methyl modified nucleotide
tcgguaaguucuguccaagc

SEQ ID NO: 12812 - DNA, 19 bp, Artificial Sequence
  source: /note="Description of Artificial Sequence: Synthetic oligonucleotide"
  source: /note="Description of Combined DNA/RNA Molecule: Synthetic oligonucleotide"
  source: /note="DNA/RNA"
  modified_base (1)..(1): bicyclic nucleic acid (BNA)
  modified_base (2)..(2): 5-methyl modified nucleotide
  modified_base (11)..(11): 5-methyl modified nucleotide
  modified_base (15)..(15): 5-methyl modified nucleotide
  modified_base (16)..(16): 5-methyl modified nucleotide
tcgguaaguucuguccaag

SEQ ID NO: 12813 - DNA, 18 bp, Artificial Sequence
  source: /note="Description of Artificial Sequence: Synthetic oligonucleotide"
  source: /note="Description of Combined DNA/RNA Molecule: Synthetic oligonucleotide"
  source: /note="DNA/RNA"
  modified_base (1)..(1): bicyclic nucleic acid (BNA)
  modified_base (2)..(2): 5-methyl modified nucleotide
  modified_base (11)..(11): 5-methyl modified nucleotide
  modified_base (15)..(15): 5-methyl modified nucleotide
  modified_base (16)..(16): 5-methyl modified nucleotide
tcgguaaguucuguccaa

SEQ ID NO: 12814 - DNA, 17 bp, Artificial Sequence
  source: /note="Description of Artificial Sequence: Synthetic oligonucleotide"
  source: /note="Description of Combined DNA/RNA Molecule: Synthetic oligonucleotide"
  source: /note="DNA/RNA"
  modified_base (1)..(1): bicyclic nucleic acid (BNA)
  modified_base (2)..(2): 5-methyl modified nucleotide
  modified_base (11)..(11): 5-methyl modified nucleotide
  modified_base (15)..(15): 5-methyl modified nucleotide
  modified_base (16)..(16): 5-methyl modified nucleotide
tcgguaaguucugucca

SEQ ID NO: 12815 - DNA, 16 bp, Artificial Sequence
  source: /note="Description of Artificial Sequence: Synthetic oligonucleotide"
  source: /note="Description of Combined DNA/RNA Molecule: Synthetic oligonucleotide"
  source: /note="DNA/RNA"
  modified_base (1)..(1): bicyclic nucleic acid (BNA)
  modified_base (2)..(2): 5-methyl modified nucleotide
  modified_base (11)..(11): 5-methyl modified nucleotide
  modified_base (15)..(15): 5-methyl modified nucleotide
  modified_base (16)..(16): 5-methyl modified nucleotide
tcgguaaguucugucc

SEQ ID NO: 12816 - DNA, 15 bp, Artificial Sequence
  source: /note="Description of Artificial Sequence: Synthetic oligonucleotide"
  source: /note="Description of Combined DNA/RNA Molecule: Synthetic oligonucleotide"
  source: /note="DNA/RNA"
  modified_base (1)..(1): bicyclic nucleic acid (BNA)
  modified_base (2)..(2): 5-methyl modified nucleotide
  modified_base (11)..(11): 5-methyl modified nucleotide
  modified_base (15)..(15): 5-methyl modified nucleotide
tcgguaaguucuguc

SEQ ID NO: 12817 - DNA, 14 bp, Artificial Sequence
  source: /note="Description of Artificial Sequence: Synthetic oligonucleotide"
  source: /note="Description of Combined DNA/RNA Molecule: Synthetic oligonucleotide"
  source: /note="DNA/RNA"
  modified_base (1)..(1): bicyclic nucleic acid (BNA)
  modified_base (2)..(2): 5-methyl modified nucleotide
  modified_base (11)..(11): 5-methyl modified nucleotide
tcgguaaguucugu

SEQ ID NO: 12818 - DNA, 13 bp, Artificial Sequence
  source: /note="Description of Artificial Sequence: Synthetic oligonucleotide"
  source: /note="Description of Combined DNA/RNA Molecule: Synthetic oligonucleotide"
  source: /note="DNA/RNA"
  modified_base (1)..(1): bicyclic nucleic acid (BNA)
  modified_base (2)..(2): 5-methyl modified nucleotide
  modified_base (11)..(11): 5-methyl modified nucleotide
tcgguaaguucug

SEQ ID NO: 12819 - DNA, 12 bp, Artificial Sequence
  source: /note="Description of Artificial Sequence: Synthetic oligonucleotide"
  source: /note="Description of Combined DNA/RNA Molecule: Synthetic oligonucleotide"
  source: /note="DNA/RNA"
  modified_base (1)..(1): bicyclic nucleic acid (BNA)
  modified_base (2)..(2): 5-methyl modified nucleotide
  modified_base (11)..(11): 5-methyl modified nucleotide
tcgguaaguucu

SEQ ID NO: 12820 - DNA, 11 bp, Artificial Sequence
  source: /note="Description of Artificial Sequence: Synthetic oligonucleotide"
  source: /note="Description of Combined DNA/RNA Molecule: Synthetic oligonucleotide"
  source: /note="DNA/RNA"
  modified_base (1)..(1): bicyclic nucleic acid (BNA)
  modified_base (2)..(2): 5-methyl modified nucleotide
  modified_base (11)..(11): 5-methyl modified nucleotide
tcgguaaguuc

SEQ ID NO: 12821 - DNA, 10 bp, Artificial Sequence
  source: /note="Description of Artificial Sequence: Synthetic oligonucleotide"
  source: /note="Description of Combined DNA/RNA Molecule: Synthetic oligonucleotide"
  source: /note="DNA/RNA"
  modified_base (1)..(1): bicyclic nucleic acid (BNA)
  modified_base (2)..(2): 5-methyl modified nucleotide
tcgguaaguu

SEQ ID NO: 12822 - DNA, 9 bp, Artificial Sequence
  source: /note="Description of Artificial Sequence: Synthetic oligonucleotide"
  source: /note="Description of Combined DNA/RNA Molecule: Synthetic oligonucleotide"
  source: /note="DNA/RNA"
  modified_base (1)..(1): bicyclic nucleic acid (BNA)
  modified_base (2)..(2): 5-methyl modified nucleotide
tcgguaagu

SEQ ID NO: 12823 - RNA, 20 nt, Artificial Sequence
  source: /note="Description of Artificial Sequence: Synthetic oligonucleotide"
  source: /note="RNA"
  modified_base (1)..(1): bicyclic nucleic acid (BNA)
  modified_base (3)..(3): 5-methyl modified nucleotide
  modified_base (12)..(12): 5-methyl modified nucleotide
  modified_base (16)..(16): 5-methyl modified nucleotide
  modified_base (17)..(17): 5-methyl modified nucleotide
gucgguaaguucuguccaag

SEQ ID NO: 12824 - RNA, 19 nt, Artificial Sequence
  source: /note="Description of Artificial Sequence: Synthetic oligonucleotide"
  source: /note="RNA"
  modified_base (1)..(1): bicyclic nucleic acid (BNA)
  modified_base (3)..(3): 5-methyl modified nucleotide
  modified_base (12)..(12): 5-methyl modified nucleotide
  modified_base (16)..(16): 5-methyl modified nucleotide
  modified_base (17)..(17): 5-methyl modified nucleotide
gucgguaaguucuguccaa

SEQ ID NO: 12825 - RNA, 18 nt, Artificial Sequence
  source: /note="Description of Artificial Sequence: Synthetic oligonucleotide"
  source: /note="RNA"
  modified_base (1)..(1): bicyclic nucleic acid (BNA)
  modified_base (3)..(3): 5-methyl modified nucleotide
  modified_base (12)..(12): 5-methyl modified nucleotide
  modified_base (16)..(16): 5-methyl modified nucleotide
  modified_base (17)..(17): 5-methyl modified nucleotide
gucgguaaguucugucca

SEQ ID NO: 12826 - RNA, 17 nt, Artificial Sequence
  source: /note="Description of Artificial Sequence: Synthetic oligonucleotide"
  source: /note="RNA"
  modified_base (1)..(1): bicyclic nucleic acid (BNA)
  modified_base (3)..(3): 5-methyl modified nucleotide
  modified_base (12)..(12): 5-methyl modified nucleotide
  modified_base (16)..(16): 5-methyl modified nucleotide
  modified_base (17)..(17): 5-methyl modified nucleotide
gucgguaaguucugucc

SEQ ID NO: 12827 - RNA, 16 nt, Artificial Sequence
  source: /note="Description of Artificial Sequence: Synthetic oligonucleotide"
  source: /note="RNA"
  modified_base (1)..(1): bicyclic nucleic acid (BNA)
  modified_base (3)..(3): 5-methyl modified nucleotide
  modified_base (12)..(12): 5-methyl modified nucleotide
  modified_base (16)..(16): 5-methyl modified nucleotide
gucgguaaguucuguc

SEQ ID NO: 12828 - RNA, 15 nt, Artificial Sequence
  source: /note="Description of Artificial Sequence: Synthetic oligonucleotide"
  source: /note="RNA"
  modified_base (1)..(1): bicyclic nucleic acid (BNA)
  modified_base (3)..(3): 5-methyl modified nucleotide
  modified_base (12)..(12): 5-methyl modified nucleotide
gucgguaaguucugu

SEQ ID NO: 12829 - RNA, 14 nt, Artificial Sequence
  source: /note="Description of Artificial Sequence: Synthetic oligonucleotide"
  source: /note="RNA"
  modified_base (1)..(1): bicyclic nucleic acid (BNA)
  modified_base (3)..(3): 5-methyl modified nucleotide
  modified_base (12)..(12): 5-methyl modified nucleotide
gucgguaaguucug

SEQ ID NO: 12830 - RNA, 13 nt, Artificial Sequence
  source: /note="Description of Artificial Sequence: Synthetic oligonucleotide"
  source: /note="RNA"
  modified_base (1)..(1): bicyclic nucleic acid (BNA)
  modified_base (3)..(3): 5-methyl modified nucleotide
  modified_base (12)..(12): 5-methyl modified nucleotide
gucgguaaguucu

SEQ ID NO: 12831 - RNA, 12 nt, Artificial Sequence
  source: /note="Description of Artificial Sequence: Synthetic oligonucleotide"
  source: /note="RNA"
  modified_base (1)..(1): bicyclic nucleic acid (BNA)
  modified_base (3)..(3): 5-methyl modified nucleotide
  modified_base (12)..(12): 5-methyl modified nucleotide
gucgguaaguuc

SEQ ID NO: 12832 - RNA, 11 nt, Artificial Sequence
  source: /note="Description of Artificial Sequence: Synthetic oligonucleotide"
  source: /note="RNA"
  modified_base (1)..(1): bicyclic nucleic acid (BNA)
  modified_base (3)..(3): 5-methyl modified nucleotide
gucgguaaguu

SEQ ID NO: 12833 - RNA, 10 nt, Artificial Sequence
  source: /note="Description of Artificial Sequence: Synthetic oligonucleotide"
  source: /note="RNA"
  modified_base (1)..(1): bicyclic nucleic acid (BNA)
  modified_base (3)..(3): 5-methyl modified nucleotide
gucgguaagu

SEQ ID NO: 12834 - RNA, 20 nt, Artificial Sequence
  source: /note="Description of Artificial Sequence: Synthetic oligonucleotide"
  source: /note="RNA"
  modified_base (1)..(1): bicyclic nucleic acid (BNA)
  modified_base (4)..(4): 5-methyl modified nucleotide
  modified_base (13)..(13): 5-methyl modified nucleotide
  modified_base (17)..(17): 5-methyl modified nucleotide
  modified_base (18)..(18): 5-methyl modified nucleotide
agucgguaaguucuguccaa

SEQ ID NO: 12835 - RNA, 19 nt, Artificial Sequence
  source: /note="Description of Artificial Sequence: Synthetic oligonucleotide"
  source: /note="RNA"
  modified_base (1)..(1): bicyclic nucleic acid (BNA)
  modified_base (4)..(4): 5-methyl modified nucleotide
  modified_base (13)..(13): 5-methyl modified nucleotide
  modified_base (17)..(17): 5-methyl modified nucleotide
  modified_base (18)..(18): 5-methyl modified nucleotide
agucgguaaguucugucca

SEQ ID NO: 12836 - RNA, 17 nt, Artificial Sequence
  source: /note="Description of Artificial Sequence: Synthetic oligonucleotide"
  source: /note="RNA"
  modified_base (1)..(1): bicyclic nucleic acid (BNA)
  modified_base (4)..(4): 5-methyl modified nucleotide
  modified_base (13)..(13): 5-methyl modified nucleotide
  modified_base (17)..(17): 5-methyl modified nucleotide
agucgguaaguucuguc

SEQ ID NO: 12837 - RNA, 16 nt, Artificial Sequence
  source: /note="Description of Artificial Sequence: Synthetic oligonucleotide"
  source: /note="RNA"
  modified_base (1)..(1): bicyclic nucleic acid (BNA)
  modified_base (4)..(4): 5-methyl modified nucleotide
  modified_base (13)..(13): 5-methyl modified nucleotide
agucgguaaguucugu

SEQ ID NO: 12838 - RNA, 15 nt, Artificial Sequence
  source: /note="Description of Artificial Sequence: Synthetic oligonucleotide"
  source: /note="RNA"
  modified_base (1)..(1): bicyclic nucleic acid (BNA)
  modified_base (4)..(4): 5-methyl modified nucleotide
  modified_base (13)..(13): 5-methyl modified nucleotide
agucgguaaguucug

SEQ ID NO: 12839 - RNA, 14 nt, Artificial Sequence
  source: /note="Description of Artificial Sequence: Synthetic oligonucleotide"
  source: /note="RNA"
  modified_base (1)..(1): bicyclic nucleic acid (BNA)
  modified_base (4)..(4): 5-methyl modified nucleotide
  modified_base (13)..(13): 5-methyl modified nucleotide
agucgguaaguucu

SEQ ID NO: 12840 - RNA, 13 nt, Artificial Sequence
  source: /note="Description of Artificial Sequence: Synthetic oligonucleotide"
  source: /note="RNA"
  modified_base (1)..(1): bicyclic nucleic acid (BNA)
  modified_base (4)..(4): 5-methyl modified nucleotide
  modified_base (13)..(13): 5-methyl modified nucleotide
agucgguaaguuc

SEQ ID NO: 12841 - RNA, 12 nt, Artificial Sequence
  source: /note="Description of Artificial Sequence: Synthetic oligonucleotide"
  source: /note="RNA"
  modified_base (1)..(1): bicyclic nucleic acid (BNA)
  modified_base (4)..(4): 5-methyl modified nucleotide
agucgguaaguu

SEQ ID NO: 12842 - RNA, 11 nt, Artificial Sequence
  source: /note="Description of Artificial Sequence: Synthetic oligonucleotide"
  source: /note="RNA"
  modified_base (1)..(1): bicyclic nucleic acid (BNA)
  modified_base (4)..(4): 5-methyl modified nucleotide
agucgguaagu

SEQ ID NO: 12843 - RNA, 20 nt, Artificial Sequence
  source: /note="Description of Artificial Sequence: Synthetic oligonucleotide"
  source: /note="RNA"
  modified_base (1)..(1): 5-methyl bicyclic nucleic acid
  modified_base (5)..(5): 5-methyl modified nucleotide
  modified_base (14)..(14): 5-methyl modified nucleotide
  modified_base (18)..(18): 5-methyl modified nucleotide
  modified_base (19)..(19): 5-methyl modified nucleotide
cagucgguaaguucugucca

SEQ ID NO: 12844 - RNA, 19 nt, Artificial Sequence
  source: /note="Description of Artificial Sequence: Synthetic oligonucleotide"
  source: /note="RNA"
  modified_base (1)..(1): 5-methyl bicyclic nucleic acid
  modified_base (5)..(5): 5-methyl modified nucleotide
  modified_base (14)..(14): 5-methyl modified nucleotide
  modified_base (18)..(18): 5-methyl modified nucleotide
  modified_base (19)..(19): 5-methyl modified nucleotide
cagucgguaaguucugucc

SEQ ID NO: 12845 - RNA, 18 nt, Artificial Sequence
  source: /note="Description of Artificial Sequence: Synthetic oligonucleotide"
  source: /note="RNA"
  modified_base (1)..(1): 5-methyl bicyclic nucleic acid
  modified_base (5)..(5): 5-methyl modified nucleotide
  modified_base (14)..(14): 5-methyl modified nucleotide
  modified_base (18)..(18): 5-methyl modified nucleotide
cagucgguaaguucuguc

SEQ ID NO: 12846 - RNA, 17 nt, Artificial Sequence
  source: /note="Description of Artificial Sequence: Synthetic oligonucleotide"
  source: /note="RNA"
  modified_base (1)..(1): 5-methyl bicyclic nucleic acid
  modified_base (5)..(5): 5-methyl modified nucleotide
  modified_base (14)..(14): 5-methyl modified nucleotide
cagucgguaaguucugu

SEQ ID NO: 12847 - RNA, 16 nt, Artificial Sequence
  source: /note="Description of Artificial Sequence: Synthetic oligonucleotide"
  source: /note="RNA"
  modified_base (1)..(1): 5-methyl bicyclic nucleic acid
  modified_base (5)..(5): 5-methyl modified nucleotide
  modified_base (14)..(14): 5-methyl modified nucleotide
cagucgguaaguucug

SEQ ID NO: 12848 - RNA, 15 nt, Artificial Sequence
  source: /note="Description of Artificial Sequence: Synthetic oligonucleotide"
  source: /note="RNA"
  modified_base (1)..(1): 5-methyl bicyclic nucleic acid
  modified_base (5)..(5): 5-methyl modified nucleotide
  modified_base (14)..(14): 5-methyl modified nucleotide
cagucgguaaguucu

SEQ ID NO: 12849 - RNA, 14 nt, Artificial Sequence
  source: /note="Description of Artificial Sequence: Synthetic oligonucleotide"
  source: /note="RNA"
  modified_base (1)..(1): 5-methyl bicyclic nucleic acid
  modified_base (5)..(5): 5-methyl modified nucleotide
  modified_base (14)..(14): 5-methyl modified nucleotide
cagucgguaaguuc

SEQ ID NO: 12850 - RNA, 13 nt, Artificial Sequence
  source: /note="Description of Artificial Sequence: Synthetic oligonucleotide"
  source: /note="RNA"
  modified_base (1)..(1): 5-methyl bicyclic nucleic acid
  modified_base (5)..(5): 5-methyl modified nucleotide
cagucgguaaguu

SEQ ID NO: 12851 - RNA, 12 nt, Artificial Sequence
  source: /note="Description of Artificial Sequence: Synthetic oligonucleotide"
  source: /note="RNA"
  modified_base (1)..(1): 5-methyl bicyclic nucleic acid
  modified_base (5)..(5): 5-methyl modified nucleotide
cagucgguaagu

SEQ ID NO: 12852 - RNA, 20 nt, Artificial Sequence
  source: /note="Description of Artificial Sequence: Synthetic oligonucleotide"
  source: /note="RNA"
  modified_base (1)..(1): 5-methyl bicyclic nucleic acid
  modified_base (2)..(2): 5-methyl modified nucleotide
  modified_base (6)..(6): 5-methyl modified nucleotide
  modified_base (15)..(15): 5-methyl modified nucleotide
  modified_base (19)..(19): 5-methyl modified nucleotide
  modified_base (20)..(20): 5-methyl modified nucleotide
ccagucgguaaguucugucc

SEQ ID NO: 12853 - RNA, 19 nt, Artificial Sequence
  source: /note="Description of Artificial Sequence: Synthetic oligonucleotide"
  source: /note="RNA"
  modified_base (1)..(1): 5-methyl bicyclic nucleic acid
  modified_base (2)..(2): 5-methyl modified nucleotide
  modified_base (6)..(6): 5-methyl modified nucleotide
  modified_base (15)..(15): 5-methyl modified nucleotide
  modified_base (19)..(19): 5-methyl modified nucleotide
ccagucgguaaguucuguc

SEQ ID NO: 12854 - RNA, 18 nt, Artificial Sequence
  source: /note="Description of Artificial Sequence: Synthetic oligonucleotide"
  source: /note="RNA"
  modified_base (1)..(1): 5-methyl bicyclic nucleic acid
  modified_base (2)..(2): 5-methyl modified nucleotide
  modified_base (6)..(6): 5-methyl modified nucleotide
  modified_base (15)..(15): 5-methyl modified nucleotide
ccagucgguaaguucugu

SEQ ID NO: 12855 - RNA, 17 nt, Artificial Sequence
  source: /note="Description of Artificial Sequence: Synthetic oligonucleotide"
  source: /note="RNA"
  modified_base (1)..(1): 5-methyl bicyclic nucleic acid
  modified_base (2)..(2): 5-methyl modified nucleotide
  modified_base (6)..(6): 5-methyl modified nucleotide
  modified_base (15)..(15): 5-methyl modified nucleotide
ccagucgguaaguucug

SEQ ID NO: 12856 - RNA, 16 nt, Artificial Sequence
  source: /note="Description of Artificial Sequence: Synthetic oligonucleotide"
  source: /note="RNA"
  modified_base (1)..(1): 5-methyl bicyclic nucleic acid
  modified_base (2)..(2): 5-methyl modified nucleotide
  modified_base (6)..(6): 5-methyl modified nucleotide
  modified_base (15)..(15): 5-methyl modified nucleotide
ccagucgguaaguucu

SEQ ID NO: 12857 - RNA, 15 nt, Artificial Sequence
  source: /note="Description of Artificial Sequence: Synthetic oligonucleotide"
  source: /note="RNA"
  modified_base (1)..(1): 5-methyl bicyclic nucleic acid
  modified_base (2)..(2): 5-methyl modified nucleotide
  modified_base (6)..(6): 5-methyl modified nucleotide
  modified_base (15)..(15): 5-methyl modified nucleotide
ccagucgguaaguuc

SEQ ID NO: 12858 - RNA, 14 nt, Artificial Sequence
  source: /note="Description of Artificial Sequence: Synthetic oligonucleotide"
  source: /note="RNA"
  modified_base (1)..(1): 5-methyl bicyclic nucleic acid
  modified_base (2)..(2): 5-methyl modified nucleotide
  modified_base (6)..(6): 5-methyl modified nucleotide
ccagucgguaaguu

SEQ ID NO: 12859 - RNA, 13 nt, Artificial Sequence
  source: /note="Description of Artificial Sequence: Synthetic oligonucleotide"
  source: /note="RNA"
  modified_base (1)..(1): 5-methyl bicyclic nucleic acid
  modified_base (2)..(2): 5-methyl modified nucleotide
  modified_base (6)..(6): 5-methyl modified nucleotide
ccagucgguaagu

SEQ ID NO: 12860 - RNA, 20 nt, Artificial Sequence
  source: /note="Description of Artificial Sequence: Synthetic oligonucleotide"
  source: /note="RNA"
  modified_base (1)..(1): bicyclic nucleic acid (BNA)
  modified_base (2)..(2): 5-methyl modified nucleotide
  modified_base (3)..(3): 5-methyl modified nucleotide
  modified_base (7)..(7): 5-methyl modified nucleotide
  modified_base (16)..(16): 5-methyl modified nucleotide
  modified_base (20)..(20): 5-methyl modified nucleotide
gccagucgguaaguucuguc

SEQ ID NO: 12861 - RNA, 19 nt, Artificial Sequence
  source: /note="Description of Artificial Sequence: Synthetic oligonucleotide"
  source: /note="RNA"
  modified_base (1)..(1): bicyclic nucleic acid (BNA)
  modified_base (2)..(2): 5-methyl modified nucleotide
  modified_base (3)..(3): 5-methyl modified nucleotide
  modified_base (7)..(7): 5-methyl modified nucleotide
  modified_base (16)..(16): 5-methyl modified nucleotide
gccagucgguaaguucugu

SEQ ID NO: 12862 - RNA, 18 nt, Artificial Sequence
  source: /note="Description of Artificial Sequence: Synthetic oligonucleotide"
  source: /note="RNA"
  modified_base (1)..(1): bicyclic nucleic acid (BNA)
  modified_base (2)..(2): 5-methyl modified nucleotide
  modified_base (3)..(3): 5-methyl modified nucleotide
  modified_base (7)..(7): 5-methyl modified nucleotide
  modified_base (16)..(16): 5-methyl modified nucleotide
gccagucgguaaguucug

SEQ ID NO: 12863 - RNA, 17 nt, Artificial Sequence
  source: /note="Description of Artificial Sequence: Synthetic oligonucleotide"
  source: /note="RNA"
  modified_base (1)..(1): bicyclic nucleic acid (BNA)
  modified_base (2)..(2): 5-methyl modified nucleotide
  modified_base (3)..(3): 5-methyl modified nucleotide
  modified_base (7)..(7): 5-methyl modified nucleotide
  modified_base (16)..(16): 5-methyl modified nucleotide
gccagucgguaaguucu

SEQ ID NO: 12864 - RNA, 16 nt, Artificial Sequence
  source: /note="Description of Artificial Sequence: Synthetic oligonucleotide"
  source: /note="RNA"
  modified_base (1)..(1): bicyclic nucleic acid (BNA)
  modified_base (2)..(2): 5-methyl modified nucleotide
  modified_base (3)..(3): 5-methyl modified nucleotide
  modified_base (7)..(7): 5-methyl modified nucleotide
  modified_base (16)..(16): 5-methyl modified nucleotide
gccagucgguaaguuc

SEQ ID NO: 12865 - RNA, 15 nt, Artificial Sequence
  source: /note="Description of Artificial Sequence: Synthetic oligonucleotide"
  source: /note="RNA"
  modified_base (1)..(1): bicyclic nucleic acid (BNA)
  modified_base (2)..(2): 5-methyl modified nucleotide
  modified_base (3)..(3): 5-methyl modified nucleotide
  modified_base (7)..(7): 5-methyl modified nucleotide
gccagucgguaaguu

SEQ ID NO: 12866 - RNA, 14 nt, Artificial Sequence
  source: /note="Description of Artificial Sequence: Synthetic oligonucleotide"
  source: /note="RNA"
  modified_base (1)..(1): bicyclic nucleic acid (BNA)
  modified_base (2)..(2): 5-methyl modified nucleotide
  modified_base (3)..(3): 5-methyl modified nucleotide
  modified_base (7)..(7): 5-methyl modified nucleotide
gccagucgguaagu

SEQ ID NO: 12867 - DNA, 20 bp, Artificial Sequence
  source: /note="Description of Artificial Sequence: Synthetic oligonucleotide"
  source: /note="Description of Combined DNA/RNA Molecule: Synthetic oligonucleotide"
  source: /note="DNA/RNA"
  modified_base (1)..(1): bicyclic nucleic acid (BNA)
  modified_base (2)..(2): 5-methyl modified nucleotide
  modified_base (14)..(14): 5-methyl modified nucleotide
  modified_base (19)..(19): 5-methyl modified nucleotide
tcaaggaagauggcauuucu

SEQ ID NO: 12868 - DNA, 22 bp, Artificial Sequence
  source: /note="Description of Artificial Sequence: Synthetic oligonucleotide"
  source: /note="Description of Combined DNA/RNA Molecule: Synthetic oligonucleotide"
  source: /note="DNA/RNA"
  modified_base (1)..(1): bicyclic nucleic acid (BNA)
  modified_base (2)..(2): 5-methyl modified nucleotide
  modified_base (14)..(14): 5-methyl modified nucleotide
  modified_base (19)..(19): 5-methyl modified nucleotide
tcaaggaagauggcauuucuag

SEQ ID NO: 12869 - DNA, 16 bp, Artificial Sequence
  source: /note="Description of Artificial Sequence: Synthetic oligonucleotide"
  source: /note="Description of Combined DNA/RNA Molecule: Synthetic oligonucleotide"
  source: /note="DNA/RNA"
  modified_base (1)..(1): bicyclic nucleic acid (BNA)
  modified_base (2)..(2): 5-methyl modified nucleotide
  modified_base (14)..(14): 5-methyl modified nucleotide
tcaaggaagauggcau

SEQ ID NO: 12870 - RNA, 15 nt, Artificial Sequence
  source: /note="Description of Artificial Sequence: Synthetic oligonucleotide"
  source: /note="RNA"
  modified_base (1)..(1): bicyclic nucleic acid (BNA)
  modified_base (9)..(9): 5-methyl modified nucleotide
  modified_base (14)..(14): 5-methyl modified nucleotide
gaagauggcauuucu

SEQ ID NO: 12871 - DNA, 21 bp, Artificial Sequence
  source: /note="Description of Artificial Sequence: Synthetic oligonucleotide"
  source: /note="Description of Combined DNA/RNA Molecule: Synthetic oligonucleotide"
  source: /note="DNA/RNA"
  modified_base (1)..(1): bicyclic nucleic acid (BNA)
  modified_base (2)..(2): 5-methyl modified nucleotide
  modified_base (14)..(14): 5-methyl modified nucleotide
  modified_base (19)..(19): 5-methyl modified nucleotide
tcaaggaagauggcauuucua

SEQ ID NO: 12872 - DNA, 19 bp, Artificial Sequence
  source: /note="Description of Artificial Sequence: Synthetic oligonucleotide"
  source: /note="Description of Combined DNA/RNA Molecule: Synthetic oligonucleotide"
  source: /note="DNA/RNA"
  modified_base (1)..(1): bicyclic nucleic acid (BNA)
  modified_base (2)..(2): 5-methyl modified nucleotide
  modified_base (14)..(14): 5-methyl modified nucleotide
  modified_base (19)..(19): 5-methyl modified nucleotide
tcaaggaagauggcauuuc

SEQ ID NO: 12873 - DNA, 18 bp, Artificial Sequence
  source: /note="Description of Artificial Sequence: Synthetic oligonucleotide"
  source: /note="Description of Combined DNA/RNA Molecule: Synthetic oligonucleotide"
  source: /note="DNA/RNA"
  modified_base (1)..(1): bicyclic nucleic acid (BNA)
  modified_base (2)..(2): 5-methyl modified nucleotide
  modified_base (14)..(14): 5-methyl modified nucleotide
tcaaggaagauggcauuu

SEQ ID NO: 12874 - DNA, 17 bp, Artificial Sequence
  source: /note="Description of Artificial Sequence: Synthetic oligonucleotide"
  source: /note="Description of Combined DNA/RNA Molecule: Synthetic oligonucleotide"
  source: /note="DNA/RNA"
  modified_base (1)..(1): bicyclic nucleic acid (BNA)
  modified_base (2)..(2): 5-methyl modified nucleotide
  modified_base (14)..(14): 5-methyl modified nucleotide
tcaaggaagauggcauu

SEQ ID NO: 12875 - DNA, 15 bp, Artificial Sequence
  source: /note="Description of Artificial Sequence: Synthetic oligonucleotide"
  source: /note="Description of Combined DNA/RNA Molecule: Synthetic oligonucleotide"
  source: /note="DNA/RNA"
  modified_base (1)..(1): bicyclic nucleic acid (BNA)
  modified_base (2)..(2): 5-methyl modified nucleotide
  modified_base (14)..(14): 5-methyl modified nucleotide
tcaaggaagauggca

SEQ ID NO: 12876 - DNA, 14 bp, Artificial Sequence
  source: /note="Description of Artificial Sequence: Synthetic oligonucleotide"
  source: /note="Description of Combined DNA/RNA Molecule: Synthetic oligonucleotide"
  source: /note="DNA/RNA"
  modified_base (1)..(1): bicyclic nucleic acid (BNA)
  modified_base (2)..(2): 5-methyl modified nucleotide
  modified_base (14)..(14): 5-methyl modified nucleotide
tcaaggaagauggc

SEQ ID NO: 12877 - DNA, 13 bp, Artificial Sequence
  source: /note="Description of Artificial Sequence: Synthetic oligonucleotide"
  source: /note="Description of Combined DNA/RNA Molecule: Synthetic oligonucleotide"
  source: /note="DNA/RNA"
  modified_base (1)..(1): bicyclic nucleic acid (BNA)
  modified_base (2)..(2): 5-methyl modified nucleotide
tcaaggaagaugg

SEQ ID NO: 12878 - DNA, 12 bp, Artificial Sequence
  source: /note="Description of Artificial Sequence: Synthetic oligonucleotide"
  source: /note="Description of Combined DNA/RNA Molecule: Synthetic oligonucleotide"
  source: /note="DNA/RNA"
  modified_base (1)..(1): bicyclic nucleic acid (BNA)
  modified_base (2)..(2): 5-methyl modified nucleotide
tcaaggaagaug

SEQ ID NO: 12879 - DNA, 11 bp, Artificial Sequence
  source: /note="Description of Artificial Sequence: Synthetic oligonucleotide"
  source: /note="Description of Combined DNA/RNA Molecule: Synthetic oligonucleotide"
  source: /note="DNA/RNA"
  modified_base (1)..(1): bicyclic nucleic acid (BNA)
  modified_base (2)..(2): 5-methyl modified nucleotide
tcaaggaagau

SEQ ID NO: 12880 - DNA, 10 bp, Artificial Sequence
  source: /note="Description of Artificial Sequence: Synthetic oligonucleotide"
  source: /note="DNA/RNA"
  modified_base (1)..(1): bicyclic nucleic acid (BNA)
  modified_base (2)..(2): 5-methyl modified nucleotide
tcaaggaaga

SEQ ID NO: 12881 - DNA, 9 bp, Artificial Sequence
  source: /note="Description of Artificial Sequence: Synthetic oligonucleotide"
  source: /note="DNA/RNA"
  modified_base (1)..(1): bicyclic nucleic acid (BNA)
  modified_base (2)..(2): 5-methyl modified nucleotide
tcaaggaag

SEQ ID NO: 12882 - RNA, 21 nt, Artificial Sequence
  source: /note="Description of Artificial Sequence: Synthetic oligonucleotide"
  source: /note="RNA"
  modified_base (1)..(1): 5-methyl bicyclic nucleic acid
  modified_base (13)..(13): 5-methyl modified nucleotide
  modified_base (18)..(18): 5-methyl modified nucleotide
caaggaagauggcauuucuag

SEQ ID NO: 12883 - RNA, 20 nt, Artificial Sequence
  source: /note="Description of Artificial Sequence: Synthetic oligonucleotide"
  source: /note="RNA"
  modified_base (1)..(1): 5-methyl bicyclic nucleic acid
  modified_base (13)..(13): 5-methyl modified nucleotide
  modified_base (18)..(18): 5-methyl modified nucleotide
caaggaagauggcauuucua

SEQ ID NO: 12884 - RNA, 19 nt, Artificial Sequence
  source: /note="Description of Artificial Sequence: Synthetic oligonucleotide"
  source: /note="RNA"
  modified_base (1)..(1): 5-methyl bicyclic nucleic acid
  modified_base (13)..(13): 5-methyl modified nucleotide
  modified_base (18)..(18): 5-methyl modified nucleotide
caaggaagauggcauuucu

SEQ ID NO: 12885 - RNA, 18 nt, Artificial Sequence
  source: /note="Description of Artificial Sequence: Synthetic oligonucleotide"
  source: /note="RNA"
  modified_base (1)..(1): 5-methyl bicyclic nucleic acid
  modified_base (13)..(13): 5-methyl modified nucleotide
  modified_base (18)..(18): 5-methyl modified nucleotide
caaggaagauggcauuuc

SEQ ID NO: 12886 - RNA, 17 nt, Artificial Sequence
  source: /note="Description of Artificial Sequence: Synthetic oligonucleotide"
  source: /note="RNA"
  modified_base (1)..(1): 5-methyl bicyclic nucleic acid
  modified_base (13)..(13): 5-methyl modified nucleotide
caaggaagauggcauuu

SEQ ID NO: 12887 - RNA, 16 nt, Artificial Sequence
  source: /note="Description of Artificial Sequence: Synthetic oligonucleotide"
  source: /note="RNA"
  modified_base (1)..(1): 5-methyl bicyclic nucleic acid
  modified_base (13)..(13): 5-methyl modified nucleotide
caaggaagauggcauu

SEQ ID NO: 12888 - RNA, 15 nt, Artificial Sequence
  source: /note="Description of Artificial Sequence: Synthetic oligonucleotide"
  source: /note="RNA"
  modified_base (1)..(1): 5-methyl bicyclic nucleic acid
  modified_base (13)..(13): 5-methyl modified nucleotide
caaggaagauggcau

SEQ ID NO: 12889 - RNA, 14 nt, Artificial Sequence
  source: /note="Description of Artificial Sequence: Synthetic oligonucleotide"
  source: /note="RNA"
  modified_base (1)..(1): 5-methyl bicyclic nucleic acid
  modified_base (13)..(13): 5-methyl modified nucleotide
caaggaagauggca

SEQ ID NO: 12890 - RNA, 13 nt, Artificial Sequence
  source: /note="Description of Artificial Sequence: Synthetic oligonucleotide"
  source: /note="RNA"
  modified_base (1)..(1): 5-methyl bicyclic nucleic acid
  modified_base (13)..(13): 5-methyl modified nucleotide
caaggaagauggc

SEQ ID NO: 12891 - RNA, 12 nt, Artificial Sequence
  source: /note="Description of Artificial Sequence: Synthetic oligonucleotide"
  source: /note="RNA"
  modified_base (1)..(1): 5-methyl bicyclic nucleic acid
caaggaagaugg

SEQ ID NO: 12892 - RNA, 11 nt, Artificial Sequence
  source: /note="Description of Artificial Sequence: Synthetic oligonucleotide"
  source: /note="RNA"
  modified_base (1)..(1): 5-methyl bicyclic nucleic acid
caaggaagaug

SEQ ID NO: 12893 - RNA, 10 nt, Artificial Sequence
  source: /note="Description of Artificial Sequence: Synthetic oligonucleotide"
  source: /note="RNA"
  modified_base (1)..(1): 5-methyl bicyclic nucleic acid
caaggaagau

SEQ ID NO: 12894 - RNA, 9 nt, Artificial Sequence
  source: /note="Description of Artificial Sequence: Synthetic oligonucleotide"
  source: /note="RNA/Antisense Oligonucleotide"
  modified_base (1)..(1): 5-methyl bicyclic nucleic acid
caaggaaga

SEQ ID NO: 12895 - RNA, 8 nt, Artificial Sequence
  source: /note="Description of Artificial Sequence: Synthetic oligonucleotide"
  source: /note="RNA/Antisense Oligonucleotide"
  modified_base (1)..(1): 5-methyl bicyclic nucleic acid
caaggaag

SEQ ID NO: 12896 - RNA, 20 nt, Artificial Sequence
  source: /note="Description of Artificial Sequence: Synthetic oligonucleotide"
  source: /note="RNA"
  modified_base (1)..(1): bicyclic nucleic acid (BNA)
  modified_base (12)..(12): 5-methyl modified nucleotide
  modified_base (17)..(17): 5-methyl modified nucleotide
aaggaagauggcauuucuag

SEQ ID NO: 12897 - RNA, 19 nt, Artificial Sequence
  source: /note="Description of Artificial Sequence: Synthetic oligonucleotide"
  source: /note="RNA"
  modified_base (1)..(1): bicyclic nucleic acid (BNA)
  modified_base (12)..(12): 5-methyl modified nucleotide
  modified_base (17)..(17): 5-methyl modified nucleotide
aaggaagauggcauuucua

SEQ ID NO: 12898 - RNA, 18 nt, Artificial Sequence
  source: /note="Description of Artificial Sequence: Synthetic oligonucleotide"
  source: /note="RNA"
  modified_base (1)..(1): bicyclic nucleic acid (BNA)
  modified_base (12)..(12): 5-methyl modified nucleotide
  modified_base (17)..(17): 5-methyl modified nucleotide
aaggaagauggcauuucu

SEQ ID NO: 12899 - RNA, 17 nt, Artificial Sequence
  source: /note="Description of Artificial Sequence: Synthetic oligonucleotide"
  source: /note="RNA"
  modified_base (1)..(1): bicyclic nucleic acid (BNA)
  modified_base (12)..(12): 5-methyl modified nucleotide
  modified_base (17)..(17): 5-methyl modified nucleotide
aaggaagauggcauuuc

SEQ ID NO: 12900 - RNA, 16 nt, Artificial Sequence
  source: /note="Description of Artificial Sequence: Synthetic oligonucleotide"
  source: /note="RNA"
  modified_base (1)..(1): bicyclic nucleic acid (BNA)
  modified_base (12)..(12): 5-methyl modified nucleotide
aaggaagauggcauuu

SEQ ID NO: 12901 - RNA, 15 nt, Artificial Sequence
  source: /note="Description of Artificial Sequence: Synthetic oligonucleotide"
  source: /note="RNA"
  modified_base (1)..(1): bicyclic nucleic acid (BNA)
  modified_base (12)..(12): 5-methyl modified nucleotide
aaggaagauggcauu

SEQ ID NO: 12902 - RNA, 14 nt, Artificial Sequence
  source: /note="Description of Artificial Sequence: Synthetic oligonucleotide"
  source: /note="RNA"
  modified_base (1)..(1): bicyclic nucleic acid (BNA)
  modified_base (12)..(12): 5-methyl modified nucleotide
aaggaagauggcau

SEQ ID NO: 12903 - RNA, 13 nt, Artificial Sequence
  source: /note="Description of Artificial Sequence: Synthetic oligonucleotide"
  source: /note="RNA"
  modified_base (1)..(1): bicyclic nucleic acid (BNA)
  modified_base (12)..(12): 5-methyl modified nucleotide
aaggaagauggca

SEQ ID NO: 12904 - RNA, 12 nt, Artificial Sequence
  source: /note="Description of Artificial Sequence: Synthetic oligonucleotide"
  source: /note="RNA"
  modified_base (1)..(1): bicyclic nucleic acid (BNA)
  modified_base (12)..(12): 5-methyl modified nucleotide
aaggaagauggc

SEQ ID NO: 12905 - RNA, 11 nt, Artificial Sequence
  source: /note="Description of Artificial Sequence: Synthetic oligonucleotide"
  source: /note="RNA"
  modified_base (1)..(1): bicyclic nucleic acid (BNA)
aaggaagaugg

SEQ ID NO: 12906 - RNA, 10 nt, Artificial Sequence
  source: /note="Description of Artificial Sequence: Synthetic oligonucleotide"
  source: /note="RNA"
  modified_base (1)..(1): bicyclic nucleic acid (BNA)
aaggaagaug

SEQ ID NO: 12907 - RNA, 9 nt, Artificial Sequence
  source: /note="Description of Artificial Sequence: Synthetic oligonucleotide"
  source: /note="RNA"
  modified_base (1)..(1): bicyclic nucleic acid (BNA)
aaggaagau

SEQ ID NO: 12908 - RNA, 8 nt, Artificial Sequence
  source: /note="Description of Artificial Sequence: Synthetic oligonucleotide"
  source: /note="RNA/Antisense Oligonucleotide"
  modified_base (1)..(1): bicyclic nucleic acid (BNA)
aaggaaga

SEQ ID NO: 12909 - RNA, 19 nt, Artificial Sequence
  source: /note="Description of Artificial Sequence: Synthetic oligonucleotide"
  source: /note="RNA"
  modified_base (1)..(1): bicyclic nucleic acid (BNA)
  modified_base (11)..(11): 5-methyl modified nucleotide
  modified_base (16)..(16): 5-methyl modified nucleotide
aggaagauggcauuucuag

SEQ ID NO: 12910 - RNA, 18 nt, Artificial Sequence
  source: /note="Description of Artificial Sequence: Synthetic oligonucleotide"
  source: /note="RNA"
  modified_base (1)..(1): bicyclic nucleic acid (BNA)
  modified_base (11)..(11): 5-methyl modified nucleotide
  modified_base (16)..(16): 5-methyl modified nucleotide
aggaagauggcauuucua

SEQ ID NO: 12911 - RNA, 17 nt, Artificial Sequence
  source: /note="Description of Artificial Sequence: Synthetic oligonucleotide"
  source: /note="RNA"
  modified_base (1)..(1): bicyclic nucleic acid (BNA)
  modified_base (11)..(11): 5-methyl modified nucleotide
  modified_base (16)..(16): 5-methyl modified nucleotide
aggaagauggcauuucu

SEQ ID NO: 12912 - RNA, 16 nt, Artificial Sequence
  source: /note="Description of Artificial Sequence: Synthetic oligonucleotide"
  source: /note="RNA"
  modified_base (1)..(1): bicyclic nucleic acid (BNA)
  modified_base (11)..(11): 5-methyl modified nucleotide
  modified_base (16)..(16): 5-methyl modified nucleotide
aggaagauggcauuuc

SEQ ID NO: 12913 - RNA, 15 nt, Artificial Sequence
  source: /note="Description of Artificial Sequence: Synthetic oligonucleotide"
  source: /note="RNA"
  modified_base (1)..(1): bicyclic nucleic acid (BNA)
  modified_base (11)..(11): 5-methyl modified nucleotide
aggaagauggcauuu

SEQ ID NO: 12914 - RNA, 14 nt, Artificial Sequence
  source: /note="Description of Artificial Sequence: Synthetic oligonucleotide"
  source: /note="RNA"
  modified_base (1)..(1): bicyclic nucleic acid (BNA)
  modified_base (11)..(11): 5-methyl modified nucleotide
aggaagauggcauu

SEQ ID NO: 12915 - RNA, 13 nt, Artificial Sequence
  source: /note="Description of Artificial Sequence: Synthetic oligonucleotide"
  source: /note="RNA"
  modified_base (1)..(1): bicyclic nucleic acid (BNA)
  modified_base (11)..(11): 5-methyl modified nucleotide
aggaagauggcau

SEQ ID NO: 12916 - RNA, 12 nt, Artificial Sequence
  source: /note="Description of Artificial Sequence: Synthetic oligonucleotide"
  source: /note="RNA"
  modified_base (1)..(1): bicyclic nucleic acid (BNA)
  modified_base (11)..(11): 5-methyl modified nucleotide
aggaagauggca

SEQ ID NO: 12917 - RNA, 10 nt, Artificial Sequence
  source: /note="Description of Artificial Sequence: Synthetic oligonucleotide"
  source: /note="RNA"
  modified_base (1)..(1): bicyclic nucleic acid (BNA)
aggaagaugg

SEQ ID NO: 12918 - RNA, 9 nt, Artificial Sequence
  source: /note="Description of Artificial Sequence: Synthetic oligonucleotide"
  source: /note="RNA"
  modified_base (1)..(1): bicyclic nucleic acid (BNA)
aggaagaug

SEQ ID NO: 12919 - RNA, 8 nt, Artificial Sequence
  source: /note="Description of Artificial Sequence: Synthetic oligonucleotide"
  source: /note="RNA"
  modified_base (1)..(1): bicyclic nucleic acid (BNA)
aggaagau

SEQ ID NO: 12920 - RNA, 18 nt, Artificial Sequence
  source: /note="Description of Artificial Sequence: Synthetic oligonucleotide"
  source: /note="RNA"
  modified_base (1)..(1): bicyclic nucleic acid (BNA)
  modified_base (10)..(10): 5-methyl modified nucleotide
  modified_base (15)..(15): 5-methyl modified nucleotide
ggaagauggcauuucuag

SEQ ID NO: 12921 - RNA, 17 nt, Artificial Sequence
  source: /note="Description of Artificial Sequence: Synthetic oligonucleotide"
  source: /note="RNA"
  modified_base (1)..(1): bicyclic nucleic acid (BNA)
  modified_base (10)..(10): 5-methyl modified nucleotide
  modified_base (15)..(15): 5-methyl modified nucleotide
ggaagauggcauuucua

SEQ ID NO: 12922 - RNA, 16 nt, Artificial Sequence
  source: /note="Description of Artificial Sequence: Synthetic oligonucleotide"
  source: /note="RNA"
  modified_base (1)..(1): bicyclic nucleic acid (BNA)
  modified_base (10)..(10): 5-methyl modified nucleotide
  modified_base (15)..(15): 5-methyl modified nucleotide
ggaagauggcauuucu

SEQ ID NO: 12923 - RNA, 15 nt, Artificial Sequence
  source: /note="Description of Artificial Sequence: Synthetic oligonucleotide"
  source: /note="RNA"
  modified_base (1)..(1): bicyclic nucleic acid (BNA)
  modified_base (10)..(10): 5-methyl modified nucleotide
  modified_base (15)..(15): 5-methyl modified nucleotide
ggaagauggcauuuc

SEQ ID NO: 12924 - RNA, 14 nt, Artificial Sequence
  source: /note="Description of Artificial Sequence: Synthetic oligonucleotide"
  source: /note="RNA"
  modified_base (1)..(1): bicyclic nucleic acid (BNA)
  modified_base (10)..(10): 5-methyl modified nucleotide
ggaagauggcauuu

SEQ ID NO: 12925 - RNA, 13 nt, Artificial Sequence
  source: /note="Description of Artificial Sequence: Synthetic oligonucleotide"
  source: /note="RNA"
  modified_base (1)..(1): bicyclic nucleic acid (BNA)
  modified_base (10)..(10): 5-methyl modified nucleotide
ggaagauggcauu

SEQ ID NO: 12926 - RNA, 12 nt, Artificial Sequence
  source: /note="Description of Artificial Sequence: Synthetic oligonucleotide"
  source: /note="RNA"
  modified_base (1)..(1): bicyclic nucleic acid (BNA)
  modified_base (10)..(10): 5-methyl modified nucleotide
ggaagauggcau

SEQ ID NO: 12927 - RNA, 11 nt, Artificial Sequence
  source: /note="Description of Artificial Sequence: Synthetic oligonucleotide"
  source: /note="RNA"
  modified_base (1)..(1): bicyclic nucleic acid (BNA)
  modified_base (10)..(10): 5-methyl modified nucleotide
ggaagauggca

SEQ ID NO: 12928 - RNA, 10 nt, Artificial Sequence
  source: /note="Description of Artificial Sequence: Synthetic oligonucleotide"
  source: /note="RNA"
  modified_base (1)..(1): bicyclic nucleic acid (BNA)
  modified_base (10)..(10): 5-methyl modified nucleotide
ggaagauggc

SEQ ID NO: 12929 - RNA, 8 nt, Artificial Sequence
  source: /note="Description of Artificial Sequence: Synthetic oligonucleotide"
  source: /note="RNA"
  modified_base (1)..(1): bicyclic nucleic acid (BNA)
ggaagaug

SEQ ID NO: 12930 - RNA, 17 nt, Artificial Sequence
  source: /note="Description of Artificial Sequence: Synthetic oligonucleotide"
  source: /note="RNA"
  modified_base (1)..(1): bicyclic nucleic acid (BNA)
  modified_base (9)..(9): 5-methyl modified nucleotide
  modified_base (14)..(14): 5-methyl modified nucleotide
gaagauggcauuucuag

SEQ ID NO: 12931 - RNA, 16 nt, Artificial Sequence
  source: /note="Description of Artificial Sequence: Synthetic oligonucleotide"
  source: /note="RNA"
  modified_base (1)..(1): bicyclic nucleic acid (BNA)
  modified_base (9)..(9): 5-methyl modified nucleotide
  modified_base (14)..(14): 5-methyl modified nucleotide
gaagauggcauuucua

SEQ ID NO: 12932 - RNA, 14 nt, Artificial Sequence
  source: /note="Description of Artificial Sequence: Synthetic oligonucleotide"
  source: /note="RNA"
  modified_base (1)..(1): bicyclic nucleic acid (BNA)
  modified_base (9)..(9): 5-methyl modified nucleotide
  modified_base (14)..(14): 5-methyl modified nucleotide
gaagauggcauuuc

SEQ ID NO: 12933 - RNA, 13 nt, Artificial Sequence
  source: /note="Description of Artificial Sequence: Synthetic oligonucleotide"
  source: /note="RNA"
  modified_base (1)..(1): bicyclic nucleic acid (BNA)
  modified_base (9)..(9): 5-methyl modified nucleotide
gaagauggcauuu

SEQ ID NO: 12934 - RNA, 12 nt, Artificial Sequence
  source: /note="Description of Artificial Sequence: Synthetic oligonucleotide"
  source: /note="RNA"
  modified_base (1)..(1): bicyclic nucleic acid (BNA)
  modified_base (9)..(9): 5-methyl modified nucleotide
gaagauggcauu

SEQ ID NO: 12935 - RNA, 11 nt, Artificial Sequence
  source: /note="Description of Artificial Sequence: Synthetic oligonucleotide"
  source: /note="RNA"
  modified_base (1)..(1): bicyclic nucleic acid (BNA)
  modified_base (9)..(9): 5-methyl modified nucleotide
gaagauggcau

SEQ ID NO: 12936 - RNA, 10 nt, Artificial Sequence
  source: /note="Description of Artificial Sequence: Synthetic oligonucleotide"
  source: /note="RNA"
  modified_base (1)..(1): bicyclic nucleic acid (BNA)
  modified_base (9)..(9): 5-methyl modified nucleotide
gaagauggca

SEQ ID NO: 12937 - RNA, 9 nt, Artificial Sequence
  source: /note="Description of Artificial Sequence: Synthetic oligonucleotide"
  source: /note="RNA"
  modified_base (1)..(1): bicyclic nucleic acid (BNA)
  modified_base (9)..(9): 5-methyl modified nucleotide
gaagauggc

SEQ ID NO: 12938 - RNA, 8 nt, Artificial Sequence
  source: /note="Description of Artificial Sequence: Synthetic oligonucleotide"
  source: /note="RNA"
  modified_base (1)..(1): bicyclic nucleic acid (BNA)
gaagaugg

SEQ ID NO: 12939 - RNA, 16 nt, Artificial Sequence
  source: /note="Description of Artificial Sequence: Synthetic oligonucleotide"
  source: /note="RNA"
  modified_base (1)..(1): bicyclic nucleic acid (BNA)
  modified_base (8)..(8): 5-methyl modified nucleotide
  modified_base (13)..(13): 5-methyl modified nucleotide
aagauggcauuucuag

SEQ ID NO: 12940 - RNA, 15 nt, Artificial Sequence
  source: /note="Description of Artificial Sequence: Synthetic oligonucleotide"
  source: /note="RNA"
  modified_base (1)..(1): bicyclic nucleic acid (BNA)
  modified_base (8)..(8): 5-methyl modified nucleotide
  modified_base (13)..(13): 5-methyl modified nucleotide
aagauggcauuucua

SEQ ID NO: 12941 - RNA, 14 nt, Artificial Sequence
  source: /note="Description of Artificial Sequence: Synthetic oligonucleotide"
  source: /note="RNA"
  modified_base (1)..(1): bicyclic nucleic acid (BNA)
  modified_base (8)..(8): 5-methyl modified nucleotide
  modified_base (13)..(13): 5-methyl modified nucleotide
aagauggcauuucu

SEQ ID NO: 12942 - RNA, 13 nt, Artificial Sequence
  source: /note="Description of Artificial Sequence: Synthetic oligonucleotide"
  source: /note="RNA"
  modified_base (1)..(1): bicyclic nucleic acid (BNA)
  modified_base (8)..(8): 5-methyl modified nucleotide
  modified_base (13)..(13): 5-methyl modified nucleotide
aagauggcauuuc

SEQ ID NO: 12943 - RNA, 12 nt, Artificial Sequence
  source: /note="Description of Artificial Sequence: Synthetic oligonucleotide"
  source: /note="RNA"
  modified_base (1)..(1): bicyclic nucleic acid (BNA)
  modified_base (8)..(8): 5-methyl modified nucleotide
aagauggcauuu

SEQ ID NO: 12944 - RNA, 11 nt, Artificial Sequence
  source: /note="Description of Artificial Sequence: Synthetic oligonucleotide"
  source: /note="RNA"
  modified_base (1)..(1): bicyclic nucleic acid (BNA)
  modified_base (8)..(8): 5-methyl modified nucleotide
aagauggcauu

SEQ ID NO: 12945 - RNA, 10 nt, Artificial Sequence
  source: /note="Description of Artificial Sequence: Synthetic oligonucleotide"
  source: /note="RNA"
  modified_base (1)..(1): bicyclic nucleic acid (BNA)
  modified_base (8)..(8): 5-methyl modified nucleotide
aagauggcau

SEQ ID NO: 12946 - RNA, 9 nt, Artificial Sequence
  source: /note="Description of Artificial Sequence: Synthetic oligonucleotide"
  source: /note="RNA"
  modified_base (1)..(1): bicyclic nucleic acid (BNA)
  modified_base (8)..(8): 5-methyl modified nucleotide
aagauggca

SEQ ID NO: 12947 - RNA, 8 nt, Artificial Sequence
  source: /note="Description of Artificial Sequence: Synthetic oligonucleotide"
  source: /note="RNA"
  modified_base (1)..(1): bicyclic nucleic acid (BNA)
  modified_base (8)..(8): 5-methyl modified nucleotide
aagauggc

SEQ ID NO: 12948 - RNA, 15 nt, Artificial Sequence
  source: /note="Description of Artificial Sequence: Synthetic oligonucleotide"
  source: /note="RNA"
  modified_base (1)..(1): bicyclic nucleic acid (BNA)
  modified_base (7)..(7): 5-methyl modified nucleotide
  modified_base (12)..(12): 5-methyl modified nucleotide
agauggcauuucuag

SEQ ID NO: 12949 - RNA, 14 nt, Artificial Sequence
  source: /note="Description of Artificial Sequence: Synthetic oligonucleotide"
  source: /note="RNA"
  modified_base (1)..(1): bicyclic nucleic acid (BNA)
  modified_base (7)..(7): 5-methyl modified nucleotide
  modified_base (12)..(12): 5-methyl modified nucleotide
agauggcauuucua

SEQ ID NO: 12950 - RNA, 13 nt, Artificial Sequence
  source: /note="Description of Artificial Sequence: Synthetic oligonucleotide"
  source: /note="RNA"
  modified_base (1)..(1): bicyclic nucleic acid (BNA)
  modified_base (7)..(7): 5-methyl modified nucleotide
  modified_base (12)..(12): 5-methyl modified nucleotide
agauggcauuucu

SEQ ID NO: 12951 - RNA, 12 nt, Artificial Sequence
  source: /note="Description of Artificial Sequence: Synthetic oligonucleotide"
  source: /note="RNA"
  modified_base (1)..(1): bicyclic nucleic acid (BNA)
  modified_base (7)..(7): 5-methyl modified nucleotide
  modified_base (12)..(12): 5-methyl modified nucleotide
agauggcauuuc

SEQ ID NO: 12952 - RNA, 11 nt, Artificial Sequence
  source: /note="Description of Artificial Sequence: Synthetic oligonucleotide"
  source: /note="RNA"
  modified_base (1)..(1): bicyclic nucleic acid (BNA)
  modified_base (7)..(7): 5-methyl modified nucleotide
agauggcauuu

SEQ ID NO: 12953 - RNA, 10 nt, Artificial Sequence
  source: /note="Description of Artificial Sequence: Synthetic oligonucleotide"
  source: /note="RNA"
  modified_base (1)..(1): bicyclic nucleic acid (BNA)
  modified_base (7)..(7): 5-methyl modified nucleotide
agauggcauu

SEQ ID NO: 12954 - RNA, 9 nt, Artificial Sequence
  source: /note="Description of Artificial Sequence: Synthetic oligonucleotide"
  source: /note="RNA"
  modified_base (1)..(1): bicyclic nucleic acid (BNA)
  modified_base (7)..(7): 5-methyl modified nucleotide
agauggcau

SEQ ID NO: 12955 - RNA, 8 nt, Artificial Sequence
  source: /note="Description of Artificial Sequence: Synthetic oligonucleotide"
  source: /note="RNA"
  modified_base (1)..(1): bicyclic nucleic acid (BNA)
  modified_base (7)..(7): 5-methyl modified nucleotide
agauggca

SEQ ID NO: 12956 - RNA, 30 nt, Artificial Sequence; identical to SEQ ID NO: 284
  source: /note="Description of Artificial Sequence: Synthetic oligonucleotide"
  source: /note="RNA"
  modified_base (1)..(1): 5-methyl bicyclic nucleic acid
  modified_base (3)..(3): 5-methyl modified nucleotide
  modified_base (4)..(4): 5-methyl modified nucleotide
  modified_base (7)..(7): 5-methyl modified nucleotide
  modified_base (10)..(10): 5-methyl modified nucleotide
  modified_base (22)..(22): 5-methyl modified nucleotide
  modified_base (27)..(27): 5-methyl modified nucleotide

SEQ ID NO: 12957 - RNA, 29 nt, Artificial Sequence
  source: /note="Description of Artificial Sequence: Synthetic oligonucleotide"
  source: /note="RNA"
  modified_base (1)..(1): 5-methyl bicyclic nucleic acid
  modified_base (3)..(3): 5-methyl modified nucleotide
  modified_base (4)..(4): 5-methyl modified nucleotide
  modified_base (7)..(7): 5-methyl modified nucleotide
  modified_base (10)..(10): 5-methyl modified nucleotide
  modified_base (22)..(22): 5-methyl modified nucleotide
  modified_base (27)..(27): 5-methyl modified nucleotide
cuccaacaucaaggaagauggcauuucua

SEQ ID NO: 12958 - RNA, 28 nt, Artificial Sequence
  source: /note="Description of Artificial Sequence: Synthetic oligonucleotide"
  source: /note="RNA"
  modified_base (1)..(1): 5-methyl bicyclic nucleic acid
  modified_base (3)..(3): 5-methyl modified nucleotide
  modified_base (4)..(4): 5-methyl modified nucleotide
  modified_base (7)..(7): 5-methyl modified nucleotide
  modified_base (10)..(10): 5-methyl modified nucleotide
  modified_base (22)..(22): 5-methyl modified nucleotide
  modified_base (27)..(27): 5-methyl modified nucleotide
cuccaacaucaaggaagauggcauuucu

SEQ ID NO: 12959 - RNA, 27 nt, Artificial Sequence
  source: /note="Description of Artificial Sequence: Synthetic oligonucleotide"
  source: /note="RNA"
  modified_base (1)..(1): 5-methyl bicyclic nucleic acid
  modified_base (3)..(3): 5-methyl modified nucleotide
  modified_base (4)..(4): 5-methyl modified nucleotide
  modified_base (7)..(7): 5-methyl modified nucleotide
  modified_base (10)..(10): 5-methyl modified nucleotide
  modified_base (22)..(22): 5-methyl modified nucleotide
  modified_base (27)..(27): 5-methyl modified nucleotide
cuccaacaucaaggaagauggcauuuc

SEQ ID NO: 12960 - RNA, 26 nt, Artificial Sequence
  source: /note="Description of Artificial Sequence: Synthetic oligonucleotide"
  source: /note="RNA"
  modified_base (1)..(1): 5-methyl bicyclic nucleic acid
  modified_base (3)..(3): 5-methyl modified nucleotide
  modified_base (4)..(4): 5-methyl modified nucleotide
  modified_base (7)..(7): 5-methyl modified nucleotide
  modified_base (10)..(10): 5-methyl modified nucleotide
  modified_base (22)..(22): 5-methyl modified nucleotide
cuccaacaucaaggaagauggcauuu

SEQ ID NO: 12961 - RNA, 25 nt, Artificial Sequence
  source: /note="Description of Artificial Sequence: Synthetic oligonucleotide"
  source: /note="RNA"
  modified_base (1)..(1): 5-methyl bicyclic nucleic acid
  modified_base (3)..(3): 5-methyl modified nucleotide
  modified_base (4)..(4): 5-methyl modified nucleotide
  modified_base (7)..(7): 5-methyl modified nucleotide
  modified_base (10)..(10): 5-methyl modified nucleotide
  modified_base (22)..(22): 5-methyl modified nucleotide
cuccaacaucaaggaagauggcauu

SEQ ID NO: 12962 - RNA, 24 nt, Artificial Sequence
  source: /note="Description of Artificial Sequence: Synthetic oligonucleotide"
  source: /note="RNA"
  modified_base (1)..(1): 5-methyl bicyclic nucleic acid
  modified_base (3)..(3): 5-methyl modified nucleotide
  modified_base (4)..(4): 5-methyl modified nucleotide
  modified_base (7)..(7): 5-methyl modified nucleotide
  modified_base (10)..(10): 5-methyl modified nucleotide
  modified_base (22)..(22): 5-methyl modified nucleotide
cuccaacaucaaggaagauggcau

SEQ ID NO: 12963 - RNA, 23 nt, Artificial Sequence
  source: /note="Description of Artificial Sequence: Synthetic oligonucleotide"
  source: /note="RNA"
  modified_base (1)..(1): 5-methyl bicyclic nucleic acid
  modified_base (3)..(3): 5-methyl modified nucleotide
  modified_base (4)..(4): 5-methyl modified nucleotide
  modified_base (7)..(7): 5-methyl modified nucleotide
  modified_base (10)..(10): 5-methyl modified nucleotide
  modified_base (22)..(22): 5-methyl modified nucleotide
cuccaacaucaaggaagauggca

SEQ ID NO: 12964 - RNA, 22 nt, Artificial Sequence
  source: /note="Description of Artificial Sequence: Synthetic oligonucleotide"
  source: /note="RNA"
  modified_base (1)..(1): 5-methyl bicyclic nucleic acid
  modified_base (3)..(3): 5-methyl modified nucleotide
  modified_base (4)..(4): 5-methyl modified nucleotide
  modified_base (7)..(7): 5-methyl modified nucleotide
  modified_base (10)..(10): 5-methyl modified nucleotide
  modified_base (22)..(22): 5-methyl modified nucleotide
cuccaacaucaaggaagauggc

SEQ ID NO: 12965 - RNA, 21 nt, Artificial Sequence
  source: /note="Description of Artificial Sequence: Synthetic oligonucleotide"
  source: /note="RNA"
  modified_base (1)..(1): 5-methyl bicyclic nucleic acid
  modified_base (3)..(3): 5-methyl modified nucleotide
  modified_base (4)..(4): 5-methyl modified nucleotide
  modified_base (7)..(7): 5-methyl modified nucleotide
  modified_base (10)..(10): 5-methyl modified nucleotide
cuccaacaucaaggaagaugg

SEQ ID NO: 12966 - RNA, 20 nt, Artificial Sequence
  source: /note="Description of Artificial Sequence: Synthetic oligonucleotide"
  source: /note="RNA"
  modified_base (1)..(1): 5-methyl bicyclic nucleic acid
  modified_base (3)..(3): 5-methyl modified nucleotide
  modified_base (4)..(4): 5-methyl modified nucleotide
  modified_base (7)..(7): 5-methyl modified nucleotide
  modified_base (10)..(10): 5-methyl modified nucleotide
cuccaacaucaaggaagaug

SEQ ID NO: 12967 - RNA, 19 nt, Artificial Sequence
  source: /note="Description of Artificial Sequence: Synthetic oligonucleotide"
  source: /note="RNA"
  modified_base (1)..(1): 5-methyl bicyclic nucleic acid
  modified_base (3)..(3): 5-methyl modified nucleotide
  modified_base (4)..(4): 5-methyl modified nucleotide
  modified_base (7)..(7): 5-methyl modified nucleotide
  modified_base (10)..(10): 5-methyl modified nucleotide
cuccaacaucaaggaagau

SEQ ID NO: 12968 - RNA, 18 nt, Artificial Sequence
  source: /note="Description of Artificial Sequence: Synthetic oligonucleotide"
  source: /note="RNA"
  modified_base (1)..(1): 5-methyl bicyclic nucleic acid
  modified_base (3)..(3): 5-methyl modified nucleotide
  modified_base (4)..(4): 5-methyl modified nucleotide
  modified_base (7)..(7): 5-methyl modified nucleotide
  modified_base (10)..(10): 5-methyl modified nucleotide
cuccaacaucaaggaaga

SEQ ID NO: 12969 - RNA, 17 nt, Artificial Sequence
  source: /note="Description of Artificial Sequence: Synthetic oligonucleotide"
  source: /note="RNA"
  modified_base (1)..(1): 5-methyl bicyclic nucleic acid
  modified_base (3)..(3): 5-methyl modified nucleotide
  modified_base (4)..(4): 5-methyl modified nucleotide
  modified_base (7)..(7): 5-methyl modified nucleotide
  modified_base (10)..(10): 5-methyl modified nucleotide
cuccaacaucaaggaag

SEQ ID NO: 12970 - DNA, 29 bp, Artificial Sequence
  source: /note="Description of Artificial Sequence: Synthetic oligonucleotide"
  source: /note="Description of Combined DNA/RNA Molecule: Synthetic oligonucleotide"
  source: /note="DNA/RNA"
  modified_base (1)..(1): bicyclic nucleic acid (BNA)
  modified_base (2)..(2): 5-methyl modified nucleotide
  modified_base (3)..(3): 5-methyl modified nucleotide
  modified_base (6)..(6): 5-methyl modified nucleotide
  modified_base (9)..(9): 5-methyl modified nucleotide
  modified_base (21)..(21): 5-methyl modified nucleotide
  modified_base (26)..(26): 5-methyl modified nucleotide
tccaacaucaaggaagauggcauuucuag

SEQ ID NO: 12971 - DNA, 28 bp, Artificial Sequence
  source: /note="Description of Artificial Sequence: Synthetic oligonucleotide"
  source: /note="Description of Combined DNA/RNA Molecule: Synthetic oligonucleotide"
  source: /note="DNA/RNA"
  modified_base (1)..(1): bicyclic nucleic acid (BNA)
  modified_base (2)..(2): 5-methyl modified nucleotide
  modified_base (3)..(3): 5-methyl modified nucleotide
  modified_base (6)..(6): 5-methyl modified nucleotide
  modified_base (9)..(9): 5-methyl modified nucleotide
  modified_base (21)..(21): 5-methyl modified nucleotide
  modified_base (26)..(26): 5-methyl modified nucleotide
tccaacaucaaggaagauggcauuucua

SEQ ID NO: 12972 - DNA, 27 bp, Artificial Sequence
  source: /note="Description of Artificial Sequence: Synthetic oligonucleotide"
  source: /note="Description of Combined DNA/RNA Molecule: Synthetic oligonucleotide"
  source: /note="DNA/RNA"
  modified_base (1)..(1): bicyclic nucleic acid (BNA)
  modified_base (2)..(2): 5-methyl modified nucleotide
  modified_base (3)..(3): 5-methyl modified nucleotide
  modified_base (6)..(6): 5-methyl modified nucleotide
  modified_base (9)..(9): 5-methyl modified nucleotide
  modified_base (21)..(21): 5-methyl modified nucleotide
  modified_base (26)..(26): 5-methyl modified nucleotide
tccaacaucaaggaagauggcauuucu

SEQ ID NO: 12973 - DNA, 26 bp, Artificial Sequence
  source: /note="Description of Artificial Sequence: Synthetic oligonucleotide"
  source: /note="Description of Combined DNA/RNA Molecule: Synthetic oligonucleotide"
  source: /note="DNA/RNA"
  modified_base (1)..(1): bicyclic nucleic acid (BNA)
  modified_base (2)..(2): 5-methyl modified nucleotide
  modified_base (3)..(3): 5-methyl modified nucleotide
  modified_base (6)..(6): 5-methyl modified nucleotide
  modified_base (9)..(9): 5-methyl modified nucleotide
  modified_base (21)..(21): 5-methyl modified nucleotide
  modified_base (26)..(26): 5-methyl modified nucleotide
tccaacaucaaggaagauggcauuuc

SEQ ID NO: 12974 - DNA, 25 bp, Artificial Sequence
  source: /note="Description of Artificial Sequence: Synthetic oligonucleotide"
  source: /note="Description of Combined DNA/RNA Molecule: Synthetic oligonucleotide"
  source: /note="DNA/RNA"
  modified_base (1)..(1): bicyclic nucleic acid (BNA)
  modified_base (2)..(2): 5-methyl modified nucleotide
  modified_base (3)..(3): 5-methyl modified nucleotide
  modified_base (6)..(6): 5-methyl modified nucleotide
  modified_base (9)..(9): 5-methyl modified nucleotide
  modified_base (21)..(21): 5-methyl modified nucleotide
tccaacaucaaggaagauggcauuu

SEQ ID NO: 12975 - DNA, 24 bp, Artificial Sequence
  source: /note="Description of Artificial Sequence: Synthetic oligonucleotide"
  source: /note="Description of Combined DNA/RNA Molecule: Synthetic oligonucleotide"
  source: /note="DNA/RNA"
  modified_base (1)..(1): bicyclic nucleic acid (BNA)
  modified_base (2)..(2): 5-methyl modified nucleotide
  modified_base (3)..(3): 5-methyl modified nucleotide
  modified_base (6)..(6): 5-methyl modified nucleotide
  modified_base (9)..(9): 5-methyl modified nucleotide
  modified_base (21)..(21): 5-methyl modified nucleotide
tccaacaucaaggaagauggcauu

SEQ ID NO: 12976 - DNA, 23 bp, Artificial Sequence
  source: /note="Description of Artificial Sequence: Synthetic oligonucleotide"
  source: /note="Description of Combined DNA/RNA Molecule: Synthetic oligonucleotide"
  source: /note="DNA/RNA"
  modified_base (1)..(1): bicyclic nucleic acid (BNA)
  modified_base (2)..(2): 5-methyl modified nucleotide
  modified_base (3)..(3): 5-methyl modified nucleotide
  modified_base (6)..(6): 5-methyl modified nucleotide
  modified_base (9)..(9): 5-methyl modified nucleotide
  modified_base (21)..(21): 5-methyl modified nucleotide
tccaacaucaaggaagauggcau

SEQ ID NO: 12977 - DNA, 22 bp, Artificial Sequence
  source: /note="Description of Artificial Sequence: Synthetic oligonucleotide"
  source: /note="Description of Combined DNA/RNA Molecule: Synthetic oligonucleotide"
  source: /note="DNA/RNA"
  modified_base (1)..(1): bicyclic nucleic acid (BNA)
  modified_base (2)..(2): 5-methyl modified nucleotide
  modified_base (3)..(3): 5-methyl modified nucleotide
  modified_base (6)..(6): 5-methyl modified nucleotide
  modified_base (9)..(9): 5-methyl modified nucleotide
  modified_base (21)..(21): 5-methyl modified nucleotide
tccaacaucaaggaagauggca

SEQ ID NO: 12978 - DNA, 21 bp, Artificial Sequence
  source: /note="Description of Artificial Sequence: Synthetic oligonucleotide"
  source: /note="Description of Combined DNA/RNA Molecule: Synthetic oligonucleotide"
  source: /note="DNA/RNA"
  modified_base (1)..(1): bicyclic nucleic acid (BNA)
  modified_base (2)..(2): 5-methyl modified nucleotide
  modified_base (3)..(3): 5-methyl modified nucleotide
  modified_base (6)..(6): 5-methyl modified nucleotide
  modified_base (9)..(9): 5-methyl modified nucleotide
  modified_base (21)..(21): 5-methyl modified nucleotide
tccaacaucaaggaagauggc

SEQ ID NO: 12979 - DNA, 20 bp, Artificial Sequence
  source: /note="Description of Artificial Sequence: Synthetic oligonucleotide"
  source: /note="Description of Combined DNA/RNA Molecule: Synthetic oligonucleotide"
  source: /note="DNA/RNA"
  modified_base (1)..(1): bicyclic nucleic acid (BNA)
  modified_base (2)..(2): 5-methyl modified nucleotide
  modified_base (3)..(3): 5-methyl modified nucleotide
  modified_base (6)..(6): 5-methyl modified nucleotide
  modified_base (9)..(9): 5-methyl modified nucleotide
tccaacaucaaggaagaugg

SEQ ID NO: 12980 - DNA, 19 bp, Artificial Sequence
  source: /note="Description of Artificial Sequence: Synthetic oligonucleotide"
  source: /note="Description of Combined DNA/RNA Molecule: Synthetic oligonucleotide"
  source: /note="DNA/RNA"
  modified_base (1)..(1): bicyclic nucleic acid (BNA)
  modified_base (2)..(2): 5-methyl modified nucleotide
  modified_base (3)..(3): 5-methyl modified nucleotide
  modified_base (6)..(6): 5-methyl modified nucleotide
  modified_base (9)..(9): 5-methyl modified nucleotide
tccaacaucaaggaagaug

SEQ ID NO: 12981 - DNA, 18 bp, Artificial Sequence
  source: /note="Description of Artificial Sequence: Synthetic oligonucleotide"
  source: /note="Description of Combined DNA/RNA Molecule: Synthetic oligonucleotide"
  source: /note="DNA/RNA"
  modified_base (1)..(1): bicyclic nucleic acid (BNA)
  modified_base (2)..(2): 5-methyl modified nucleotide
  modified_base (3)..(3): 5-methyl modified nucleotide
  modified_base (6)..(6): 5-methyl modified nucleotide
  modified_base (9)..(9): 5-methyl modified nucleotide
tccaacaucaaggaagau

SEQ ID NO: 12982 - DNA, 17 bp, Artificial Sequence
  source: /note="Description of Artificial Sequence: Synthetic oligonucleotide"
  source: /note="Description of Combined DNA/RNA Molecule: Synthetic oligonucleotide"
  source: /note="DNA/RNA"
  modified_base (1)..(1): bicyclic nucleic acid (BNA)
  modified_base (2)..(2): 5-methyl modified nucleotide
  modified_base (3)..(3): 5-methyl modified nucleotide
  modified_base (6)..(6): 5-methyl modified nucleotide
  modified_base (9)..(9): 5-methyl modified nucleotide
tccaacaucaaggaaga

SEQ ID NO: 12983 - DNA, 16 bp, Artificial Sequence
  source: /note="Description of Artificial Sequence: Synthetic oligonucleotide"
  source: /note="Description of Combined DNA/RNA Molecule: Synthetic oligonucleotide"
  source: /note="DNA/RNA"
  modified_base (1)..(1): bicyclic nucleic acid (BNA)
  modified_base (2)..(2): 5-methyl modified nucleotide
  modified_base (3)..(3): 5-methyl modified nucleotide
  modified_base (6)..(6): 5-methyl modified nucleotide
  modified_base (9)..(9): 5-methyl modified nucleotide
tccaacaucaaggaag

SEQ ID NO: 12984 - RNA, 28 nt, Artificial Sequence
  source: /note="Description of Artificial Sequence: Synthetic oligonucleotide"
  source: /note="RNA"
  modified_base (1)..(1): 5-methyl bicyclic nucleic acid
  modified_base (2)..(2): 5-methyl modified nucleotide
  modified_base (5)..(5): 5-methyl modified nucleotide
  modified_base (8)..(8): 5-methyl modified nucleotide
  modified_base (20)..(20): 5-methyl modified nucleotide
  modified_base (25)..(25): 5-methyl modified nucleotide
ccaacaucaaggaagauggcauuucuag

SEQ ID NO: 12985 - RNA, 27 nt, Artificial Sequence
  source: /note="Description of Artificial Sequence: Synthetic oligonucleotide"
  source: /note="RNA"
  modified_base (1)..(1): 5-methyl bicyclic nucleic acid
  modified_base (2)..(2): 5-methyl modified nucleotide
  modified_base (5)..(5): 5-methyl modified nucleotide
  modified_base (8)..(8): 5-methyl modified nucleotide
  modified_base (20)..(20): 5-methyl modified nucleotide
  modified_base (25)..(25): 5-methyl modified nucleotide
ccaacaucaaggaagauggcauuucua

SEQ ID NO: 12986 - RNA, 26 nt, Artificial Sequence
  source: /note="Description of Artificial Sequence: Synthetic oligonucleotide"
  source: /note="RNA"
  modified_base (1)..(1): 5-methyl bicyclic nucleic acid
  modified_base (2)..(2): 5-methyl modified nucleotide
  modified_base (5)..(5): 5-methyl modified nucleotide
  modified_base (8)..(8): 5-methyl modified nucleotide
  modified_base (20)..(20): 5-methyl modified nucleotide
  modified_base (25)..(25): 5-methyl modified nucleotide
ccaacaucaaggaagauggcauuucu

SEQ ID NO: 12987 - RNA, 25 nt, Artificial Sequence
  source: /note="Description of Artificial Sequence: Synthetic oligonucleotide"
  source: /note="RNA"
  modified_base (1)..(1): 5-methyl bicyclic nucleic acid
  modified_base (2)..(2): 5-methyl modified nucleotide
  modified_base (5)..(5): 5-methyl modified nucleotide
  modified_base (8)..(8): 5-methyl modified nucleotide
  modified_base (20)..(20): 5-methyl modified nucleotide
  modified_base (25)..(25): 5-methyl modified nucleotide
ccaacaucaaggaagauggcauuuc

SEQ ID NO: 12988 - RNA, 24 nt, Artificial Sequence
  source: /note="Description of Artificial Sequence: Synthetic oligonucleotide"
  source: /note="RNA"
  modified_base (1)..(1): 5-methyl bicyclic nucleic acid
  modified_base (2)..(2): 5-methyl modified nucleotide
  modified_base (5)..(5): 5-methyl modified nucleotide
  modified_base (8)..(8): 5-methyl modified nucleotide
  modified_base (20)..(20): 5-methyl modified nucleotide
ccaacaucaaggaagauggcauuu

SEQ ID NO: 12989 - RNA, 23 nt, Artificial Sequence
  source: /note="Description of Artificial Sequence: Synthetic oligonucleotide"
  source: /note="RNA"
  modified_base (1)..(1): 5-methyl bicyclic nucleic acid
  modified_base (2)..(2): 5-methyl modified nucleotide
  modified_base (5)..(5): 5-methyl modified nucleotide
  modified_base (8)..(8): 5-methyl modified nucleotide
  modified_base (20)..(20): 5-methyl modified nucleotide
ccaacaucaaggaagauggcauu

SEQ ID NO: 12990 - RNA, 22 nt, Artificial Sequence
  source: /note="Description of Artificial Sequence: Synthetic oligonucleotide"
  source: /note="RNA"
  modified_base (1)..(1): 5-methyl bicyclic nucleic acid
  modified_base (2)..(2): 5-methyl modified nucleotide
  modified_base (5)..(5): 5-methyl modified nucleotide
  modified_base (8)..(8): 5-methyl modified nucleotide
  modified_base (20)..(20): 5-methyl modified nucleotide
ccaacaucaaggaagauggcau

SEQ ID NO: 12991 - RNA, 21 nt, Artificial Sequence
  source: /note="Description of Artificial Sequence: Synthetic oligonucleotide"
  source: /note="RNA"
  modified_base (1)..(1): 5-methyl bicyclic nucleic acid
  modified_base (2)..(2): 5-methyl modified nucleotide
  modified_base (5)..(5): 5-methyl modified nucleotide
  modified_base (8)..(8): 5-methyl modified nucleotide
  modified_base (20)..(20): 5-methyl modified nucleotide
ccaacaucaaggaagauggca

SEQ ID NO: 12992 - RNA, 20 nt, Artificial Sequence
  source: /note="Description of Artificial Sequence: Synthetic oligonucleotide"
  source: /note="RNA"
  modified_base (1)..(1): 5-methyl bicyclic nucleic acid
  modified_base (2)..(2): 5-methyl modified nucleotide
  modified_base (5)..(5): 5-methyl modified nucleotide
  modified_base (8)..(8): 5-methyl modified nucleotide
  modified_base (20)..(20): 5-methyl modified nucleotide
ccaacaucaaggaagauggc

SEQ ID NO: 12993 - RNA, 19 nt, Artificial Sequence
  source: /note="Description of Artificial Sequence: Synthetic oligonucleotide"
  source: /note="RNA"
  modified_base (1)..(1): 5-methyl bicyclic nucleic acid
  modified_base (2)..(2): 5-methyl modified nucleotide
  modified_base (5)..(5): 5-methyl modified nucleotide
  modified_base (8)..(8): 5-methyl modified nucleotide
ccaacaucaaggaagaugg

SEQ ID NO: 12994 - RNA, 18 nt, Artificial Sequence
  source: /note="Description of Artificial Sequence: Synthetic oligonucleotide"
  source: /note="RNA"
  modified_base (1)..(1): 5-methyl bicyclic nucleic acid
  modified_base (2)..(2): 5-methyl modified nucleotide
  modified_base (5)..(5): 5-methyl modified nucleotide
  modified_base (8)..(8): 5-methyl modified nucleotide
ccaacaucaaggaagaug

SEQ ID NO: 12995 - RNA, 17 nt, Artificial Sequence
  source: /note="Description of Artificial Sequence: Synthetic oligonucleotide"
  source: /note="RNA"
  modified_base (1)..(1): 5-methyl bicyclic nucleic acid
  modified_base (2)..(2): 5-methyl modified nucleotide
  modified_base (5)..(5): 5-methyl modified nucleotide
  modified_base (8)..(8): 5-methyl modified nucleotide
ccaacaucaaggaagau

SEQ ID NO: 12996 - RNA, 16 nt, Artificial Sequence
  source: /note="Description of Artificial Sequence: Synthetic oligonucleotide"
  source: /note="RNA"
  modified_base (1)..(1): 5-methyl bicyclic nucleic acid
  modified_base (2)..(2): 5-methyl modified nucleotide
  modified_base (5)..(5): 5-methyl modified nucleotide
  modified_base (8)..(8): 5-methyl modified nucleotide
ccaacaucaaggaaga

SEQ ID NO: 12997 - RNA, 15 nt, Artificial Sequence
  source: /note="Description of Artificial Sequence: Synthetic oligonucleotide"
  source: /note="RNA"
  modified_base (1)..(1): 5-methyl bicyclic nucleic acid
  modified_base (2)..(2): 5-methyl modified nucleotide
  modified_base (5)..(5): 5-methyl modified nucleotide
  modified_base (8)..(8): 5-methyl modified nucleotide
ccaacaucaaggaag

SEQ ID NO: 12998 - RNA, 27 nt, Artificial Sequence
  source: /note="Description of Artificial Sequence: Synthetic oligonucleotide"
  source: /note="RNA"
  modified_base (1)..(1): 5-methyl bicyclic nucleic acid
  modified_base (4)..(4): 5-methyl modified nucleotide
  modified_base (7)..(7): 5-methyl modified nucleotide
  modified_base (19)..(19): 5-methyl modified nucleotide
  modified_base (24)..(24): 5-methyl modified nucleotide
caacaucaaggaagauggcauuucuag

SEQ ID NO: 12999 - RNA, 26 nt, Artificial Sequence
  source: /note="Description of Artificial Sequence: Synthetic oligonucleotide"
  source: /note="RNA"
  modified_base (1)..(1): 5-methyl bicyclic nucleic acid
  modified_base (4)..(4): 5-methyl modified nucleotide
  modified_base (7)..(7): 5-methyl modified nucleotide
  modified_base (19)..(19): 5-methyl modified nucleotide
  modified_base (24)..(24): 5-methyl modified nucleotide
caacaucaaggaagauggcauuucua

SEQ ID NO: 13000 - RNA, 25 nt, Artificial Sequence
  source: /note="Description of Artificial Sequence: Synthetic oligonucleotide"
  source: /note="RNA"
  modified_base (1)..(1): 5-methyl bicyclic nucleic acid
  modified_base (4)..(4): 5-methyl modified nucleotide
  modified_base (7)..(7): 5-methyl modified nucleotide
  modified_base (19)..(19): 5-methyl modified nucleotide
  modified_base (24)..(24): 5-methyl modified nucleotide
caacaucaaggaagauggcauuucu

SEQ ID NO: 13001 - RNA, 24 nt, Artificial Sequence
  source: /note="Description of Artificial Sequence: Synthetic oligonucleotide"
  source: /note="RNA"
  modified_base (1)..(1): 5-methyl bicyclic nucleic acid
  modified_base (4)..(4): 5-methyl modified nucleotide
  modified_base (7)..(7): 5-methyl modified nucleotide
  modified_base (19)..(19): 5-methyl modified nucleotide
  modified_base (24)..(24): 5-methyl modified nucleotide
caacaucaaggaagauggcauuuc

SEQ ID NO: 13002 - RNA, 23 nt, Artificial Sequence
  source: /note="Description of Artificial Sequence: Synthetic oligonucleotide"
  source: /note="RNA"
  modified_base (1)..(1): 5-methyl bicyclic nucleic acid
  modified_base (4)..(4): 5-methyl modified nucleotide
  modified_base (7)..(7): 5-methyl modified nucleotide
  modified_base (19)..(19): 5-methyl modified nucleotide
caacaucaaggaagauggcauuu

SEQ ID NO: 13003 - RNA, 22 nt, Artificial Sequence
  source: /note="Description of Artificial Sequence: Synthetic oligonucleotide"
  source: /note="RNA"
  modified_base (1)..(1): 5-methyl bicyclic nucleic acid
  modified_base (4)..(4): 5-methyl modified nucleotide
  modified_base (7)..(7): 5-methyl modified nucleotide
  modified_base (19)..(19): 5-methyl modified nucleotide
caacaucaaggaagauggcauu

SEQ ID NO: 13004 - RNA, 21 nt, Artificial Sequence
  source: /note="Description of Artificial Sequence: Synthetic oligonucleotide"
  source: /note="RNA"
  modified_base (1)..(1): 5-methyl bicyclic nucleic acid
  modified_base (4)..(4): 5-methyl modified nucleotide
  modified_base (7)..(7): 5-methyl modified nucleotide
  modified_base (19)..(19): 5-methyl modified nucleotide
caacaucaaggaagauggcau

SEQ ID NO: 13005 - RNA, 20 nt, Artificial Sequence
  source: /note="Description of Artificial Sequence: Synthetic oligonucleotide"
  source: /note="RNA"
  modified_base (1)..(1): 5-methyl bicyclic nucleic acid
  modified_base (4)..(4): 5-methyl modified nucleotide
  modified_base (7)..(7): 5-methyl modified nucleotide
  modified_base (19)..(19): 5-methyl modified nucleotide
caacaucaaggaagauggca

SEQ ID NO: 13006 - RNA, 19 nt, Artificial Sequence
  source: /note="Description of Artificial Sequence: Synthetic oligonucleotide"
  source: /note="RNA"
  modified_base (1)..(1): 5-methyl bicyclic nucleic acid
  modified_base (4)..(4): 5-methyl modified nucleotide
  modified_base (7)..(7): 5-methyl modified nucleotide
  modified_base (19)..(19): 5-methyl modified nucleotide
caacaucaaggaagauggc

SEQ ID NO: 13007 - RNA, 18 nt, Artificial Sequence
  source: /note="Description of Artificial Sequence: Synthetic oligonucleotide"
  source: /note="RNA"
  modified_base (1)..(1): 5-methyl bicyclic nucleic acid
  modified_base (4)..(4): 5-methyl modified nucleotide
  modified_base (7)..(7): 5-methyl modified nucleotide
caacaucaaggaagaugg

SEQ ID NO: 13008 - RNA, 17 nt, Artificial Sequence
  source: /note="Description of Artificial Sequence: Synthetic oligonucleotide"
  source: /note="RNA"
  modified_base (1)..(1): 5-methyl bicyclic nucleic acid
  modified_base (4)..(4): 5-methyl modified nucleotide
  modified_base (7)..(7): 5-methyl modified nucleotide
caacaucaaggaagaug

SEQ ID NO: 13009 - RNA, 16 nt, Artificial Sequence
  source: /note="Description of Artificial Sequence: Synthetic oligonucleotide"
  source: /note="RNA"
  modified_base (1)..(1): 5-methyl bicyclic nucleic acid
  modified_base (4)..(4): 5-methyl modified nucleotide
  modified_base (7)..(7): 5-methyl modified nucleotide
caacaucaaggaagau

SEQ ID NO: 13010 - RNA, 15 nt, Artificial Sequence
  source: /note="Description of Artificial Sequence: Synthetic oligonucleotide"
  source: /note="RNA"
  modified_base (1)..(1): 5-methyl bicyclic nucleic acid
  modified_base (4)..(4): 5-methyl modified nucleotide
  modified_base (7)..(7): 5-methyl modified nucleotide
caacaucaaggaaga

SEQ ID NO: 13011 - RNA, 14 nt, Artificial Sequence
  source: /note="Description of Artificial Sequence: Synthetic oligonucleotide"
  source: /note="RNA"
  modified_base (1)..(1): 5-methyl bicyclic nucleic acid
  modified_base (4)..(4): 5-methyl modified nucleotide
  modified_base (7)..(7): 5-methyl modified nucleotide
caacaucaaggaag

SEQ ID NO: 13012 - RNA, 26 nt, Artificial Sequence
  source: /note="Description of Artificial Sequence: Synthetic oligonucleotide"
  source: /note="RNA"
  modified_base (1)..(1): bicyclic nucleic acid (BNA)
  modified_base (3)..(3): 5-methyl modified nucleotide
  modified_base (6)..(6): 5-methyl modified nucleotide
  modified_base (18)..(18): 5-methyl modified nucleotide
  modified_base (23)..(23): 5-methyl modified nucleotide
aacaucaaggaagauggcauuucuag

SEQ ID NO: 13013 - RNA, 25 nt, Artificial Sequence
  source: /note="Description of Artificial Sequence: Synthetic oligonucleotide"
  source: /note="RNA"
  modified_base (1)..(1): bicyclic nucleic acid (BNA)
  modified_base (3)..(3): 5-methyl modified nucleotide
  modified_base (6)..(6): 5-methyl modified nucleotide
  modified_base (18)..(18): 5-methyl modified nucleotide
  modified_base (23)..(23): 5-methyl modified nucleotide
aacaucaaggaagauggcauuucua

SEQ ID NO: 13014 - RNA, 24 nt, Artificial Sequence
  source: /note="Description of Artificial Sequence: Synthetic oligonucleotide"
  source: /note="RNA"
  modified_base (1)..(1): bicyclic nucleic acid (BNA)
  modified_base (3)..(3): 5-methyl modified nucleotide
  modified_base (6)..(6): 5-methyl modified nucleotide
  modified_base (18)..(18): 5-methyl modified nucleotide
  modified_base (23)..(23): 5-methyl modified nucleotide
aacaucaaggaagauggcauuucu

SEQ ID NO: 13015 - RNA, 23 nt, Artificial Sequence
  source: /note="Description of Artificial Sequence: Synthetic oligonucleotide"
  source: /note="RNA"
  modified_base (1)..(1): bicyclic nucleic acid (BNA)
  modified_base (3)..(3): 5-methyl modified nucleotide
  modified_base (6)..(6): 5-methyl modified nucleotide
  modified_base (18)..(18): 5-methyl modified nucleotide
  modified_base (23)..(23): 5-methyl modified nucleotide
aacaucaaggaagauggcauuuc

SEQ ID NO: 13016 - RNA, 22 nt, Artificial Sequence
  source: /note="Description of Artificial Sequence: Synthetic oligonucleotide"
  source: /note="RNA"
  modified_base (1)..(1): bicyclic nucleic acid (BNA)
  modified_base (3)..(3): 5-methyl modified nucleotide
  modified_base (6)..(6): 5-methyl modified nucleotide
  modified_base (18)..(18): 5-methyl modified nucleotide
aacaucaaggaagauggcauuu

SEQ ID NO: 13017 - RNA, 21 nt, Artificial Sequence
  source: /note="Description of Artificial Sequence: Synthetic oligonucleotide"
  source: /note="RNA"
  modified_base (1)..(1): bicyclic nucleic acid (BNA)
  modified_base (3)..(3): 5-methyl modified nucleotide
  modified_base (6)..(6): 5-methyl modified nucleotide
  modified_base (18)..(18): 5-methyl modified nucleotide
aacaucaaggaagauggcauu

SEQ ID NO: 13018 - RNA, 20 nt, Artificial Sequence
  source: /note="Description of Artificial Sequence: Synthetic oligonucleotide"
  source: /note="RNA"
  modified_base (1)..(1): bicyclic nucleic acid (BNA)
  modified_base (3)..(3): 5-methyl modified nucleotide
  modified_base (6)..(6): 5-methyl modified nucleotide
  modified_base (18)..(18): 5-methyl modified nucleotide
aacaucaaggaagauggcau

SEQ ID NO: 13019 - RNA, 19 nt, Artificial Sequence
  source: /note="Description of Artificial Sequence: Synthetic oligonucleotide"
  source: /note="RNA"
  modified_base (1)..(1): bicyclic nucleic acid (BNA)
  modified_base (3)..(3): 5-methyl modified nucleotide
  modified_base (6)..(6): 5-methyl modified nucleotide
  modified_base (18)..(18): 5-methyl modified nucleotide
aacaucaaggaagauggca

SEQ ID NO: 13020 - RNA, 18 nt, Artificial Sequence
  source: /note="Description of Artificial Sequence: Synthetic oligonucleotide"
  source: /note="RNA"
  modified_base (1)..(1): bicyclic nucleic acid (BNA)
  modified_base (3)..(3): 5-methyl modified nucleotide
  modified_base (6)..(6): 5-methyl modified nucleotide
  modified_base (18)..(18): 5-methyl modified nucleotide
aacaucaaggaagauggc

SEQ ID NO: 13021 - RNA, 17 nt, Artificial Sequence
  source: /note="Description of Artificial Sequence: Synthetic oligonucleotide"
  source: /note="RNA"
  modified_base (1)..(1): bicyclic nucleic acid (BNA)
  modified_base (3)..(3): 5-methyl modified nucleotide
  modified_base (6)..(6): 5-methyl modified nucleotide
aacaucaaggaagaugg

SEQ ID NO: 13022 - RNA, 16 nt, Artificial Sequence
  source: /note="Description of Artificial Sequence: Synthetic oligonucleotide"
  source: /note="RNA"
  modified_base (1)..(1): bicyclic nucleic acid (BNA)
  modified_base (3)..(3): 5-methyl modified nucleotide
  modified_base (6)..(6): 5-methyl modified nucleotide
aacaucaaggaagaug

SEQ ID NO: 13023 - RNA, 15 nt, Artificial Sequence
  source: /note="Description of Artificial Sequence: Synthetic oligonucleotide"
  source: /note="RNA"
  modified_base (1)..(1): bicyclic nucleic acid (BNA)
  modified_base (3)..(3): 5-methyl modified nucleotide
  modified_base (6)..(6): 5-methyl modified nucleotide
aacaucaaggaagau

SEQ ID NO: 13024 - RNA, 14 nt, Artificial Sequence
  source: /note="Description of Artificial Sequence: Synthetic oligonucleotide"
  source: /note="RNA"
  modified_base (1)..(1): bicyclic nucleic acid (BNA)
  modified_base (3)..(3): 5-methyl modified nucleotide
  modified_base (6)..(6): 5-methyl modified nucleotide
aacaucaaggaaga

SEQ ID NO: 13025 - RNA, 13 nt, Artificial Sequence
  source: /note="Description of Artificial Sequence: Synthetic oligonucleotide"
  source: /note="RNA"
  modified_base (1)..(1): bicyclic nucleic acid (BNA)
  modified_base (3)..(3): 5-methyl modified nucleotide
  modified_base (6)..(6): 5-methyl modified nucleotide
aacaucaaggaag

SEQ ID NO: 13026 - RNA, 25 nt, Artificial Sequence
  source: /note="Description of Artificial Sequence: Synthetic oligonucleotide"
  source: /note="RNA"
  modified_base (1)..(1): bicyclic nucleic acid (BNA)
  modified_base (2)..(2): 5-methyl modified nucleotide
  modified_base (5)..(5): 5-methyl modified nucleotide
  modified_base (17)..(17): 5-methyl modified nucleotide
  modified_base (22)..(22): 5-methyl modified nucleotide
acaucaaggaagauggcauuucuag

SEQ ID NO: 13027 - RNA, 24 nt, Artificial Sequence
  source: /note="Description of Artificial Sequence: Synthetic oligonucleotide"
  source: /note="RNA"
  modified_base (1)..(1): bicyclic nucleic acid (BNA)
  modified_base (2)..(2): 5-methyl modified nucleotide
  modified_base (5)..(5): 5-methyl modified nucleotide
  modified_base (17)..(17): 5-methyl modified nucleotide
  modified_base (22)..(22): 5-methyl modified nucleotide
acaucaaggaagauggcauuucua

SEQ ID NO: 13028 - RNA, 23 nt, Artificial Sequence
  source: /note="Description of Artificial Sequence: Synthetic oligonucleotide"
  source: /note="RNA"
  modified_base (1)..(1): bicyclic nucleic acid (BNA)
  modified_base (2)..(2): 5-methyl modified nucleotide
  modified_base (5)..(5): 5-methyl modified nucleotide
  modified_base (17)..(17): 5-methyl modified nucleotide
  modified_base (22)..(22): 5-methyl modified nucleotide
acaucaaggaagauggcauuucu

SEQ ID NO: 13029 - RNA, 22 nt, Artificial Sequence
  source: /note="Description of Artificial Sequence: Synthetic oligonucleotide"
  source: /note="RNA"
  modified_base (1)..(1): bicyclic nucleic acid (BNA)
  modified_base (2)..(2): 5-methyl modified nucleotide
  modified_base (5)..(5): 5-methyl modified nucleotide
  modified_base (17)..(17): 5-methyl modified nucleotide
  modified_base (22)..(22): 5-methyl modified nucleotide
acaucaaggaagauggcauuuc

SEQ ID NO: 13030 - RNA, 21 nt, Artificial Sequence
  source: /note="Description of Artificial Sequence: Synthetic oligonucleotide"
  source: /note="RNA"
  modified_base (1)..(1): bicyclic nucleic acid (BNA)
  modified_base (2)..(2): 5-methyl modified nucleotide
  modified_base (5)..(5): 5-methyl modified nucleotide
  modified_base (17)..(17): 5-methyl modified nucleotide
acaucaaggaagauggcauuu

SEQ ID NO: 13031 - RNA, 20 nt, Artificial Sequence
  source: /note="Description of Artificial Sequence: Synthetic oligonucleotide"
  source: /note="RNA"
  modified_base (1)..(1): bicyclic nucleic acid (BNA)
  modified_base (2)..(2): 5-methyl modified nucleotide
  modified_base (5)..(5): 5-methyl modified nucleotide
  modified_base (17)..(17): 5-methyl modified nucleotide
acaucaaggaagauggcauu

SEQ ID NO: 13032 - RNA, 19 nt, Artificial Sequence
  source: /note="Description of Artificial Sequence: Synthetic oligonucleotide"
  source: /note="RNA"
  modified_base (1)..(1): bicyclic nucleic acid (BNA)
  modified_base (2)..(2): 5-methyl modified nucleotide
  modified_base (5)..(5): 5-methyl modified nucleotide
  modified_base (17)..(17): 5-methyl modified nucleotide
acaucaaggaagauggcau

SEQ ID NO: 13033 - RNA, 18 nt, Artificial Sequence
  source: /note="Description of Artificial Sequence: Synthetic oligonucleotide"
  source: /note="RNA"
  modified_base (1)..(1): bicyclic nucleic acid (BNA)
  modified_base (2)..(2): 5-methyl modified nucleotide
  modified_base (5)..(5): 5-methyl modified nucleotide
  modified_base (17)..(17): 5-methyl modified nucleotide
acaucaaggaagauggca

SEQ ID NO: 13034 - RNA, 17 nt, Artificial Sequence
  source: /note="Description of Artificial Sequence: Synthetic oligonucleotide"
  source: /note="RNA"
  modified_base (1)..(1): bicyclic nucleic acid (BNA)
  modified_base (2)..(2): 5-methyl modified nucleotide
  modified_base (5)..(5): 5-methyl modified nucleotide
  modified_base (17)..(17): 5-methyl modified nucleotide
acaucaaggaagauggc

SEQ ID NO: 13035 - RNA, 16 nt, Artificial Sequence
  source: /note="Description of Artificial Sequence: Synthetic oligonucleotide"
  source: /note="RNA"
  modified_base (1)..(1): bicyclic nucleic acid (BNA)
  modified_base (2)..(2): 5-methyl modified nucleotide
  modified_base (5)..(5): 5-methyl modified nucleotide
acaucaaggaagaugg

SEQ ID NO: 13036 - RNA, 15 nt, Artificial Sequence
  source: /note="Description of Artificial Sequence: Synthetic oligonucleotide"
  source: /note="RNA"
  modified_base (1)..(1): bicyclic nucleic acid (BNA)
  modified_base (2)..(2): 5-methyl modified nucleotide
  modified_base (5)..(5): 5-methyl modified nucleotide
acaucaaggaagaug

SEQ ID NO: 13037 - RNA, 14 nt, Artificial Sequence
  source: /note="Description of Artificial Sequence: Synthetic oligonucleotide"
  source: /note="RNA"
  modified_base (1)..(1): bicyclic nucleic acid (BNA)
  modified_base (2)..(2): 5-methyl modified nucleotide
  modified_base (5)..(5): 5-methyl modified nucleotide
acaucaaggaagau

SEQ ID NO: 13038 - RNA, 13 nt, Artificial Sequence
  source: /note="Description of Artificial Sequence: Synthetic oligonucleotide"
  source: /note="RNA"
  modified_base (1)..(1): bicyclic nucleic acid (BNA)
  modified_base (2)..(2): 5-methyl modified nucleotide
  modified_base (5)..(5): 5-methyl modified nucleotide
acaucaaggaaga

SEQ ID NO: 13039 - RNA, 12 nt, Artificial Sequence
  source: /note="Description of Artificial Sequence: Synthetic oligonucleotide"
  source: /note="RNA"
  modified_base (1)..(1): bicyclic nucleic acid (BNA)
  modified_base (2)..(2): 5-methyl modified nucleotide
  modified_base (5)..(5): 5-methyl modified nucleotide
acaucaaggaag

SEQ ID NO: 13040 - RNA, 24 nt, Artificial Sequence
  source: /note="Description of Artificial Sequence: Synthetic oligonucleotide"
  source: /note="RNA"
  modified_base (1)..(1): 5-methyl bicyclic nucleic acid
  modified_base (4)..(4): 5-methyl modified nucleotide
  modified_base (16)..(16): 5-methyl modified nucleotide
  modified_base (21)..(21): 5-methyl modified nucleotide
caucaaggaagauggcauuucuag

SEQ ID NO: 13041 - RNA, 23 nt, Artificial Sequence
  source: /note="Description of Artificial Sequence: Synthetic oligonucleotide"
  source: /note="RNA"
  modified_base (1)..(1): 5-methyl bicyclic nucleic acid
  modified_base (4)..(4): 5-methyl modified nucleotide
  modified_base (16)..(16): 5-methyl modified nucleotide
  modified_base (21)..(21): 5-methyl modified nucleotide
caucaaggaagauggcauuucua

SEQ ID NO: 13042 - RNA, 22 nt, Artificial Sequence
  source: /note="Description of Artificial Sequence: Synthetic oligonucleotide"
  source: /note="RNA"
  modified_base (1)..(1): 5-methyl bicyclic nucleic acid
  modified_base (4)..(4): 5-methyl modified nucleotide
  modified_base (16)..(16): 5-methyl modified nucleotide
  modified_base (21)..(21): 5-methyl modified nucleotide
caucaaggaagauggcauuucu

SEQ ID NO: 13043 - RNA, 21 nt, Artificial Sequence
  source: /note="Description of Artificial Sequence: Synthetic oligonucleotide"
  source: /note="RNA"
  modified_base (1)..(1): 5-methyl bicyclic nucleic acid
  modified_base (4)..(4): 5-methyl modified nucleotide
  modified_base (16)..(16): 5-methyl modified nucleotide
  modified_base (21)..(21): 5-methyl modified nucleotide
caucaaggaagauggcauuuc

SEQ ID NO: 13044 - RNA, 20 nt, Artificial Sequence
  source: /note="Description of Artificial Sequence: Synthetic oligonucleotide"
  source: /note="RNA"
  modified_base (1)..(1): 5-methyl bicyclic nucleic acid
  modified_base (4)..(4): 5-methyl modified nucleotide
  modified_base (16)..(16): 5-methyl modified nucleotide
caucaaggaagauggcauuu

SEQ ID NO: 13045 - RNA, 19 nt, Artificial Sequence
  source: /note="Description of Artificial Sequence: Synthetic oligonucleotide"
  source: /note="RNA"
  modified_base (1)..(1): 5-methyl bicyclic nucleic acid
  modified_base (4)..(4): 5-methyl modified nucleotide
  modified_base (16)..(16): 5-methyl modified nucleotide
caucaaggaagauggcauu

SEQ ID NO: 13046 - RNA, 18 nt, Artificial Sequence
  source: /note="Description of Artificial Sequence: Synthetic oligonucleotide"
  source: /note="RNA"
  modified_base (1)..(1): 5-methyl bicyclic nucleic acid
  modified_base (4)..(4): 5-methyl modified nucleotide
  modified_base (16)..(16): 5-methyl modified nucleotide
caucaaggaagauggcau

SEQ ID NO: 13047 - RNA, 17 nt, Artificial Sequence
  source: /note="Description of Artificial Sequence: Synthetic oligonucleotide"
  source: /note="RNA"
  modified_base (1)..(1): 5-methyl bicyclic nucleic acid
  modified_base (4)..(4): 5-methyl modified nucleotide
  modified_base (16)..(16): 5-methyl modified nucleotide
caucaaggaagauggca

SEQ ID NO: 13048 - RNA, 16 nt, Artificial Sequence
  source: /note="Description of Artificial Sequence: Synthetic oligonucleotide"
  source: /note="RNA"
  modified_base (1)..(1): 5-methyl bicyclic nucleic acid
  modified_base (4)..(4): 5-methyl modified nucleotide
  modified_base (16)..(16): 5-methyl modified nucleotide
caucaaggaagauggc

SEQ ID NO: 13049 - RNA, 15 nt, Artificial Sequence
  source: /note="Description of Artificial Sequence: Synthetic oligonucleotide"
  source: /note="RNA"
  modified_base (1)..(1): 5-methyl bicyclic nucleic acid
  modified_base (4)..(4): 5-methyl modified nucleotide
caucaaggaagaugg

SEQ ID NO: 13050 - RNA, 14 nt, Artificial Sequence
  source: /note="Description of Artificial Sequence: Synthetic oligonucleotide"
  source: /note="RNA"
  modified_base (1)..(1): 5-methyl bicyclic nucleic acid
  modified_base (4)..(4): 5-methyl modified nucleotide
caucaaggaagaug

SEQ ID NO: 13051 - RNA, 13 nt, Artificial Sequence
  source: /note="Description of Artificial Sequence: Synthetic oligonucleotide"
  source: /note="RNA"
  modified_base (1)..(1): 5-methyl bicyclic nucleic acid
  modified_base (4)..(4): 5-methyl modified nucleotide
caucaaggaagau

SEQ ID NO: 13052 - RNA, 12 nt, Artificial Sequence
  source: /note="Description of Artificial Sequence: Synthetic oligonucleotide"
  source: /note="RNA"
  modified_base (1)..(1): 5-methyl bicyclic nucleic acid
  modified_base (4)..(4): 5-methyl modified nucleotide
caucaaggaaga

SEQ ID NO: 13053 - RNA, 11 nt, Artificial Sequence
  source: /note="Description of Artificial Sequence: Synthetic oligonucleotide"
  source: /note="RNA"
  modified_base (1)..(1): 5-methyl bicyclic nucleic acid
  modified_base (4)..(4): 5-methyl modified nucleotide
caucaaggaag

SEQ ID NO: 13054 - RNA, 23 nt, Artificial Sequence
  source: /note="Description of Artificial Sequence: Synthetic oligonucleotide"
  source: /note="RNA"
  modified_base (1)..(1): bicyclic nucleic acid (BNA)
  modified_base (3)..(3): 5-methyl modified nucleotide
  modified_base (15)..(15): 5-methyl modified nucleotide
  modified_base (20)..(20): 5-methyl modified nucleotide
aucaaggaagauggcauuucuag

SEQ ID NO: 13055 - RNA, 22 nt, Artificial Sequence
  source: /note="Description of Artificial Sequence: Synthetic oligonucleotide"
  source: /note="RNA"
  modified_base (1)..(1): bicyclic nucleic acid (BNA)
  modified_base (3)..(3): 5-methyl modified nucleotide
  modified_base (15)..(15): 5-methyl modified nucleotide
  modified_base (20)..(20): 5-methyl modified nucleotide
aucaaggaagauggcauuucua

SEQ ID NO: 13056 - RNA, 21 nt, Artificial Sequence
  source: /note="Description of Artificial Sequence: Synthetic oligonucleotide"
  source: /note="RNA"
  modified_base (1)..(1): bicyclic nucleic acid (BNA)
  modified_base (3)..(3): 5-methyl modified nucleotide
  modified_base (15)..(15): 5-methyl modified nucleotide
  modified_base (20)..(20): 5-methyl modified nucleotide
aucaaggaagauggcauuucu

SEQ ID NO: 13057 - RNA, 20 nt, Artificial Sequence
  source: /note="Description of Artificial Sequence: Synthetic oligonucleotide"
  source: /note="RNA"
  modified_base (1)..(1): bicyclic nucleic acid (BNA)
  modified_base (3)..(3): 5-methyl modified nucleotide
  modified_base (15)..(15): 5-methyl modified nucleotide
  modified_base (20)..(20): 5-methyl modified nucleotide
aucaaggaagauggcauuuc

SEQ ID NO: 13058 - RNA, 19 nt, Artificial Sequence
  source: /note="Description of Artificial Sequence: Synthetic oligonucleotide"
  source: /note="RNA"
  modified_base (1)..(1): bicyclic nucleic acid (BNA)
  modified_base (3)..(3): 5-methyl modified nucleotide
  modified_base (15)..(15): 5-methyl modified nucleotide
aucaaggaagauggcauuu

SEQ ID NO: 13059 - RNA, 18 nt, Artificial Sequence
  source: /note="Description of Artificial Sequence: Synthetic oligonucleotide"
  source: /note="RNA"
  modified_base (1)..(1): bicyclic nucleic acid (BNA)
  modified_base (3)..(3): 5-methyl modified nucleotide
  modified_base (15)..(15): 5-methyl modified nucleotide
aucaaggaagauggcauu

SEQ ID NO: 13060 - RNA, 17 nt, Artificial Sequence
  source: /note="Description of Artificial Sequence: Synthetic oligonucleotide"
  source: /note="RNA"
  modified_base (1)..(1): bicyclic nucleic acid (BNA)
  modified_base (3)..(3): 5-methyl modified nucleotide
  modified_base (15)..(15): 5-methyl modified nucleotide
aucaaggaagauggcau

SEQ ID NO: 13061 - RNA, 16 nt, Artificial Sequence
  source: /note="Description of Artificial Sequence: Synthetic oligonucleotide"
  source: /note="RNA"
  modified_base (1)..(1): bicyclic nucleic acid (BNA)
  modified_base (3)..(3): 5-methyl modified nucleotide
  modified_base (15)..(15): 5-methyl modified nucleotide
aucaaggaagauggca

SEQ ID NO: 13062 - RNA, 15 nt, Artificial Sequence
  source: /note="Description of Artificial Sequence: Synthetic oligonucleotide"
  source: /note="RNA"
  modified_base (1)..(1): bicyclic nucleic acid (BNA)
  modified_base (3)..(3): 5-methyl modified nucleotide
  modified_base (15)..(15): 5-methyl modified nucleotide
aucaaggaagauggc

SEQ ID NO: 13063 - RNA, 14 nt, Artificial Sequence
  source: /note="Description of Artificial Sequence: Synthetic oligonucleotide"
  source: /note="RNA"
  modified_base (1)..(1): bicyclic nucleic acid (BNA)
  modified_base (3)..(3): 5-methyl modified nucleotide
aucaaggaagaugg

SEQ ID NO: 13064 - RNA, 13 nt, Artificial Sequence
  source: /note="Description of Artificial Sequence: Synthetic oligonucleotide"
  source: /note="RNA"
  modified_base (1)..(1): bicyclic nucleic acid (BNA)
  modified_base (3)..(3): 5-methyl modified nucleotide
aucaaggaagaug

SEQ ID NO: 13065 - RNA, 12 nt, Artificial Sequence
  source: /note="Description of Artificial Sequence: Synthetic oligonucleotide"
  source: /note="RNA"
  modified_base (1)..(1): bicyclic nucleic acid (BNA)
  modified_base (3)..(3): 5-methyl modified nucleotide
aucaaggaagau

SEQ ID NO: 13066 - RNA, 11 nt, Artificial Sequence
  source: /note="Description of Artificial Sequence: Synthetic oligonucleotide"
  source: /note="RNA"
  modified_base (1)..(1): bicyclic nucleic acid (BNA)
  modified_base (3)..(3): 5-methyl modified nucleotide
aucaaggaaga

SEQ ID NO: 13067 - RNA, 10 nt, Artificial Sequence
  source: /note="Description of Artificial Sequence: Synthetic oligonucleotide"
  source: /note="RNA"
  modified_base (1)..(1): bicyclic nucleic acid (BNA)
  modified_base (3)..(3): 5-methyl modified nucleotide
aucaaggaag

SEQ ID NO: 13068 - RNA, 23 nt, Artificial Sequence
  source: /note="Description of Artificial Sequence: Synthetic oligonucleotide"
  source: /note="RNA"
  modified_base (1)..(1): 5-methyl bicyclic nucleic acid
  modified_base (2)..(2): 5-methyl modified nucleotide
  modified_base (7)..(7): 5-methyl modified nucleotide
  modified_base (13)..(13): 5-methyl modified nucleotide
  modified_base (14)..(14): 5-methyl modified nucleotide
  modified_base (16)..(16): 5-methyl modified nucleotide
  modified_base (17)..(17): 5-methyl modified nucleotide
  modified_base (20)..(20): 5-methyl modified nucleotide
  modified_base (23)..(23): 5-methyl modified nucleotide
ccagagcagguaccuccaacauc

SEQ ID NO: 13069 - RNA, 18 nt, Artificial Sequence
  source: /note="Description of Artificial Sequence: Synthetic oligonucleotide"
  source: /note="RNA"
  modified_base (1)..(1): 5-methyl bicyclic nucleic acid
  modified_base (2)..(2): 5-methyl modified nucleotide
  modified_base (7)..(7): 5-methyl modified nucleotide
  modified_base (13)..(13): 5-methyl modified nucleotide
  modified_base (14)..(14): 5-methyl modified nucleotide
  modified_base (16)..(16): 5-methyl modified nucleotide
  modified_base (17)..(17): 5-methyl modified nucleotide
ccagagcagguaccucca

SEQ ID NO: 13070 - RNA, 23 nt, Artificial Sequence
  source: /note="Description of Artificial Sequence: Synthetic oligonucleotide"
  source: /note="RNA"
  modified_base (1)..(1): 5-methyl bicyclic nucleic acid
  modified_base (2)..(2): 5-methyl modified nucleotide
  modified_base (4)..(4): 5-methyl modified nucleotide
  modified_base (18)..(18): 5-methyl modified nucleotide
ccucugugauuuuauaacuugau

SEQ ID NO: 13071 - DNA, 17 bp, Artificial Sequence
  source: /note="Description of Artificial Sequence: Synthetic oligonucleotide"
  source: /note="Description of Combined DNA/RNA Molecule: Synthetic oligonucleotide"
  source: /note="DNA/RNA"
  modified_base (1)..(1): bicyclic nucleic acid (BNA)
  modified_base (2)..(2): 5-methyl modified nucleotide
  modified_base (4)..(4): 5-methyl modified nucleotide
  modified_base (5)..(5): 5-methyl modified nucleotide
  modified_base (6)..(6): 5-methyl modified nucleotide
  modified_base (8)..(8): 5-methyl modified nucleotide
  modified_base (9)..(9): 5-methyl modified nucleotide
  modified_base (12)..(12): 5-methyl modified nucleotide
  modified_base (14)..(14): 5-methyl modified nucleotide
  modified_base (15)..(15): 5-methyl modified nucleotide
  modified_base (16)..(16): 5-methyl modified nucleotide
tcacccaccaucacccu

SEQ ID NO: 13072 - DNA, 20 bp, Artificial Sequence
  source: /note="Description of Artificial Sequence: Synthetic oligonucleotide"
  source: /note="Description of Combined DNA/RNA Molecule: Synthetic oligonucleotide"
  source: /note="DNA/RNA"
  modified_base (1)..(1): bicyclic nucleic acid (BNA)
  modified_base (7)..(7): 5-methyl modified nucleotide
  modified_base (8)..(8): 5-methyl modified nucleotide
  modified_base (10)..(10): 5-methyl modified nucleotide
  modified_base (16)..(16): 5-methyl modified nucleotide
  modified_base (18)..(18): 5-methyl modified nucleotide
  modified_base (19)..(19): 5-methyl modified nucleotide
  modified_base (20)..(20): 5-methyl modified nucleotide
tgauauccucaaggucaccc

SEQ ID NO: 13073 - RNA, 22 nt, Artificial Sequence
  source: /note="Description of Artificial Sequence: Synthetic oligonucleotide"
  source: /note="RNA"
  modified_base (1)..(1): 5-methyl bicyclic nucleic acid
  modified_base (4)..(4): 5-methyl modified nucleotide
  modified_base (13)..(13): 5-methyl modified nucleotide
  modified_base (16)..(16): 5-methyl modified nucleotide
  modified_base (18)..(18): 5-methyl modified nucleotide
cugcuugaugaucaucucguug

SEQ ID NO: 13074 - RNA, 18 nt, Artificial Sequence
  source: /note="Description of Artificial Sequence: Synthetic oligonucleotide"
  source: /note="RNA"
  modified_base (1)..(1): 5-methyl bicyclic nucleic acid
  modified_base (4)..(4): 5-methyl modified nucleotide
  modified_base (13)..(13): 5-methyl modified nucleotide
  modified_base (16)..(16): 5-methyl modified nucleotide
  modified_base (18)..(18): 5-methyl modified nucleotide
cugcuugaugaucaucuc

SEQ ID NO: 13075 - RNA, 19 nt, Artificial Sequence
  source: /note="Description of Artificial Sequence: Synthetic oligonucleotide"
  source: /note="RNA"
  modified_base (1)..(1): bicyclic nucleic acid (BNA)
  modified_base (5)..(5): 5-methyl modified nucleotide
  modified_base (6)..(6): 5-methyl modified nucleotide
  modified_base (14)..(14): 5-methyl modified nucleotide
  modified_base (15)..(15): 5-methyl modified nucleotide
  modified_base (17)..(17): 5-methyl modified nucleotide
guuuccuuaguaaccacag

SEQ ID NO: 13076 - RNA, 17 nt, Artificial Sequence
  source: /note="Description of Artificial Sequence: Synthetic oligonucleotide"
  source: /note="RNA"
  modified_base (1)..(1): bicyclic nucleic acid (BNA)
  modified_base (5)..(5): 5-methyl modified nucleotide
  modified_base (6)..(6): 5-methyl modified nucleotide
  modified_base (14)..(14): 5-methyl modified nucleotide
  modified_base (15)..(15): 5-methyl modified nucleotide
  modified_base (17)..(17): 5-methyl modified nucleotide
guuuccuuaguaaccac

SEQ ID NO: 13077 - DNA, 20 bp, Artificial Sequence
  source: /note="Description of Artificial Sequence: Synthetic oligonucleotide"
  source: /note="Description of Combined DNA/RNA Molecule: Synthetic oligonucleotide"
  source: /note="DNA/RNA"
  source: /note="5' tri-ethylene glycol (TEG)"
  modified_base (1)..(1): bicyclic nucleic acid (BNA)
  modified_base (2)..(2): 5-methyl modified nucleotide
  modified_base (14)..(14): 5-methyl modified nucleotide
  modified_base (19)..(19): 5-methyl modified nucleotide
tcaaggaagauggcauuucu

SEQ ID NO: 13078 - DNA, 22 bp, Artificial Sequence
  source: /note="Description of Artificial Sequence: Synthetic oligonucleotide"
  source: /note="Description of Combined DNA/RNA Molecule: Synthetic oligonucleotide"
  source: /note="DNA/RNA"
  source: /note="5' tri-ethylene glycol (TEG)"
  modified_base (1)..(1): bicyclic nucleic acid (BNA)
  modified_base (2)..(2): 5-methyl modified nucleotide
  modified_base (14)..(14): 5-methyl modified nucleotide
  modified_base (19)..(19): 5-methyl modified nucleotide
tcaaggaagauggcauuucuag

SEQ ID NO: 13079 - RNA, 18 nt, Artificial Sequence
  source: /note="Description of Artificial Sequence: Synthetic oligonucleotide"
  source: /note="RNA"
  source: /note="5' tri-ethylene glycol (TEG)"
  modified_base (1)..(1): bicyclic nucleic acid (BNA)
  modified_base (9)..(9): 5-methyl modified nucleotide
  modified_base (13)..(13): 5-methyl modified nucleotide
  modified_base (14)..(14): 5-methyl modified nucleotide
  modified_base (18)..(18): 5-methyl modified nucleotide
gguaaguucuguccaagc

SEQ ID NO: 13080 - RNA, 18 nt, Artificial Sequence
  source: /note="Description of Artificial Sequence: Synthetic oligonucleotide"
  source: /note="RNA"
  source: /note="5' tri-ethylene glycol (TEG)"
  modified_base (1)..(1): bicyclic nucleic acid (BNA)
  modified_base (8)..(8): 5-methyl modified nucleotide
  modified_base (12)..(12): 5-methyl modified nucleotide
  modified_base (13)..(13): 5-methyl modified nucleotide
  modified_base (17)..(17): 5-methyl modified nucleotide
  modified_base (18)..(18): 5-methyl modified nucleotide
guaaguucuguccaagcc

SEQ ID NO: 13081 - RNA, 18 nt, Artificial Sequence
  source: /note="Description of Artificial Sequence: Synthetic oligonucleotide"
  source: /note="RNA"
  source: /note="5' tri-ethylene glycol (TEG)"
  modified_base (1)..(1): bicyclic nucleic acid (BNA)
  modified_base (4)..(4): 5-methyl modified nucleotide
  modified_base (13)..(13): 5-methyl modified nucleotide
  modified_base (17)..(17): 5-methyl modified nucleotide
  modified_base (18)..(18): 5-methyl modified nucleotide
agucgguaaguucugucc

SEQ ID NO: 13082 - RNA, 18 nt, Artificial Sequence
  source: /note="Description of Artificial Sequence: Synthetic oligonucleotide"
  source: /note="RNA"
  source: /note="5' tri-ethylene glycol (TEG)"
  modified_base (1)..(1): 5-methyl bicyclic nucleic acid
  modified_base (5)..(5): 5-methyl modified nucleotide
  modified_base (6)..(6): 5-methyl modified nucleotide
  modified_base (10)..(10): 5-methyl modified nucleotide
  modified_base (11)..(11): 5-methyl modified nucleotide
  modified_base (12)..(12): 5-methyl modified nucleotide
cuguccaagcccgguuga

SEQ ID NO: 13083 - DNA, 15 bp, Artificial Sequence
  source: /note="Description of Artificial Sequence: Synthetic oligonucleotide"
  source: /note="Description of Combined DNA/RNA Molecule: Synthetic oligonucleotide"
  source: /note="DNA/RNA"
  source: /note="5' tri-ethylene glycol (TEG)"
  modified_base (1)..(1): bicyclic nucleic acid (BNA)
  modified_base (7)..(7): 5-methyl modified nucleotide
  modified_base (11)..(11): 5-methyl modified nucleotide
  modified_base (12)..(12): 5-methyl modified nucleotide
taaguucuguccaag

SEQ ID NO: 13084 - DNA, 20 bp, Artificial Sequence
  source: /note="Description of Artificial Sequence: Synthetic oligonucleotide"
  source: /note="Description of Combined DNA/RNA Molecule: Synthetic oligonucleotide"
  source: /note="DNA/RNA"
  source: /note="5' tri-ethylene glycol (TEG)"
  modified_base (1)..(1): bicyclic nucleic acid (BNA)
  modified_base (3)..(3): 5-methyl modified nucleotide
  modified_base (7)..(7): 5-methyl modified nucleotide
  modified_base (8)..(8): 5-methyl modified nucleotide
  modified_base (12)..(12): 5-methyl modified nucleotide
  modified_base (13)..(13): 5-methyl modified nucleotide
  modified_base (14)..(14): 5-methyl modified nucleotide
tucuguccaagcccgguuga

SEQ ID NO: 13085 - DNA, 19 bp, Artificial Sequence
  source: /note="Description of Artificial Sequence: Synthetic oligonucleotide"
  source: /note="Description of Combined DNA/RNA Molecule: Synthetic oligonucleotide"
  source: /note="DNA/RNA"
  source: /note="5' tri-ethylene glycol (TEG)"
  modified_base (1)..(1): bicyclic nucleic acid (BNA)
  modified_base (3)..(3): 5-methyl modified nucleotide
  modified_base (7)..(7): 5-methyl modified nucleotide
  modified_base (8)..(8): 5-methyl modified nucleotide
  modified_base (12)..(12): 5-methyl modified nucleotide
  modified_base (13)..(13): 5-methyl modified nucleotide
  modified_base (14)..(14): 5-methyl modified nucleotide
tucuguccaagcccgguug

SEQ ID NO: 13086 - DNA, 18 bp, Artificial Sequence
  source: /note="Description of Artificial Sequence: Synthetic oligonucleotide"
  source: /note="Description of Combined DNA/RNA Molecule: Synthetic oligonucleotide"
  source: /note="DNA/RNA"
  source: /note="5' tri-ethylene glycol (TEG)"
  modified_base (1)..(1): bicyclic nucleic acid (BNA)
  modified_base (3)..(3): 5-methyl modified nucleotide
  modified_base (7)..(7): 5-methyl modified nucleotide
  modified_base (8)..(8): 5-methyl modified nucleotide
  modified_base (12)..(12): 5-methyl modified nucleotide
  modified_base (13)..(13): 5-methyl modified nucleotide
  modified_base (14)..(14): 5-methyl modified nucleotide
tucuguccaagcccgguu

SEQ ID NO: 13087 - DNA, 17 bp, Artificial Sequence
  source: /note="Description of Artificial Sequence: Synthetic oligonucleotide"
  source: /note="Description of Combined DNA/RNA Molecule: Synthetic oligonucleotide"
  source: /note="DNA/RNA"
  source: /note="5' tri-ethylene glycol (TEG)"
  modified_base (1)..(1): bicyclic nucleic acid (BNA)
  modified_base (3)..(3): 5-methyl modified nucleotide
  modified_base (7)..(7): 5-methyl modified nucleotide
  modified_base (8)..(8): 5-methyl modified nucleotide
  modified_base (12)..(12): 5-methyl modified nucleotide
  modified_base (13)..(13): 5-methyl modified nucleotide
  modified_base (14)..(14): 5-methyl modified nucleotide
tucuguccaagcccggu

SEQ ID NO: 13088 - DNA, 16 bp, Artificial Sequence
  source: /note="Description of Artificial Sequence: Synthetic oligonucleotide"
  source: /note="Description of Combined DNA/RNA Molecule: Synthetic oligonucleotide"
  source: /note="DNA/RNA"
  source: /note="5' tri-ethylene glycol (TEG)"
  modified_base (1)..(1): bicyclic nucleic acid (BNA)
  modified_base (3)..(3): 5-methyl modified nucleotide
  modified_base (7)..(7): 5-methyl modified nucleotide
  modified_base (8)..(8): 5-methyl modified nucleotide
  modified_base (12)..(12): 5-methyl modified nucleotide
  modified_base (13)..(13): 5-methyl modified nucleotide
  modified_base (14)..(14): 5-methyl modified nucleotide
tucuguccaagcccgg

SEQ ID NO: 13089 - DNA, 15 bp, Artificial Sequence
  source: /note="Description of Artificial Sequence: Synthetic oligonucleotide"
  source: /note="Description of Combined DNA/RNA Molecule: Synthetic oligonucleotide"
  source: /note="DNA/RNA"
  source: /note="5' tri-ethylene glycol (TEG)"
  modified_base (1)..(1): bicyclic nucleic acid (BNA)
  modified_base (3)..(3): 5-methyl modified nucleotide
  modified_base (7)..(7): 5-methyl modified nucleotide
  modified_base (8)..(8): 5-methyl modified nucleotide
  modified_base (12)..(12): 5-methyl modified nucleotide
  modified_base (13)..(13): 5-methyl modified nucleotide
  modified_base (14)..(14): 5-methyl modified nucleotide
tucuguccaagcccg

SEQ ID NO: 13090 - DNA, 14 bp, Artificial Sequence
  source: /note="Description of Artificial Sequence: Synthetic oligonucleotide"
  source: /note="Description of Combined DNA/RNA Molecule: Synthetic oligonucleotide"
  source: /note="DNA/RNA"
  source: /note="5' tri-ethylene glycol (TEG)"
  modified_base (1)..(1): bicyclic nucleic acid (BNA)
  modified_base (3)..(3): 5-methyl modified nucleotide
  modified_base (7)..(7): 5-methyl modified nucleotide
  modified_base (8)..(8): 5-methyl modified nucleotide
  modified_base (12)..(12): 5-methyl modified nucleotide
  modified_base (13)..(13): 5-methyl modified nucleotide
  modified_base (14)..(14): 5-methyl modified nucleotide
tucuguccaagccc

SEQ ID NO: 13091 - DNA, 13 bp, Artificial Sequence
  source: /note="Description of Artificial Sequence: Synthetic oligonucleotide"
  source: /note="Description of Combined DNA/RNA Molecule: Synthetic oligonucleotide"
  source: /note="DNA/RNA"
  source: /note="5' tri-ethylene glycol (TEG)"
  modified_base (1)..(1): bicyclic nucleic acid (BNA)
  modified_base (3)..(3): 5-methyl modified nucleotide
  modified_base (7)..(7): 5-methyl modified nucleotide
  modified_base (8)..(8): 5-methyl modified nucleotide
  modified_base (12)..(12): 5-methyl modified nucleotide
  modified_base (13)..(13): 5-methyl modified nucleotide
tucuguccaagcc

SEQ ID NO: 13092 - DNA, 12 bp, Artificial Sequence
  source: /note="Description of Artificial Sequence: Synthetic oligonucleotide"
  source: /note="Description of Combined DNA/RNA Molecule: Synthetic oligonucleotide"
  source: /note="DNA/RNA"
  source: /note="5' tri-ethylene glycol (TEG)"
  modified_base (1)..(1): bicyclic nucleic acid (BNA)
  modified_base (3)..(3): 5-methyl modified nucleotide
  modified_base (7)..(7): 5-methyl modified nucleotide
  modified_base (8)..(8): 5-methyl modified nucleotide
  modified_base (12)..(12): 5-methyl modified nucleotide
tucuguccaagc

SEQ ID NO: 13093 - DNA, 11 bp, Artificial Sequence
  source: /note="Description of Artificial Sequence: Synthetic oligonucleotide"
  source: /note="Description of Combined DNA/RNA Molecule: Synthetic oligonucleotide"
  source: /note="DNA/RNA"
  source: /note="5' tri-ethylene glycol (TEG)"
  modified_base (1)..(1): bicyclic nucleic acid (BNA)
  modified_base (3)..(3): 5-methyl modified nucleotide
  modified_base (7)..(7): 5-methyl modified nucleotide
  modified_base (8)..(8): 5-methyl modified nucleotide
tucuguccaag

SEQ ID NO: 13094 - DNA, 10 bp, Artificial Sequence
  source: /note="Description of Artificial Sequence: Synthetic oligonucleotide"
  source: /note="Description of Combined DNA/RNA Molecule: Synthetic oligonucleotide"
  source: /note="DNA/RNA"
  source: /note="5' tri-ethylene glycol (TEG)"
  modified_base (1)..(1): bicyclic nucleic acid (BNA)
  modified_base (3)..(3): 5-methyl modified nucleotide
  modified_base (7)..(7): 5-methyl modified nucleotide
  modified_base (8)..(8): 5-methyl modified nucleotide
tucuguccaa

SEQ ID NO: 13095 - DNA, 9 bp, Artificial Sequence
  source: /note="Description of Artificial Sequence: Synthetic oligonucleotide"
  source: /note="Description of Combined DNA/RNA Molecule: Synthetic oligonucleotide"
  source: /note="DNA/RNA"
  source: /note="5' tri-ethylene glycol (TEG)"
  modified_base (1)..(1): bicyclic nucleic acid (BNA)
  modified_base (3)..(3): 5-methyl modified nucleotide
  modified_base (7)..(7): 5-methyl modified nucleotide
  modified_base (8)..(8): 5-methyl modified nucleotide
tucugucca

SEQ ID NO: 13096 - DNA, 8 bp, Artificial Sequence
  source: /note="Description of Artificial Sequence: Synthetic oligonucleotide"
  source: /note="Description of Combined DNA/RNA Molecule: Synthetic oligonucleotide"
  source: /note="DNA/RNA"
  source: /note="5' tri-ethylene glycol (TEG)"
  modified_base (1)..(1): bicyclic nucleic acid (BNA)
  modified_base (3)..(3): 5-methyl modified nucleotide
  modified_base (7)..(7): 5-methyl modified nucleotide
  modified_base (8)..(8): 5-methyl modified nucleotide
tucugucc

SEQ ID NO: 13097 - DNA, 19 bp, Artificial Sequence
  source: /note="Description of Artificial Sequence: Synthetic oligonucleotide"
  source: /note="Description of Combined DNA/RNA Molecule: Synthetic oligonucleotide"
  source: /note="DNA/RNA"
  source: /note="5' tri-ethylene glycol (TEG)"
  modified_base (1)..(1): bicyclic nucleic acid (BNA)
  modified_base (2)..(2): 5-methyl modified nucleotide
  modified_base (6)..(6): 5-methyl modified nucleotide
  modified_base (7)..(7): 5-methyl modified nucleotide
  modified_base (11)..(11): 5-methyl modified nucleotide
  modified_base (12)..(12): 5-methyl modified nucleotide
  modified_base (13)..(13): 5-methyl modified nucleotide
tcuguccaagcccgguuga

SEQ ID NO: 13098 - DNA, 18 bp, Artificial Sequence
  source: /note="Description of Artificial Sequence: Synthetic oligonucleotide"
  source: /note="Description of Combined DNA/RNA Molecule: Synthetic oligonucleotide"
  source: /note="DNA/RNA"
  source: /note="5' tri-ethylene glycol (TEG)"
  modified_base (1)..(1): bicyclic nucleic acid (BNA)
  modified_base (2)..(2): 5-methyl modified nucleotide
  modified_base (6)..(6): 5-methyl modified nucleotide
  modified_base (7)..(7): 5-methyl modified nucleotide
  modified_base (11)..(11): 5-methyl modified nucleotide
  modified_base (12)..(12): 5-methyl modified nucleotide
  modified_base (13)..(13): 5-methyl modified nucleotide
tcuguccaagcccgguug

SEQ ID NO: 13099 - DNA, 17 bp, Artificial Sequence
  source: /note="Description of Artificial Sequence: Synthetic oligonucleotide"
  source: /note="Description of Combined DNA/RNA Molecule: Synthetic oligonucleotide"
  source: /note="DNA/RNA"
  source: /note="5' tri-ethylene glycol (TEG)"
  modified_base (1)..(1): bicyclic nucleic acid (BNA)
  modified_base (2)..(2): 5-methyl modified nucleotide
  modified_base (6)..(6): 5-methyl modified nucleotide
  modified_base (7)..(7): 5-methyl modified nucleotide
  modified_base (11)..(11): 5-methyl modified nucleotide
  modified_base (12)..(12): 5-methyl modified nucleotide
  modified_base (13)..(13): 5-methyl modified nucleotide
tcuguccaagcccgguu

SEQ ID NO: 13100 - DNA, 16 bp, Artificial Sequence
  source: /note="Description of Artificial Sequence: Synthetic oligonucleotide"
  source: /note="Description of Combined DNA/RNA Molecule: Synthetic oligonucleotide"
  source: /note="DNA/RNA"
  source: /note="5' tri-ethylene glycol (TEG)"
  modified_base (1)..(1): bicyclic nucleic acid (BNA)
  modified_base (2)..(2): 5-methyl modified nucleotide
  modified_base (6)..(6): 5-methyl modified nucleotide
  modified_base (7)..(7): 5-methyl modified nucleotide
  modified_base (11)..(11): 5-methyl modified nucleotide
  modified_base (12)..(12): 5-methyl modified nucleotide
  modified_base (13)..(13): 5-methyl modified nucleotide
tcuguccaagcccggu

SEQ ID NO: 13101 - DNA, 15 bp, Artificial Sequence
  source: /note="Description of Artificial Sequence: Synthetic oligonucleotide"
  source: /note="Description of Combined DNA/RNA Molecule: Synthetic oligonucleotide"
  source: /note="DNA/RNA"
  source: /note="5' tri-ethylene glycol (TEG)"
  modified_base (1)..(1): bicyclic nucleic acid (BNA)
  modified_base (2)..(2): 5-methyl modified nucleotide
  modified_base (6)..(6): 5-methyl modified nucleotide
  modified_base (7)..(7): 5-methyl modified nucleotide
  modified_base (11)..(11): 5-methyl modified nucleotide
  modified_base (12)..(12): 5-methyl modified nucleotide
  modified_base (13)..(13): 5-methyl modified nucleotide
tcuguccaagcccgg

SEQ ID NO: 13102 - DNA, 14 bp, Artificial Sequence
  source: /note="Description of Artificial Sequence: Synthetic oligonucleotide"
  source: /note="Description of Combined DNA/RNA Molecule: Synthetic oligonucleotide"
  source: /note="DNA/RNA"
  source: /note="5' tri-ethylene glycol (TEG)"
  modified_base (1)..(1): bicyclic nucleic acid (BNA)
  modified_base (2)..(2): 5-methyl modified nucleotide
  modified_base (6)..(6): 5-methyl modified nucleotide
  modified_base (7)..(7): 5-methyl modified nucleotide
  modified_base (11)..(11): 5-methyl modified nucleotide
  modified_base (12)..(12): 5-methyl modified nucleotide
  modified_base (13)..(13): 5-methyl modified nucleotide
tcuguccaagcccg

SEQ ID NO: 13103 - DNA, 13 bp, Artificial Sequence
  source: /note="Description of Artificial Sequence: Synthetic oligonucleotide"
  source: /note="Description of Combined DNA/RNA Molecule: Synthetic oligonucleotide"
  source: /note="DNA/RNA"
  source: /note="5' tri-ethylene glycol (TEG)"
  modified_base (1)..(1): bicyclic nucleic acid (BNA)
  modified_base (2)..(2): 5-methyl modified nucleotide
  modified_base (6)..(6): 5-methyl modified nucleotide
  modified_base (7)..(7): 5-methyl modified nucleotide
  modified_base (11)..(11): 5-methyl modified nucleotide
  modified_base (12)..(12): 5-methyl modified nucleotide
  modified_base (13)..(13): 5-methyl modified nucleotide
tcuguccaagccc

SEQ ID NO: 13104 - DNA, 12 bp, Artificial Sequence
  source: /note="Description of Artificial Sequence: Synthetic oligonucleotide"
  source: /note="Description of Combined DNA/RNA Molecule: Synthetic oligonucleotide"
  source: /note="DNA/RNA"
  source: /note="5' tri-ethylene glycol (TEG)"
  modified_base (1)..(1): bicyclic nucleic acid (BNA)
  modified_base (2)..(2): 5-methyl modified nucleotide
  modified_base (6)..(6): 5-methyl modified nucleotide
  modified_base (7)..(7): 5-methyl modified nucleotide
  modified_base (11)..(11): 5-methyl modified nucleotide
  modified_base (12)..(12): 5-methyl modified nucleotide
tcuguccaagcc

SEQ ID NO: 13105 - DNA, 11 bp, Artificial Sequence
  source: /note="Description of Artificial Sequence: Synthetic oligonucleotide"
  source: /note="Description of Combined DNA/RNA Molecule: Synthetic oligonucleotide"
  source: /note="DNA/RNA"
  source: /note="5' tri-ethylene glycol (TEG)"
  modified_base (1)..(1): bicyclic nucleic acid (BNA)
  modified_base (2)..(2): 5-methyl modified nucleotide
  modified_base (6)..(6): 5-methyl modified nucleotide
  modified_base (7)..(7): 5-methyl modified nucleotide
  modified_base (11)..(11): 5-methyl modified nucleotide
tcuguccaagc

SEQ ID NO: 13106 - DNA, 10 bp, Artificial Sequence
  source: /note="Description of Artificial Sequence: Synthetic oligonucleotide"
  source: /note="Description of Combined DNA/RNA Molecule: Synthetic oligonucleotide"
  source: /note="DNA/RNA"
  source: /note="5' tri-ethylene glycol (TEG)"
  modified_base (1)..(1): bicyclic nucleic acid (BNA)
  modified_base (2)..(2): 5-methyl modified nucleotide
  modified_base (6)..(6): 5-methyl modified nucleotide
  modified_base (7)..(7): 5-methyl modified nucleotide
tcuguccaag

SEQ ID NO: 13107 - DNA, 9 bp, Artificial Sequence
  source: /note="Description of Artificial Sequence: Synthetic oligonucleotide"
  source: /note="Description of Combined DNA/RNA Molecule: Synthetic oligonucleotide"
  source: /note="DNA/RNA"
  source: /note="5' tri-ethylene glycol (TEG)"
  modified_base (1)..(1): bicyclic nucleic acid (BNA)
  modified_base (2)..(2): 5-methyl modified nucleotide
  modified_base (6)..(6): 5-methyl modified nucleotide
  modified_base (7)..(7): 5-methyl modified nucleotide
tcuguccaa

SEQ ID NO: 13108 - DNA, 8 bp, Artificial Sequence
  source: /note="Description of Artificial Sequence: Synthetic oligonucleotide"
  source: /note="Description of Combined DNA/RNA Molecule: Synthetic oligonucleotide"
  source: /note="DNA/RNA"
  source: /note="5' tri-ethylene glycol (TEG)"
  modified_base (1)..(1): bicyclic nucleic acid (BNA)
  modified_base (2)..(2): 5-methyl modified nucleotide
  modified_base (6)..(6): 5-methyl modified nucleotide
  modified_base (7)..(7): 5-methyl modified nucleotide
tcugucca

SEQ ID NO: 13109 - RNA, 17 nt, Artificial Sequence
  source: /note="Description of Artificial Sequence: Synthetic oligonucleotide"
  source: /note="RNA"
  source: /note="5' tri-ethylene glycol (TEG)"
  modified_base (1)..(1): 5-methyl bicyclic nucleic acid
  modified_base (5)..(5): 5-methyl modified nucleotide
  modified_base (6)..(6): 5-methyl modified nucleotide
  modified_base (10)..(10): 5-methyl modified nucleotide
  modified_base (11)..(11): 5-methyl modified nucleotide
  modified_base (12)..(12): 5-methyl modified nucleotide
cuguccaagcccgguug

SEQ ID NO: 13110 - RNA, 16 nt, Artificial Sequence
  source: /note="Description of Artificial Sequence: Synthetic oligonucleotide"
  source: /note="RNA"
  source: /note="5' tri-ethylene glycol (TEG)"
  modified_base (1)..(1): 5-methyl bicyclic nucleic acid
  modified_base (5)..(5): 5-methyl modified nucleotide
  modified_base (6)..(6): 5-methyl modified nucleotide
  modified_base (10)..(10): 5-methyl modified nucleotide
  modified_base (11)..(11): 5-methyl modified nucleotide
  modified_base (12)..(12): 5-methyl modified nucleotide
cuguccaagcccgguu

SEQ ID NO: 13111 - RNA, 15 nt, Artificial Sequence
  source: /note="Description of Artificial Sequence: Synthetic oligonucleotide"
  source: /note="RNA"
  source: /note="5' tri-ethylene glycol (TEG)"
  modified_base (1)..(1): 5-methyl bicyclic nucleic acid
  modified_base (5)..(5): 5-methyl modified nucleotide
  modified_base (6)..(6): 5-methyl modified nucleotide
  modified_base (10)..(10): 5-methyl modified nucleotide
  modified_base (11)..(11): 5-methyl modified nucleotide
  modified_base (12)..(12): 5-methyl modified nucleotide
cuguccaagcccggu

SEQ ID NO: 13112 - RNA, 14 nt, Artificial Sequence
  source: /note="Description of Artificial Sequence: Synthetic oligonucleotide"
  source: /note="RNA"
  source: /note="5' tri-ethylene glycol (TEG)"
  modified_base (1)..(1): 5-methyl bicyclic nucleic acid
  modified_base (5)..(5): 5-methyl modified nucleotide
  modified_base (6)..(6): 5-methyl modified nucleotide
  modified_base (10)..(10): 5-methyl modified nucleotide
  modified_base (11)..(11): 5-methyl modified nucleotide
  modified_base (12)..(12): 5-methyl modified nucleotide
cuguccaagcccgg

SEQ ID NO: 13113 - RNA, 13 nt, Artificial Sequence
  source: /note="Description of Artificial Sequence: Synthetic oligonucleotide"
  source: /note="RNA"
  source: /note="5' tri-ethylene glycol (TEG)"
  modified_base (1)..(1): 5-methyl bicyclic nucleic acid
  modified_base (5)..(5): 5-methyl modified nucleotide
  modified_base (6)..(6): 5-methyl modified nucleotide
  modified_base (10)..(10): 5-methyl modified nucleotide
  modified_base (11)..(11): 5-methyl modified nucleotide
  modified_base (12)..(12): 5-methyl modified nucleotide
cuguccaagcccg

SEQ ID NO: 13114 - RNA, 12 nt, Artificial Sequence
  source: /note="Description of Artificial Sequence: Synthetic oligonucleotide"
  source: /note="RNA"
  source: /note="5' tri-ethylene glycol (TEG)"
  modified_base (1)..(1): 5-methyl bicyclic nucleic acid
  modified_base (5)..(5): 5-methyl modified nucleotide
  modified_base (6)..(6): 5-methyl modified nucleotide
  modified_base (10)..(10): 5-methyl modified nucleotide
  modified_base (11)..(11): 5-methyl modified nucleotide
  modified_base (12)..(12): 5-methyl modified nucleotide
cuguccaagccc

SEQ ID NO: 13115 - RNA, 11 nt, Artificial Sequence
  source: /note="Description of Artificial Sequence: Synthetic oligonucleotide"
  source: /note="RNA"
  source: /note="5' tri-ethylene glycol (TEG)"
  modified_base (1)..(1): 5-methyl bicyclic nucleic acid
  modified_base (5)..(5): 5-methyl modified nucleotide
  modified_base (6)..(6): 5-methyl modified nucleotide
  modified_base (10)..(10): 5-methyl modified nucleotide
  modified_base (11)..(11): 5-methyl modified nucleotide
cuguccaagcc

SEQ ID NO: 13116 - RNA, 10 nt, Artificial Sequence
  source: /note="Description of Artificial Sequence: Synthetic oligonucleotide"
  source: /note="RNA"
  source: /note="5' tri-ethylene glycol (TEG)"
  modified_base (1)..(1): 5-methyl bicyclic nucleic acid
  modified_base (5)..(5): 5-methyl modified nucleotide
  modified_base (6)..(6): 5-methyl modified nucleotide
  modified_base (10)..(10): 5-methyl modified nucleotide
cuguccaagc

SEQ ID NO: 13117 - RNA, 9 nt, Artificial Sequence
  source: /note="Description of Artificial Sequence: Synthetic oligonucleotide"
  source: /note="RNA"
  source: /note="5' tri-ethylene glycol (TEG)"
  modified_base (1)..(1): 5-methyl bicyclic nucleic acid
  modified_base (5)..(5): 5-methyl modified nucleotide
  modified_base (6)..(6): 5-methyl modified nucleotide
cuguccaag

SEQ ID NO: 13118 - RNA, 8 nt, Artificial Sequence
  source: /note="Description of Artificial Sequence: Synthetic oligonucleotide"
  source: /note="RNA"
  source: /note="5' tri-ethylene glycol (TEG)"
  modified_base (1)..(1): 5-methyl bicyclic nucleic acid
  modified_base (5)..(5): 5-methyl modified nucleotide
  modified_base (6)..(6): 5-methyl modified nucleotide
cuguccaa

SEQ ID NO: 13119 - RNA, 20 nt, Artificial Sequence
  source: /note="Description of Artificial Sequence: Synthetic oligonucleotide"
  source: /note="RNA"
  source: /note="5' tri-ethylene glycol (TEG)"
  modified_base (1)..(1): bicyclic nucleic acid (BNA)
  modified_base (4)..(4): 5-methyl modified nucleotide
  modified_base (8)..(8): 5-methyl modified nucleotide
  modified_base (9)..(9): 5-methyl modified nucleotide
  modified_base (13)..(13): 5-methyl modified nucleotide
  modified_base (14)..(14): 5-methyl modified nucleotide
  modified_base (15)..(15): 5-methyl modified nucleotide
guucuguccaagcccgguug

SEQ ID NO: 13120 - RNA, 19 nt, Artificial Sequence
  source: /note="Description of Artificial Sequence: Synthetic oligonucleotide"
  source: /note="RNA"
  source: /note="5' tri-ethylene glycol (TEG)"
  modified_base (1)..(1): bicyclic nucleic acid (BNA)
  modified_base (4)..(4): 5-methyl modified nucleotide
  modified_base (8)..(8): 5-methyl modified nucleotide
  modified_base (9)..(9): 5-methyl modified nucleotide
  modified_base (13)..(13): 5-methyl modified nucleotide
  modified_base (14)..(14): 5-methyl modified nucleotide
  modified_base (15)..(15): 5-methyl modified nucleotide
guucuguccaagcccgguu

SEQ ID NO: 13121 - RNA, 18 nt, Artificial Sequence
  source: /note="Description of Artificial Sequence: Synthetic oligonucleotide"
  source: /note="RNA"
  source: /note="5' tri-ethylene glycol (TEG)"
  modified_base (1)..(1): bicyclic nucleic acid (BNA)
  modified_base (4)..(4): 5-methyl modified nucleotide
  modified_base (8)..(8): 5-methyl modified nucleotide
  modified_base (9)..(9): 5-methyl modified nucleotide
  modified_base (13)..(13): 5-methyl modified nucleotide
  modified_base (14)..(14): 5-methyl modified nucleotide
  modified_base (15)..(15): 5-methyl modified nucleotide
guucuguccaagcccggu

SEQ ID NO: 13122 - RNA, 17 nt, Artificial Sequence
  source: /note="Description of Artificial Sequence: Synthetic oligonucleotide"
  source: /note="RNA"
  source: /note="5' tri-ethylene glycol (TEG)"
  modified_base (1)..(1): bicyclic nucleic acid (BNA)
  modified_base (4)..(4): 5-methyl modified nucleotide
  modified_base (8)..(8): 5-methyl modified nucleotide
  modified_base (9)..(9): 5-methyl modified nucleotide
  modified_base (13)..(13): 5-methyl modified nucleotide
  modified_base (14)..(14): 5-methyl modified nucleotide
  modified_base (15)..(15): 5-methyl modified nucleotide
guucuguccaagcccgg

SEQ ID NO: 13123 - RNA, 16 nt, Artificial Sequence
  source: /note="Description of Artificial Sequence: Synthetic oligonucleotide"
  source: /note="RNA"
  source: /note="5' tri-ethylene glycol (TEG)"
  modified_base (1)..(1): bicyclic nucleic acid (BNA)
  modified_base (4)..(4): 5-methyl modified nucleotide
  modified_base (8)..(8): 5-methyl modified nucleotide
  modified_base (9)..(9): 5-methyl modified nucleotide
  modified_base (13)..(13): 5-methyl modified nucleotide
  modified_base (14)..(14): 5-methyl modified nucleotide
  modified_base (15)..(15): 5-methyl modified nucleotide
guucuguccaagcccg

SEQ ID NO: 13124 - RNA, 15 nt, Artificial Sequence
  source: /note="Description of Artificial Sequence: Synthetic oligonucleotide"
  source: /note="RNA"
  source: /note="5' tri-ethylene glycol (TEG)"
  modified_base (1)..(1): bicyclic nucleic acid (BNA)
  modified_base (4)..(4): 5-methyl modified nucleotide
  modified_base (8)..(8): 5-methyl modified nucleotide
  modified_base (9)..(9): 5-methyl modified nucleotide
  modified_base (13)..(13): 5-methyl modified nucleotide
  modified_base (14)..(14): 5-methyl modified nucleotide
  modified_base (15)..(15): 5-methyl modified nucleotide
guucuguccaagccc

SEQ ID NO: 13125 - RNA, 14 nt, Artificial Sequence
  source: /note="Description of Artificial Sequence: Synthetic oligonucleotide"
  source: /note="RNA"
  source: /note="5' tri-ethylene glycol (TEG)"
  modified_base (1)..(1): bicyclic nucleic acid (BNA)
  modified_base (4)..(4): 5-methyl modified nucleotide
  modified_base (8)..(8): 5-methyl modified nucleotide
  modified_base (9)..(9): 5-methyl modified nucleotide
  modified_base (13)..(13): 5-methyl modified nucleotide
  modified_base (14)..(14): 5-methyl modified nucleotide
guucuguccaagcc

SEQ ID NO: 13126 - RNA, 13 nt, Artificial Sequence
  source: /note="Description of Artificial Sequence: Synthetic oligonucleotide"
  source: /note="RNA"
  source: /note="5' tri-ethylene glycol (TEG)"
  modified_base (1)..(1): bicyclic nucleic acid (BNA)
  modified_base (4)..(4): 5-methyl modified nucleotide
  modified_base (8)..(8): 5-methyl modified nucleotide
  modified_base (9)..(9): 5-methyl modified nucleotide
  modified_base (13)..(13): 5-methyl modified nucleotide
guucuguccaagc

SEQ ID NO: 13127 - RNA, 12 nt, Artificial Sequence
  source: /note="Description of Artificial Sequence: Synthetic oligonucleotide"
  source: /note="RNA"
  source: /note="5' tri-ethylene glycol (TEG)"
  modified_base (1)..(1): bicyclic nucleic acid (BNA)
  modified_base (4)..(4): 5-methyl modified nucleotide
  modified_base (8)..(8): 5-methyl modified nucleotide
  modified_base (9)..(9): 5-methyl modified nucleotide
guucuguccaag

SEQ ID NO: 13128 - RNA, 11 nt, Artificial Sequence
  source: /note="Description of Artificial Sequence: Synthetic oligonucleotide"
  source: /note="RNA"
  source: /note="5' tri-ethylene glycol (TEG)"
  modified_base (1)..(1): bicyclic nucleic acid (BNA)
  modified_base (4)..(4): 5-methyl modified nucleotide
  modified_base (8)..(8): 5-methyl modified nucleotide
  modified_base (9)..(9): 5-methyl modified nucleotide
guucuguccaa

SEQ ID NO: 13129 - RNA, 10 nt, Artificial Sequence
  source: /note="Description of Artificial Sequence: Synthetic oligonucleotide"
  source: /note="RNA"
  source: /note="5' tri-ethylene glycol (TEG)"
  modified_base (1)..(1): bicyclic nucleic acid (BNA)
  modified_base (4)..(4): 5-methyl modified nucleotide
  modified_base (8)..(8): 5-methyl modified nucleotide
  modified_base (9)..(9): 5-methyl modified nucleotide
guucugucca

SEQ ID NO: 13130 - RNA, 9 nt, Artificial Sequence
  source: /note="Description of Artificial Sequence: Synthetic oligonucleotide"
  source: /note="RNA"
  source: /note="5' tri-ethylene glycol (TEG)"
  modified_base (1)..(1): bicyclic nucleic acid (BNA)
  modified_base (4)..(4): 5-methyl modified nucleotide
  modified_base (8)..(8): 5-methyl modified nucleotide
  modified_base (9)..(9): 5-methyl modified nucleotide
guucugucc

SEQ ID NO: 13131 - RNA, 8 nt, Artificial Sequence
  source: /note="Description of Artificial Sequence: Synthetic oligonucleotide"
  source: /note="RNA"
  source: /note="5' tri-ethylene glycol (TEG)"
  modified_base (1)..(1): bicyclic nucleic acid (BNA)
  modified_base (4)..(4): 5-methyl modified nucleotide
  modified_base (8)..(8): 5-methyl modified nucleotide
guucuguc

SEQ ID NO: 13132 - RNA, 20 nt, Artificial Sequence
  source: /note="Description of Artificial Sequence: Synthetic oligonucleotide"
  source: /note="RNA"
  source: /note="5' tri-ethylene glycol (TEG)"
  modified_base (1)..(1): bicyclic nucleic acid (BNA)
  modified_base (5)..(5): 5-methyl modified nucleotide
  modified_base (9)..(9): 5-methyl modified nucleotide
  modified_base (10)..(10): 5-methyl modified nucleotide
  modified_base (14)..(14): 5-methyl modified nucleotide
  modified_base (15)..(15): 5-methyl modified nucleotide
  modified_base (16)..(16): 5-methyl modified nucleotide
aguucuguccaagcccgguu

SEQ ID NO: 13133 - RNA, 19 nt, Artificial Sequence
  source: /note="Description of Artificial Sequence: Synthetic oligonucleotide"
  source: /note="RNA"
  source: /note="5' tri-ethylene glycol (TEG)"
  modified_base (1)..(1): bicyclic nucleic acid (BNA)
  modified_base (5)..(5): 5-methyl modified nucleotide
  modified_base (9)..(9): 5-methyl modified nucleotide
  modified_base (10)..(10): 5-methyl modified nucleotide
  modified_base (14)..(14): 5-methyl modified nucleotide
  modified_base (15)..(15): 5-methyl modified nucleotide
  modified_base (16)..(16): 5-methyl modified nucleotide
aguucuguccaagcccggu

SEQ ID NO: 13134 - RNA, 18 nt, Artificial Sequence
  source: /note="Description of Artificial Sequence: Synthetic oligonucleotide"
  source: /note="RNA"
  source: /note="5' tri-ethylene glycol (TEG)"
  modified_base (1)..(1): bicyclic nucleic acid (BNA)
  modified_base (5)..(5): 5-methyl modified nucleotide
  modified_base (9)..(9): 5-methyl modified nucleotide
  modified_base (10)..(10): 5-methyl modified nucleotide
  modified_base (14)..(14): 5-methyl modified nucleotide
  modified_base (15)..(15): 5-methyl modified nucleotide
  modified_base (16)..(16): 5-methyl modified nucleotide
aguucuguccaagcccgg

SEQ ID NO: 13135 - RNA, 17 nt, Artificial Sequence
  source: /note="Description of Artificial Sequence: Synthetic oligonucleotide"
  source: /note="RNA"
  source: /note="5' tri-ethylene glycol (TEG)"
  modified_base (1)..(1): bicyclic nucleic acid (BNA)
  modified_base (5)..(5): 5-methyl modified nucleotide
  modified_base (9)..(9): 5-methyl modified nucleotide
  modified_base (10)..(10): 5-methyl modified nucleotide
  modified_base (14)..(14): 5-methyl modified nucleotide
  modified_base (15)..(15): 5-methyl modified nucleotide
  modified_base (16)..(16): 5-methyl modified nucleotide
aguucuguccaagcccg

SEQ ID NO: 13136 - RNA, 16 nt, Artificial Sequence
  source: /note="Description of Artificial Sequence: Synthetic oligonucleotide"
  source: /note="RNA"
  source: /note="5' tri-ethylene glycol (TEG)"
  modified_base (1)..(1): bicyclic nucleic acid (BNA)
  modified_base (5)..(5): 5-methyl modified nucleotide
  modified_base (9)..(9): 5-methyl modified nucleotide
  modified_base (10)..(10): 5-methyl modified nucleotide
  modified_base (14)..(14): 5-methyl modified nucleotide
  modified_base (15)..(15): 5-methyl modified nucleotide
  modified_base (16)..(16): 5-methyl modified nucleotide
aguucuguccaagccc

SEQ ID NO: 13137 - RNA, 15 nt, Artificial Sequence
  source: /note="Description of Artificial Sequence: Synthetic oligonucleotide"
  source: /note="RNA"
  source: /note="5' tri-ethylene glycol (TEG)"
  modified_base (1)..(1): bicyclic nucleic acid (BNA)
  modified_base (5)..(5): 5-methyl modified nucleotide
  modified_base (9)..(9): 5-methyl modified nucleotide
  modified_base (10)..(10): 5-methyl modified nucleotide
  modified_base (14)..(14): 5-methyl modified nucleotide
  modified_base (15)..(15): 5-methyl modified nucleotide
aguucuguccaagcc

SEQ ID NO: 13138 - RNA, 14 nt, Artificial Sequence
  source: /note="Description of Artificial Sequence: Synthetic oligonucleotide"
  source: /note="RNA"
  source: /note="5' tri-ethylene glycol (TEG)"
  modified_base (1)..(1): bicyclic nucleic acid (BNA)
  modified_base (5)..(5): 5-methyl modified nucleotide
  modified_base (9)..(9): 5-methyl modified nucleotide
  modified_base (10)..(10): 5-methyl modified nucleotide
  modified_base (14)..(14): 5-methyl modified nucleotide
aguucuguccaagc

SEQ ID NO: 13139 - RNA, 13 nt, Artificial Sequence
  source: /note="Description of Artificial Sequence: Synthetic oligonucleotide"
  source: /note="RNA"
  source: /note="5' tri-ethylene glycol (TEG)"
  modified_base (1)..(1): bicyclic nucleic acid (BNA)
  modified_base (5)..(5): 5-methyl modified nucleotide
  modified_base (9)..(9): 5-methyl modified nucleotide
  modified_base (10)..(10): 5-methyl modified nucleotide
aguucuguccaag

SEQ ID NO: 13140 - RNA, 12 nt, Artificial Sequence
  source: /note="Description of Artificial Sequence: Synthetic oligonucleotide"
  source: /note="RNA"
  source: /note="5' tri-ethylene glycol (TEG)"
  modified_base (1)..(1): bicyclic nucleic acid (BNA)
  modified_base (5)..(5): 5-methyl modified nucleotide
  modified_base (9)..(9): 5-methyl modified nucleotide
  modified_base (10)..(10): 5-methyl modified nucleotide
aguucuguccaa

SEQ ID NO: 13141 - RNA, 11 nt, Artificial Sequence
  source: /note="Description of Artificial Sequence: Synthetic oligonucleotide"
  source: /note="RNA"
  source: /note="5' tri-ethylene glycol (TEG)"
  modified_base (1)..(1): bicyclic nucleic acid (BNA)
  modified_base (5)..(5): 5-methyl modified nucleotide
  modified_base (9)..(9): 5-methyl modified nucleotide
  modified_base (10)..(10): 5-methyl modified nucleotide
aguucugucca

SEQ ID NO: 13142 - RNA, 10 nt, Artificial Sequence
  source: /note="Description of Artificial Sequence: Synthetic oligonucleotide"
  source: /note="RNA"
  source: /note="5' tri-ethylene glycol (TEG)"
  modified_base (1)..(1): bicyclic nucleic acid (BNA)
  modified_base (5)..(5): 5-methyl modified nucleotide
  modified_base (9)..(9): 5-methyl modified nucleotide
  modified_base (10)..(10): 5-methyl modified nucleotide
aguucugucc

SEQ ID NO: 13143 - RNA, 9 nt, Artificial Sequence
  source: /note="Description of Artificial Sequence: Synthetic oligonucleotide"
  source: /note="RNA"
  source: /note="5' tri-ethylene glycol (TEG)"
  modified_base (1)..(1): bicyclic nucleic acid (BNA)
  modified_base (5)..(5): 5-methyl modified nucleotide
  modified_base (9)..(9): 5-methyl modified nucleotide
aguucuguc

SEQ ID NO: 13144 - RNA, 8 nt, Artificial Sequence
  source: /note="Description of Artificial Sequence: Synthetic oligonucleotide"
  source: /note="RNA"
  source: /note="5' tri-ethylene glycol (TEG)"
  modified_base (1)..(1): bicyclic nucleic acid (BNA)
  modified_base (5)..(5): 5-methyl modified nucleotide
aguucugu

SEQ ID NO: 13145 - RNA, 20 nt, Artificial Sequence
  source: /note="Description of Artificial Sequence: Synthetic oligonucleotide"
  source: /note="RNA"
  source: /note="5' tri-ethylene glycol (TEG)"
  modified_base (1)..(1): bicyclic nucleic acid (BNA)
  modified_base (6)..(6): 5-methyl modified nucleotide
  modified_base (10)..(10): 5-methyl modified nucleotide
  modified_base (11)..(11): 5-methyl modified nucleotide
  modified_base (15)..(15): 5-methyl modified nucleotide
  modified_base (16)..(16): 5-methyl modified nucleotide
  modified_base (17)..(17): 5-methyl modified nucleotide
aaguucuguccaagcccggu

SEQ ID NO: 13146 - RNA, 19 nt, Artificial Sequence
  source: /note="Description of Artificial Sequence: Synthetic oligonucleotide"
  source: /note="RNA"
  source: /note="5' tri-ethylene glycol (TEG)"
  modified_base (1)..(1): bicyclic nucleic acid (BNA)
  modified_base (6)..(6): 5-methyl modified nucleotide
  modified_base (10)..(10): 5-methyl modified nucleotide
  modified_base (11)..(11): 5-methyl modified nucleotide
  modified_base (15)..(15): 5-methyl modified nucleotide
  modified_base (16)..(16): 5-methyl modified nucleotide
  modified_base (17)..(17): 5-methyl modified nucleotide
aaguucuguccaagcccgg

SEQ ID NO: 13147 - RNA, 18 nt, Artificial Sequence
  source: /note="Description of Artificial Sequence: Synthetic oligonucleotide"
  source: /note="RNA"
  source: /note="5' tri-ethylene glycol (TEG)"
  modified_base (1)..(1): bicyclic nucleic acid (BNA)
  modified_base (6)..(6): 5-methyl modified nucleotide
  modified_base (10)..(10): 5-methyl modified nucleotide
  modified_base (11)..(11): 5-methyl modified nucleotide
  modified_base (15)..(15): 5-methyl modified nucleotide
  modified_base (16)..(16): 5-methyl modified nucleotide
  modified_base (17)..(17): 5-methyl modified nucleotide
aaguucuguccaagcccg

SEQ ID NO: 13148 - RNA, 17 nt, Artificial Sequence
  source: /note="Description of Artificial Sequence: Synthetic oligonucleotide"
  source: /note="RNA"
  source: /note="5' tri-ethylene glycol (TEG)"
  modified_base (1)..(1): bicyclic nucleic acid (BNA)
  modified_base (6)..(6): 5-methyl modified nucleotide
  modified_base (10)..(10): 5-methyl modified nucleotide
  modified_base (11)..(11): 5-methyl modified nucleotide
  modified_base (15)..(15): 5-methyl modified nucleotide
  modified_base (16)..(16): 5-methyl modified nucleotide
  modified_base (17)..(17): 5-methyl modified nucleotide
aaguucuguccaagccc

SEQ ID NO: 13149 - RNA, 16 nt, Artificial Sequence
  source: /note="Description of Artificial Sequence: Synthetic oligonucleotide"
  source: /note="RNA"
  source: /note="5' tri-ethylene glycol (TEG)"
  modified_base (1)..(1): bicyclic nucleic acid (BNA)
  modified_base (6)..(6): 5-methyl modified nucleotide
  modified_base (10)..(10): 5-methyl modified nucleotide
  modified_base (11)..(11): 5-methyl modified nucleotide
  modified_base (15)..(15): 5-methyl modified nucleotide
  modified_base (16)..(16): 5-methyl modified nucleotide
aaguucuguccaagcc

SEQ ID NO: 13150 - RNA, 15 nt, Artificial Sequence
  source: /note="Description of Artificial Sequence: Synthetic oligonucleotide"
  source: /note="RNA"
  source: /note="5' tri-ethylene glycol (TEG)"
  modified_base (1)..(1): bicyclic nucleic acid (BNA)
  modified_base (6)..(6): 5-methyl modified nucleotide
  modified_base (10)..(10): 5-methyl modified nucleotide
  modified_base (11)..(11): 5-methyl modified nucleotide
  modified_base (15)..(15): 5-methyl modified nucleotide
aaguucuguccaagc

SEQ ID NO: 13151 - RNA, 14 nt, Artificial Sequence
  source: /note="Description of Artificial Sequence: Synthetic oligonucleotide"
  source: /note="RNA"
  source: /note="5' tri-ethylene glycol (TEG)"
  modified_base (1)..(1): bicyclic nucleic acid (BNA)
  modified_base (6)..(6): 5-methyl modified nucleotide
  modified_base (10)..(10): 5-methyl modified nucleotide
  modified_base (11)..(11): 5-methyl modified nucleotide
aaguucuguccaag

SEQ ID NO: 13152 - RNA, 13 nt, Artificial Sequence
  source: /note="Description of Artificial Sequence: Synthetic oligonucleotide"
  source: /note="RNA"
  source: /note="5' tri-ethylene glycol (TEG)"
  modified_base (1)..(1): bicyclic nucleic acid (BNA)
  modified_base (6)..(6): 5-methyl modified nucleotide
  modified_base (10)..(10): 5-methyl modified nucleotide
  modified_base (11)..(11): 5-methyl modified nucleotide
aaguucuguccaa

SEQ ID NO: 13153 - RNA, 12 nt, Artificial Sequence
  source: /note="Description of Artificial Sequence: Synthetic oligonucleotide"
  source: /note="RNA"
  source: /note="5' tri-ethylene glycol (TEG)"
  modified_base (1)..(1): bicyclic nucleic acid (BNA)
  modified_base (6)..(6): 5-methyl modified nucleotide
  modified_base (10)..(10): 5-methyl modified nucleotide
  modified_base (11)..(11): 5-methyl modified nucleotide
aaguucugucca

SEQ ID NO: 13154 - RNA, 11 nt, Artificial Sequence
  source: /note="Description of Artificial Sequence: Synthetic oligonucleotide"
  source: /note="RNA"
  source: /note="5' tri-ethylene glycol (TEG)"
  modified_base (1)..(1): bicyclic nucleic acid (BNA)
  modified_base (6)..(6): 5-methyl modified nucleotide
  modified_base (10)..(10): 5-methyl modified nucleotide
  modified_base (11)..(11): 5-methyl modified nucleotide
aaguucugucc

SEQ ID NO: 13155 - RNA, 10 nt, Artificial Sequence
  source: /note="Description of Artificial Sequence: Synthetic oligonucleotide"
  source: /note="RNA"
  source: /note="5' tri-ethylene glycol (TEG)"
  modified_base (1)..(1): bicyclic nucleic acid (BNA)
  modified_base (6)..(6): 5-methyl modified nucleotide
  modified_base (10)..(10): 5-methyl modified nucleotide
aaguucuguc

SEQ ID NO: 13156 - RNA, 9 nt, Artificial Sequence
  source: /note="Description of Artificial Sequence: Synthetic oligonucleotide"
  source: /note="RNA"
  source: /note="5' tri-ethylene glycol (TEG)"
  modified_base (1)..(1): bicyclic nucleic acid (BNA)
  modified_base (6)..(6): 5-methyl modified nucleotide
aaguucugu

SEQ ID NO: 13157 - RNA, 8 nt, Artificial Sequence
  source: /note="Description of Artificial Sequence: Synthetic oligonucleotide"
  source: /note="RNA"
  source: /note="5' tri-ethylene glycol (TEG)"
  modified_base (1)..(1): bicyclic nucleic acid (BNA)
  modified_base (6)..(6): 5-methyl modified nucleotide
aaguucug

SEQ ID NO: 13158 - DNA, 20 bp, Artificial Sequence
  source: /note="Description of Artificial Sequence: Synthetic oligonucleotide"
  source: /note="Description of Combined DNA/RNA Molecule: Synthetic oligonucleotide"
  source: /note="DNA/RNA"
  source: /note="5' tri-ethylene glycol (TEG)"
  modified_base (1)..(1): bicyclic nucleic acid (BNA)
  modified_base (7)..(7): 5-methyl modified nucleotide
  modified_base (11)..(11): 5-methyl modified nucleotide
  modified_base (12)..(12): 5-methyl modified nucleotide
  modified_base (16)..(16): 5-methyl modified nucleotide
  modified_base (17)..(17): 5-methyl modified nucleotide
  modified_base (18)..(18): 5-methyl modified nucleotide
taaguucuguccaagcccgg

SEQ ID NO: 13159 - DNA, 19 bp, Artificial Sequence
  source: /note="Description of Artificial Sequence: Synthetic oligonucleotide"
  source: /note="Description of Combined DNA/RNA Molecule: Synthetic oligonucleotide"
  source: /note="DNA/RNA"
  source: /note="5' tri-ethylene glycol (TEG)"
  modified_base (1)..(1): bicyclic nucleic acid (BNA)
  modified_base (7)..(7): 5-methyl modified nucleotide
  modified_base (11)..(11): 5-methyl modified nucleotide
  modified_base (12)..(12): 5-methyl modified nucleotide
  modified_base (16)..(16): 5-methyl modified nucleotide
  modified_base (17)..(17): 5-methyl modified nucleotide
  modified_base (18)..(18): 5-methyl modified nucleotide
taaguucuguccaagcccg

SEQ ID NO: 13160 - DNA, 18 bp, Artificial Sequence
  source: /note="Description of Artificial Sequence: Synthetic oligonucleotide"
  source: /note="Description of Combined DNA/RNA Molecule: Synthetic oligonucleotide"
  source: /note="DNA/RNA"
  source: /note="5' tri-ethylene glycol (TEG)"
  modified_base (1)..(1): bicyclic nucleic acid (BNA)
  modified_base (7)..(7): 5-methyl modified nucleotide
  modified_base (11)..(11): 5-methyl modified nucleotide
  modified_base (12)..(12): 5-methyl modified nucleotide
  modified_base (16)..(16): 5-methyl modified nucleotide
  modified_base (17)..(17): 5-methyl modified nucleotide
  modified_base (18)..(18): 5-methyl modified nucleotide
taaguucuguccaagccc

SEQ ID NO: 13161 - DNA, 17 bp, Artificial Sequence
  source: /note="Description of Artificial Sequence: Synthetic oligonucleotide"
  source: /note="Description of Combined DNA/RNA Molecule: Synthetic oligonucleotide"
  source: /note="DNA/RNA"
  source: /note="5' tri-ethylene glycol (TEG)"
  modified_base (1)..(1): bicyclic nucleic acid (BNA)
  modified_base (7)..(7): 5-methyl modified nucleotide
  modified_base (11)..(11): 5-methyl modified nucleotide
  modified_base (12)..(12): 5-methyl modified nucleotide
  modified_base (16)..(16): 5-methyl modified nucleotide
  modified_base (17)..(17): 5-methyl modified nucleotide
taaguucuguccaagcc

SEQ ID NO: 13162 - DNA, 16 bp, Artificial Sequence
  source: /note="Description of Artificial Sequence: Synthetic oligonucleotide"
  source: /note="Description of Combined DNA/RNA Molecule: Synthetic oligonucleotide"
  source: /note="DNA/RNA"
  source: /note="5' tri-ethylene glycol (TEG)"
  modified_base (1)..(1): bicyclic nucleic acid (BNA)
  modified_base (7)..(7): 5-methyl modified nucleotide
  modified_base (11)..(11): 5-methyl modified nucleotide
  modified_base (12)..(12): 5-methyl modified nucleotide
  modified_base (16)..(16): 5-methyl modified nucleotide
taaguucuguccaagc

SEQ ID NO: 13163 - DNA, 14 bp, Artificial Sequence
  source: /note="Description of Artificial Sequence: Synthetic oligonucleotide"
  source: /note="Description of Combined DNA/RNA Molecule: Synthetic oligonucleotide"
  source: /note="DNA/RNA"
  source: /note="5' tri-ethylene glycol (TEG)"
  modified_base (1)..(1): bicyclic nucleic acid (BNA)
  modified_base (7)..(7): 5-methyl modified nucleotide
  modified_base (11)..(11): 5-methyl modified nucleotide
  modified_base (12)..(12): 5-methyl modified nucleotide
taaguucuguccaa

SEQ ID NO: 13164 - DNA, 13 bp, Artificial Sequence
  source: /note="Description of Artificial Sequence: Synthetic oligonucleotide"
  source: /note="Description of Combined DNA/RNA Molecule: Synthetic oligonucleotide"
  source: /note="DNA/RNA"
  source: /note="5' tri-ethylene glycol (TEG)"
  modified_base (1)..(1): bicyclic nucleic acid (BNA)
  modified_base (7)..(7): 5-methyl modified nucleotide
  modified_base (11)..(11): 5-methyl modified nucleotide
  modified_base (12)..(12): 5-methyl modified nucleotide
taaguucugucca

SEQ ID NO: 13165 - DNA, 12 bp, Artificial Sequence
  source: /note="Description of Artificial Sequence: Synthetic oligonucleotide"
  source: /note="Description of Combined DNA/RNA Molecule: Synthetic oligonucleotide"
  source: /note="DNA/RNA"
  source: /note="5' tri-ethylene glycol (TEG)"
  modified_base (1)..(1): bicyclic nucleic acid (BNA)
  modified_base (7)..(7): 5-methyl modified nucleotide
  modified_base (11)..(11): 5-methyl modified nucleotide
  modified_base (12)..(12): 5-methyl modified nucleotide
taaguucugucc

SEQ ID NO: 13166 - DNA, 11 bp, Artificial Sequence
  source: /note="Description of Artificial Sequence: Synthetic oligonucleotide"
  source: /note="Description of Combined DNA/RNA Molecule: Synthetic oligonucleotide"
  source: /note="DNA/RNA"
  source: /note="5' tri-ethylene glycol (TEG)"
  modified_base (1)..(1): bicyclic nucleic acid (BNA)
  modified_base (7)..(7): 5-methyl modified nucleotide
  modified_base (11)..(11): 5-methyl modified nucleotide
taaguucuguc

SEQ ID NO: 13167 - DNA, 10 bp, Artificial Sequence
  source: /note="Description of Artificial Sequence: Synthetic oligonucleotide"
  source: /note="Description of Combined DNA/RNA Molecule: Synthetic oligonucleotide"
  source: /note="DNA/RNA"
  source: /note="5' tri-ethylene glycol (TEG)"
  modified_base (1)..(1): bicyclic nucleic acid (BNA)
  modified_base (7)..(7): 5-methyl modified nucleotide
taaguucugu

SEQ ID NO: 13168 - DNA, 9 bp, Artificial Sequence
  source: /note="Description of Artificial Sequence: Synthetic oligonucleotide"
  source: /note="Description of Combined DNA/RNA Molecule: Synthetic oligonucleotide"
  source: /note="DNA/RNA"
  source: /note="5' tri-ethylene glycol (TEG)"
  modified_base (1)..(1): bicyclic nucleic acid (BNA)
  modified_base (7)..(7): 5-methyl modified nucleotide
taaguucug

SEQ ID NO: 13169 - DNA, 8 bp, Artificial Sequence
  source: /note="Description of Artificial Sequence: Synthetic oligonucleotide"
  source: /note="Description of Combined DNA/RNA Molecule: Synthetic oligonucleotide"
  source: /note="DNA/RNA"
  source: /note="5' tri-ethylene glycol (TEG)"
  modified_base (1)..(1): bicyclic nucleic acid (BNA)
  modified_base (7)..(7): 5-methyl modified nucleotide
taaguucu

SEQ ID NO: 13170 - RNA, 20 nt, Artificial Sequence
  source: /note="Description of Artificial Sequence: Synthetic oligonucleotide"
  source: /note="RNA"
  source: /note="5' tri-ethylene glycol (TEG)"
  modified_base (1)..(1): bicyclic nucleic acid (BNA)
  modified_base (8)..(8): 5-methyl modified nucleotide
  modified_base (12)..(12): 5-methyl modified nucleotide
  modified_base (13)..(13): 5-methyl modified nucleotide
  modified_base (17)..(17): 5-methyl modified nucleotide
  modified_base (18)..(18): 5-methyl modified nucleotide
  modified_base (19)..(19): 5-methyl modified nucleotide
guaaguucuguccaagcccg

SEQ ID NO: 13171 - RNA, 19 nt, Artificial Sequence
  source: /note="Description of Artificial Sequence: Synthetic oligonucleotide"
  source: /note="RNA"
  source: /note="5' tri-ethylene glycol (TEG)"
  modified_base (1)..(1): bicyclic nucleic acid (BNA)
  modified_base (8)..(8): 5-methyl modified nucleotide
  modified_base (12)..(12): 5-methyl modified nucleotide
  modified_base (13)..(13): 5-methyl modified nucleotide
  modified_base (17)..(17): 5-methyl modified nucleotide
  modified_base (18)..(18): 5-methyl modified nucleotide
  modified_base (19)..(19): 5-methyl modified nucleotide
guaaguucuguccaagccc

SEQ ID NO: 13172 - RNA, 17 nt, Artificial Sequence
  source: /note="Description of Artificial Sequence: Synthetic oligonucleotide"
  source: /note="RNA"
  source: /note="5' tri-ethylene glycol (TEG)"
  modified_base (1)..(1): bicyclic nucleic acid (BNA)
  modified_base (8)..(8): 5-methyl modified nucleotide
  modified_base (12)..(12): 5-methyl modified nucleotide
  modified_base (13)..(13): 5-methyl modified nucleotide
  modified_base (17)..(17): 5-methyl modified nucleotide
guaaguucuguccaagc

SEQ ID NO: 13173 - RNA, 16 nt, Artificial Sequence
  source: /note="Description of Artificial Sequence: Synthetic oligonucleotide"
  source: /note="RNA"
  source: /note="5' tri-ethylene glycol (TEG)"
  modified_base (1)..(1): bicyclic nucleic acid (BNA)
  modified_base (8)..(8): 5-methyl modified nucleotide
  modified_base (12)..(12): 5-methyl modified nucleotide
  modified_base (13)..(13): 5-methyl modified nucleotide
guaaguucuguccaag

SEQ ID NO: 13174 - RNA, 15 nt, Artificial Sequence
  source: /note="Description of Artificial Sequence: Synthetic oligonucleotide"
  source: /note="RNA"
  source: /note="5' tri-ethylene glycol (TEG)"
  modified_base (1)..(1): bicyclic nucleic acid (BNA)
  modified_base (8)..(8): 5-methyl modified nucleotide
  modified_base (12)..(12): 5-methyl modified nucleotide
  modified_base (13)..(13): 5-methyl modified nucleotide
guaaguucuguccaa

SEQ ID NO: 13175 - RNA, 14 nt, Artificial Sequence
  source: /note="Description of Artificial Sequence: Synthetic oligonucleotide"
  source: /note="RNA"
  source: /note="5' tri-ethylene glycol (TEG)"
  modified_base (1)..(1): bicyclic nucleic acid (BNA)
  modified_base (8)..(8): 5-methyl modified nucleotide
  modified_base (12)..(12): 5-methyl modified nucleotide
  modified_base (13)..(13): 5-methyl modified nucleotide
guaaguucugucca

SEQ ID NO: 13176 - RNA, 13 nt, Artificial Sequence
  source: /note="Description of Artificial Sequence: Synthetic oligonucleotide"
  source: /note="RNA"
  source: /note="5' tri-ethylene glycol (TEG)"
  modified_base (1)..(1): bicyclic nucleic acid (BNA)
  modified_base (8)..(8): 5-methyl modified nucleotide
  modified_base (12)..(12): 5-methyl modified nucleotide
  modified_base (13)..(13): 5-methyl modified nucleotide
guaaguucugucc

SEQ ID NO: 13177 - RNA, 12 nt, Artificial Sequence
  source: /note="Description of Artificial Sequence: Synthetic oligonucleotide"
  source: /note="RNA"
  source: /note="5' tri-ethylene glycol (TEG)"
  modified_base (1)..(1): bicyclic nucleic acid (BNA)
  modified_base (8)..(8): 5-methyl modified nucleotide
  modified_base (12)..(12): 5-methyl modified nucleotide
guaaguucuguc

SEQ ID NO: 13178 - RNA, 11 nt, Artificial Sequence
  source: /note="Description of Artificial Sequence: Synthetic oligonucleotide"
  source: /note="RNA"
  source: /note="5' tri-ethylene glycol (TEG)"
  modified_base (1)..(1): bicyclic nucleic acid (BNA)
  modified_base (8)..(8): 5-methyl modified nucleotide
guaaguucugu

SEQ ID NO: 13179 - RNA, 10 nt, Artificial Sequence
  source: /note="Description of Artificial Sequence: Synthetic oligonucleotide"
  source: /note="RNA"
  source: /note="5' tri-ethylene glycol (TEG)"
  modified_base (1)..(1): bicyclic nucleic acid (BNA)
  modified_base (8)..(8): 5-methyl modified nucleotide
guaaguucug

SEQ ID NO: 13180 - RNA, 9 nt, Artificial Sequence
  source: /note="Description of Artificial Sequence: Synthetic oligonucleotide"
  source: /note="RNA"
  source: /note="5' tri-ethylene glycol (TEG)"
  modified_base (1)..(1): bicyclic nucleic acid (BNA)
  modified_base (8)..(8): 5-methyl modified nucleotide
guaaguucu

SEQ ID NO: 13181 - RNA, 8 nt, Artificial Sequence
  source: /note="Description of Artificial Sequence: Synthetic oligonucleotide"
  source: /note="RNA"
  source: /note="5' tri-ethylene glycol (TEG)"
  modified_base (1)..(1): bicyclic nucleic acid (BNA)
  modified_base (8)..(8): 5-methyl modified nucleotide
guaaguuc

SEQ ID NO: 13182 - RNA, 20 nt, Artificial Sequence
  source: /note="Description of Artificial Sequence: Synthetic oligonucleotide"
  source: /note="RNA"
  source: /note="5' tri-ethylene glycol (TEG)"
  modified_base (1)..(1): bicyclic nucleic acid (BNA)
  modified_base (9)..(9): 5-methyl modified nucleotide
  modified_base (13)..(13): 5-methyl modified nucleotide
  modified_base (14)..(14): 5-methyl modified nucleotide
  modified_base (18)..(18): 5-methyl modified nucleotide
  modified_base (19)..(19): 5-methyl modified nucleotide
  modified_base (20)..(20): 5-methyl modified nucleotide
gguaaguucuguccaagccc

SEQ ID NO: 13183 - RNA, 19 nt, Artificial Sequence
  source: /note="Description of Artificial Sequence: Synthetic oligonucleotide"
  source: /note="RNA"
  source: /note="5' tri-ethylene glycol (TEG)"
  modified_base (1)..(1): bicyclic nucleic acid (BNA)
  modified_base (9)..(9): 5-methyl modified nucleotide
  modified_base (13)..(13): 5-methyl modified nucleotide
  modified_base (14)..(14): 5-methyl modified nucleotide
  modified_base (18)..(18): 5-methyl modified nucleotide
  modified_base (19)..(19): 5-methyl modified nucleotide
gguaaguucuguccaagcc

SEQ ID NO: 13184 - RNA, 17 nt, Artificial Sequence
  source: /note="Description of Artificial Sequence: Synthetic oligonucleotide"
  source: /note="RNA"
  source: /note="5' tri-ethylene glycol (TEG)"
  modified_base (1)..(1): bicyclic nucleic acid (BNA)
  modified_base (9)..(9): 5-methyl modified nucleotide
  modified_base (13)..(13): 5-methyl modified nucleotide
  modified_base (14)..(14): 5-methyl modified nucleotide
gguaaguucuguccaag

SEQ ID NO: 13185 - RNA, 16 nt, Artificial Sequence
  source: /note="Description of Artificial Sequence: Synthetic oligonucleotide"
  source: /note="RNA"
  source: /note="5' tri-ethylene glycol (TEG)"
  modified_base (1)..(1): bicyclic nucleic acid (BNA)
  modified_base (9)..(9): 5-methyl modified nucleotide
  modified_base (13)..(13): 5-methyl modified nucleotide
  modified_base (14)..(14): 5-methyl modified nucleotide
gguaaguucuguccaa

SEQ ID NO: 13186 - RNA, 15 nt, Artificial Sequence
  source: /note="Description of Artificial Sequence: Synthetic oligonucleotide"
  source: /note="RNA"
  source: /note="5' tri-ethylene glycol (TEG)"
  modified_base (1)..(1): bicyclic nucleic acid (BNA)
  modified_base (9)..(9): 5-methyl modified nucleotide
  modified_base (13)..(13): 5-methyl modified nucleotide
  modified_base (14)..(14): 5-methyl modified nucleotide
gguaaguucugucca

SEQ ID NO: 13187 - RNA, 14 nt, Artificial Sequence
  source: /note="Description of Artificial Sequence: Synthetic oligonucleotide"
  source: /note="RNA"
  source: /note="5' tri-ethylene glycol (TEG)"
  modified_base (1)..(1): bicyclic nucleic acid (BNA)
  modified_base (9)..(9): 5-methyl modified nucleotide
  modified_base (13)..(13): 5-methyl modified nucleotide
  modified_base (14)..(14): 5-methyl modified nucleotide
gguaaguucugucc

SEQ ID NO: 13188 - RNA, 13 nt, Artificial Sequence
  source: /note="Description of Artificial Sequence: Synthetic oligonucleotide"
  source: /note="RNA"
  source: /note="5' tri-ethylene glycol (TEG)"
  modified_base (1)..(1): bicyclic nucleic acid (BNA)
  modified_base (9)..(9): 5-methyl modified nucleotide
  modified_base (13)..(13): 5-methyl modified nucleotide
gguaaguucuguc

SEQ ID NO: 13189 - RNA, 12 nt, Artificial Sequence
  source: /note="Description of Artificial Sequence: Synthetic oligonucleotide"
  source: /note="RNA"
  source: /note="5' tri-ethylene glycol (TEG)"
  modified_base (1)..(1): bicyclic nucleic acid (BNA)
  modified_base (9)..(9): 5-methyl modified nucleotide
gguaaguucugu

SEQ ID NO: 13190 - RNA, 11 nt, Artificial Sequence
  source: /note="Description of Artificial Sequence: Synthetic oligonucleotide"
  source: /note="RNA"
  source: /note="5' tri-ethylene glycol (TEG)"
  modified_base (1)..(1): bicyclic nucleic acid (BNA)
  modified_base (9)..(9): 5-methyl modified nucleotide
gguaaguucug

SEQ ID NO: 13191 - RNA, 10 nt, Artificial Sequence
  source: /note="Description of Artificial Sequence: Synthetic oligonucleotide"
  source: /note="RNA"
  source: /note="5' tri-ethylene glycol (TEG)"
  modified_base (1)..(1): bicyclic nucleic acid (BNA)
  modified_base (9)..(9): 5-methyl modified nucleotide
gguaaguucu

SEQ ID NO: 13192 - RNA, 9 nt, Artificial Sequence
  source: /note="Description of Artificial Sequence: Synthetic oligonucleotide"
  source: /note="RNA"
  source: /note="5' tri-ethylene glycol (TEG)"
  modified_base (1)..(1): bicyclic nucleic acid (BNA)
  modified_base (9)..(9): 5-methyl modified nucleotide
gguaaguuc

SEQ ID NO: 13193 - RNA, 8 nt, Artificial Sequence
  source: /note="Description of Artificial Sequence: Synthetic oligonucleotide"
  source: /note="RNA"
  source: /note="5' tri-ethylene glycol (TEG)"
  modified_base (1)..(1): bicyclic nucleic acid (BNA)
gguaaguu

SEQ ID NO: 13194 - RNA, 20 nt, Artificial Sequence
  source: /note="Description of Artificial Sequence: Synthetic oligonucleotide"
  source: /note="RNA"
  source: /note="5' tri-ethylene glycol (TEG)"
  modified_base (1)..(1): 5-methyl bicyclic nucleic acid
  modified_base (10)..(10): 5-methyl modified nucleotide
  modified_base (14)..(14): 5-methyl modified nucleotide
  modified_base (15)..(15): 5-methyl modified nucleotide
  modified_base (19)..(19): 5-methyl modified nucleotide
  modified_base (20)..(20): 5-methyl modified nucleotide
cgguaaguucuguccaagcc

SEQ ID NO: 13195 - RNA, 19 nt, Artificial Sequence
  source: /note="Description of Artificial Sequence: Synthetic oligonucleotide"
  source: /note="RNA"
  source: /note="5' tri-ethylene glycol (TEG)"
  modified_base (1)..(1): 5-methyl bicyclic nucleic acid
  modified_base (10)..(10): 5-methyl modified nucleotide
  modified_base (14)..(14): 5-methyl modified nucleotide
  modified_base (15)..(15): 5-methyl modified nucleotide
  modified_base (19)..(19): 5-methyl modified nucleotide
cgguaaguucuguccaagc

SEQ ID NO: 13196 - RNA, 18 nt, Artificial Sequence
  source: /note="Description of Artificial Sequence: Synthetic oligonucleotide"
  source: /note="RNA"
  source: /note="5' tri-ethylene glycol (TEG)"
  modified_base (1)..(1): 5-methyl bicyclic nucleic acid
  modified_base (10)..(10): 5-methyl modified nucleotide
  modified_base (14)..(14): 5-methyl modified nucleotide
  modified_base (15)..(15): 5-methyl modified nucleotide
cgguaaguucuguccaag

SEQ ID NO: 13197 - RNA, 17 nt, Artificial Sequence
  source: /note="Description of Artificial Sequence: Synthetic oligonucleotide"
  source: /note="RNA"
  source: /note="5' tri-ethylene glycol (TEG)"
  modified_base (1)..(1): 5-methyl bicyclic nucleic acid
  modified_base (10)..(10): 5-methyl modified nucleotide
  modified_base (14)..(14): 5-methyl modified nucleotide
  modified_base (15)..(15): 5-methyl modified nucleotide
cgguaaguucuguccaa

SEQ ID NO: 13198 - RNA, 16 nt, Artificial Sequence
  source: /note="Description of Artificial Sequence: Synthetic oligonucleotide"
  source: /note="RNA"
  source: /note="5' tri-ethylene glycol (TEG)"
  modified_base (1)..(1): 5-methyl bicyclic nucleic acid
  modified_base (10)..(10): 5-methyl modified nucleotide
  modified_base (14)..(14): 5-methyl modified nucleotide
  modified_base (15)..(15): 5-methyl modified nucleotide
cgguaaguucugucca

SEQ ID NO: 13199 - RNA, 15 nt, Artificial Sequence
  source: /note="Description of Artificial Sequence: Synthetic oligonucleotide"
  source: /note="RNA"
  source: /note="5' tri-ethylene glycol (TEG)"
  modified_base (1)..(1): 5-methyl bicyclic nucleic acid
  modified_base (10)..(10): 5-methyl modified nucleotide
  modified_base (14)..(14): 5-methyl modified nucleotide
  modified_base (15)..(15): 5-methyl modified nucleotide
cgguaaguucugucc

SEQ ID NO: 13200 - RNA, 14 nt, Artificial Sequence
  source: /note="Description of Artificial Sequence: Synthetic oligonucleotide"
  source: /note="RNA"
  source: /note="5' tri-ethylene glycol (TEG)"
  modified_base (1)..(1): 5-methyl bicyclic nucleic acid
  modified_base (10)..(10): 5-methyl modified nucleotide
  modified_base (14)..(14): 5-methyl modified nucleotide
cgguaaguucuguc

SEQ ID NO: 13201 - RNA, 13 nt, Artificial Sequence
  source: /note="Description of Artificial Sequence: Synthetic oligonucleotide"
  source: /note="RNA"
  source: /note="5' tri-ethylene glycol (TEG)"
  modified_base (1)..(1): 5-methyl bicyclic nucleic acid
  modified_base (10)..(10): 5-methyl modified nucleotide
cgguaaguucugu

SEQ ID NO: 13202 - RNA, 12 nt, Artificial Sequence
  source: /note="Description of Artificial Sequence: Synthetic oligonucleotide"
  source: /note="RNA"
  source: /note="5' tri-ethylene glycol (TEG)"
  modified_base (1)..(1): 5-methyl bicyclic nucleic acid
  modified_base (10)..(10): 5-methyl modified nucleotide
cgguaaguucug

SEQ ID NO: 13203 - RNA, 11 nt, Artificial Sequence
  source: /note="Description of Artificial Sequence: Synthetic oligonucleotide"
  source: /note="RNA"
  source: /note="5' tri-ethylene glycol (TEG)"
  modified_base (1)..(1): 5-methyl bicyclic nucleic acid
  modified_base (10)..(10): 5-methyl modified nucleotide
cgguaaguucu

SEQ ID NO: 13204 - RNA, 10 nt, Artificial Sequence
  source: /note="Description of Artificial Sequence: Synthetic oligonucleotide"
  source: /note="RNA"
  source: /note="5' tri-ethylene glycol (TEG)"
  modified_base (1)..(1): 5-methyl bicyclic nucleic acid
  modified_base (10)..(10): 5-methyl modified nucleotide
cgguaaguuc

SEQ ID NO: 13205 - RNA, 9 nt, Artificial Sequence
  source: /note="Description of Artificial Sequence: Synthetic oligonucleotide"
  source: /note="RNA"
  source: /note="5' tri-ethylene glycol (TEG)"
  modified_base (1)..(1): 5-methyl bicyclic nucleic acid
cgguaaguu

SEQ ID NO: 13206 - RNA, 8 nt, Artificial Sequence
  source: /note="Description of Artificial Sequence: Synthetic oligonucleotide"
  source: /note="RNA"
  source: /note="5' tri-ethylene glycol (TEG)"
  modified_base (1)..(1): 5-methyl bicyclic nucleic acid
cgguaagu

SEQ ID NO: 13207 - DNA, 20 bp, Artificial Sequence
  source: /note="Description of Artificial Sequence: Synthetic oligonucleotide"
  source: /note="Description of Combined DNA/RNA Molecule: Synthetic oligonucleotide"
  source: /note="DNA/RNA"
  source: /note="5' tri-ethylene glycol (TEG)"
  modified_base (1)..(1): bicyclic nucleic acid (BNA)
  modified_base (2)..(2): 5-methyl modified nucleotide
  modified_base (11)..(11): 5-methyl modified nucleotide
  modified_base (15)..(15): 5-methyl modified nucleotide
  modified_base (16)..(16): 5-methyl modified nucleotide
  modified_base (20)..(20): 5-methyl modified nucleotide
tcgguaaguucuguccaagc

SEQ ID NO: 13208 - DNA, 19 bp, Artificial Sequence
  source: /note="Description of Artificial Sequence: Synthetic oligonucleotide"
  source: /note="Description of Combined DNA/RNA Molecule: Synthetic oligonucleotide"
  source: /note="DNA/RNA"
  source: /note="5' tri-ethylene glycol (TEG)"
  modified_base (1)..(1): bicyclic nucleic acid (BNA)
  modified_base (2)..(2): 5-methyl modified nucleotide
  modified_base (11)..(11): 5-methyl modified nucleotide
  modified_base (15)..(15): 5-methyl modified nucleotide
  modified_base (16)..(16): 5-methyl modified nucleotide
tcgguaaguucuguccaag

SEQ ID NO: 13209 - DNA, 18 bp, Artificial Sequence
  source: /note="Description of Artificial Sequence: Synthetic oligonucleotide"
  source: /note="Description of Combined DNA/RNA Molecule: Synthetic oligonucleotide"
  source: /note="DNA/RNA"
  source: /note="5' tri-ethylene glycol (TEG)"
  modified_base (1)..(1): bicyclic nucleic acid (BNA)
  modified_base (2)..(2): 5-methyl modified nucleotide
  modified_base (11)..(11): 5-methyl modified nucleotide
  modified_base (15)..(15): 5-methyl modified nucleotide
  modified_base (16)..(16): 5-methyl modified nucleotide
tcgguaaguucuguccaa

SEQ ID NO: 13210 - DNA, 17 bp, Artificial Sequence
  source: /note="Description of Artificial Sequence: Synthetic oligonucleotide"
  source: /note="Description of Combined DNA/RNA Molecule: Synthetic oligonucleotide"
  source: /note="DNA/RNA"
  source: /note="5' tri-ethylene glycol (TEG)"
  modified_base (1)..(1): bicyclic nucleic acid (BNA)
  modified_base (2)..(2): 5-methyl modified nucleotide
  modified_base (11)..(11): 5-methyl modified nucleotide
  modified_base (15)..(15): 5-methyl modified nucleotide
  modified_base (16)..(16): 5-methyl modified nucleotide
tcgguaaguucugucca

SEQ ID NO: 13211 - DNA, 16 bp, Artificial Sequence
  source: /note="Description of Artificial Sequence: Synthetic oligonucleotide"
  source: /note="Description of Combined DNA/RNA Molecule: Synthetic oligonucleotide"
  source: /note="DNA/RNA"
  source: /note="5' tri-ethylene glycol (TEG)"
  modified_base (1)..(1): bicyclic nucleic acid (BNA)
  modified_base (2)..(2): 5-methyl modified nucleotide
  modified_base (11)..(11): 5-methyl modified nucleotide
  modified_base (15)..(15): 5-methyl modified nucleotide
  modified_base (16)..(16): 5-methyl modified nucleotide
tcgguaaguucugucc

SEQ ID NO: 13212 - DNA, 15 bp, Artificial Sequence
  source: /note="Description of Artificial Sequence: Synthetic oligonucleotide"
  source: /note="Description of Combined DNA/RNA Molecule: Synthetic oligonucleotide"
  source: /note="DNA/RNA"
  source: /note="5' tri-ethylene glycol (TEG)"
  modified_base (1)..(1): bicyclic nucleic acid (BNA)
  modified_base (2)..(2): 5-methyl modified nucleotide
  modified_base (11)..(11): 5-methyl modified nucleotide
  modified_base (15)..(15): 5-methyl modified nucleotide
tcgguaaguucuguc

SEQ ID NO: 13213 - DNA, 14 bp, Artificial Sequence
  source: /note="Description of Artificial Sequence: Synthetic oligonucleotide"
  source: /note="Description of Combined DNA/RNA Molecule: Synthetic oligonucleotide"
  source: /note="DNA/RNA"
  source: /note="5' tri-ethylene glycol (TEG)"
  modified_base (1)..(1): bicyclic nucleic acid (BNA)
  modified_base (2)..(2): 5-methyl modified nucleotide
  modified_base (11)..(11): 5-methyl modified nucleotide
tcgguaaguucugu

SEQ ID NO: 13214 - DNA, 13 bp, Artificial Sequence
  source: /note="Description of Artificial Sequence: Synthetic oligonucleotide"
  source: /note="Description of Combined DNA/RNA Molecule: Synthetic oligonucleotide"
  source: /note="DNA/RNA"
  source: /note="5' tri-ethylene glycol (TEG)"
  modified_base (1)..(1): bicyclic nucleic acid (BNA)
  modified_base (2)..(2): 5-methyl modified nucleotide
  modified_base (11)..(11): 5-methyl modified nucleotide
tcgguaaguucug

SEQ ID NO: 13215 - DNA, 12 bp, Artificial Sequence
  source: /note="Description of Artificial Sequence: Synthetic oligonucleotide"
  source: /note="Description of Combined DNA/RNA Molecule: Synthetic oligonucleotide"
  source: /note="DNA/RNA"
  source: /note="5' tri-ethylene glycol (TEG)"
  modified_base (1)..(1): bicyclic nucleic acid (BNA)
  modified_base (2)..(2): 5-methyl modified nucleotide
  modified_base (11)..(11): 5-methyl modified nucleotide
tcgguaaguucu

SEQ ID NO: 13216 - DNA, 11 bp, Artificial Sequence
  source: /note="Description of Artificial Sequence: Synthetic oligonucleotide"
  source: /note="Description of Combined DNA/RNA Molecule: Synthetic oligonucleotide"
  source: /note="DNA/RNA"
  source: /note="5' tri-ethylene glycol (TEG)"
  modified_base (1)..(1): bicyclic nucleic acid (BNA)
  modified_base (2)..(2): 5-methyl modified nucleotide
  modified_base (11)..(11): 5-methyl modified nucleotide
tcgguaaguuc

SEQ ID NO: 13217 - DNA, 10 bp, Artificial Sequence
  source: /note="Description of Artificial Sequence: Synthetic oligonucleotide"
  source: /note="Description of Combined DNA/RNA Molecule: Synthetic oligonucleotide"
  source: /note="DNA/RNA"
  source: /note="5' tri-ethylene glycol (TEG)"
  modified_base (1)..(1): bicyclic nucleic acid (BNA)
  modified_base (2)..(2): 5-methyl modified nucleotide
tcgguaaguu

SEQ ID NO: 13218 - DNA, 9 bp, Artificial Sequence
  source: /note="Description of Artificial Sequence: Synthetic oligonucleotide"
  source: /note="Description of Combined DNA/RNA Molecule: Synthetic oligonucleotide"
  source: /note="DNA/RNA"
  source: /note="5' tri-ethylene glycol (TEG)"
  modified_base (1)..(1): bicyclic nucleic acid (BNA)
  modified_base (2)..(2): 5-methyl modified nucleotide
tcgguaagu

SEQ ID NO: 13219 - RNA, 20 nt, Artificial Sequence
  source: /note="Description of Artificial Sequence: Synthetic oligonucleotide"
  source: /note="RNA"
  source: /note="5' tri-ethylene glycol (TEG)"
  modified_base (1)..(1): bicyclic nucleic acid (BNA)
  modified_base (3)..(3): 5-methyl modified nucleotide
  modified_base (12)..(12): 5-methyl modified nucleotide
  modified_base (16)..(16): 5-methyl modified nucleotide
  modified_base (17)..(17): 5-methyl modified nucleotide
gucgguaaguucuguccaag

SEQ ID NO: 13220 - RNA, 19 nt, Artificial Sequence
  source: /note="Description of Artificial Sequence: Synthetic oligonucleotide"
  source: /note="RNA"
  source: /note="5' tri-ethylene glycol (TEG)"
  modified_base (1)..(1): bicyclic nucleic acid (BNA)
  modified_base (3)..(3): 5-methyl modified nucleotide
  modified_base (12)..(12): 5-methyl modified nucleotide
  modified_base (16)..(16): 5-methyl modified nucleotide
  modified_base (17)..(17): 5-methyl modified nucleotide
gucgguaaguucuguccaa

SEQ ID NO: 13221 - RNA, 18 nt, Artificial Sequence
  source: /note="Description of Artificial Sequence: Synthetic oligonucleotide"
  source: /note="RNA"
  source: /note="5' tri-ethylene glycol (TEG)"
  modified_base (1)..(1): bicyclic nucleic acid (BNA)
  modified_base (3)..(3): 5-methyl modified nucleotide
  modified_base (12)..(12): 5-methyl modified nucleotide
  modified_base (16)..(16): 5-methyl modified nucleotide
  modified_base (17)..(17): 5-methyl modified nucleotide
gucgguaaguucugucca

SEQ ID NO: 13222 - RNA, 17 nt, Artificial Sequence
  source: /note="Description of Artificial Sequence: Synthetic oligonucleotide"
  source: /note="RNA"
  source: /note="5' tri-ethylene glycol (TEG)"
  modified_base (1)..(1): bicyclic nucleic acid (BNA)
  modified_base (3)..(3): 5-methyl modified nucleotide
  modified_base (12)..(12): 5-methyl modified nucleotide
  modified_base (16)..(16): 5-methyl modified nucleotide
  modified_base (17)..(17): 5-methyl modified nucleotide
gucgguaaguucugucc

SEQ ID NO: 13223 - RNA, 16 nt, Artificial Sequence
  source: /note="Description of Artificial Sequence: Synthetic oligonucleotide"
  source: /note="RNA"
  source: /note="5' tri-ethylene glycol (TEG)"
  modified_base (1)..(1): bicyclic nucleic acid (BNA)
  modified_base (3)..(3): 5-methyl modified nucleotide
  modified_base (12)..(12): 5-methyl modified nucleotide
  modified_base (16)..(16): 5-methyl modified nucleotide
gucgguaaguucuguc

SEQ ID NO: 13224 - RNA, 15 nt, Artificial Sequence
  source: /note="Description of Artificial Sequence: Synthetic oligonucleotide"
  source: /note="RNA"
  source: /note="5' tri-ethylene glycol (TEG)"
  modified_base (1)..(1): bicyclic nucleic acid (BNA)
  modified_base (3)..(3): 5-methyl modified nucleotide
  modified_base (12)..(12): 5-methyl modified nucleotide
gucgguaaguucugu

SEQ ID NO: 13225 - RNA, 14 nt, Artificial Sequence
  source: /note="Description of Artificial Sequence: Synthetic oligonucleotide"
  source: /note="RNA"
  source: /note="5' tri-ethylene glycol (TEG)"
  modified_base (1)..(1): bicyclic nucleic acid (BNA)
  modified_base (3)..(3): 5-methyl modified nucleotide
  modified_base (12)..(12): 5-methyl modified nucleotide
gucgguaaguucug

SEQ ID NO: 13226 - RNA, 13 nt, Artificial Sequence
  source: /note="Description of Artificial Sequence: Synthetic oligonucleotide"
  source: /note="RNA"
  source: /note="5' tri-ethylene glycol (TEG)"
  modified_base (1)..(1): bicyclic nucleic acid (BNA)
  modified_base (3)..(3): 5-methyl modified nucleotide
  modified_base (12)..(12): 5-methyl modified nucleotide
gucgguaaguucu

SEQ ID NO: 13227 - RNA, 12 nt, Artificial Sequence
  source: /note="Description of Artificial Sequence: Synthetic oligonucleotide"
  source: /note="RNA"
  source: /note="5' tri-ethylene glycol (TEG)"
  modified_base (1)..(1): bicyclic nucleic acid (BNA)
  modified_base (3)..(3): 5-methyl modified nucleotide
  modified_base (12)..(12): 5-methyl modified nucleotide
gucgguaaguuc

SEQ ID NO: 13228 - RNA, 11 nt, Artificial Sequence
  source: /note="Description of Artificial Sequence: Synthetic oligonucleotide"
  source: /note="RNA"
  source: /note="5' tri-ethylene glycol (TEG)"
  modified_base (1)..(1): bicyclic nucleic acid (BNA)
  modified_base (3)..(3): 5-methyl modified nucleotide
gucgguaaguu

SEQ ID NO: 13229 - RNA, 10 nt, Artificial Sequence
  source: /note="Description of Artificial Sequence: Synthetic oligonucleotide"
  source: /note="RNA"
  source: /note="5' tri-ethylene glycol (TEG)"
  modified_base (1)..(1): bicyclic nucleic acid (BNA)
  modified_base (3)..(3): 5-methyl modified nucleotide
gucgguaagu

SEQ ID NO: 13230 - RNA, 20 nt, Artificial Sequence
  source: /note="Description of Artificial Sequence: Synthetic oligonucleotide"
  source: /note="RNA"
  source: /note="5' tri-ethylene glycol (TEG)"
  modified_base (1)..(1): bicyclic nucleic acid (BNA)
  modified_base (4)..(4): 5-methyl modified nucleotide
  modified_base (13)..(13): 5-methyl modified nucleotide
  modified_base (17)..(17): 5-methyl modified nucleotide
  modified_base (18)..(18): 5-methyl modified nucleotide
agucgguaaguucuguccaa

SEQ ID NO: 13231 - RNA, 19 nt, Artificial Sequence
  source: /note="Description of Artificial Sequence: Synthetic oligonucleotide"
  source: /note="RNA"
  source: /note="5' tri-ethylene glycol (TEG)"
  modified_base (1)..(1): bicyclic nucleic acid (BNA)
  modified_base (4)..(4): 5-methyl modified nucleotide
  modified_base (13)..(13): 5-methyl modified nucleotide
  modified_base (17)..(17): 5-methyl modified nucleotide
  modified_base (18)..(18): 5-methyl modified nucleotide
agucgguaaguucugucca

SEQ ID NO: 13232 - RNA, 17 nt, Artificial Sequence
  source: /note="Description of Artificial Sequence: Synthetic oligonucleotide"
  source: /note="RNA"
  source: /note="5' tri-ethylene glycol (TEG)"
  modified_base (1)..(1): bicyclic nucleic acid (BNA)
  modified_base (4)..(4): 5-methyl modified nucleotide
  modified_base (13)..(13): 5-methyl modified nucleotide
  modified_base (17)..(17): 5-methyl modified nucleotide
agucgguaaguucuguc

SEQ ID NO: 13233 - RNA, 16 nt, Artificial Sequence
  source: /note="Description of Artificial Sequence: Synthetic oligonucleotide"
  source: /note="RNA"
  source: /note="5' tri-ethylene glycol (TEG)"
  modified_base (1)..(1): bicyclic nucleic acid (BNA)
  modified_base (4)..(4): 5-methyl modified nucleotide
  modified_base (13)..(13): 5-methyl modified nucleotide
agucgguaaguucugu

SEQ ID NO: 13234 - RNA, 15 nt, Artificial Sequence
  source: /note="Description of Artificial Sequence: Synthetic oligonucleotide"
  source: /note="RNA"
  source: /note="5' tri-ethylene glycol (TEG)"
  modified_base (1)..(1): bicyclic nucleic acid (BNA)
  modified_base (4)..(4): 5-methyl modified nucleotide
  modified_base (13)..(13): 5-methyl modified nucleotide
agucgguaaguucug

SEQ ID NO: 13235 - RNA, 14 nt, Artificial Sequence
  source: /note="Description of Artificial Sequence: Synthetic oligonucleotide"
  source: /note="RNA"
  source: /note="5' tri-ethylene glycol (TEG)"
  modified_base (1)..(1): bicyclic nucleic acid (BNA)
  modified_base (4)..(4): 5-methyl modified nucleotide
  modified_base (13)..(13): 5-methyl modified nucleotide
agucgguaaguucu

SEQ ID NO: 13236 - RNA, 13 nt, Artificial Sequence
  source: /note="Description of Artificial Sequence: Synthetic oligonucleotide"
  source: /note="RNA"
  source: /note="5' tri-ethylene glycol (TEG)"
  modified_base (1)..(1): bicyclic nucleic acid (BNA)
  modified_base (4)..(4): 5-methyl modified nucleotide
  modified_base (13)..(13): 5-methyl modified nucleotide
agucgguaaguuc

SEQ ID NO: 13237 - RNA, 12 nt, Artificial Sequence
  source: /note="Description of Artificial Sequence: Synthetic oligonucleotide"
  source: /note="RNA"
  source: /note="5' tri-ethylene glycol (TEG)"
  modified_base (1)..(1): bicyclic nucleic acid (BNA)
  modified_base (4)..(4): 5-methyl modified nucleotide
agucgguaaguu

SEQ ID NO: 13238 - RNA, 11 nt, Artificial Sequence
  source: /note="Description of Artificial Sequence: Synthetic oligonucleotide"
  source: /note="RNA"
  source: /note="5' tri-ethylene glycol (TEG)"
  modified_base (1)..(1): bicyclic nucleic acid (BNA)
  modified_base (4)..(4): 5-methyl modified nucleotide
agucgguaagu

SEQ ID NO: 13239 - RNA, 20 nt, Artificial Sequence
  source: /note="Description of Artificial Sequence: Synthetic oligonucleotide"
  source: /note="RNA"
  source: /note="5' tri-ethylene glycol (TEG)"
  modified_base (1)..(1): 5-methyl bicyclic nucleic acid
  modified_base (5)..(5): 5-methyl modified nucleotide
  modified_base (14)..(14): 5-methyl modified nucleotide
  modified_base (18)..(18): 5-methyl modified nucleotide
  modified_base (19)..(19): 5-methyl modified nucleotide
cagucgguaaguucugucca

SEQ ID NO: 13240 - RNA, 19 nt, Artificial Sequence
  source: /note="Description of Artificial Sequence: Synthetic oligonucleotide"
  source: /note="RNA"
  source: /note="5' tri-ethylene glycol (TEG)"
  modified_base (1)..(1): 5-methyl bicyclic nucleic acid
  modified_base (5)..(5): 5-methyl modified nucleotide
  modified_base (14)..(14): 5-methyl modified nucleotide
  modified_base (18)..(18): 5-methyl modified nucleotide
  modified_base (19)..(19): 5-methyl modified nucleotide
cagucgguaaguucugucc

SEQ ID NO: 13241 - RNA, 18 nt, Artificial Sequence
  source: /note="Description of Artificial Sequence: Synthetic oligonucleotide"
  source: /note="RNA"
  source: /note="5' tri-ethylene glycol (TEG)"
  modified_base (1)..(1): 5-methyl bicyclic nucleic acid
  modified_base (5)..(5): 5-methyl modified nucleotide
  modified_base (14)..(14): 5-methyl modified nucleotide
  modified_base (18)..(18): 5-methyl modified nucleotide
cagucgguaaguucuguc

SEQ ID NO: 13242 - RNA, 17 nt, Artificial Sequence
  source: /note="Description of Artificial Sequence: Synthetic oligonucleotide"
  source: /note="RNA"
  source: /note="5' tri-ethylene glycol (TEG)"
  modified_base (1)..(1): 5-methyl bicyclic nucleic acid
  modified_base (5)..(5): 5-methyl modified nucleotide
  modified_base (14)..(14): 5-methyl modified nucleotide
cagucgguaaguucugu

SEQ ID NO: 13243 - RNA, 16 nt, Artificial Sequence
  source: /note="Description of Artificial Sequence: Synthetic oligonucleotide"
  source: /note="RNA"
  source: /note="5' tri-ethylene glycol (TEG)"
  modified_base (1)..(1): 5-methyl bicyclic nucleic acid
  modified_base (5)..(5): 5-methyl modified nucleotide
  modified_base (14)..(14): 5-methyl modified nucleotide
cagucgguaaguucug

SEQ ID NO: 13244 - RNA, 15 nt, Artificial Sequence
  source: /note="Description of Artificial Sequence: Synthetic oligonucleotide"
  source: /note="RNA"
  source: /note="5' tri-ethylene glycol (TEG)"
  modified_base (1)..(1): 5-methyl bicyclic nucleic acid
  modified_base (5)..(5): 5-methyl modified nucleotide
  modified_base (14)..(14): 5-methyl modified nucleotide
cagucgguaaguucu

SEQ ID NO: 13245 - RNA, 14 nt, Artificial Sequence
  source: /note="Description of Artificial Sequence: Synthetic oligonucleotide"
  source: /note="RNA"
  source: /note="5' tri-ethylene glycol (TEG)"
  modified_base (1)..(1): 5-methyl bicyclic nucleic acid
  modified_base (5)..(5): 5-methyl modified nucleotide
  modified_base (14)..(14): 5-methyl modified nucleotide
cagucgguaaguuc

SEQ ID NO: 13246 - RNA, 13 nt, Artificial Sequence
  source: /note="Description of Artificial Sequence: Synthetic oligonucleotide"
  source: /note="RNA"
  source: /note="5' tri-ethylene glycol (TEG)"
  modified_base (1)..(1): 5-methyl bicyclic nucleic acid
  modified_base (5)..(5): 5-methyl modified nucleotide
cagucgguaaguu

SEQ ID NO: 13247 - RNA, 12 nt, Artificial Sequence
  source: /note="Description of Artificial Sequence: Synthetic oligonucleotide"
  source: /note="RNA"
  source: /note="5' tri-ethylene glycol (TEG)"
  modified_base (1)..(1): 5-methyl bicyclic nucleic acid
  modified_base (5)..(5): 5-methyl modified nucleotide
cagucgguaagu

SEQ ID NO: 13248 - RNA, 20 nt, Artificial Sequence
  source: /note="Description of Artificial Sequence: Synthetic oligonucleotide"
  source: /note="RNA"
  source: /note="5' tri-ethylene glycol (TEG)"
  modified_base (1)..(1): 5-methyl bicyclic nucleic acid
  modified_base (2)..(2): 5-methyl modified nucleotide
  modified_base (6)..(6): 5-methyl modified nucleotide
  modified_base (15)..(15): 5-methyl modified nucleotide
  modified_base (19)..(19): 5-methyl modified nucleotide
  modified_base (20)..(20): 5-methyl modified nucleotide
ccagucgguaaguucugucc

SEQ ID NO: 13249 - RNA, 19 nt, Artificial Sequence
  source: /note="Description of Artificial Sequence: Synthetic oligonucleotide"
  source: /note="RNA"
  source: /note="5' tri-ethylene glycol (TEG)"
  modified_base (1)..(1): 5-methyl bicyclic nucleic acid
  modified_base (2)..(2): 5-methyl modified nucleotide
  modified_base (6)..(6): 5-methyl modified nucleotide
  modified_base (15)..(15): 5-methyl modified nucleotide
  modified_base (19)..(19): 5-methyl modified nucleotide
ccagucgguaaguucuguc

SEQ ID NO: 13250 - RNA, 18 nt, Artificial Sequence
  source: /note="Description of Artificial Sequence: Synthetic oligonucleotide"
  source: /note="RNA"
  source: /note="5' tri-ethylene glycol (TEG)"
  modified_base (1)..(1): 5-methyl bicyclic nucleic acid
  modified_base (2)..(2): 5-methyl modified nucleotide
  modified_base (6)..(6): 5-methyl modified nucleotide
  modified_base (15)..(15): 5-methyl modified nucleotide
ccagucgguaaguucugu

SEQ ID NO: 13251 - RNA, 17 nt, Artificial Sequence
  source: /note="Description of Artificial Sequence: Synthetic oligonucleotide"
  source: /note="RNA"
  source: /note="5' tri-ethylene glycol (TEG)"
  modified_base (1)..(1): 5-methyl bicyclic nucleic acid
  modified_base (2)..(2): 5-methyl modified nucleotide
  modified_base (6)..(6): 5-methyl modified nucleotide
  modified_base (15)..(15): 5-methyl modified nucleotide
ccagucgguaaguucug

SEQ ID NO: 13252 - RNA, 16 nt, Artificial Sequence
  source: /note="Description of Artificial Sequence: Synthetic oligonucleotide"
  source: /note="RNA"
  source: /note="5' tri-ethylene glycol (TEG)"
  modified_base (1)..(1): 5-methyl bicyclic nucleic acid
  modified_base (2)..(2): 5-methyl modified nucleotide
  modified_base (6)..(6): 5-methyl modified nucleotide
  modified_base (15)..(15): 5-methyl modified nucleotide
ccagucgguaaguucu

SEQ ID NO: 13253 - RNA, 15 nt, Artificial Sequence
  source: /note="Description of Artificial Sequence: Synthetic oligonucleotide"
  source: /note="RNA"
  source: /note="5' tri-ethylene glycol (TEG)"
  modified_base (1)..(1): 5-methyl bicyclic nucleic acid
  modified_base (2)..(2): 5-methyl modified nucleotide
  modified_base (6)..(6): 5-methyl modified nucleotide
  modified_base (15)..(15): 5-methyl modified nucleotide
ccagucgguaaguuc

SEQ ID NO: 13254 - RNA, 14 nt, Artificial Sequence
  source: /note="Description of Artificial Sequence: Synthetic oligonucleotide"
  source: /note="RNA"
  source: /note="5' tri-ethylene glycol (TEG)"
  modified_base (1)..(1): 5-methyl bicyclic nucleic acid
  modified_base (2)..(2): 5-methyl modified nucleotide
  modified_base (6)..(6): 5-methyl modified nucleotide
ccagucgguaaguu

SEQ ID NO: 13255 - RNA, 13 nt, Artificial Sequence
  source: /note="Description of Artificial Sequence: Synthetic oligonucleotide"
  source: /note="RNA"
  source: /note="5' tri-ethylene glycol (TEG)"
  modified_base (1)..(1): 5-methyl bicyclic nucleic acid
  modified_base (2)..(2): 5-methyl modified nucleotide
  modified_base (6)..(6): 5-methyl modified nucleotide
ccagucgguaagu

SEQ ID NO: 13256 - RNA, 20 nt, Artificial Sequence
  source: /note="Description of Artificial Sequence: Synthetic oligonucleotide"
  source: /note="RNA"
  source: /note="5' tri-ethylene glycol (TEG)"
  modified_base (1)..(1): bicyclic nucleic acid (BNA)
  modified_base (2)..(2): 5-methyl modified nucleotide
  modified_base (3)..(3): 5-methyl modified nucleotide
  modified_base (7)..(7): 5-methyl modified nucleotide
  modified_base (16)..(16): 5-methyl modified nucleotide
  modified_base (20)..(20): 5-methyl modified nucleotide
gccagucgguaaguucuguc

SEQ ID NO: 13257 - RNA, 19 nt, Artificial Sequence
  source: /note="Description of Artificial Sequence: Synthetic oligonucleotide"
  source: /note="RNA"
  source: /note="5' tri-ethylene glycol (TEG)"
  modified_base (1)..(1): bicyclic nucleic acid (BNA)
  modified_base (2)..(2): 5-methyl modified nucleotide
  modified_base (3)..(3): 5-methyl modified nucleotide
  modified_base (7)..(7): 5-methyl modified nucleotide
  modified_base (16)..(16): 5-methyl modified nucleotide
gccagucgguaaguucugu

SEQ ID NO: 13258 - RNA, 18 nt, Artificial Sequence
  source: /note="Description of Artificial Sequence: Synthetic oligonucleotide"
  source: /note="RNA"
  source: /note="5' tri-ethylene glycol (TEG)"
  modified_base (1)..(1): bicyclic nucleic acid (BNA)
  modified_base (2)..(2): 5-methyl modified nucleotide
  modified_base (3)..(3): 5-methyl modified nucleotide
  modified_base (7)..(7): 5-methyl modified nucleotide
  modified_base (16)..(16): 5-methyl modified nucleotide
gccagucgguaaguucug

SEQ ID NO: 13259 - RNA, 17 nt, Artificial Sequence
  source: /note="Description of Artificial Sequence: Synthetic oligonucleotide"
  source: /note="RNA"
  source: /note="5' tri-ethylene glycol (TEG)"
  modified_base (1)..(1): bicyclic nucleic acid (BNA)
  modified_base (2)..(2): 5-methyl modified nucleotide
  modified_base (3)..(3): 5-methyl modified nucleotide
  modified_base (7)..(7): 5-methyl modified nucleotide
  modified_base (16)..(16): 5-methyl modified nucleotide
gccagucgguaaguucu

SEQ ID NO: 13260 - RNA, 16 nt, Artificial Sequence
  source: /note="Description of Artificial Sequence: Synthetic oligonucleotide"
  source: /note="RNA"
  source: /note="5' tri-ethylene glycol (TEG)"
  modified_base (1)..(1): bicyclic nucleic acid (BNA)
  modified_base (2)..(2): 5-methyl modified nucleotide
  modified_base (3)..(3): 5-methyl modified nucleotide
  modified_base (7)..(7): 5-methyl modified nucleotide
  modified_base (16)..(16): 5-methyl modified nucleotide
gccagucgguaaguuc

SEQ ID NO: 13261 - RNA, 15 nt, Artificial Sequence
  source: /note="Description of Artificial Sequence: Synthetic oligonucleotide"
  source: /note="RNA"
  source: /note="5' tri-ethylene glycol (TEG)"
  modified_base (1)..(1): bicyclic nucleic acid (BNA)
  modified_base (2)..(2): 5-methyl modified nucleotide
  modified_base (3)..(3): 5-methyl modified nucleotide
  modified_base (7)..(7): 5-methyl modified nucleotide
gccagucgguaaguu

SEQ ID NO: 13262 - RNA, 14 nt, Artificial Sequence
  source: /note="Description of Artificial Sequence: Synthetic oligonucleotide"
  source: /note="RNA"
  source: /note="5' tri-ethylene glycol (TEG)"
  modified_base (1)..(1): bicyclic nucleic acid (BNA)
  modified_base (2)..(2): 5-methyl modified nucleotide
  modified_base (3)..(3): 5-methyl modified nucleotide
  modified_base (7)..(7): 5-methyl modified nucleotide
gccagucgguaagu

SEQ ID NO: 13263 - DNA, 20 bp, Artificial Sequence
  source: /note="Description of Artificial Sequence: Synthetic oligonucleotide"
  source: /note="Description of Combined DNA/RNA Molecule: Synthetic oligonucleotide"
  source: /note="DNA/RNA"
  source: /note="5' tri-ethylene glycol (TEG)"
  modified_base (1)..(1): bicyclic nucleic acid (BNA)
  modified_base (2)..(2): 5-methyl modified nucleotide
  modified_base (14)..(14): 5-methyl modified nucleotide
  modified_base (19)..(19): 5-methyl modified nucleotide
tcaaggaagauggcauuucu

SEQ ID NO: 13264 - DNA, 22 bp, Artificial Sequence
  source: /note="Description of Artificial Sequence: Synthetic oligonucleotide"
  source: /note="Description of Combined DNA/RNA Molecule: Synthetic oligonucleotide"
  source: /note="DNA/RNA"
  source: /note="5' tri-ethylene glycol (TEG)"
  modified_base (1)..(1): bicyclic nucleic acid (BNA)
  modified_base (2)..(2): 5-methyl modified nucleotide
  modified_base (14)..(14): 5-methyl modified nucleotide
  modified_base (19)..(19): 5-methyl modified nucleotide
tcaaggaagauggcauuucuag

SEQ ID NO: 13265 - DNA, 16 bp, Artificial Sequence
  source: /note="Description of Artificial Sequence: Synthetic oligonucleotide"
  source: /note="Description of Combined DNA/RNA Molecule: Synthetic oligonucleotide"
  source: /note="DNA/RNA"
  source: /note="5' tri-ethylene glycol (TEG)"
  modified_base (1)..(1): bicyclic nucleic acid (BNA)
  modified_base (2)..(2): 5-methyl modified nucleotide
  modified_base (14)..(14): 5-methyl modified nucleotide
tcaaggaagauggcau

SEQ ID NO: 13266 - RNA, 15 nt, Artificial Sequence
  source: /note="Description of Artificial Sequence: Synthetic oligonucleotide"
  source: /note="RNA"
  source: /note="5' tri-ethylene glycol (TEG)"
  modified_base (1)..(1): bicyclic nucleic acid (BNA)
  modified_base (9)..(9): 5-methyl modified nucleotide
  modified_base (14)..(14): 5-methyl modified nucleotide
gaagauggcauuucu

SEQ ID NO: 13267 - DNA, 21 bp, Artificial Sequence
  source: /note="Description of Artificial Sequence: Synthetic oligonucleotide"
  source: /note="Description of Combined DNA/RNA Molecule: Synthetic oligonucleotide"
  source: /note="DNA/RNA"
  source: /note="5' tri-ethylene glycol (TEG)"
  modified_base (1)..(1): bicyclic nucleic acid (BNA)
  modified_base (2)..(2): 5-methyl modified nucleotide
  modified_base (14)..(14): 5-methyl modified nucleotide
  modified_base (19)..(19): 5-methyl modified nucleotide
tcaaggaagauggcauuucua

SEQ ID NO: 13268 - DNA, 19 bp, Artificial Sequence
  source: /note="Description of Artificial Sequence: Synthetic oligonucleotide"
  source: /note="Description of Combined DNA/RNA Molecule: Synthetic oligonucleotide"
  source: /note="DNA/RNA"
  source: /note="5' tri-ethylene glycol (TEG)"
  modified_base (1)..(1): bicyclic nucleic acid (BNA)
  modified_base (2)..(2): 5-methyl modified nucleotide
  modified_base (14)..(14): 5-methyl modified nucleotide
  modified_base (19)..(19): 5-methyl modified nucleotide
tcaaggaagauggcauuuc

SEQ ID NO: 13269 - DNA, 18 bp, Artificial Sequence
  source: /note="Description of Artificial Sequence: Synthetic oligonucleotide"
  source: /note="Description of Combined DNA/RNA Molecule: Synthetic oligonucleotide"
  source: /note="DNA/RNA"
  source: /note="5' tri-ethylene glycol (TEG)"
  modified_base (1)..(1): bicyclic nucleic acid (BNA)
  modified_base (2)..(2): 5-methyl modified nucleotide
  modified_base (14)..(14): 5-methyl modified nucleotide
tcaaggaagauggcauuu

SEQ ID NO: 13270 - DNA, 17 bp, Artificial Sequence
  source: /note="Description of Artificial Sequence: Synthetic oligonucleotide"
  source: /note="Description of Combined DNA/RNA Molecule: Synthetic oligonucleotide"
  source: /note="DNA/RNA"
  source: /note="5' tri-ethylene glycol (TEG)"
  modified_base (1)..(1): bicyclic nucleic acid (BNA)
  modified_base (2)..(2): 5-methyl modified nucleotide
  modified_base (14)..(14): 5-methyl modified nucleotide
tcaaggaagauggcauu

SEQ ID NO: 13271 - DNA, 15 bp, Artificial Sequence
  source: /note="Description of Artificial Sequence: Synthetic oligonucleotide"
  source: /note="Description of Combined DNA/RNA Molecule: Synthetic oligonucleotide"
  source: /note="DNA/RNA"
  source: /note="5' tri-ethylene glycol (TEG)"
  modified_base (1)..(1): bicyclic nucleic acid (BNA)
  modified_base (2)..(2): 5-methyl modified nucleotide
  modified_base (14)..(14): 5-methyl modified nucleotide
tcaaggaagauggca

SEQ ID NO: 13272 - DNA, 14 bp, Artificial Sequence
  source: /note="Description of Artificial Sequence: Synthetic oligonucleotide"
  source: /note="Description of Combined DNA/RNA Molecule: Synthetic oligonucleotide"
  source: /note="DNA/RNA"
  source: /note="5' tri-ethylene glycol (TEG)"
  modified_base (1)..(1): bicyclic nucleic acid (BNA)
  modified_base (2)..(2): 5-methyl modified nucleotide
  modified_base (14)..(14): 5-methyl modified nucleotide
tcaaggaagauggc

SEQ ID NO: 13273 - DNA, 13 bp, Artificial Sequence
  source: /note="Description of Artificial Sequence: Synthetic oligonucleotide"
  source: /note="Description of Combined DNA/RNA Molecule: Synthetic oligonucleotide"
  source: /note="DNA/RNA"
  source: /note="5' tri-ethylene glycol (TEG)"
  modified_base (1)..(1): bicyclic nucleic acid (BNA)
  modified_base (2)..(2): 5-methyl modified nucleotide
tcaaggaagaugg

SEQ ID NO: 13274 - DNA, 12 bp, Artificial Sequence
  source: /note="Description of Artificial Sequence: Synthetic oligonucleotide"
  source: /note="Description of Combined DNA/RNA Molecule: Synthetic oligonucleotide"
  source: /note="DNA/RNA"
  source: /note="5' tri-ethylene glycol (TEG)"
  modified_base (1)..(1): bicyclic nucleic acid (BNA)
  modified_base (2)..(2): 5-methyl modified nucleotide
tcaaggaagaug

SEQ ID NO: 13275 - DNA, 11 bp, Artificial Sequence
  source: /note="Description of Artificial Sequence: Synthetic oligonucleotide"
  source: /note="Description of Combined DNA/RNA Molecule: Synthetic oligonucleotide"
  source: /note="DNA/RNA"
  source: /note="5' tri-ethylene glycol (TEG)"
  modified_base (1)..(1): bicyclic nucleic acid (BNA)
  modified_base (2)..(2): 5-methyl modified nucleotide
tcaaggaagau

SEQ ID NO: 13276 - DNA, 10 bp, Artificial Sequence
  source: /note="Description of Artificial Sequence: Synthetic oligonucleotide"
  source: /note="DNA/RNA"
  source: /note="5' tri-ethylene glycol (TEG)"
  modified_base (1)..(1): bicyclic nucleic acid (BNA)
  modified_base (2)..(2): 5-methyl modified nucleotide
tcaaggaaga

SEQ ID NO: 13277 - DNA, 9 bp, Artificial Sequence
  source: /note="Description of Artificial Sequence: Synthetic oligonucleotide"
  source: /note="DNA/RNA"
  source: /note="5' tri-ethylene glycol (TEG)"
  modified_base (1)..(1): bicyclic nucleic acid (BNA)
  modified_base (2)..(2): 5-methyl modified nucleotide
tcaaggaag

SEQ ID NO: 13278 - RNA, 21 nt, Artificial Sequence
  source: /note="Description of Artificial Sequence: Synthetic oligonucleotide"
  source: /note="RNA"
  source: /note="5' tri-ethylene glycol (TEG)"
  modified_base (1)..(1): 5-methyl bicyclic nucleic acid
  modified_base (13)..(13): 5-methyl modified nucleotide
  modified_base (18)..(18): 5-methyl modified nucleotide
caaggaagauggcauuucuag

SEQ ID NO: 13279 - RNA, 20 nt, Artificial Sequence
  source: /note="Description of Artificial Sequence: Synthetic oligonucleotide"
  source: /note="RNA"
  source: /note="5' tri-ethylene glycol (TEG)"
  modified_base (1)..(1): 5-methyl bicyclic nucleic acid
  modified_base (13)..(13): 5-methyl modified nucleotide
  modified_base (18)..(18): 5-methyl modified nucleotide
caaggaagauggcauuucua

SEQ ID NO: 13280 - RNA, 19 nt, Artificial Sequence
  source: /note="Description of Artificial Sequence: Synthetic oligonucleotide"
  source: /note="RNA"
  source: /note="5' tri-ethylene glycol (TEG)"
  modified_base (1)..(1): 5-methyl bicyclic nucleic acid
  modified_base (13)..(13): 5-methyl modified nucleotide
  modified_base (18)..(18): 5-methyl modified nucleotide
caaggaagauggcauuucu

SEQ ID NO: 13281 - RNA, 18 nt, Artificial Sequence
  source: /note="Description of Artificial Sequence: Synthetic oligonucleotide"
  source: /note="RNA"
  source: /note="5' tri-ethylene glycol (TEG)"
  modified_base (1)..(1): 5-methyl bicyclic nucleic acid
  modified_base (13)..(13): 5-methyl modified nucleotide
  modified_base (18)..(18): 5-methyl modified nucleotide
caaggaagauggcauuuc

SEQ ID NO: 13282 - RNA, 17 nt, Artificial Sequence
  source: /note="Description of Artificial Sequence: Synthetic oligonucleotide"
  source: /note="RNA"
  source: /note="5' tri-ethylene glycol (TEG)"
  modified_base (1)..(1): 5-methyl bicyclic nucleic acid
  modified_base (13)..(13): 5-methyl modified nucleotide
caaggaagauggcauuu

SEQ ID NO: 13283 - RNA, 16 nt, Artificial Sequence
  source: /note="Description of Artificial Sequence: Synthetic oligonucleotide"
  source: /note="RNA"
  source: /note="5' tri-ethylene glycol (TEG)"
  modified_base (1)..(1): 5-methyl bicyclic nucleic acid
  modified_base (13)..(13): 5-methyl modified nucleotide
caaggaagauggcauu

SEQ ID NO: 13284 - RNA, 15 nt, Artificial Sequence
  source: /note="Description of Artificial Sequence: Synthetic oligonucleotide"
  source: /note="RNA"
  source: /note="5' tri-ethylene glycol (TEG)"
  modified_base (1)..(1): 5-methyl bicyclic nucleic acid
  modified_base (13)..(13): 5-methyl modified nucleotide
caaggaagauggcau

SEQ ID NO: 13285 - RNA, 14 nt, Artificial Sequence
  source: /note="Description of Artificial Sequence: Synthetic oligonucleotide"
  source: /note="RNA"
  source: /note="5' tri-ethylene glycol (TEG)"
  modified_base (1)..(1): 5-methyl bicyclic nucleic acid
  modified_base (13)..(13): 5-methyl modified nucleotide
caaggaagauggca

SEQ ID NO: 13286 - RNA, 13 nt, Artificial Sequence
  source: /note="Description of Artificial Sequence: Synthetic oligonucleotide"
  source: /note="RNA"
  source: /note="5' tri-ethylene glycol (TEG)"
  modified_base (1)..(1): 5-methyl bicyclic nucleic acid
  modified_base (13)..(13): 5-methyl modified nucleotide
caaggaagauggc

SEQ ID NO: 13287 - RNA, 12 nt, Artificial Sequence
  source: /note="Description of Artificial Sequence: Synthetic oligonucleotide"
  source: /note="RNA"
  source: /note="5' tri-ethylene glycol (TEG)"
  modified_base (1)..(1): 5-methyl bicyclic nucleic acid
caaggaagaugg

SEQ ID NO: 13288 - RNA, 11 nt, Artificial Sequence
  source: /note="Description of Artificial Sequence: Synthetic oligonucleotide"
  source: /note="RNA"
  source: /note="5' tri-ethylene glycol (TEG)"
  modified_base (1)..(1): 5-methyl bicyclic nucleic acid
caaggaagaug

SEQ ID NO: 13289 - RNA, 10 nt, Artificial Sequence
  source: /note="Description of Artificial Sequence: Synthetic oligonucleotide"
  source: /note="RNA"
  source: /note="5' tri-ethylene glycol (TEG)"
  modified_base (1)..(1): 5-methyl bicyclic nucleic acid
caaggaagau

SEQ ID NO: 13290 - RNA, 9 nt, Artificial Sequence
  source: /note="Description of Artificial Sequence: Synthetic oligonucleotide"
  source: /note="RNA/Antisense Oligonucleotide"
  source: /note="5' tri-ethylene glycol (TEG)"
  modified_base (1)..(1): 5-methyl bicyclic nucleic acid
caaggaaga

SEQ ID NO: 13291 - RNA, 8 nt, Artificial Sequence
  source: /note="Description of Artificial Sequence: Synthetic oligonucleotide"
  source: /note="RNA/Antisense Oligonucleotide"
  source: /note="5' tri-ethylene glycol (TEG)"
  modified_base (1)..(1): 5-methyl bicyclic nucleic acid
caaggaag

SEQ ID NO: 13292 - RNA, 20 nt, Artificial Sequence
  source: /note="Description of Artificial Sequence: Synthetic oligonucleotide"
  source: /note="RNA"
  source: /note="5' tri-ethylene glycol (TEG)"
  modified_base (1)..(1): bicyclic nucleic acid (BNA)
  modified_base (12)..(12): 5-methyl modified nucleotide
  modified_base (17)..(17): 5-methyl modified nucleotide
aaggaagauggcauuucuag

SEQ ID NO: 13293 - RNA, 19 nt, Artificial Sequence
  source: /note="Description of Artificial Sequence: Synthetic oligonucleotide"
  source: /note="RNA"
  source: /note="5' tri-ethylene glycol (TEG)"
  modified_base (1)..(1): bicyclic nucleic acid (BNA)
  modified_base (12)..(12): 5-methyl modified nucleotide
  modified_base (17)..(17): 5-methyl modified nucleotide
aaggaagauggcauuucua

SEQ ID NO: 13294 - RNA, 18 nt, Artificial Sequence
  source: /note="Description of Artificial Sequence: Synthetic oligonucleotide"
  source: /note="RNA"
  source: /note="5' tri-ethylene glycol (TEG)"
  modified_base (1)..(1): bicyclic nucleic acid (BNA)
  modified_base (12)..(12): 5-methyl modified nucleotide
  modified_base (17)..(17): 5-methyl modified nucleotide
aaggaagauggcauuucu

SEQ ID NO: 13295 - RNA, 17 nt, Artificial Sequence
  source: /note="Description of Artificial Sequence: Synthetic oligonucleotide"
  source: /note="RNA"
  source: /note="5' tri-ethylene glycol (TEG)"
  modified_base (1)..(1): bicyclic nucleic acid (BNA)
  modified_base (12)..(12): 5-methyl modified nucleotide
  modified_base (17)..(17): 5-methyl modified nucleotide
aaggaagauggcauuuc

SEQ ID NO: 13296 - RNA, 16 nt, Artificial Sequence
  source: /note="Description of Artificial Sequence: Synthetic oligonucleotide"
  source: /note="RNA"
  source: /note="5' tri-ethylene glycol (TEG)"
  modified_base (1)..(1): bicyclic nucleic acid (BNA)
  modified_base (12)..(12): 5-methyl modified nucleotide
aaggaagauggcauuu

SEQ ID NO: 13297 - RNA, 15 nt, Artificial Sequence
  source: /note="Description of Artificial Sequence: Synthetic oligonucleotide"
  source: /note="RNA"
  source: /note="5' tri-ethylene glycol (TEG)"
  modified_base (1)..(1): bicyclic nucleic acid (BNA)
  modified_base (12)..(12): 5-methyl modified nucleotide
aaggaagauggcauu

SEQ ID NO: 13298 - RNA, 14 nt, Artificial Sequence
  source: /note="Description of Artificial Sequence: Synthetic oligonucleotide"
  source: /note="RNA"
  source: /note="5' tri-ethylene glycol (TEG)"
  modified_base (1)..(1): bicyclic nucleic acid (BNA)
  modified_base (12)..(12): 5-methyl modified nucleotide
aaggaagauggcau

SEQ ID NO: 13299 - RNA, 13 nt, Artificial Sequence
  source: /note="Description of Artificial Sequence: Synthetic oligonucleotide"
  source: /note="RNA"
  source: /note="5' tri-ethylene glycol (TEG)"
  modified_base (1)..(1): bicyclic nucleic acid (BNA)
  modified_base (12)..(12): 5-methyl modified nucleotide
aaggaagauggca

SEQ ID NO: 13300 - RNA, 12 nt, Artificial Sequence
  source: /note="Description of Artificial Sequence: Synthetic oligonucleotide"
  source: /note="RNA"
  source: /note="5' tri-ethylene glycol (TEG)"
  modified_base (1)..(1): bicyclic nucleic acid (BNA)
  modified_base (12)..(12): 5-methyl modified nucleotide
aaggaagauggc

SEQ ID NO: 13301 - RNA, 11 nt, Artificial Sequence
  source: /note="Description of Artificial Sequence: Synthetic oligonucleotide"
  source: /note="RNA"
  source: /note="5' tri-ethylene glycol (TEG)"
  modified_base (1)..(1): bicyclic nucleic acid (BNA)
aaggaagaugg

SEQ ID NO: 13302 - RNA, 10 nt, Artificial Sequence
  source: /note="Description of Artificial Sequence: Synthetic oligonucleotide"
  source: /note="RNA"
  source: /note="5' tri-ethylene glycol (TEG)"
  modified_base (1)..(1): bicyclic nucleic acid (BNA)
aaggaagaug

SEQ ID NO: 13303 - RNA, 9 nt, Artificial Sequence
  source: /note="Description of Artificial Sequence: Synthetic oligonucleotide"
  source: /note="RNA"
  source: /note="5' tri-ethylene glycol (TEG)"
  modified_base (1)..(1): bicyclic nucleic acid (BNA)
aaggaagau

SEQ ID NO: 13304 - RNA, 8 nt, Artificial Sequence
  source: /note="Description of Artificial Sequence: Synthetic oligonucleotide"
  source: /note="RNA/Antisense Oligonucleotide"
  source: /note="5' tri-ethylene glycol (TEG)"
  modified_base (1)..(1): bicyclic nucleic acid (BNA)
aaggaaga

SEQ ID NO: 13305 - RNA, 19 nt, Artificial Sequence
  source: /note="Description of Artificial Sequence: Synthetic oligonucleotide"
  source: /note="RNA"
  source: /note="5' tri-ethylene glycol (TEG)"
  modified_base (1)..(1): bicyclic nucleic acid (BNA)
  modified_base (11)..(11): 5-methyl modified nucleotide
  modified_base (16)..(16): 5-methyl modified nucleotide
aggaagauggcauuucuag

SEQ ID NO: 13306 - RNA, 18 nt, Artificial Sequence
  source: /note="Description of Artificial Sequence: Synthetic oligonucleotide"
  source: /note="RNA"
  source: /note="5' tri-ethylene glycol (TEG)"
  modified_base (1)..(1): bicyclic nucleic acid (BNA)
  modified_base (11)..(11): 5-methyl modified nucleotide
  modified_base (16)..(16): 5-methyl modified nucleotide
aggaagauggcauuucua

SEQ ID NO: 13307 - RNA, 17 nt, Artificial Sequence
  source: /note="Description of Artificial Sequence: Synthetic oligonucleotide"
  source: /note="RNA"
  source: /note="5' tri-ethylene glycol (TEG)"
  modified_base (1)..(1): bicyclic nucleic acid (BNA)
  modified_base (11)..(11): 5-methyl modified nucleotide
  modified_base (16)..(16): 5-methyl modified nucleotide
aggaagauggcauuucu

SEQ ID NO: 13308 - RNA, 16 nt, Artificial Sequence
  source: /note="Description of Artificial Sequence: Synthetic oligonucleotide"
  source: /note="RNA"
  source: /note="5' tri-ethylene glycol (TEG)"
  modified_base (1)..(1): bicyclic nucleic acid (BNA)
  modified_base (11)..(11): 5-methyl modified nucleotide
  modified_base (16)..(16): 5-methyl modified nucleotide
aggaagauggcauuuc

SEQ ID NO: 13309 - RNA, 15 nt, Artificial Sequence
  source: /note="Description of Artificial Sequence: Synthetic oligonucleotide"
  source: /note="RNA"
  source: /note="5' tri-ethylene glycol (TEG)"
  modified_base (1)..(1): bicyclic nucleic acid (BNA)
  modified_base (11)..(11): 5-methyl modified nucleotide
aggaagauggcauuu

SEQ ID NO: 13310 - RNA, 14 nt, Artificial Sequence
  source: /note="Description of Artificial Sequence: Synthetic oligonucleotide"
  source: /note="RNA"
  source: /note="5' tri-ethylene glycol (TEG)"
  modified_base (1)..(1): bicyclic nucleic acid (BNA)
  modified_base (11)..(11): 5-methyl modified nucleotide
aggaagauggcauu

SEQ ID NO: 13311 - RNA, 13 nt, Artificial Sequence
  source: /note="Description of Artificial Sequence: Synthetic oligonucleotide"
  source: /note="RNA"
  source: /note="5' tri-ethylene glycol (TEG)"
  modified_base (1)..(1): bicyclic nucleic acid (BNA)
  modified_base (11)..(11): 5-methyl modified nucleotide
aggaagauggcau

SEQ ID NO: 13312 - RNA, 12 nt, Artificial Sequence
  source: /note="Description of Artificial Sequence: Synthetic oligonucleotide"
  source: /note="RNA"
  source: /note="5' tri-ethylene glycol (TEG)"
  modified_base (1)..(1): bicyclic nucleic acid (BNA)
  modified_base (11)..(11): 5-methyl modified nucleotide
aggaagauggca

SEQ ID NO: 13313 - RNA, 10 nt, Artificial Sequence
  source: /note="Description of Artificial Sequence: Synthetic oligonucleotide"
  source: /note="RNA"
  source: /note="5' tri-ethylene glycol (TEG)"
  modified_base (1)..(1): bicyclic nucleic acid (BNA)
aggaagaugg

SEQ ID NO: 13314 - RNA, 9 nt, Artificial Sequence
  source: /note="Description of Artificial Sequence: Synthetic oligonucleotide"
  source: /note="RNA"
  source: /note="5' tri-ethylene glycol (TEG)"
  modified_base (1)..(1): bicyclic nucleic acid (BNA)
aggaagaug

SEQ ID NO: 13315 - RNA, 8 nt, Artificial Sequence
  source: /note="Description of Artificial Sequence: Synthetic oligonucleotide"
  source: /note="RNA"
  source: /note="5' tri-ethylene glycol (TEG)"
  modified_base (1)..(1): bicyclic nucleic acid (BNA)
aggaagau

SEQ ID NO: 13316 - RNA, 18 nt, Artificial Sequence
  source: /note="Description of Artificial Sequence: Synthetic oligonucleotide"
  source: /note="RNA"
  source: /note="5' tri-ethylene glycol (TEG)"
  modified_base (1)..(1): bicyclic nucleic acid (BNA)
  modified_base (10)..(10): 5-methyl modified nucleotide
  modified_base (15)..(15): 5-methyl modified nucleotide
ggaagauggcauuucuag

SEQ ID NO: 13317 - RNA, 17 nt, Artificial Sequence
  source: /note="Description of Artificial Sequence: Synthetic oligonucleotide"
  source: /note="RNA"
  source: /note="5' tri-ethylene glycol (TEG)"
  modified_base (1)..(1): bicyclic nucleic acid (BNA)
  modified_base (10)..(10): 5-methyl modified nucleotide
  modified_base (15)..(15): 5-methyl modified nucleotide
ggaagauggcauuucua

SEQ ID NO: 13318 - RNA, 16 nt, Artificial Sequence
  source: /note="Description of Artificial Sequence: Synthetic oligonucleotide"
  source: /note="RNA"
  source: /note="5' tri-ethylene glycol (TEG)"
  modified_base (1)..(1): bicyclic nucleic acid (BNA)
  modified_base (10)..(10): 5-methyl modified nucleotide
  modified_base (15)..(15): 5-methyl modified nucleotide
ggaagauggcauuucu

SEQ ID NO: 13319 - RNA, 15 nt, Artificial Sequence
  source: /note="Description of Artificial Sequence: Synthetic oligonucleotide"
  source: /note="RNA"
  source: /note="5' tri-ethylene glycol (TEG)"
  modified_base (1)..(1): bicyclic nucleic acid (BNA)
  modified_base (10)..(10): 5-methyl modified nucleotide
  modified_base (15)..(15): 5-methyl modified nucleotide
ggaagauggcauuuc

SEQ ID NO: 13320 - RNA, 14 nt, Artificial Sequence
  source: /note="Description of Artificial Sequence: Synthetic oligonucleotide"
  source: /note="RNA"
  source: /note="5' tri-ethylene glycol (TEG)"
  modified_base (1)..(1): bicyclic nucleic acid (BNA)
  modified_base (10)..(10): 5-methyl modified nucleotide
ggaagauggcauuu

SEQ ID NO: 13321 - RNA, 13 nt, Artificial Sequence
  source: /note="Description of Artificial Sequence: Synthetic oligonucleotide"
  source: /note="RNA"
  source: /note="5' tri-ethylene glycol (TEG)"
  modified_base (1)..(1): bicyclic nucleic acid (BNA)
  modified_base (10)..(10): 5-methyl modified nucleotide
ggaagauggcauu

SEQ ID NO: 13322 - RNA, 12 nt, Artificial Sequence
  source: /note="Description of Artificial Sequence: Synthetic oligonucleotide"
  source: /note="RNA"
  source: /note="5' tri-ethylene glycol (TEG)"
  modified_base (1)..(1): bicyclic nucleic acid (BNA)
  modified_base (10)..(10): 5-methyl modified nucleotide
ggaagauggcau

SEQ ID NO: 13323 - RNA, 11 nt, Artificial Sequence
  source: /note="Description of Artificial Sequence: Synthetic oligonucleotide"
  source: /note="RNA"
  source: /note="5' tri-ethylene glycol (TEG)"
  modified_base (1)..(1): bicyclic nucleic acid (BNA)
  modified_base (10)..(10): 5-methyl modified nucleotide
ggaagauggca

SEQ ID NO: 13324 - RNA, 10 nt, Artificial Sequence
  source: /note="Description of Artificial Sequence: Synthetic oligonucleotide"
  source: /note="RNA"
  source: /note="5' tri-ethylene glycol (TEG)"
  modified_base (1)..(1): bicyclic nucleic acid (BNA)
  modified_base (10)..(10): 5-methyl modified nucleotide
ggaagauggc

SEQ ID NO: 13325 - RNA, 8 nt, Artificial Sequence
  source: /note="Description of Artificial Sequence: Synthetic oligonucleotide"
  source: /note="RNA"
  source: /note="5' tri-ethylene glycol (TEG)"
  modified_base (1)..(1): bicyclic nucleic acid (BNA)
ggaagaug

SEQ ID NO: 13326 - RNA, 17 nt, Artificial Sequence
  source: /note="Description of Artificial Sequence: Synthetic oligonucleotide"
  source: /note="RNA"
  source: /note="5' tri-ethylene glycol (TEG)"
  modified_base (1)..(1): bicyclic nucleic acid (BNA)
  modified_base (9)..(9): 5-methyl modified nucleotide
  modified_base (14)..(14): 5-methyl modified nucleotide
gaagauggcauuucuag

SEQ ID NO: 13327 - RNA, 16 nt, Artificial Sequence
  source: /note="Description of Artificial Sequence: Synthetic oligonucleotide"
  source: /note="RNA"
  source: /note="5' tri-ethylene glycol (TEG)"
  modified_base (1)..(1): bicyclic nucleic acid (BNA)
  modified_base (9)..(9): 5-methyl modified nucleotide
  modified_base (14)..(14): 5-methyl modified nucleotide
gaagauggcauuucua

SEQ ID NO: 13328 - RNA, 14 nt, Artificial Sequence
  source: /note="Description of Artificial Sequence: Synthetic oligonucleotide"
  source: /note="RNA"
  source: /note="5' tri-ethylene glycol (TEG)"
  modified_base (1)..(1): bicyclic nucleic acid (BNA)
  modified_base (9)..(9): 5-methyl modified nucleotide
  modified_base (14)..(14): 5-methyl modified nucleotide
gaagauggcauuuc

SEQ ID NO: 13329 - RNA, 13 nt, Artificial Sequence
  source: /note="Description of Artificial Sequence: Synthetic oligonucleotide"
  source: /note="RNA"
  source: /note="5' tri-ethylene glycol (TEG)"
  modified_base (1)..(1): bicyclic nucleic acid (BNA)
  modified_base (9)..(9): 5-methyl modified nucleotide
gaagauggcauuu

SEQ ID NO: 13330 - RNA, 12 nt, Artificial Sequence
  source: /note="Description of Artificial Sequence: Synthetic oligonucleotide"
  source: /note="RNA"
  source: /note="5' tri-ethylene glycol (TEG)"
  modified_base (1)..(1): bicyclic nucleic acid (BNA)
  modified_base (9)..(9): 5-methyl modified nucleotide
gaagauggcauu

SEQ ID NO: 13331 - RNA, 11 nt, Artificial Sequence
  source: /note="Description of Artificial Sequence: Synthetic oligonucleotide"
  source: /note="RNA"
  source: /note="5' tri-ethylene glycol (TEG)"
  modified_base (1)..(1): bicyclic nucleic acid (BNA)
  modified_base (9)..(9): 5-methyl modified nucleotide
gaagauggcau

SEQ ID NO: 13332 - RNA, 10 nt, Artificial Sequence
  source: /note="Description of Artificial Sequence: Synthetic oligonucleotide"
  source: /note="RNA"
  source: /note="5' tri-ethylene glycol (TEG)"
  modified_base (1)..(1): bicyclic nucleic acid (BNA)
  modified_base (9)..(9): 5-methyl modified nucleotide
gaagauggca

SEQ ID NO: 13333 - RNA, 9 nt, Artificial Sequence
  source: /note="Description of Artificial Sequence: Synthetic oligonucleotide"
  source: /note="RNA"
  source: /note="5' tri-ethylene glycol (TEG)"
  modified_base (1)..(1): bicyclic nucleic acid (BNA)
  modified_base (9)..(9): 5-methyl modified nucleotide
gaagauggc

SEQ ID NO: 13334 - RNA, 8 nt, Artificial Sequence
  source: /note="Description of Artificial Sequence: Synthetic oligonucleotide"
  source: /note="RNA"
  source: /note="5' tri-ethylene glycol (TEG)"
  modified_base (1)..(1): bicyclic nucleic acid (BNA)
gaagaugg

SEQ ID NO: 13335 - RNA, 16 nt, Artificial Sequence
  source: /note="Description of Artificial Sequence: Synthetic oligonucleotide"
  source: /note="RNA"
  source: /note="5' tri-ethylene glycol (TEG)"
  modified_base (1)..(1): bicyclic nucleic acid (BNA)
  modified_base (8)..(8): 5-methyl modified nucleotide
  modified_base (13)..(13): 5-methyl modified nucleotide
aagauggcauuucuag

SEQ ID NO: 13336 - RNA, 15 nt, Artificial Sequence
  source: /note="Description of Artificial Sequence: Synthetic oligonucleotide"
  source: /note="RNA"
  source: /note="5' tri-ethylene glycol (TEG)"
  modified_base (1)..(1): bicyclic nucleic acid (BNA)
  modified_base (8)..(8): 5-methyl modified nucleotide
  modified_base (13)..(13): 5-methyl modified nucleotide
aagauggcauuucua

SEQ ID NO: 13337 - RNA, 14 nt, Artificial Sequence
  source: /note="Description of Artificial Sequence: Synthetic oligonucleotide"
  source: /note="RNA"
  source: /note="5' tri-ethylene glycol (TEG)"
  modified_base (1)..(1): bicyclic nucleic acid (BNA)
  modified_base (8)..(8): 5-methyl modified nucleotide
  modified_base (13)..(13): 5-methyl modified nucleotide
aagauggcauuucu

SEQ ID NO: 13338 - RNA, 13 nt, Artificial Sequence
  source: /note="Description of Artificial Sequence: Synthetic oligonucleotide"
  source: /note="RNA"
  source: /note="5' tri-ethylene glycol (TEG)"
  modified_base (1)..(1): bicyclic nucleic acid (BNA)
  modified_base (8)..(8): 5-methyl modified nucleotide
  modified_base (13)..(13): 5-methyl modified nucleotide
aagauggcauuuc

SEQ ID NO: 13339 - RNA, 12 nt, Artificial Sequence
  source: /note="Description of Artificial Sequence: Synthetic oligonucleotide"
  source: /note="RNA"
  source: /note="5' tri-ethylene glycol (TEG)"
  modified_base (1)..(1): bicyclic nucleic acid (BNA)
  modified_base (8)..(8): 5-methyl modified nucleotide
aagauggcauuu

SEQ ID NO: 13340 - RNA, 11 nt, Artificial Sequence
  source: /note="Description of Artificial Sequence: Synthetic oligonucleotide"
  source: /note="RNA"
  source: /note="5' tri-ethylene glycol (TEG)"
  modified_base (1)..(1): bicyclic nucleic acid (BNA)
  modified_base (8)..(8): 5-methyl modified nucleotide
aagauggcauu

SEQ ID NO: 13341 - RNA, 10 nt, Artificial Sequence
  source: /note="Description of Artificial Sequence: Synthetic oligonucleotide"
  source: /note="RNA"
  source: /note="5' tri-ethylene glycol (TEG)"
  modified_base (1)..(1): bicyclic nucleic acid (BNA)
  modified_base (8)..(8): 5-methyl modified nucleotide
aagauggcau

SEQ ID NO: 13342 - RNA, 9 nt, Artificial Sequence
  source: /note="Description of Artificial Sequence: Synthetic oligonucleotide"
  source: /note="RNA"
  source: /note="5' tri-ethylene glycol (TEG)"
  modified_base (1)..(1): bicyclic nucleic acid (BNA)
  modified_base (8)..(8): 5-methyl modified nucleotide
aagauggca

SEQ ID NO: 13343 - RNA, 8 nt, Artificial Sequence
  source: /note="Description of Artificial Sequence: Synthetic oligonucleotide"
  source: /note="RNA"
  source: /note="5' tri-ethylene glycol (TEG)"
  modified_base (1)..(1): bicyclic nucleic acid (BNA)
  modified_base (8)..(8): 5-methyl modified nucleotide
aagauggc

SEQ ID NO: 13344 - RNA, 15 nt, Artificial Sequence
  source: /note="Description of Artificial Sequence: Synthetic oligonucleotide"
  source: /note="RNA"
  source: /note="5' tri-ethylene glycol (TEG)"
  modified_base (1)..(1): bicyclic nucleic acid (BNA)
  modified_base (7)..(7): 5-methyl modified nucleotide
  modified_base (12)..(12): 5-methyl modified nucleotide
agauggcauuucuag

SEQ ID NO: 13345 - RNA, 14 nt, Artificial Sequence
  source: /note="Description of Artificial Sequence: Synthetic oligonucleotide"
  source: /note="RNA"
  source: /note="5' tri-ethylene glycol (TEG)"
  modified_base (1)..(1): bicyclic nucleic acid (BNA)
  modified_base (7)..(7): 5-methyl modified nucleotide
  modified_base (12)..(12): 5-methyl modified nucleotide
agauggcauuucua

SEQ ID NO: 13346 - RNA, 13 nt, Artificial Sequence
  source: /note="Description of Artificial Sequence: Synthetic oligonucleotide"
  source: /note="RNA"
  source: /note="5' tri-ethylene glycol (TEG)"
  modified_base (1)..(1): bicyclic nucleic acid (BNA)
  modified_base (7)..(7): 5-methyl modified nucleotide
  modified_base (12)..(12): 5-methyl modified nucleotide
agauggcauuucu

SEQ ID NO: 13347 - RNA, 12 nt, Artificial Sequence
  source: /note="Description of Artificial Sequence: Synthetic oligonucleotide"
  source: /note="RNA"
  source: /note="5' tri-ethylene glycol (TEG)"
  modified_base (1)..(1): bicyclic nucleic acid (BNA)
  modified_base (7)..(7): 5-methyl modified nucleotide
  modified_base (12)..(12): 5-methyl modified nucleotide
agauggcauuuc

SEQ ID NO: 13348 - RNA, 11 nt, Artificial Sequence
  source: /note="Description of Artificial Sequence: Synthetic oligonucleotide"
  source: /note="RNA"
  source: /note="5' tri-ethylene glycol (TEG)"
  modified_base (1)..(1): bicyclic nucleic acid (BNA)
  modified_base (7)..(7): 5-methyl modified nucleotide
agauggcauuu

SEQ ID NO: 13349 - RNA, 10 nt, Artificial Sequence
  source: /note="Description of Artificial Sequence: Synthetic oligonucleotide"
  source: /note="RNA"
  source: /note="5' tri-ethylene glycol (TEG)"
  modified_base (1)..(1): bicyclic nucleic acid (BNA)
  modified_base (7)..(7): 5-methyl modified nucleotide
agauggcauu

SEQ ID NO: 13350 - RNA, 9 nt, Artificial Sequence
  source: /note="Description of Artificial Sequence: Synthetic oligonucleotide"
  source: /note="RNA"
  source: /note="5' tri-ethylene glycol (TEG)"
  modified_base (1)..(1): bicyclic nucleic acid (BNA)
  modified_base (7)..(7): 5-methyl modified nucleotide
agauggcau

SEQ ID NO: 13351 - RNA, 8 nt, Artificial Sequence
  source: /note="Description of Artificial Sequence: Synthetic oligonucleotide"
  source: /note="RNA"
  source: /note="5' tri-ethylene glycol (TEG)"
  modified_base (1)..(1): bicyclic nucleic acid (BNA)
  modified_base (7)..(7): 5-methyl modified nucleotide
agauggca

SEQ ID NO: 13352 - RNA, 30 nt, Artificial Sequence; identical to SEQ ID NO: 284
  source: /note="Description of Artificial Sequence: Synthetic oligonucleotide"
  source: /note="RNA"
  source: /note="5' tri-ethylene glycol (TEG)"
  modified_base (1)..(1): 5-methyl bicyclic nucleic acid
  modified_base (3)..(3): 5-methyl modified nucleotide
  modified_base (4)..(4): 5-methyl modified nucleotide
  modified_base (7)..(7): 5-methyl modified nucleotide
  modified_base (10)..(10): 5-methyl modified nucleotide
  modified_base (22)..(22): 5-methyl modified nucleotide
  modified_base (27)..(27): 5-methyl modified nucleotide

SEQ ID NO: 13353 - RNA, 29 nt, Artificial Sequence
  source: /note="Description of Artificial Sequence: Synthetic oligonucleotide"
  source: /note="RNA"
  source: /note="5' tri-ethylene glycol (TEG)"
  modified_base (1)..(1): 5-methyl bicyclic nucleic acid
  modified_base (3)..(3): 5-methyl modified nucleotide
  modified_base (4)..(4): 5-methyl modified nucleotide
  modified_base (7)..(7): 5-methyl modified nucleotide
  modified_base (10)..(10): 5-methyl modified nucleotide
  modified_base (22)..(22): 5-methyl modified nucleotide
  modified_base (27)..(27): 5-methyl modified nucleotide
cuccaacaucaaggaagauggcauuucua

SEQ ID NO: 13354 - RNA, 28 nt, Artificial Sequence
  source: /note="Description of Artificial Sequence: Synthetic oligonucleotide"
  source: /note="RNA"
  source: /note="5' tri-ethylene glycol (TEG)"
  modified_base (1)..(1): 5-methyl bicyclic nucleic acid
  modified_base (3)..(3): 5-methyl modified nucleotide
  modified_base (4)..(4): 5-methyl modified nucleotide
  modified_base (7)..(7): 5-methyl modified nucleotide
  modified_base (10)..(10): 5-methyl modified nucleotide
  modified_base (22)..(22): 5-methyl modified nucleotide
  modified_base (27)..(27): 5-methyl modified nucleotide
cuccaacaucaaggaagauggcauuucu

SEQ ID NO: 13355 - RNA, 27 nt, Artificial Sequence
  source: /note="Description of Artificial Sequence: Synthetic oligonucleotide"
  source: /note="RNA"
  source: /note="5' tri-ethylene glycol (TEG)"
  modified_base (1)..(1): 5-methyl bicyclic nucleic acid
  modified_base (3)..(3): 5-methyl modified nucleotide
  modified_base (4)..(4): 5-methyl modified nucleotide
  modified_base (7)..(7): 5-methyl modified nucleotide
  modified_base (10)..(10): 5-methyl modified nucleotide
  modified_base (22)..(22): 5-methyl modified nucleotide
  modified_base (27)..(27): 5-methyl modified nucleotide
cuccaacaucaaggaagauggcauuuc

SEQ ID NO: 13356 - RNA, 26 nt, Artificial Sequence
  source: /note="Description of Artificial Sequence: Synthetic oligonucleotide"
  source: /note="RNA"
  source: /note="5' tri-ethylene glycol (TEG)"
  modified_base (1)..(1): 5-methyl bicyclic nucleic acid
  modified_base (3)..(3): 5-methyl modified nucleotide
  modified_base (4)..(4): 5-methyl modified nucleotide
  modified_base (7)..(7): 5-methyl modified nucleotide
  modified_base (10)..(10): 5-methyl modified nucleotide
  modified_base (22)..(22): 5-methyl modified nucleotide
cuccaacaucaaggaagauggcauuu

SEQ ID NO: 13357 - RNA, 25 nt, Artificial Sequence
  source: /note="Description of Artificial Sequence: Synthetic oligonucleotide"
  source: /note="RNA"
  source: /note="5' tri-ethylene glycol (TEG)"
  modified_base (1)..(1): 5-methyl bicyclic nucleic acid
  modified_base (3)..(3): 5-methyl modified nucleotide
  modified_base (4)..(4): 5-methyl modified nucleotide
  modified_base (7)..(7): 5-methyl modified nucleotide
  modified_base (10)..(10): 5-methyl modified nucleotide
  modified_base (22)..(22): 5-methyl modified nucleotide
cuccaacaucaaggaagauggcauu

SEQ ID NO: 13358 - RNA, 24 nt, Artificial Sequence
  source: /note="Description of Artificial Sequence: Synthetic oligonucleotide"
  source: /note="RNA"
  source: /note="5' tri-ethylene glycol (TEG)"
  modified_base (1)..(1): 5-methyl bicyclic nucleic acid
  modified_base (3)..(3): 5-methyl modified nucleotide
  modified_base (4)..(4): 5-methyl modified nucleotide
  modified_base (7)..(7): 5-methyl modified nucleotide
  modified_base (10)..(10): 5-methyl modified nucleotide
  modified_base (22)..(22): 5-methyl modified nucleotide
cuccaacaucaaggaagauggcau

SEQ ID NO: 13359 - RNA, 23 nt, Artificial Sequence
  source: /note="Description of Artificial Sequence: Synthetic oligonucleotide"
  source: /note="RNA"
  source: /note="5' tri-ethylene glycol (TEG)"
  modified_base (1)..(1): 5-methyl bicyclic nucleic acid
  modified_base (3)..(3): 5-methyl modified nucleotide
  modified_base (4)..(4): 5-methyl modified nucleotide
  modified_base (7)..(7): 5-methyl modified nucleotide
  modified_base (10)..(10): 5-methyl modified nucleotide
  modified_base (22)..(22): 5-methyl modified nucleotide
cuccaacaucaaggaagauggca

SEQ ID NO: 13360 - RNA, 22 nt, Artificial Sequence
  source: /note="Description of Artificial Sequence: Synthetic oligonucleotide"
  source: /note="RNA"
  source: /note="5' tri-ethylene glycol (TEG)"
  modified_base (1)..(1): 5-methyl bicyclic nucleic acid
  modified_base (3)..(3): 5-methyl modified nucleotide
  modified_base (4)..(4): 5-methyl modified nucleotide
  modified_base (7)..(7): 5-methyl modified nucleotide
  modified_base (10)..(10): 5-methyl modified nucleotide
  modified_base (22)..(22): 5-methyl modified nucleotide
cuccaacaucaaggaagauggc

SEQ ID NO: 13361 - RNA, 21 nt, Artificial Sequence
  source: /note="Description of Artificial Sequence: Synthetic oligonucleotide"
  source: /note="RNA"
  source: /note="5' tri-ethylene glycol (TEG)"
  modified_base (1)..(1): 5-methyl bicyclic nucleic acid
  modified_base (3)..(3): 5-methyl modified nucleotide
  modified_base (4)..(4): 5-methyl modified nucleotide
  modified_base (7)..(7): 5-methyl modified nucleotide
  modified_base (10)..(10): 5-methyl modified nucleotide
cuccaacaucaaggaagaugg

SEQ ID NO: 13362 - RNA, 20 nt, Artificial Sequence
  source: /note="Description of Artificial Sequence: Synthetic oligonucleotide"
  source: /note="RNA"
  source: /note="5' tri-ethylene glycol (TEG)"
  modified_base (1)..(1): 5-methyl bicyclic nucleic acid
  modified_base (3)..(3): 5-methyl modified nucleotide
  modified_base (4)..(4): 5-methyl modified nucleotide
  modified_base (7)..(7): 5-methyl modified nucleotide
  modified_base (10)..(10): 5-methyl modified nucleotide
cuccaacaucaaggaagaug

SEQ ID NO: 13363 - RNA, 19 nt, Artificial Sequence
  source: /note="Description of Artificial Sequence: Synthetic oligonucleotide"
  source: /note="RNA"
  source: /note="5' tri-ethylene glycol (TEG)"
  modified_base (1)..(1): 5-methyl bicyclic nucleic acid
  modified_base (3)..(3): 5-methyl modified nucleotide
  modified_base (4)..(4): 5-methyl modified nucleotide
  modified_base (7)..(7): 5-methyl modified nucleotide
  modified_base (10)..(10): 5-methyl modified nucleotide
cuccaacaucaaggaagau

SEQ ID NO: 13364 - RNA, 18 nt, Artificial Sequence
  source: /note="Description of Artificial Sequence: Synthetic oligonucleotide"
  source: /note="RNA"
  source: /note="5' tri-ethylene glycol (TEG)"
  modified_base (1)..(1): 5-methyl bicyclic nucleic acid
  modified_base (3)..(3): 5-methyl modified nucleotide
  modified_base (4)..(4): 5-methyl modified nucleotide
  modified_base (7)..(7): 5-methyl modified nucleotide
  modified_base (10)..(10): 5-methyl modified nucleotide
cuccaacaucaaggaaga

SEQ ID NO: 13365 - RNA, 17 nt, Artificial Sequence
  source: /note="Description of Artificial Sequence: Synthetic oligonucleotide"
  source: /note="RNA"
  source: /note="5' tri-ethylene glycol (TEG)"
  modified_base (1)..(1): 5-methyl bicyclic nucleic acid
  modified_base (3)..(3): 5-methyl modified nucleotide
  modified_base (4)..(4): 5-methyl modified nucleotide
  modified_base (7)..(7): 5-methyl modified nucleotide
  modified_base (10)..(10): 5-methyl modified nucleotide
cuccaacaucaaggaag

SEQ ID NO: 13366 - DNA, 29 bp, Artificial Sequence
  source: /note="Description of Artificial Sequence: Synthetic oligonucleotide"
  source: /note="Description of Combined DNA/RNA Molecule: Synthetic oligonucleotide"
  source: /note="DNA/RNA"
  source: /note="5' tri-ethylene glycol (TEG)"
  modified_base (1)..(1): bicyclic nucleic acid (BNA)
  modified_base (2)..(2): 5-methyl modified nucleotide
  modified_base (3)..(3): 5-methyl modified nucleotide
  modified_base (6)..(6): 5-methyl modified nucleotide
  modified_base (9)..(9): 5-methyl modified nucleotide
  modified_base (21)..(21): 5-methyl modified nucleotide
  modified_base (26)..(26): 5-methyl modified nucleotide
tccaacaucaaggaagauggcauuucuag

SEQ ID NO: 13367 - DNA, 28 bp, Artificial Sequence
  source: /note="Description of Artificial Sequence: Synthetic oligonucleotide"
  source: /note="Description of Combined DNA/RNA Molecule: Synthetic oligonucleotide"
  source: /note="DNA/RNA"
  source: /note="5' tri-ethylene glycol (TEG)"
  modified_base (1)..(1): bicyclic nucleic acid (BNA)
  modified_base (2)..(2): 5-methyl modified nucleotide
  modified_base (3)..(3): 5-methyl modified nucleotide
  modified_base (6)..(6): 5-methyl modified nucleotide
  modified_base (9)..(9): 5-methyl modified nucleotide
  modified_base (21)..(21): 5-methyl modified nucleotide
  modified_base (26)..(26): 5-methyl modified nucleotide
tccaacaucaaggaagauggcauuucua

SEQ ID NO: 13368 - DNA, 27 bp, Artificial Sequence
  source: /note="Description of Artificial Sequence: Synthetic oligonucleotide"
  source: /note="Description of Combined DNA/RNA Molecule: Synthetic oligonucleotide"
  source: /note="DNA/RNA"
  source: /note="5' tri-ethylene glycol (TEG)"
  modified_base (1)..(1): bicyclic nucleic acid (BNA)
  modified_base (2)..(2): 5-methyl modified nucleotide
  modified_base (3)..(3): 5-methyl modified nucleotide
  modified_base (6)..(6): 5-methyl modified nucleotide
  modified_base (9)..(9): 5-methyl modified nucleotide
  modified_base (21)..(21): 5-methyl modified nucleotide
  modified_base (26)..(26): 5-methyl modified nucleotide
tccaacaucaaggaagauggcauuucu

SEQ ID NO: 13369 - DNA, 26 bp, Artificial Sequence
  source: /note="Description of Artificial Sequence: Synthetic oligonucleotide"
  source: /note="Description of Combined DNA/RNA Molecule: Synthetic oligonucleotide"
  source: /note="DNA/RNA"
  source: /note="5' tri-ethylene glycol (TEG)"
  modified_base (1)..(1): bicyclic nucleic acid (BNA)
  modified_base (2)..(2): 5-methyl modified nucleotide
  modified_base (3)..(3): 5-methyl modified nucleotide
  modified_base (6)..(6): 5-methyl modified nucleotide
  modified_base (9)..(9): 5-methyl modified nucleotide
  modified_base (21)..(21): 5-methyl modified nucleotide
  modified_base (26)..(26): 5-methyl modified nucleotide
tccaacaucaaggaagauggcauuuc

SEQ ID NO: 13370 - DNA, 25 bp, Artificial Sequence
  source: /note="Description of Artificial Sequence: Synthetic oligonucleotide"
  source: /note="Description of Combined DNA/RNA Molecule: Synthetic oligonucleotide"
  source: /note="DNA/RNA"
  source: /note="5' tri-ethylene glycol (TEG)"
  modified_base (1)..(1): bicyclic nucleic acid (BNA)
  modified_base (2)..(2): 5-methyl modified nucleotide
  modified_base (3)..(3): 5-methyl modified nucleotide
  modified_base (6)..(6): 5-methyl modified nucleotide
  modified_base (9)..(9): 5-methyl modified nucleotide
  modified_base (21)..(21): 5-methyl modified nucleotide
tccaacaucaaggaagauggcauuu

SEQ ID NO: 13371 - DNA, 24 bp, Artificial Sequence
  source: /note="Description of Artificial Sequence: Synthetic oligonucleotide"
  source: /note="Description of Combined DNA/RNA Molecule: Synthetic oligonucleotide"
  source: /note="DNA/RNA"
  source: /note="5' tri-ethylene glycol (TEG)"
  modified_base (1)..(1): bicyclic nucleic acid (BNA)
  modified_base (2)..(2): 5-methyl modified nucleotide
  modified_base (3)..(3): 5-methyl modified nucleotide
  modified_base (6)..(6): 5-methyl modified nucleotide
  modified_base (9)..(9): 5-methyl modified nucleotide
  modified_base (21)..(21): 5-methyl modified nucleotide
tccaacaucaaggaagauggcauu

SEQ ID NO: 13372 - DNA, 23 bp, Artificial Sequence
  source: /note="Description of Artificial Sequence: Synthetic oligonucleotide"
  source: /note="Description of Combined DNA/RNA Molecule: Synthetic oligonucleotide"
  source: /note="DNA/RNA"
  source: /note="5' tri-ethylene glycol (TEG)"
  modified_base (1)..(1): bicyclic nucleic acid (BNA)
  modified_base (2)..(2): 5-methyl modified nucleotide
  modified_base (3)..(3): 5-methyl modified nucleotide
  modified_base (6)..(6): 5-methyl modified nucleotide
  modified_base (9)..(9): 5-methyl modified nucleotide
  modified_base (21)..(21): 5-methyl modified nucleotide
tccaacaucaaggaagauggcau

SEQ ID NO: 13373 - DNA, 22 bp, Artificial Sequence
  source: /note="Description of Artificial Sequence: Synthetic oligonucleotide"
  source: /note="Description of Combined DNA/RNA Molecule: Synthetic oligonucleotide"
  source: /note="DNA/RNA"
  source: /note="5' tri-ethylene glycol (TEG)"
  modified_base (1)..(1): bicyclic nucleic acid (BNA)
  modified_base (2)..(2): 5-methyl modified nucleotide
  modified_base (3)..(3): 5-methyl modified nucleotide
  modified_base (6)..(6): 5-methyl modified nucleotide
  modified_base (9)..(9): 5-methyl modified nucleotide
  modified_base (21)..(21): 5-methyl modified nucleotide
tccaacaucaaggaagauggca

SEQ ID NO: 13374 - DNA, 21 bp, Artificial Sequence
  source: /note="Description of Artificial Sequence: Synthetic oligonucleotide"
  source: /note="Description of Combined DNA/RNA Molecule: Synthetic oligonucleotide"
  source: /note="DNA/RNA"
  source: /note="5' tri-ethylene glycol (TEG)"
  modified_base (1)..(1): bicyclic nucleic acid (BNA)
  modified_base (2)..(2): 5-methyl modified nucleotide
  modified_base (3)..(3): 5-methyl modified nucleotide
  modified_base (6)..(6): 5-methyl modified nucleotide
  modified_base (9)..(9): 5-methyl modified nucleotide
  modified_base (21)..(21): 5-methyl modified nucleotide
tccaacaucaaggaagauggc

SEQ ID NO: 13375 - DNA, 20 bp, Artificial Sequence
  source: /note="Description of Artificial Sequence: Synthetic oligonucleotide"
  source: /note="Description of Combined DNA/RNA Molecule: Synthetic oligonucleotide"
  source: /note="DNA/RNA"
  source: /note="5' tri-ethylene glycol (TEG)"
  modified_base (1)..(1): bicyclic nucleic acid (BNA)
  modified_base (2)..(2): 5-methyl modified nucleotide
  modified_base (3)..(3): 5-methyl modified nucleotide
  modified_base (6)..(6): 5-methyl modified nucleotide
  modified_base (9)..(9): 5-methyl modified nucleotide
tccaacaucaaggaagaugg

SEQ ID NO: 13376 - DNA, 19 bp, Artificial Sequence
  source: /note="Description of Artificial Sequence: Synthetic oligonucleotide"
  source: /note="Description of Combined DNA/RNA Molecule: Synthetic oligonucleotide"
  source: /note="DNA/RNA"
  source: /note="5' tri-ethylene glycol (TEG)"
  modified_base (1)..(1): bicyclic nucleic acid (BNA)
  modified_base (2)..(2): 5-methyl modified nucleotide
  modified_base (3)..(3): 5-methyl modified nucleotide
  modified_base (6)..(6): 5-methyl modified nucleotide
  modified_base (9)..(9): 5-methyl modified nucleotide
tccaacaucaaggaagaug

SEQ ID NO: 13377 - DNA, 18 bp, Artificial Sequence
  source: /note="Description of Artificial Sequence: Synthetic oligonucleotide"
  source: /note="Description of Combined DNA/RNA Molecule: Synthetic oligonucleotide"
  source: /note="DNA/RNA"
  source: /note="5' tri-ethylene glycol (TEG)"
  modified_base (1)..(1): bicyclic nucleic acid (BNA)
  modified_base (2)..(2): 5-methyl modified nucleotide
  modified_base (3)..(3): 5-methyl modified nucleotide
  modified_base (6)..(6): 5-methyl modified nucleotide
  modified_base (9)..(9): 5-methyl modified nucleotide
tccaacaucaaggaagau

SEQ ID NO: 13378 - DNA, 17 bp, Artificial Sequence
  source: /note="Description of Artificial Sequence: Synthetic oligonucleotide"
  source: /note="Description of Combined DNA/RNA Molecule: Synthetic oligonucleotide"
  source: /note="DNA/RNA"
  source: /note="5' tri-ethylene glycol (TEG)"
  modified_base (1)..(1): bicyclic nucleic acid (BNA)
  modified_base (2)..(2): 5-methyl modified nucleotide
  modified_base (3)..(3): 5-methyl modified nucleotide
  modified_base (6)..(6): 5-methyl modified nucleotide
  modified_base (9)..(9): 5-methyl modified nucleotide
tccaacaucaaggaaga

SEQ ID NO: 13379 - DNA, 16 bp, Artificial Sequence
  source: /note="Description of Artificial Sequence: Synthetic oligonucleotide"
  source: /note="Description of Combined DNA/RNA Molecule: Synthetic oligonucleotide"
  source: /note="DNA/RNA"
  source: /note="5' tri-ethylene glycol (TEG)"
  modified_base (1)..(1): bicyclic nucleic acid (BNA)
  modified_base (2)..(2): 5-methyl modified nucleotide
  modified_base (3)..(3): 5-methyl modified nucleotide
  modified_base (6)..(6): 5-methyl modified nucleotide
  modified_base (9)..(9): 5-methyl modified nucleotide
tccaacaucaaggaag

SEQ ID NO: 13380 - RNA, 28 nt, Artificial Sequence
  source: /note="Description of Artificial Sequence: Synthetic oligonucleotide"
  source: /note="RNA"
  source: /note="5' tri-ethylene glycol (TEG)"
  modified_base (1)..(1): 5-methyl bicyclic nucleic acid
  modified_base (2)..(2): 5-methyl modified nucleotide
  modified_base (5)..(5): 5-methyl modified nucleotide
  modified_base (8)..(8): 5-methyl modified nucleotide
  modified_base (20)..(20): 5-methyl modified nucleotide
  modified_base (25)..(25): 5-methyl modified nucleotide
ccaacaucaaggaagauggcauuucuag

SEQ ID NO: 13381 - RNA, 27 nt, Artificial Sequence
  source: /note="Description of Artificial Sequence: Synthetic oligonucleotide"
  source: /note="RNA"
  source: /note="5' tri-ethylene glycol (TEG)"
  modified_base (1)..(1): 5-methyl bicyclic nucleic acid
  modified_base (2)..(2): 5-methyl modified nucleotide
  modified_base (5)..(5): 5-methyl modified nucleotide
  modified_base (8)..(8): 5-methyl modified nucleotide
  modified_base (20)..(20): 5-methyl modified nucleotide
  modified_base (25)..(25): 5-methyl modified nucleotide
ccaacaucaaggaagauggcauuucua

SEQ ID NO: 13382 - RNA, 26 nt, Artificial Sequence
  source: /note="Description of Artificial Sequence: Synthetic oligonucleotide"
  source: /note="RNA"
  source: /note="5' tri-ethylene glycol (TEG)"
  modified_base (1)..(1): 5-methyl bicyclic nucleic acid
  modified_base (2)..(2): 5-methyl modified nucleotide
  modified_base (5)..(5): 5-methyl modified nucleotide
  modified_base (8)..(8): 5-methyl modified nucleotide
  modified_base (20)..(20): 5-methyl modified nucleotide
  modified_base (25)..(25): 5-methyl modified nucleotide
ccaacaucaaggaagauggcauuucu

SEQ ID NO: 13383 - RNA, 25 nt, Artificial Sequence
  source: /note="Description of Artificial Sequence: Synthetic oligonucleotide"
  source: /note="RNA"
  source: /note="5' tri-ethylene glycol (TEG)"
  modified_base (1)..(1): 5-methyl bicyclic nucleic acid
  modified_base (2)..(2): 5-methyl modified nucleotide
  modified_base (5)..(5): 5-methyl modified nucleotide
  modified_base (8)..(8): 5-methyl modified nucleotide
  modified_base (20)..(20): 5-methyl modified nucleotide
  modified_base (25)..(25): 5-methyl modified nucleotide
ccaacaucaaggaagauggcauuuc

SEQ ID NO: 13384 - RNA, 24 nt, Artificial Sequence
  source: /note="Description of Artificial Sequence: Synthetic oligonucleotide"
  source: /note="RNA"
  source: /note="5' tri-ethylene glycol (TEG)"
  modified_base (1)..(1): 5-methyl bicyclic nucleic acid
  modified_base (2)..(2): 5-methyl modified nucleotide
  modified_base (5)..(5): 5-methyl modified nucleotide
  modified_base (8)..(8): 5-methyl modified nucleotide
  modified_base (20)..(20): 5-methyl modified nucleotide
ccaacaucaaggaagauggcauuu

SEQ ID NO: 13385 - RNA, 23 nt, Artificial Sequence
  source: /note="Description of Artificial Sequence: Synthetic oligonucleotide"
  source: /note="RNA"
  source: /note="5' tri-ethylene glycol (TEG)"
  modified_base (1)..(1): 5-methyl bicyclic nucleic acid
  modified_base (2)..(2): 5-methyl modified nucleotide
  modified_base (5)..(5): 5-methyl modified nucleotide
  modified_base (8)..(8): 5-methyl modified nucleotide
  modified_base (20)..(20): 5-methyl modified nucleotide
ccaacaucaaggaagauggcauu

SEQ ID NO: 13386 - RNA, 22 nt, Artificial Sequence
  source: /note="Description of Artificial Sequence: Synthetic oligonucleotide"
  source: /note="RNA"
  source: /note="5' tri-ethylene glycol (TEG)"
  modified_base (1)..(1): 5-methyl bicyclic nucleic acid
  modified_base (2)..(2): 5-methyl modified nucleotide
  modified_base (5)..(5): 5-methyl modified nucleotide
  modified_base (8)..(8): 5-methyl modified nucleotide
  modified_base (20)..(20): 5-methyl modified nucleotide
ccaacaucaaggaagauggcau

SEQ ID NO: 13387 - RNA, 21 nt, Artificial Sequence
  source: /note="Description of Artificial Sequence: Synthetic oligonucleotide"
  source: /note="RNA"
  source: /note="5' tri-ethylene glycol (TEG)"
  modified_base (1)..(1): 5-methyl bicyclic nucleic acid
  modified_base (2)..(2): 5-methyl modified nucleotide
  modified_base (5)..(5): 5-methyl modified nucleotide
  modified_base (8)..(8): 5-methyl modified nucleotide
  modified_base (20)..(20): 5-methyl modified nucleotide
ccaacaucaaggaagauggca

SEQ ID NO: 13388 - RNA, 20 nt, Artificial Sequence
  source: /note="Description of Artificial Sequence: Synthetic oligonucleotide"
  source: /note="RNA"
  source: /note="5' tri-ethylene glycol (TEG)"
  modified_base (1)..(1): 5-methyl bicyclic nucleic acid
  modified_base (2)..(2): 5-methyl modified nucleotide
  modified_base (5)..(5): 5-methyl modified nucleotide
  modified_base (8)..(8): 5-methyl modified nucleotide
  modified_base (20)..(20): 5-methyl modified nucleotide
ccaacaucaaggaagauggc

SEQ ID NO: 13389 - RNA, 19 nt, Artificial Sequence
  source: /note="Description of Artificial Sequence: Synthetic oligonucleotide"
  source: /note="RNA"
  source: /note="5' tri-ethylene glycol (TEG)"
  modified_base (1)..(1): 5-methyl bicyclic nucleic acid
  modified_base (2)..(2): 5-methyl modified nucleotide
  modified_base (5)..(5): 5-methyl modified nucleotide
  modified_base (8)..(8): 5-methyl modified nucleotide
ccaacaucaaggaagaugg

SEQ ID NO: 13390 - RNA, 18 nt, Artificial Sequence
  source: /note="Description of Artificial Sequence: Synthetic oligonucleotide"
  source: /note="RNA"
  source: /note="5' tri-ethylene glycol (TEG)"
  modified_base (1)..(1): 5-methyl bicyclic nucleic acid
  modified_base (2)..(2): 5-methyl modified nucleotide
  modified_base (5)..(5): 5-methyl modified nucleotide
  modified_base (8)..(8): 5-methyl modified nucleotide
ccaacaucaaggaagaug

SEQ ID NO: 13391 - RNA, 17 nt, Artificial Sequence
  source: /note="Description of Artificial Sequence: Synthetic oligonucleotide"
  source: /note="RNA"
  source: /note="5' tri-ethylene glycol (TEG)"
  modified_base (1)..(1): 5-methyl bicyclic nucleic acid
  modified_base (2)..(2): 5-methyl modified nucleotide
  modified_base (5)..(5): 5-methyl modified nucleotide
  modified_base (8)..(8): 5-methyl modified nucleotide
ccaacaucaaggaagau

SEQ ID NO: 13392 - RNA, 16 nt, Artificial Sequence
  source: /note="Description of Artificial Sequence: Synthetic oligonucleotide"
  source: /note="RNA"
  source: /note="5' tri-ethylene glycol (TEG)"
  modified_base (1)..(1): 5-methyl bicyclic nucleic acid
  modified_base (2)..(2): 5-methyl modified nucleotide
  modified_base (5)..(5): 5-methyl modified nucleotide
  modified_base (8)..(8): 5-methyl modified nucleotide
ccaacaucaaggaaga

SEQ ID NO: 13393 - RNA, 15 nt, Artificial Sequence
  source: /note="Description of Artificial Sequence: Synthetic oligonucleotide"
  source: /note="RNA"
  source: /note="5' tri-ethylene glycol (TEG)"
  modified_base (1)..(1): 5-methyl bicyclic nucleic acid
  modified_base (2)..(2): 5-methyl modified nucleotide
  modified_base (5)..(5): 5-methyl modified nucleotide
  modified_base (8)..(8): 5-methyl modified nucleotide
ccaacaucaaggaag

SEQ ID NO: 13394 - RNA, 27 nt, Artificial Sequence
  source: /note="Description of Artificial Sequence: Synthetic oligonucleotide"
  source: /note="RNA"
  source: /note="5' tri-ethylene glycol (TEG)"
  modified_base (1)..(1): 5-methyl bicyclic nucleic acid
  modified_base (4)..(4): 5-methyl modified nucleotide
  modified_base (7)..(7): 5-methyl modified nucleotide
  modified_base (19)..(19): 5-methyl modified nucleotide
  modified_base (24)..(24): 5-methyl modified nucleotide
caacaucaaggaagauggcauuucuag

SEQ ID NO: 13395 - RNA, 26 nt, Artificial Sequence
  source: /note="Description of Artificial Sequence: Synthetic oligonucleotide"
  source: /note="RNA"
  source: /note="5' tri-ethylene glycol (TEG)"
  modified_base (1)..(1): 5-methyl bicyclic nucleic acid
  modified_base (4)..(4): 5-methyl modified nucleotide
  modified_base (7)..(7): 5-methyl modified nucleotide
  modified_base (19)..(19): 5-methyl modified nucleotide
  modified_base (24)..(24): 5-methyl modified nucleotide
caacaucaaggaagauggcauuucua

SEQ ID NO: 13396 - RNA, 25 nt, Artificial Sequence
  source: /note="Description of Artificial Sequence: Synthetic oligonucleotide"
  source: /note="RNA"
  source: /note="5' tri-ethylene glycol (TEG)"
  modified_base (1)..(1): 5-methyl bicyclic nucleic acid
  modified_base (4)..(4): 5-methyl modified nucleotide
  modified_base (7)..(7): 5-methyl modified nucleotide
  modified_base (19)..(19): 5-methyl modified nucleotide
  modified_base (24)..(24): 5-methyl modified nucleotide
caacaucaaggaagauggcauuucu

SEQ ID NO: 13397 - RNA, 24 nt, Artificial Sequence
  source: /note="Description of Artificial Sequence: Synthetic oligonucleotide"
  source: /note="RNA"
  source: /note="5' tri-ethylene glycol (TEG)"
  modified_base (1)..(1): 5-methyl bicyclic nucleic acid
  modified_base (4)..(4): 5-methyl modified nucleotide
  modified_base (7)..(7): 5-methyl modified nucleotide
  modified_base (19)..(19): 5-methyl modified nucleotide
  modified_base (24)..(24): 5-methyl modified nucleotide
caacaucaaggaagauggcauuuc

SEQ ID NO: 13398 - RNA, 23 nt, Artificial Sequence
  source: /note="Description of Artificial Sequence: Synthetic oligonucleotide"
  source: /note="RNA"
  source: /note="5' tri-ethylene glycol (TEG)"
  modified_base (1)..(1): 5-methyl bicyclic nucleic acid
  modified_base (4)..(4): 5-methyl modified nucleotide
  modified_base (7)..(7): 5-methyl modified nucleotide
  modified_base (19)..(19): 5-methyl modified nucleotide
caacaucaaggaagauggcauuu

SEQ ID NO: 13399 - RNA, 22 nt, Artificial Sequence
  source: /note="Description of Artificial Sequence: Synthetic oligonucleotide"
  source: /note="RNA"
  source: /note="5' tri-ethylene glycol (TEG)"
  modified_base (1)..(1): 5-methyl bicyclic nucleic acid
  modified_base (4)..(4): 5-methyl modified nucleotide
  modified_base (7)..(7): 5-methyl modified nucleotide
  modified_base (19)..(19): 5-methyl modified nucleotide
caacaucaaggaagauggcauu

SEQ ID NO: 13400 - RNA, 21 nt, Artificial Sequence
  source: /note="Description of Artificial Sequence: Synthetic oligonucleotide"
  source: /note="RNA"
  source: /note="5' tri-ethylene glycol (TEG)"
  modified_base (1)..(1): 5-methyl bicyclic nucleic acid
  modified_base (4)..(4): 5-methyl modified nucleotide
  modified_base (7)..(7): 5-methyl modified nucleotide
  modified_base (19)..(19): 5-methyl modified nucleotide
caacaucaaggaagauggcau

SEQ ID NO: 13401 - RNA, 20 nt, Artificial Sequence
  source: /note="Description of Artificial Sequence: Synthetic oligonucleotide"
  source: /note="RNA"
  source: /note="5' tri-ethylene glycol (TEG)"
  modified_base (1)..(1): 5-methyl bicyclic nucleic acid
  modified_base (4)..(4): 5-methyl modified nucleotide
  modified_base (7)..(7): 5-methyl modified nucleotide
  modified_base (19)..(19): 5-methyl modified nucleotide
caacaucaaggaagauggca

SEQ ID NO: 13402 - RNA, 19 nt, Artificial Sequence
  source: /note="Description of Artificial Sequence: Synthetic oligonucleotide"
  source: /note="RNA"
  source: /note="5' tri-ethylene glycol (TEG)"
  modified_base (1)..(1): 5-methyl bicyclic nucleic acid
  modified_base (4)..(4): 5-methyl modified nucleotide
  modified_base (7)..(7): 5-methyl modified nucleotide
  modified_base (19)..(19): 5-methyl modified nucleotide
caacaucaaggaagauggc

SEQ ID NO: 13403 - RNA, 18 nt, Artificial Sequence
  source: /note="Description of Artificial Sequence: Synthetic oligonucleotide"
  source: /note="RNA"
  source: /note="5' tri-ethylene glycol (TEG)"
  modified_base (1)..(1): 5-methyl bicyclic nucleic acid
  modified_base (4)..(4): 5-methyl modified nucleotide
  modified_base (7)..(7): 5-methyl modified nucleotide
caacaucaaggaagaugg

SEQ ID NO: 13404 - RNA, 17 nt, Artificial Sequence
  source: /note="Description of Artificial Sequence: Synthetic oligonucleotide"
  source: /note="RNA"
  source: /note="5' tri-ethylene glycol (TEG)"
  modified_base (1)..(1): 5-methyl bicyclic nucleic acid
  modified_base (4)..(4): 5-methyl modified nucleotide
  modified_base (7)..(7): 5-methyl modified nucleotide
caacaucaaggaagaug

SEQ ID NO: 13405 - RNA, 16 nt, Artificial Sequence
  source: /note="Description of Artificial Sequence: Synthetic oligonucleotide"
  source: /note="RNA"
  source: /note="5' tri-ethylene glycol (TEG)"
  modified_base (1)..(1): 5-methyl bicyclic nucleic acid
  modified_base (4)..(4): 5-methyl modified nucleotide
  modified_base (7)..(7): 5-methyl modified nucleotide
caacaucaaggaagau

SEQ ID NO: 13406 - RNA, 15 nt, Artificial Sequence
  source: /note="Description of Artificial Sequence: Synthetic oligonucleotide"
  source: /note="RNA"
  source: /note="5' tri-ethylene glycol (TEG)"
  modified_base (1)..(1): 5-methyl bicyclic nucleic acid
  modified_base (4)..(4): 5-methyl modified nucleotide
  modified_base (7)..(7): 5-methyl modified nucleotide
caacaucaaggaaga

SEQ ID NO: 13407 - RNA, 14 nt, Artificial Sequence
  source: /note="Description of Artificial Sequence: Synthetic oligonucleotide"
  source: /note="RNA"
  source: /note="5' tri-ethylene glycol (TEG)"
  modified_base (1)..(1): 5-methyl bicyclic nucleic acid
  modified_base (4)..(4): 5-methyl modified nucleotide
  modified_base (7)..(7): 5-methyl modified nucleotide
caacaucaaggaag

SEQ ID NO: 13408 - RNA, 26 nt, Artificial Sequence
  source: /note="Description of Artificial Sequence: Synthetic oligonucleotide"
  source: /note="RNA"
  source: /note="5' tri-ethylene glycol (TEG)"
  modified_base (1)..(1): bicyclic nucleic acid (BNA)
  modified_base (3)..(3): 5-methyl modified nucleotide
  modified_base (6)..(6): 5-methyl modified nucleotide
  modified_base (18)..(18): 5-methyl modified nucleotide
  modified_base (23)..(23): 5-methyl modified nucleotide
aacaucaaggaagauggcauuucuag

SEQ ID NO: 13409 - RNA, 25 nt, Artificial Sequence
  source: /note="Description of Artificial Sequence: Synthetic oligonucleotide"
  source: /note="RNA"
  source: /note="5' tri-ethylene glycol (TEG)"
  modified_base (1)..(1): bicyclic nucleic acid (BNA)
  modified_base (3)..(3): 5-methyl modified nucleotide
  modified_base (6)..(6): 5-methyl modified nucleotide
  modified_base (18)..(18): 5-methyl modified nucleotide
  modified_base (23)..(23): 5-methyl modified nucleotide
aacaucaaggaagauggcauuucua

SEQ ID NO: 13410 - RNA, 24 nt, Artificial Sequence
  source: /note="Description of Artificial Sequence: Synthetic oligonucleotide"
  source: /note="RNA"
  source: /note="5' tri-ethylene glycol (TEG)"
  modified_base (1)..(1): bicyclic nucleic acid (BNA)
  modified_base (3)..(3): 5-methyl modified nucleotide
  modified_base (6)..(6): 5-methyl modified nucleotide
  modified_base (18)..(18): 5-methyl modified nucleotide
  modified_base (23)..(23): 5-methyl modified nucleotide
aacaucaaggaagauggcauuucu

SEQ ID NO: 13411 - RNA, 23 nt, Artificial Sequence
  source: /note="Description of Artificial Sequence: Synthetic oligonucleotide"
  source: /note="RNA"
  source: /note="5' tri-ethylene glycol (TEG)"
  modified_base (1)..(1): bicyclic nucleic acid (BNA)
  modified_base (3)..(3): 5-methyl modified nucleotide
  modified_base (6)..(6): 5-methyl modified nucleotide
  modified_base (18)..(18): 5-methyl modified nucleotide
  modified_base (23)..(23): 5-methyl modified nucleotide
aacaucaaggaagauggcauuuc

SEQ ID NO: 13412 - RNA, 22 nt, Artificial Sequence
  source: /note="Description of Artificial Sequence: Synthetic oligonucleotide"
  source: /note="RNA"
  source: /note="5' tri-ethylene glycol (TEG)"
  modified_base (1)..(1): bicyclic nucleic acid (BNA)
  modified_base (3)..(3): 5-methyl modified nucleotide
  modified_base (6)..(6): 5-methyl modified nucleotide
  modified_base (18)..(18): 5-methyl modified nucleotide
aacaucaaggaagauggcauuu

SEQ ID NO: 13413 - RNA, 21 nt, Artificial Sequence
  source: /note="Description of Artificial Sequence: Synthetic oligonucleotide"
  source: /note="RNA"
  source: /note="5' tri-ethylene glycol (TEG)"
  modified_base (1)..(1): bicyclic nucleic acid (BNA)
  modified_base (3)..(3): 5-methyl modified nucleotide
  modified_base (6)..(6): 5-methyl modified nucleotide
  modified_base (18)..(18): 5-methyl modified nucleotide
aacaucaaggaagauggcauu

SEQ ID NO: 13414 - RNA, 20 nt, Artificial Sequence
  source: /note="Description of Artificial Sequence: Synthetic oligonucleotide"
  source: /note="RNA"
  source: /note="5' tri-ethylene glycol (TEG)"
  modified_base (1)..(1): bicyclic nucleic acid (BNA)
  modified_base (3)..(3): 5-methyl modified nucleotide
  modified_base (6)..(6): 5-methyl modified nucleotide
  modified_base (18)..(18): 5-methyl modified nucleotide
aacaucaaggaagauggcau

SEQ ID NO: 13415 - RNA, 19 nt, Artificial Sequence
  source: /note="Description of Artificial Sequence: Synthetic oligonucleotide"
  source: /note="RNA"
  source: /note="5' tri-ethylene glycol (TEG)"
  modified_base (1)..(1): bicyclic nucleic acid (BNA)
  modified_base (3)..(3): 5-methyl modified nucleotide
  modified_base (6)..(6): 5-methyl modified nucleotide
  modified_base (18)..(18): 5-methyl modified nucleotide
aacaucaaggaagauggca

SEQ ID NO: 13416 - RNA, 18 nt, Artificial Sequence
  source: /note="Description of Artificial Sequence: Synthetic oligonucleotide"
  source: /note="RNA"
  source: /note="5' tri-ethylene glycol (TEG)"
  modified_base (1)..(1): bicyclic nucleic acid (BNA)
  modified_base (3)..(3): 5-methyl modified nucleotide
  modified_base (6)..(6): 5-methyl modified nucleotide
  modified_base (18)..(18): 5-methyl modified nucleotide
aacaucaaggaagauggc

SEQ ID NO: 13417 - RNA, 17 nt, Artificial Sequence
  source: /note="Description of Artificial Sequence: Synthetic oligonucleotide"
  source: /note="RNA"
  source: /note="5' tri-ethylene glycol (TEG)"
  modified_base (1)..(1): bicyclic nucleic acid (BNA)
  modified_base (3)..(3): 5-methyl modified nucleotide
  modified_base (6)..(6): 5-methyl modified nucleotide
aacaucaaggaagaugg

SEQ ID NO: 13418 - RNA, 16 nt, Artificial Sequence
  source: /note="Description of Artificial Sequence: Synthetic oligonucleotide"
  source: /note="RNA"
  source: /note="5' tri-ethylene glycol (TEG)"
  modified_base (1)..(1): bicyclic nucleic acid (BNA)
  modified_base (3)..(3): 5-methyl modified nucleotide
  modified_base (6)..(6): 5-methyl modified nucleotide
aacaucaaggaagaug

SEQ ID NO: 13419 - RNA, 15 nt, Artificial Sequence
  source: /note="Description of Artificial Sequence: Synthetic oligonucleotide"
  source: /note="RNA"
  source: /note="5' tri-ethylene glycol (TEG)"
  modified_base (1)..(1): bicyclic nucleic acid (BNA)
  modified_base (3)..(3): 5-methyl modified nucleotide
  modified_base (6)..(6): 5-methyl modified nucleotide
aacaucaaggaagau

SEQ ID NO: 13420 - RNA, 14 nt, Artificial Sequence
  source: /note="Description of Artificial Sequence: Synthetic oligonucleotide"
  source: /note="RNA"
  source: /note="5' tri-ethylene glycol (TEG)"
  modified_base (1)..(1): bicyclic nucleic acid (BNA)
  modified_base (3)..(3): 5-methyl modified nucleotide
  modified_base (6)..(6): 5-methyl modified nucleotide
aacaucaaggaaga

SEQ ID NO: 13421 - RNA, 13 nt, Artificial Sequence
  source: /note="Description of Artificial Sequence: Synthetic oligonucleotide"
  source: /note="RNA"
  source: /note="5' tri-ethylene glycol (TEG)"
  modified_base (1)..(1): bicyclic nucleic acid (BNA)
  modified_base (3)..(3): 5-methyl modified nucleotide
  modified_base (6)..(6): 5-methyl modified nucleotide
aacaucaaggaag

SEQ ID NO: 13422 - RNA, 25 nt, Artificial Sequence
  source: /note="Description of Artificial Sequence: Synthetic oligonucleotide"
  source: /note="RNA"
  source: /note="5' tri-ethylene glycol (TEG)"
  modified_base (1)..(1): bicyclic nucleic acid (BNA)
  modified_base (2)..(2): 5-methyl modified nucleotide
  modified_base (5)..(5): 5-methyl modified nucleotide
  modified_base (17)..(17): 5-methyl modified nucleotide
  modified_base (22)..(22): 5-methyl modified nucleotide
acaucaaggaagauggcauuucuag

SEQ ID NO: 13423 - RNA, 24 nt, Artificial Sequence
  source: /note="Description of Artificial Sequence: Synthetic oligonucleotide"
  source: /note="RNA"
  source: /note="5' tri-ethylene glycol (TEG)"
  modified_base (1)..(1): bicyclic nucleic acid (BNA)
  modified_base (2)..(2): 5-methyl modified nucleotide
  modified_base (5)..(5): 5-methyl modified nucleotide
  modified_base (17)..(17): 5-methyl modified nucleotide
  modified_base (22)..(22): 5-methyl modified nucleotide
acaucaaggaagauggcauuucua

SEQ ID NO: 13424 - RNA, 23 nt, Artificial Sequence
  source: /note="Description of Artificial Sequence: Synthetic oligonucleotide"
  source: /note="RNA"
  source: /note="5' tri-ethylene glycol (TEG)"
  modified_base (1)..(1): bicyclic nucleic acid (BNA)
  modified_base (2)..(2): 5-methyl modified nucleotide
  modified_base (5)..(5): 5-methyl modified nucleotide
  modified_base (17)..(17): 5-methyl modified nucleotide
  modified_base (22)..(22): 5-methyl modified nucleotide
acaucaaggaagauggcauuucu

SEQ ID NO: 13425 - RNA, 22 nt, Artificial Sequence
  source: /note="Description of Artificial Sequence: Synthetic oligonucleotide"
  source: /note="RNA"
  source: /note="5' tri-ethylene glycol (TEG)"
  modified_base (1)..(1): bicyclic nucleic acid (BNA)
  modified_base (2)..(2): 5-methyl modified nucleotide
  modified_base (5)..(5): 5-methyl modified nucleotide
  modified_base (17)..(17): 5-methyl modified nucleotide
  modified_base (22)..(22): 5-methyl modified nucleotide
acaucaaggaagauggcauuuc

SEQ ID NO: 13426 - RNA, 21 nt, Artificial Sequence
  source: /note="Description of Artificial Sequence: Synthetic oligonucleotide"
  source: /note="RNA"
  source: /note="5' tri-ethylene glycol (TEG)"
  modified_base (1)..(1): bicyclic nucleic acid (BNA)
  modified_base (2)..(2): 5-methyl modified nucleotide
  modified_base (5)..(5): 5-methyl modified nucleotide
  modified_base (17)..(17): 5-methyl modified nucleotide
acaucaaggaagauggcauuu

SEQ ID NO: 13427 - RNA, 20 nt, Artificial Sequence
  source: /note="Description of Artificial Sequence: Synthetic oligonucleotide"
  source: /note="RNA"
  source: /note="5' tri-ethylene glycol (TEG)"
  modified_base (1)..(1): bicyclic nucleic acid (BNA)
  modified_base (2)..(2): 5-methyl modified nucleotide
  modified_base (5)..(5): 5-methyl modified nucleotide
  modified_base (17)..(17): 5-methyl modified nucleotide
acaucaaggaagauggcauu

SEQ ID NO: 13428 - RNA, 19 nt, Artificial Sequence
  source: /note="Description of Artificial Sequence: Synthetic oligonucleotide"
  source: /note="RNA"
  source: /note="5' tri-ethylene glycol (TEG)"
  modified_base (1)..(1): bicyclic nucleic acid (BNA)
  modified_base (2)..(2): 5-methyl modified nucleotide
  modified_base (5)..(5): 5-methyl modified nucleotide
  modified_base (17)..(17): 5-methyl modified nucleotide
acaucaaggaagauggcau

SEQ ID NO: 13429 - RNA, 18 nt, Artificial Sequence
  source: /note="Description of Artificial Sequence: Synthetic oligonucleotide"
  source: /note="RNA"
  source: /note="5' tri-ethylene glycol (TEG)"
  modified_base (1)..(1): bicyclic nucleic acid (BNA)
  modified_base (2)..(2): 5-methyl modified nucleotide
  modified_base (5)..(5): 5-methyl modified nucleotide
  modified_base (17)..(17): 5-methyl modified nucleotide
acaucaaggaagauggca

SEQ ID NO: 13430 - RNA, 17 nt, Artificial Sequence
  source: /note="Description of Artificial Sequence: Synthetic oligonucleotide"
  source: /note="RNA"
  source: /note="5' tri-ethylene glycol (TEG)"
  modified_base (1)..(1): bicyclic nucleic acid (BNA)
  modified_base (2)..(2): 5-methyl modified nucleotide
  modified_base (5)..(5): 5-methyl modified nucleotide
  modified_base (17)..(17): 5-methyl modified nucleotide
acaucaaggaagauggc

SEQ ID NO: 13431 - RNA, 16 nt, Artificial Sequence
  source: /note="Description of Artificial Sequence: Synthetic oligonucleotide"
  source: /note="RNA"
  source: /note="5' tri-ethylene glycol (TEG)"
  modified_base (1)..(1): bicyclic nucleic acid (BNA)
  modified_base (2)..(2): 5-methyl modified nucleotide
  modified_base (5)..(5): 5-methyl modified nucleotide
acaucaaggaagaugg

SEQ ID NO: 13432 - RNA, 15 nt, Artificial Sequence
  source: /note="Description of Artificial Sequence: Synthetic oligonucleotide"
  source: /note="RNA"
  source: /note="5' tri-ethylene glycol (TEG)"
  modified_base (1)..(1): bicyclic nucleic acid (BNA)
  modified_base (2)..(2): 5-methyl modified nucleotide
  modified_base (5)..(5): 5-methyl modified nucleotide
acaucaaggaagaug

SEQ ID NO: 13433 - RNA, 14 nt, Artificial Sequence
  source: /note="Description of Artificial Sequence: Synthetic oligonucleotide"
  source: /note="RNA"
  source: /note="5' tri-ethylene glycol (TEG)"
  modified_base (1)..(1): bicyclic nucleic acid (BNA)
  modified_base (2)..(2): 5-methyl modified nucleotide
  modified_base (5)..(5): 5-methyl modified nucleotide
acaucaaggaagau

SEQ ID NO: 13434 - RNA, 13 nt, Artificial Sequence
  source: /note="Description of Artificial Sequence: Synthetic oligonucleotide"
  source: /note="RNA"
  source: /note="5' tri-ethylene glycol (TEG)"
  modified_base (1)..(1): bicyclic nucleic acid (BNA)
  modified_base (2)..(2): 5-methyl modified nucleotide
  modified_base (5)..(5): 5-methyl modified nucleotide
acaucaaggaaga

SEQ ID NO: 13435 - RNA, 12 nt, Artificial Sequence
  source: /note="Description of Artificial Sequence: Synthetic oligonucleotide"
  source: /note="RNA"
  source: /note="5' tri-ethylene glycol (TEG)"
  modified_base (1)..(1): bicyclic nucleic acid (BNA)
  modified_base (2)..(2): 5-methyl modified nucleotide
  modified_base (5)..(5): 5-methyl modified nucleotide
acaucaaggaag

SEQ ID NO: 13436 - RNA, 24 nt, Artificial Sequence
  source: /note="Description of Artificial Sequence: Synthetic oligonucleotide"
  source: /note="RNA"
  source: /note="5' tri-ethylene glycol (TEG)"
  modified_base (1)..(1): 5-methyl bicyclic nucleic acid
  modified_base (4)..(4): 5-methyl modified nucleotide
  modified_base (16)..(16): 5-methyl modified nucleotide
  modified_base (21)..(21): 5-methyl modified nucleotide
caucaaggaagauggcauuucuag

SEQ ID NO: 13437 - RNA, 23 nt, Artificial Sequence
  source: /note="Description of Artificial Sequence: Synthetic oligonucleotide"
  source: /note="RNA"
  source: /note="5' tri-ethylene glycol (TEG)"
  modified_base (1)..(1): 5-methyl bicyclic nucleic acid
  modified_base (4)..(4): 5-methyl modified nucleotide
  modified_base (16)..(16): 5-methyl modified nucleotide
  modified_base (21)..(21): 5-methyl modified nucleotide
caucaaggaagauggcauuucua

SEQ ID NO: 13438 - RNA, 22 nt, Artificial Sequence
  source: /note="Description of Artificial Sequence: Synthetic oligonucleotide"
  source: /note="RNA"
  source: /note="5' tri-ethylene glycol (TEG)"
  modified_base (1)..(1): 5-methyl bicyclic nucleic acid
  modified_base (4)..(4): 5-methyl modified nucleotide
  modified_base (16)..(16): 5-methyl modified nucleotide
  modified_base (21)..(21): 5-methyl modified nucleotide
caucaaggaagauggcauuucu

SEQ ID NO: 13439 - RNA, 21 nt, Artificial Sequence
  source: /note="Description of Artificial Sequence: Synthetic oligonucleotide"
  source: /note="RNA"
  source: /note="5' tri-ethylene glycol (TEG)"
  modified_base (1)..(1): 5-methyl bicyclic nucleic acid
  modified_base (4)..(4): 5-methyl modified nucleotide
  modified_base (16)..(16): 5-methyl modified nucleotide
  modified_base (21)..(21): 5-methyl modified nucleotide
caucaaggaagauggcauuuc

SEQ ID NO: 13440 - RNA, 20 nt, Artificial Sequence
  source: /note="Description of Artificial Sequence: Synthetic oligonucleotide"
  source: /note="RNA"
  source: /note="5' tri-ethylene glycol (TEG)"
  modified_base (1)..(1): 5-methyl bicyclic nucleic acid
  modified_base (4)..(4): 5-methyl modified nucleotide
  modified_base (16)..(16): 5-methyl modified nucleotide
caucaaggaagauggcauuu

SEQ ID NO: 13441 - RNA, 19 nt, Artificial Sequence
  source: /note="Description of Artificial Sequence: Synthetic oligonucleotide"
  source: /note="RNA"
  source: /note="5' tri-ethylene glycol (TEG)"
  modified_base (1)..(1): 5-methyl bicyclic nucleic acid
  modified_base (4)..(4): 5-methyl modified nucleotide
  modified_base (16)..(16): 5-methyl modified nucleotide
caucaaggaagauggcauu

SEQ ID NO: 13442 - RNA, 18 nt, Artificial Sequence
  source: /note="Description of Artificial Sequence: Synthetic oligonucleotide"
  source: /note="RNA"
  source: /note="5' tri-ethylene glycol (TEG)"
  modified_base (1)..(1): 5-methyl bicyclic nucleic acid
  modified_base (4)..(4): 5-methyl modified nucleotide
  modified_base (16)..(16): 5-methyl modified nucleotide
caucaaggaagauggcau

SEQ ID NO: 13443 - RNA, 17 nt, Artificial Sequence
  source: /note="Description of Artificial Sequence: Synthetic oligonucleotide"
  source: /note="RNA"
  source: /note="5' tri-ethylene glycol (TEG)"
  modified_base (1)..(1): 5-methyl bicyclic nucleic acid
  modified_base (4)..(4): 5-methyl modified nucleotide
  modified_base (16)..(16): 5-methyl modified nucleotide
caucaaggaagauggca

SEQ ID NO: 13444 - RNA, 16 nt, Artificial Sequence
  source: /note="Description of Artificial Sequence: Synthetic oligonucleotide"
  source: /note="RNA"
  source: /note="5' tri-ethylene glycol (TEG)"
  modified_base (1)..(1): 5-methyl bicyclic nucleic acid
  modified_base (4)..(4): 5-methyl modified nucleotide
  modified_base (16)..(16): 5-methyl modified nucleotide
caucaaggaagauggc

SEQ ID NO: 13445 - RNA, 15 nt, Artificial Sequence
  source: /note="Description of Artificial Sequence: Synthetic oligonucleotide"
  source: /note="RNA"
  source: /note="5' tri-ethylene glycol (TEG)"
  modified_base (1)..(1): 5-methyl bicyclic nucleic acid
  modified_base (4)..(4): 5-methyl modified nucleotide
caucaaggaagaugg

SEQ ID NO: 13446 - RNA, 14 nt, Artificial Sequence
  source: /note="Description of Artificial Sequence: Synthetic oligonucleotide"
  source: /note="RNA"
  source: /note="5' tri-ethylene glycol (TEG)"
  modified_base (1)..(1): 5-methyl bicyclic nucleic acid
  modified_base (4)..(4): 5-methyl modified nucleotide
caucaaggaagaug

SEQ ID NO: 13447 - RNA, 13 nt, Artificial Sequence
  source: /note="Description of Artificial Sequence: Synthetic oligonucleotide"
  source: /note="RNA"
  source: /note="5' tri-ethylene glycol (TEG)"
  modified_base (1)..(1): 5-methyl bicyclic nucleic acid
  modified_base (4)..(4): 5-methyl modified nucleotide
caucaaggaagau

SEQ ID NO: 13448 - RNA, 12 nt, Artificial Sequence
  source: /note="Description of Artificial Sequence: Synthetic oligonucleotide"
  source: /note="RNA"
  source: /note="5' tri-ethylene glycol (TEG)"
  modified_base (1)..(1): 5-methyl bicyclic nucleic acid
  modified_base (4)..(4): 5-methyl modified nucleotide
caucaaggaaga

SEQ ID NO: 13449 - RNA, 11 nt, Artificial Sequence
  source: /note="Description of Artificial Sequence: Synthetic oligonucleotide"
  source: /note="RNA"
  source: /note="5' tri-ethylene glycol (TEG)"
  modified_base (1)..(1): 5-methyl bicyclic nucleic acid
  modified_base (4)..(4): 5-methyl modified nucleotide
caucaaggaag

SEQ ID NO: 13450 - RNA, 23 nt, Artificial Sequence
  source: /note="Description of Artificial Sequence: Synthetic oligonucleotide"
  source: /note="RNA"
  source: /note="5' tri-ethylene glycol (TEG)"
  modified_base (1)..(1): bicyclic nucleic acid (BNA)
  modified_base (3)..(3): 5-methyl modified nucleotide
  modified_base (15)..(15): 5-methyl modified nucleotide
  modified_base (20)..(20): 5-methyl modified nucleotide
aucaaggaagauggcauuucuag

SEQ ID NO: 13451 - RNA, 22 nt, Artificial Sequence
  source: /note="Description of Artificial Sequence: Synthetic oligonucleotide"
  source: /note="RNA"
  source: /note="5' tri-ethylene glycol (TEG)"
  modified_base (1)..(1): bicyclic nucleic acid (BNA)
  modified_base (3)..(3): 5-methyl modified nucleotide
  modified_base (15)..(15): 5-methyl modified nucleotide
  modified_base (20)..(20): 5-methyl modified nucleotide
aucaaggaagauggcauuucua

SEQ ID NO: 13452 - RNA, 21 nt, Artificial Sequence
  source: /note="Description of Artificial Sequence: Synthetic oligonucleotide"
  source: /note="RNA"
  source: /note="5' tri-ethylene glycol (TEG)"
  modified_base (1)..(1): bicyclic nucleic acid (BNA)
  modified_base (3)..(3): 5-methyl modified nucleotide
  modified_base (15)..(15): 5-methyl modified nucleotide
  modified_base (20)..(20): 5-methyl modified nucleotide
aucaaggaagauggcauuucu

SEQ ID NO: 13453 - RNA, 20 nt, Artificial Sequence
  source: /note="Description of Artificial Sequence: Synthetic oligonucleotide"
  source: /note="RNA"
  source: /note="5' tri-ethylene glycol (TEG)"
  modified_base (1)..(1): bicyclic nucleic acid (BNA)
  modified_base (3)..(3): 5-methyl modified nucleotide
  modified_base (15)..(15): 5-methyl modified nucleotide
  modified_base (20)..(20): 5-methyl modified nucleotide
aucaaggaagauggcauuuc

SEQ ID NO: 13454 - RNA, 19 nt, Artificial Sequence
  source: /note="Description of Artificial Sequence: Synthetic oligonucleotide"
  source: /note="RNA"
  source: /note="5' tri-ethylene glycol (TEG)"
  modified_base (1)..(1): bicyclic nucleic acid (BNA)
  modified_base (3)..(3): 5-methyl modified nucleotide
  modified_base (15)..(15): 5-methyl modified nucleotide
aucaaggaagauggcauuu

SEQ ID NO: 13455 - RNA, 18 nt, Artificial Sequence
  source: /note="Description of Artificial Sequence: Synthetic oligonucleotide"
  source: /note="RNA"
  source: /note="5' tri-ethylene glycol (TEG)"
  modified_base (1)..(1): bicyclic nucleic acid (BNA)
  modified_base (3)..(3): 5-methyl modified nucleotide
  modified_base (15)..(15): 5-methyl modified nucleotide
aucaaggaagauggcauu

SEQ ID NO: 13456 - RNA, 17 nt, Artificial Sequence
  source: /note="Description of Artificial Sequence: Synthetic oligonucleotide"
  source: /note="RNA"
  source: /note="5' tri-ethylene glycol (TEG)"
  modified_base (1)..(1): bicyclic nucleic acid (BNA)
  modified_base (3)..(3): 5-methyl modified nucleotide
  modified_base (15)..(15): 5-methyl modified nucleotide
aucaaggaagauggcau

SEQ ID NO: 13457 - RNA, 16 nt, Artificial Sequence
  source: /note="Description of Artificial Sequence: Synthetic oligonucleotide"
  source: /note="RNA"
  source: /note="5' tri-ethylene glycol (TEG)"
  modified_base (1)..(1): bicyclic nucleic acid (BNA)
  modified_base (3)..(3): 5-methyl modified nucleotide
  modified_base (15)..(15): 5-methyl modified nucleotide
aucaaggaagauggca

SEQ ID NO: 13458 - RNA, 15 nt, Artificial Sequence
  source: /note="Description of Artificial Sequence: Synthetic oligonucleotide"
  source: /note="RNA"
  source: /note="5' tri-ethylene glycol (TEG)"
  modified_base (1)..(1): bicyclic nucleic acid (BNA)
  modified_base (3)..(3): 5-methyl modified nucleotide
  modified_base (15)..(15): 5-methyl modified nucleotide
aucaaggaagauggc

SEQ ID NO: 13459 - RNA, 14 nt, Artificial Sequence
  source: /note="Description of Artificial Sequence: Synthetic oligonucleotide"
  source: /note="RNA"
  source: /note="5' tri-ethylene glycol (TEG)"
  modified_base (1)..(1): bicyclic nucleic acid (BNA)
  modified_base (3)..(3): 5-methyl modified nucleotide
aucaaggaagaugg

SEQ ID NO: 13460 - RNA, 13 nt, Artificial Sequence
  source: /note="Description of Artificial Sequence: Synthetic oligonucleotide"
  source: /note="RNA"
  source: /note="5' tri-ethylene glycol (TEG)"
  modified_base (1)..(1): bicyclic nucleic acid (BNA)
  modified_base (3)..(3): 5-methyl modified nucleotide
aucaaggaagaug

SEQ ID NO: 13461 - RNA, 12 nt, Artificial Sequence
  source: /note="Description of Artificial Sequence: Synthetic oligonucleotide"
  source: /note="RNA"
  source: /note="5' tri-ethylene glycol (TEG)"
  modified_base (1)..(1): bicyclic nucleic acid (BNA)
  modified_base (3)..(3): 5-methyl modified nucleotide
aucaaggaagau

SEQ ID NO: 13462 - RNA, 11 nt, Artificial Sequence
  source: /note="Description of Artificial Sequence: Synthetic oligonucleotide"
  source: /note="RNA"
  source: /note="5' tri-ethylene glycol (TEG)"
  modified_base (1)..(1): bicyclic nucleic acid (BNA)
  modified_base (3)..(3): 5-methyl modified nucleotide
aucaaggaaga

SEQ ID NO: 13463 - RNA, 10 nt, Artificial Sequence
  source: /note="Description of Artificial Sequence: Synthetic oligonucleotide"
  source: /note="RNA"
  source: /note="5' tri-ethylene glycol (TEG)"
  modified_base (1)..(1): bicyclic nucleic acid (BNA)
  modified_base (3)..(3): 5-methyl modified nucleotide
aucaaggaag

SEQ ID NO: 13464 - RNA, 23 nt, Artificial Sequence
  source: /note="Description of Artificial Sequence: Synthetic oligonucleotide"
  source: /note="RNA"
  source: /note="5' tri-ethylene glycol (TEG)"
  modified_base (1)..(1): 5-methyl bicyclic nucleic acid
  modified_base (2)..(2): 5-methyl modified nucleotide
  modified_base (7)..(7): 5-methyl modified nucleotide
  modified_base (13)..(13): 5-methyl modified nucleotide
  modified_base (14)..(14): 5-methyl modified nucleotide
  modified_base (16)..(16): 5-methyl modified nucleotide
  modified_base (17)..(17): 5-methyl modified nucleotide
  modified_base (20)..(20): 5-methyl modified nucleotide
  modified_base (23)..(23): 5-methyl modified nucleotide
ccagagcagguaccuccaacauc

SEQ ID NO: 13465 - RNA, 18 nt, Artificial Sequence
  source: /note="Description of Artificial Sequence: Synthetic oligonucleotide"
  source: /note="RNA"
  source: /note="5' tri-ethylene glycol (TEG)"
  modified_base (1)..(1): 5-methyl bicyclic nucleic acid
  modified_base (2)..(2): 5-methyl modified nucleotide
  modified_base (7)..(7): 5-methyl modified nucleotide
  modified_base (13)..(13): 5-methyl modified nucleotide
  modified_base (14)..(14): 5-methyl modified nucleotide
  modified_base (16)..(16): 5-methyl modified nucleotide
  modified_base (17)..(17): 5-methyl modified nucleotide
ccagagcagguaccucca

SEQ ID NO: 13466 - RNA, 23 nt, Artificial Sequence
  source: /note="Description of Artificial Sequence: Synthetic oligonucleotide"
  source: /note="RNA"
  source: /note="5' tri-ethylene glycol (TEG)"
  modified_base (1)..(1): 5-methyl bicyclic nucleic acid
  modified_base (2)..(2): 5-methyl modified nucleotide
  modified_base (4)..(4): 5-methyl modified nucleotide
  modified_base (18)..(18): 5-methyl modified nucleotide
ccucugugauuuuauaacuugau

SEQ ID NO: 13467 - DNA, 17 bp, Artificial Sequence
  source: /note="Description of Artificial Sequence: Synthetic oligonucleotide"
  source: /note="Description of Combined DNA/RNA Molecule: Synthetic oligonucleotide"
  source: /note="DNA/RNA"
  source: /note="5' tri-ethylene glycol (TEG)"
  modified_base (1)..(1): bicyclic nucleic acid (BNA)
  modified_base (2)..(2): 5-methyl modified nucleotide
  modified_base (4)..(4): 5-methyl modified nucleotide
  modified_base (5)..(5): 5-methyl modified nucleotide
  modified_base (6)..(6): 5-methyl modified nucleotide
  modified_base (8)..(8): 5-methyl modified nucleotide
  modified_base (9)..(9): 5-methyl modified nucleotide
  modified_base (12)..(12): 5-methyl modified nucleotide
  modified_base (14)..(14): 5-methyl modified nucleotide
  modified_base (15)..(15): 5-methyl modified nucleotide
  modified_base (16)..(16): 5-methyl modified nucleotide
tcacccaccaucacccu

SEQ ID NO: 13468 - DNA, 20 bp, Artificial Sequence
  source: /note="Description of Artificial Sequence: Synthetic oligonucleotide"
  source: /note="Description of Combined DNA/RNA Molecule: Synthetic oligonucleotide"
  source: /note="DNA/RNA"
  source: /note="5' tri-ethylene glycol (TEG)"
  modified_base (1)..(1): bicyclic nucleic acid (BNA)
  modified_base (7)..(7): 5-methyl modified nucleotide
  modified_base (8)..(8): 5-methyl modified nucleotide
  modified_base (10)..(10): 5-methyl modified nucleotide
  modified_base (16)..(16): 5-methyl modified nucleotide
  modified_base (18)..(18): 5-methyl modified nucleotide
  modified_base (19)..(19): 5-methyl modified nucleotide
  modified_base (20)..(20): 5-methyl modified nucleotide
tgauauccucaaggucaccc

SEQ ID NO: 13469 - RNA, 22 nt, Artificial Sequence
  source: /note="Description of Artificial Sequence: Synthetic oligonucleotide"
  source: /note="RNA"
  source: /note="5' tri-ethylene glycol (TEG)"
  modified_base (1)..(1): 5-methyl bicyclic nucleic acid
  modified_base (4)..(4): 5-methyl modified nucleotide
  modified_base (13)..(13): 5-methyl modified nucleotide
  modified_base (16)..(16): 5-methyl modified nucleotide
  modified_base (18)..(18): 5-methyl modified nucleotide
cugcuugaugaucaucucguug

SEQ ID NO: 13470 - RNA, 18 nt, Artificial Sequence
  source: /note="Description of Artificial Sequence: Synthetic oligonucleotide"
  source: /note="RNA"
  source: /note="5' tri-ethylene glycol (TEG)"
  modified_base (1)..(1): 5-methyl bicyclic nucleic acid
  modified_base (4)..(4): 5-methyl modified nucleotide
  modified_base (13)..(13): 5-methyl modified nucleotide
  modified_base (16)..(16): 5-methyl modified nucleotide
  modified_base (18)..(18): 5-methyl modified nucleotide
cugcuugaugaucaucuc

SEQ ID NO: 13471 - RNA, 19 nt, Artificial Sequence
  source: /note="Description of Artificial Sequence: Synthetic oligonucleotide"
  source: /note="RNA"
  source: /note="5' tri-ethylene glycol (TEG)"
  modified_base (1)..(1): bicyclic nucleic acid (BNA)
  modified_base (5)..(5): 5-methyl modified nucleotide
  modified_base (6)..(6): 5-methyl modified nucleotide
  modified_base (14)..(14): 5-methyl modified nucleotide
  modified_base (15)..(15): 5-methyl modified nucleotide
  modified_base (17)..(17): 5-methyl modified nucleotide
guuuccuuaguaaccacag

SEQ ID NO: 13472 - RNA, 17 nt, Artificial Sequence
  source: /note="Description of Artificial Sequence: Synthetic oligonucleotide"
  source: /note="RNA"
  source: /note="5' tri-ethylene glycol (TEG)"
  modified_base (1)..(1): bicyclic nucleic acid (BNA)
  modified_base (5)..(5): 5-methyl modified nucleotide
  modified_base (6)..(6): 5-methyl modified nucleotide
  modified_base (14)..(14): 5-methyl modified nucleotide
  modified_base (15)..(15): 5-methyl modified nucleotide
  modified_base (17)..(17): 5-methyl modified nucleotide
guuuccuuaguaaccac

SEQ ID NO: 13473 - DNA, 20 bp, Artificial Sequence
  source: /note="Description of Artificial Sequence: Synthetic oligonucleotide"
  source: /note="Description of Combined DNA/RNA Molecule: Synthetic oligonucleotide"
  source: /note="DNA/RNA"
  modified_base (1)..(1): bicyclic nucleic acid (BNA)
  modified_base (2)..(2): 5-methyl modified nucleotide
  modified_base (14)..(14): 5-methyl modified nucleotide
  modified_base (19)..(19): 5-methyl modified nucleotide
  source: /note="3' tri-ethylene glycol (TEG)"
tcaaggaagauggcauuucu

SEQ ID NO: 13474 - DNA, 22 bp, Artificial Sequence
  source: /note="Description of Artificial Sequence: Synthetic oligonucleotide"
  source: /note="Description of Combined DNA/RNA Molecule: Synthetic oligonucleotide"
  source: /note="DNA/RNA"
  modified_base (1)..(1): bicyclic nucleic acid (BNA)
  modified_base (2)..(2): 5-methyl modified nucleotide
  modified_base (14)..(14): 5-methyl modified nucleotide
  modified_base (19)..(19): 5-methyl modified nucleotide
  source: /note="3' tri-ethylene glycol (TEG)"
tcaaggaagauggcauuucuag

SEQ ID NO: 13475 - RNA, 18 nt, Artificial Sequence
  source: /note="Description of Artificial Sequence: Synthetic oligonucleotide"
  source: /note="RNA"
  modified_base (1)..(1): bicyclic nucleic acid (BNA)
  modified_base (9)..(9): 5-methyl modified nucleotide
  modified_base (13)..(13): 5-methyl modified nucleotide
  modified_base (14)..(14): 5-methyl modified nucleotide
  modified_base (18)..(18): 5-methyl modified nucleotide
  source: /note="3' tri-ethylene glycol (TEG)"
gguaaguucuguccaagc

SEQ ID NO: 13476 - RNA, 18 nt, Artificial Sequence
  source: /note="Description of Artificial Sequence: Synthetic oligonucleotide"
  source: /note="RNA"
  modified_base (1)..(1): bicyclic nucleic acid (BNA)
  modified_base (8)..(8): 5-methyl modified nucleotide
  modified_base (12)..(12): 5-methyl modified nucleotide
  modified_base (13)..(13): 5-methyl modified nucleotide
  modified_base (17)..(17): 5-methyl modified nucleotide
  modified_base (18)..(18): 5-methyl modified nucleotide
  source: /note="3' tri-ethylene glycol (TEG)"
guaaguucuguccaagcc

SEQ ID NO: 13477 - RNA, 18 nt, Artificial Sequence
  source: /note="Description of Artificial Sequence: Synthetic oligonucleotide"
  source: /note="RNA"
  modified_base (1)..(1): bicyclic nucleic acid (BNA)
  modified_base (4)..(4): 5-methyl modified nucleotide
  modified_base (13)..(13): 5-methyl modified nucleotide
  modified_base (17)..(17): 5-methyl modified nucleotide
  modified_base (18)..(18): 5-methyl modified nucleotide
  source: /note="3' tri-ethylene glycol (TEG)"
agucgguaaguucugucc

SEQ ID NO: 13478 - RNA, 18 nt, Artificial Sequence
  source: /note="Description of Artificial Sequence: Synthetic oligonucleotide"
  source: /note="RNA"
  modified_base (1)..(1): 5-methyl bicyclic nucleic acid
  modified_base (5)..(5): 5-methyl modified nucleotide
  modified_base (6)..(6): 5-methyl modified nucleotide
  modified_base (10)..(10): 5-methyl modified nucleotide
  modified_base (11)..(11): 5-methyl modified nucleotide
  modified_base (12)..(12): 5-methyl modified nucleotide
  source: /note="3' tri-ethylene glycol (TEG)"
cuguccaagcccgguuga

SEQ ID NO: 13479 - DNA, 15 bp, Artificial Sequence
  source: /note="Description of Artificial Sequence: Synthetic oligonucleotide"
  source: /note="Description of Combined DNA/RNA Molecule: Synthetic oligonucleotide"
  source: /note="DNA/RNA"
  modified_base (1)..(1): bicyclic nucleic acid (BNA)
  modified_base (7)..(7): 5-methyl modified nucleotide
  modified_base (11)..(11): 5-methyl modified nucleotide
  modified_base (12)..(12): 5-methyl modified nucleotide
  source: /note="3' tri-ethylene glycol (TEG)"
taaguucuguccaag

SEQ ID NO: 13480 - DNA, 20 bp, Artificial Sequence
  source: /note="Description of Artificial Sequence: Synthetic oligonucleotide"
  source: /note="Description of Combined DNA/RNA Molecule: Synthetic oligonucleotide"
  source: /note="DNA/RNA"
  modified_base (1)..(1): bicyclic nucleic acid (BNA)
  modified_base (3)..(3): 5-methyl modified nucleotide
  modified_base (7)..(7): 5-methyl modified nucleotide
  modified_base (8)..(8): 5-methyl modified nucleotide
  modified_base (12)..(12): 5-methyl modified nucleotide
  modified_base (13)..(13): 5-methyl modified nucleotide
  modified_base (14)..(14): 5-methyl modified nucleotide
  source: /note="3' tri-ethylene glycol (TEG)"
tucuguccaagcccgguuga

SEQ ID NO: 13481 - DNA, 19 bp, Artificial Sequence
  source: /note="Description of Artificial Sequence: Synthetic oligonucleotide"
  source: /note="Description of Combined DNA/RNA Molecule: Synthetic oligonucleotide"
  source: /note="DNA/RNA"
  modified_base (1)..(1): bicyclic nucleic acid (BNA)
  modified_base (3)..(3): 5-methyl modified nucleotide
  modified_base (7)..(7): 5-methyl modified nucleotide
  modified_base (8)..(8): 5-methyl modified nucleotide
  modified_base (12)..(12): 5-methyl modified nucleotide
  modified_base (13)..(13): 5-methyl modified nucleotide
  modified_base (14)..(14): 5-methyl modified nucleotide
  source: /note="3' tri-ethylene glycol (TEG)"
tucuguccaagcccgguug

SEQ ID NO: 13482 - DNA, 18 bp, Artificial Sequence
  source: /note="Description of Artificial Sequence: Synthetic oligonucleotide"
  source: /note="Description of Combined DNA/RNA Molecule: Synthetic oligonucleotide"
  source: /note="DNA/RNA"
  modified_base (1)..(1): bicyclic nucleic acid (BNA)
  modified_base (3)..(3): 5-methyl modified nucleotide
  modified_base (7)..(7): 5-methyl modified nucleotide
  modified_base (8)..(8): 5-methyl modified nucleotide
  modified_base (12)..(12): 5-methyl modified nucleotide
  modified_base (13)..(13): 5-methyl modified nucleotide
  modified_base (14)..(14): 5-methyl modified nucleotide
  source: /note="3' tri-ethylene glycol (TEG)"
tucuguccaagcccgguu

SEQ ID NO: 13483 - DNA, 17 bp, Artificial Sequence
  source: /note="Description of Artificial Sequence: Synthetic oligonucleotide"
  source: /note="Description of Combined DNA/RNA Molecule: Synthetic oligonucleotide"
  source: /note="DNA/RNA"
  modified_base (1)..(1): bicyclic nucleic acid (BNA)
  modified_base (3)..(3): 5-methyl modified nucleotide
  modified_base (7)..(7): 5-methyl modified nucleotide
  modified_base (8)..(8): 5-methyl modified nucleotide
  modified_base (12)..(12): 5-methyl modified nucleotide
  modified_base (13)..(13): 5-methyl modified nucleotide
  modified_base (14)..(14): 5-methyl modified nucleotide
  source: /note="3' tri-ethylene glycol (TEG)"
tucuguccaagcccggu

SEQ ID NO: 13484 - DNA, 16 bp, Artificial Sequence
  source: /note="Description of Artificial Sequence: Synthetic oligonucleotide"
  source: /note="Description of Combined DNA/RNA Molecule: Synthetic oligonucleotide"
  source: /note="DNA/RNA"
  modified_base (1)..(1): bicyclic nucleic acid (BNA)
  modified_base (3)..(3): 5-methyl modified nucleotide
  modified_base (7)..(7): 5-methyl modified nucleotide
  modified_base (8)..(8): 5-methyl modified nucleotide
  modified_base (12)..(12): 5-methyl modified nucleotide
  modified_base (13)..(13): 5-methyl modified nucleotide
  modified_base (14)..(14): 5-methyl modified nucleotide
  source: /note="3' tri-ethylene glycol (TEG)"
tucuguccaagcccgg

SEQ ID NO: 13485 - DNA, 15 bp, Artificial Sequence
  source: /note="Description of Artificial Sequence: Synthetic oligonucleotide"
  source: /note="Description of Combined DNA/RNA Molecule: Synthetic oligonucleotide"
  source: /note="DNA/RNA"
  modified_base (1)..(1): bicyclic nucleic acid (BNA)
  modified_base (3)..(3): 5-methyl modified nucleotide
  modified_base (7)..(7): 5-methyl modified nucleotide
  modified_base (8)..(8): 5-methyl modified nucleotide
  modified_base (12)..(12): 5-methyl modified nucleotide
  modified_base (13)..(13): 5-methyl modified nucleotide
  modified_base (14)..(14): 5-methyl modified nucleotide
  source: /note="3' tri-ethylene glycol (TEG)"
tucuguccaagcccg

SEQ ID NO: 13486 - DNA, 14 bp, Artificial Sequence
  source: /note="Description of Artificial Sequence: Synthetic oligonucleotide"
  source: /note="Description of Combined DNA/RNA Molecule: Synthetic oligonucleotide"
  source: /note="DNA/RNA"
  modified_base (1)..(1): bicyclic nucleic acid (BNA)
  modified_base (3)..(3): 5-methyl modified nucleotide
  modified_base (7)..(7): 5-methyl modified nucleotide
  modified_base (8)..(8): 5-methyl modified nucleotide
  modified_base (12)..(12): 5-methyl modified nucleotide
  modified_base (13)..(13): 5-methyl modified nucleotide
  modified_base (14)..(14): 5-methyl modified nucleotide
  source: /note="3' tri-ethylene glycol (TEG)"
tucuguccaagccc

SEQ ID NO: 13487 - DNA, 13 bp, Artificial Sequence
  source: /note="Description of Artificial Sequence: Synthetic oligonucleotide"
  source: /note="Description of Combined DNA/RNA Molecule: Synthetic oligonucleotide"
  source: /note="DNA/RNA"
  modified_base (1)..(1): bicyclic nucleic acid (BNA)
  modified_base (3)..(3): 5-methyl modified nucleotide
  modified_base (7)..(7): 5-methyl modified nucleotide
  modified_base (8)..(8): 5-methyl modified nucleotide
  modified_base (12)..(12): 5-methyl modified nucleotide
  modified_base (13)..(13): 5-methyl modified nucleotide
  source: /note="3' tri-ethylene glycol (TEG)"
tucuguccaagcc

SEQ ID NO: 13488 - DNA, 12 bp, Artificial Sequence
  source: /note="Description of Artificial Sequence: Synthetic oligonucleotide"
  source: /note="Description of Combined DNA/RNA Molecule: Synthetic oligonucleotide"
  source: /note="DNA/RNA"
  modified_base (1)..(1): bicyclic nucleic acid (BNA)
  modified_base (3)..(3): 5-methyl modified nucleotide
  modified_base (7)..(7): 5-methyl modified nucleotide
  modified_base (8)..(8): 5-methyl modified nucleotide
  modified_base (12)..(12): 5-methyl modified nucleotide
  source: /note="3' tri-ethylene glycol (TEG)"
tucuguccaagc

SEQ ID NO: 13489 - DNA, 11 bp, Artificial Sequence
  source: /note="Description of Artificial Sequence: Synthetic oligonucleotide"
  source: /note="Description of Combined DNA/RNA Molecule: Synthetic oligonucleotide"
  source: /note="DNA/RNA"
  modified_base (1)..(1): bicyclic nucleic acid (BNA)
  modified_base (3)..(3): 5-methyl modified nucleotide
  modified_base (7)..(7): 5-methyl modified nucleotide
  modified_base (8)..(8): 5-methyl modified nucleotide
  source: /note="3' tri-ethylene glycol (TEG)"
tucuguccaag

SEQ ID NO: 13490 - DNA, 10 bp, Artificial Sequence
  source: /note="Description of Artificial Sequence: Synthetic oligonucleotide"
  source: /note="Description of Combined DNA/RNA Molecule: Synthetic oligonucleotide"
  source: /note="DNA/RNA"
  modified_base (1)..(1): bicyclic nucleic acid (BNA)
  modified_base (3)..(3): 5-methyl modified nucleotide
  modified_base (7)..(7): 5-methyl modified nucleotide
  modified_base (8)..(8): 5-methyl modified nucleotide
  source: /note="3' tri-ethylene glycol (TEG)"
tucuguccaa

SEQ ID NO: 13491 - DNA, 9 bp, Artificial Sequence
  source: /note="Description of Artificial Sequence: Synthetic oligonucleotide"
  source: /note="Description of Combined DNA/RNA Molecule: Synthetic oligonucleotide"
  source: /note="DNA/RNA"
  modified_base (1)..(1): bicyclic nucleic acid (BNA)
  modified_base (3)..(3): 5-methyl modified nucleotide
  modified_base (7)..(7): 5-methyl modified nucleotide
  modified_base (8)..(8): 5-methyl modified nucleotide
  source: /note="3' tri-ethylene glycol (TEG)"
tucugucca

SEQ ID NO: 13492 - DNA, 8 bp, Artificial Sequence
  source: /note="Description of Artificial Sequence: Synthetic oligonucleotide"
  source: /note="Description of Combined DNA/RNA Molecule: Synthetic oligonucleotide"
  source: /note="DNA/RNA"
  modified_base (1)..(1): bicyclic nucleic acid (BNA)
  modified_base (3)..(3): 5-methyl modified nucleotide
  modified_base (7)..(7): 5-methyl modified nucleotide
  modified_base (8)..(8): 5-methyl modified nucleotide
  source: /note="3' tri-ethylene glycol (TEG)"
tucugucc

SEQ ID NO: 13493 - DNA, 19 bp, Artificial Sequence
  source: /note="Description of Artificial Sequence: Synthetic oligonucleotide"
  source: /note="Description of Combined DNA/RNA Molecule: Synthetic oligonucleotide"
  source: /note="DNA/RNA"
  modified_base (1)..(1): bicyclic nucleic acid (BNA)
  modified_base (2)..(2): 5-methyl modified nucleotide
  modified_base (6)..(6): 5-methyl modified nucleotide
  modified_base (7)..(7): 5-methyl modified nucleotide
  modified_base (11)..(11): 5-methyl modified nucleotide
  modified_base (12)..(12): 5-methyl modified nucleotide
  modified_base (13)..(13): 5-methyl modified nucleotide
  source: /note="3' tri-ethylene glycol (TEG)"
tcuguccaagcccgguuga

SEQ ID NO: 13494 - DNA, 18 bp, Artificial Sequence
  source: /note="Description of Artificial Sequence: Synthetic oligonucleotide"
  source: /note="Description of Combined DNA/RNA Molecule: Synthetic oligonucleotide"
  source: /note="DNA/RNA"
  modified_base (1)..(1): bicyclic nucleic acid (BNA)
  modified_base (2)..(2): 5-methyl modified nucleotide
  modified_base (6)..(6): 5-methyl modified nucleotide
  modified_base (7)..(7): 5-methyl modified nucleotide
  modified_base (11)..(11): 5-methyl modified nucleotide
  modified_base (12)..(12): 5-methyl modified nucleotide
  modified_base (13)..(13): 5-methyl modified nucleotide
  source: /note="3' tri-ethylene glycol (TEG)"
tcuguccaagcccgguug

SEQ ID NO: 13495 - DNA, 17 bp, Artificial Sequence
  source: /note="Description of Artificial Sequence: Synthetic oligonucleotide"
  source: /note="Description of Combined DNA/RNA Molecule: Synthetic oligonucleotide"
  source: /note="DNA/RNA"
  modified_base (1)..(1): bicyclic nucleic acid (BNA)
  modified_base (2)..(2): 5-methyl modified nucleotide
  modified_base (6)..(6): 5-methyl modified nucleotide
  modified_base (7)..(7): 5-methyl modified nucleotide
  modified_base (11)..(11): 5-methyl modified nucleotide
  modified_base (12)..(12): 5-methyl modified nucleotide
  modified_base (13)..(13): 5-methyl modified nucleotide
  source: /note="3' tri-ethylene glycol (TEG)"
tcuguccaagcccgguu

SEQ ID NO: 13496 - DNA, 16 bp, Artificial Sequence
  source: /note="Description of Artificial Sequence: Synthetic oligonucleotide"
  source: /note="Description of Combined DNA/RNA Molecule: Synthetic oligonucleotide"
  source: /note="DNA/RNA"
  modified_base (1)..(1): bicyclic nucleic acid (BNA)
  modified_base (2)..(2): 5-methyl modified nucleotide
  modified_base (6)..(6): 5-methyl modified nucleotide
  modified_base (7)..(7): 5-methyl modified nucleotide
  modified_base (11)..(11): 5-methyl modified nucleotide
  modified_base (12)..(12): 5-methyl modified nucleotide
  modified_base (13)..(13): 5-methyl modified nucleotide
  source: /note="3' tri-ethylene glycol (TEG)"
tcuguccaagcccggu

SEQ ID NO: 13497 - DNA, 15 bp, Artificial Sequence
  source: /note="Description of Artificial Sequence: Synthetic oligonucleotide"
  source: /note="Description of Combined DNA/RNA Molecule: Synthetic oligonucleotide"
  source: /note="DNA/RNA"
  modified_base (1)..(1): bicyclic nucleic acid (BNA)
  modified_base (2)..(2): 5-methyl modified nucleotide
  modified_base (6)..(6): 5-methyl modified nucleotide
  modified_base (7)..(7): 5-methyl modified nucleotide
  modified_base (11)..(11): 5-methyl modified nucleotide
  modified_base (12)..(12): 5-methyl modified nucleotide
  modified_base (13)..(13): 5-methyl modified nucleotide
  source: /note="3' tri-ethylene glycol (TEG)"
tcuguccaagcccgg

SEQ ID NO: 13498 - DNA, 14 bp, Artificial Sequence
  source: /note="Description of Artificial Sequence: Synthetic oligonucleotide"
  source: /note="Description of Combined DNA/RNA Molecule: Synthetic oligonucleotide"
  source: /note="DNA/RNA"
  modified_base (1)..(1): bicyclic nucleic acid (BNA)
  modified_base (2)..(2): 5-methyl modified nucleotide
  modified_base (6)..(6): 5-methyl modified nucleotide
  modified_base (7)..(7): 5-methyl modified nucleotide
  modified_base (11)..(11): 5-methyl modified nucleotide
  modified_base (12)..(12): 5-methyl modified nucleotide
  modified_base (13)..(13): 5-methyl modified nucleotide
  source: /note="3' tri-ethylene glycol (TEG)"
tcuguccaagcccg

SEQ ID NO: 13499 - DNA, 13 bp, Artificial Sequence
  source: /note="Description of Artificial Sequence: Synthetic oligonucleotide"
  source: /note="Description of Combined DNA/RNA Molecule: Synthetic oligonucleotide"
  source: /note="DNA/RNA"
  modified_base (1)..(1): bicyclic nucleic acid (BNA)
  modified_base (2)..(2): 5-methyl modified nucleotide
  modified_base (6)..(6): 5-methyl modified nucleotide
  modified_base (7)..(7): 5-methyl modified nucleotide
  modified_base (11)..(11): 5-methyl modified nucleotide
  modified_base (12)..(12): 5-methyl modified nucleotide
  modified_base (13)..(13): 5-methyl modified nucleotide
  source: /note="3' tri-ethylene glycol (TEG)"
tcuguccaagccc

SEQ ID NO: 13500 - DNA, 12 bp, Artificial Sequence
  source: /note="Description of Artificial Sequence: Synthetic oligonucleotide"
  source: /note="Description of Combined DNA/RNA Molecule: Synthetic oligonucleotide"
  source: /note="DNA/RNA"
  modified_base (1)..(1): bicyclic nucleic acid (BNA)
  modified_base (2)..(2): 5-methyl modified nucleotide
  modified_base (6)..(6): 5-methyl modified nucleotide
  modified_base (7)..(7): 5-methyl modified nucleotide
  modified_base (11)..(11): 5-methyl modified nucleotide
  modified_base (12)..(12): 5-methyl modified nucleotide
  source: /note="3' tri-ethylene glycol (TEG)"
tcuguccaagcc

SEQ ID NO: 13501 - DNA, 11 bp, Artificial Sequence
  source: /note="Description of Artificial Sequence: Synthetic oligonucleotide"
  source: /note="Description of Combined DNA/RNA Molecule: Synthetic oligonucleotide"
  source: /note="DNA/RNA"
  modified_base (1)..(1): bicyclic nucleic acid (BNA)
  modified_base (2)..(2): 5-methyl modified nucleotide
  modified_base (6)..(6): 5-methyl modified nucleotide
  modified_base (7)..(7): 5-methyl modified nucleotide
  modified_base (11)..(11): 5-methyl modified nucleotide
  source: /note="3' tri-ethylene glycol (TEG)"
tcuguccaagc

SEQ ID NO: 13502 - DNA, 10 bp, Artificial Sequence
  source: /note="Description of Artificial Sequence: Synthetic oligonucleotide"
  source: /note="Description of Combined DNA/RNA Molecule: Synthetic oligonucleotide"
  source: /note="DNA/RNA"
  modified_base (1)..(1): bicyclic nucleic acid (BNA)
  modified_base (2)..(2): 5-methyl modified nucleotide
  modified_base (6)..(6): 5-methyl modified nucleotide
  modified_base (7)..(7): 5-methyl modified nucleotide
  source: /note="3' tri-ethylene glycol (TEG)"
tcuguccaag

SEQ ID NO: 13503 - DNA, 9 bp, Artificial Sequence
  source: /note="Description of Artificial Sequence: Synthetic oligonucleotide"
  source: /note="Description of Combined DNA/RNA Molecule: Synthetic oligonucleotide"
  source: /note="DNA/RNA"
  modified_base (1)..(1): bicyclic nucleic acid (BNA)
  modified_base (2)..(2): 5-methyl modified nucleotide
  modified_base (6)..(6): 5-methyl modified nucleotide
  modified_base (7)..(7): 5-methyl modified nucleotide
  source: /note="3' tri-ethylene glycol (TEG)"
tcuguccaa

SEQ ID NO: 13504 - DNA, 8 bp, Artificial Sequence
  source: /note="Description of Artificial Sequence: Synthetic oligonucleotide"
  source: /note="Description of Combined DNA/RNA Molecule: Synthetic oligonucleotide"
  source: /note="DNA/RNA"
  modified_base (1)..(1): bicyclic nucleic acid (BNA)
  modified_base (2)..(2): 5-methyl modified nucleotide
  modified_base (6)..(6): 5-methyl modified nucleotide
  modified_base (7)..(7): 5-methyl modified nucleotide
  source: /note="3' tri-ethylene glycol (TEG)"
tcugucca

SEQ ID NO: 13505 - RNA, 17 nt, Artificial Sequence
  source: /note="Description of Artificial Sequence: Synthetic oligonucleotide"
  source: /note="RNA"
  modified_base (1)..(1): 5-methyl bicyclic nucleic acid
  modified_base (5)..(5): 5-methyl modified nucleotide
  modified_base (6)..(6): 5-methyl modified nucleotide
  modified_base (10)..(10): 5-methyl modified nucleotide
  modified_base (11)..(11): 5-methyl modified nucleotide
  modified_base (12)..(12): 5-methyl modified nucleotide
  source: /note="3' tri-ethylene glycol (TEG)"
cuguccaagcccgguug

SEQ ID NO: 13506 - RNA, 16 nt, Artificial Sequence
  source: /note="Description of Artificial Sequence: Synthetic oligonucleotide"
  source: /note="RNA"
  modified_base (1)..(1): 5-methyl bicyclic nucleic acid
  modified_base (5)..(5): 5-methyl modified nucleotide
  modified_base (6)..(6): 5-methyl modified nucleotide
  modified_base (10)..(10): 5-methyl modified nucleotide
  modified_base (11)..(11): 5-methyl modified nucleotide
  modified_base (12)..(12): 5-methyl modified nucleotide
  source: /note="3' tri-ethylene glycol (TEG)"
cuguccaagcccgguu

SEQ ID NO: 13507 - RNA, 15 nt, Artificial Sequence
  source: /note="Description of Artificial Sequence: Synthetic oligonucleotide"
  source: /note="RNA"
  modified_base (1)..(1): 5-methyl bicyclic nucleic acid
  modified_base (5)..(5): 5-methyl modified nucleotide
  modified_base (6)..(6): 5-methyl modified nucleotide
  modified_base (10)..(10): 5-methyl modified nucleotide
  modified_base (11)..(11): 5-methyl modified nucleotide
  modified_base (12)..(12): 5-methyl modified nucleotide
  source: /note="3' tri-ethylene glycol (TEG)"
cuguccaagcccggu

SEQ ID NO: 13508 - RNA, 14 nt, Artificial Sequence
  source: /note="Description of Artificial Sequence: Synthetic oligonucleotide"
  source: /note="RNA"
  modified_base (1)..(1): 5-methyl bicyclic nucleic acid
  modified_base (5)..(5): 5-methyl modified nucleotide
  modified_base (6)..(6): 5-methyl modified nucleotide
  modified_base (10)..(10): 5-methyl modified nucleotide
  modified_base (11)..(11): 5-methyl modified nucleotide
  modified_base (12)..(12): 5-methyl modified nucleotide
  source: /note="3' tri-ethylene glycol (TEG)"
cuguccaagcccgg

SEQ ID NO: 13509 - RNA, 13 nt, Artificial Sequence
  source: /note="Description of Artificial Sequence: Synthetic oligonucleotide"
  source: /note="RNA"
  modified_base (1)..(1): 5-methyl bicyclic nucleic acid
  modified_base (5)..(5): 5-methyl modified nucleotide
  modified_base (6)..(6): 5-methyl modified nucleotide
  modified_base (10)..(10): 5-methyl modified nucleotide
  modified_base (11)..(11): 5-methyl modified nucleotide
  modified_base (12)..(12): 5-methyl modified nucleotide
  source: /note="3' tri-ethylene glycol (TEG)"
cuguccaagcccg

SEQ ID NO: 13510 - RNA, 12 nt, Artificial Sequence
  source: /note="Description of Artificial Sequence: Synthetic oligonucleotide"
  source: /note="RNA"
  modified_base (1)..(1): 5-methyl bicyclic nucleic acid
  modified_base (5)..(5): 5-methyl modified nucleotide
  modified_base (6)..(6): 5-methyl modified nucleotide
  modified_base (10)..(10): 5-methyl modified nucleotide
  modified_base (11)..(11): 5-methyl modified nucleotide
  modified_base (12)..(12): 5-methyl modified nucleotide
  source: /note="3' tri-ethylene glycol (TEG)"
cuguccaagccc

SEQ ID NO: 13511 - RNA, 11 nt, Artificial Sequence
  source: /note="Description of Artificial Sequence: Synthetic oligonucleotide"
  source: /note="RNA"
  modified_base (1)..(1): 5-methyl bicyclic nucleic acid
  modified_base (5)..(5): 5-methyl modified nucleotide
  modified_base (6)..(6): 5-methyl modified nucleotide
  modified_base (10)..(10): 5-methyl modified nucleotide
  modified_base (11)..(11): 5-methyl modified nucleotide
  source: /note="3' tri-ethylene glycol (TEG)"
cuguccaagcc

SEQ ID NO: 13512 - RNA, 10 nt, Artificial Sequence
  source: /note="Description of Artificial Sequence: Synthetic oligonucleotide"
  source: /note="RNA"
  modified_base (1)..(1): 5-methyl bicyclic nucleic acid
  modified_base (5)..(5): 5-methyl modified nucleotide
  modified_base (6)..(6): 5-methyl modified nucleotide
  modified_base (10)..(10): 5-methyl modified nucleotide
  source: /note="3' tri-ethylene glycol (TEG)"
cuguccaagc

SEQ ID NO: 13513 - RNA, 9 nt, Artificial Sequence
  source: /note="Description of Artificial Sequence: Synthetic oligonucleotide"
  source: /note="RNA"
  modified_base (1)..(1): 5-methyl bicyclic nucleic acid
  modified_base (5)..(5): 5-methyl modified nucleotide
  modified_base (6)..(6): 5-methyl modified nucleotide
  source: /note="3' tri-ethylene glycol (TEG)"
cuguccaag

SEQ ID NO: 13514 - RNA, 8 nt, Artificial Sequence
  source: /note="Description of Artificial Sequence: Synthetic oligonucleotide"
  source: /note="RNA"
  modified_base (1)..(1): 5-methyl bicyclic nucleic acid
  modified_base (5)..(5): 5-methyl modified nucleotide
  modified_base (6)..(6): 5-methyl modified nucleotide
  source: /note="3' tri-ethylene glycol (TEG)"
cuguccaa

SEQ ID NO: 13515 - RNA, 20 nt, Artificial Sequence
  source: /note="Description of Artificial Sequence: Synthetic oligonucleotide"
  source: /note="RNA"
  modified_base (1)..(1): bicyclic nucleic acid (BNA)
  modified_base (4)..(4): 5-methyl modified nucleotide
  modified_base (8)..(8): 5-methyl modified nucleotide
  modified_base (9)..(9): 5-methyl modified nucleotide
  modified_base (13)..(13): 5-methyl modified nucleotide
  modified_base (14)..(14): 5-methyl modified nucleotide
  modified_base (15)..(15): 5-methyl modified nucleotide
  source: /note="3' tri-ethylene glycol (TEG)"
guucuguccaagcccgguug

SEQ ID NO: 13516 - RNA, 19 nt, Artificial Sequence
  source: /note="Description of Artificial Sequence: Synthetic oligonucleotide"
  source: /note="RNA"
  modified_base (1)..(1): bicyclic nucleic acid (BNA)
  modified_base (4)..(4): 5-methyl modified nucleotide
  modified_base (8)..(8): 5-methyl modified nucleotide
  modified_base (9)..(9): 5-methyl modified nucleotide
  modified_base (13)..(13): 5-methyl modified nucleotide
  modified_base (14)..(14): 5-methyl modified nucleotide
  modified_base (15)..(15): 5-methyl modified nucleotide
  source: /note="3' tri-ethylene glycol (TEG)"
guucuguccaagcccgguu

SEQ ID NO: 13517 - RNA, 18 nt, Artificial Sequence
  source: /note="Description of Artificial Sequence: Synthetic oligonucleotide"
  source: /note="RNA"
  modified_base (1)..(1): bicyclic nucleic acid (BNA)
  modified_base (4)..(4): 5-methyl modified nucleotide
  modified_base (8)..(8): 5-methyl modified nucleotide
  modified_base (9)..(9): 5-methyl modified nucleotide
  modified_base (13)..(13): 5-methyl modified nucleotide
  modified_base (14)..(14): 5-methyl modified nucleotide
  modified_base (15)..(15): 5-methyl modified nucleotide
  source: /note="3' tri-ethylene glycol (TEG)"
guucuguccaagcccggu

SEQ ID NO: 13518 - RNA, 17 nt, Artificial Sequence
  source: /note="Description of Artificial Sequence: Synthetic oligonucleotide"
  source: /note="RNA"
  modified_base (1)..(1): bicyclic nucleic acid (BNA)
  modified_base (4)..(4): 5-methyl modified nucleotide
  modified_base (8)..(8): 5-methyl modified nucleotide
  modified_base (9)..(9): 5-methyl modified nucleotide
  modified_base (13)..(13): 5-methyl modified nucleotide
  modified_base (14)..(14): 5-methyl modified nucleotide
  modified_base (15)..(15): 5-methyl modified nucleotide
  source: /note="3' tri-ethylene glycol (TEG)"
guucuguccaagcccgg

SEQ ID NO: 13519 - RNA, 16 nt, Artificial Sequence
  source: /note="Description of Artificial Sequence: Synthetic oligonucleotide"
  source: /note="RNA"
  modified_base (1)..(1): bicyclic nucleic acid (BNA)
  modified_base (4)..(4): 5-methyl modified nucleotide
  modified_base (8)..(8): 5-methyl modified nucleotide
  modified_base (9)..(9): 5-methyl modified nucleotide
  modified_base (13)..(13): 5-methyl modified nucleotide
  modified_base (14)..(14): 5-methyl modified nucleotide
  modified_base (15)..(15): 5-methyl modified nucleotide
  source: /note="3' tri-ethylene glycol (TEG)"
guucuguccaagcccg

SEQ ID NO: 13520 - RNA, 15 nt, Artificial Sequence
  source: /note="Description of Artificial Sequence: Synthetic oligonucleotide"
  source: /note="RNA"
  modified_base (1)..(1): bicyclic nucleic acid (BNA)
  modified_base (4)..(4): 5-methyl modified nucleotide
  modified_base (8)..(8): 5-methyl modified nucleotide
  modified_base (9)..(9): 5-methyl modified nucleotide
  modified_base (13)..(13): 5-methyl modified nucleotide
  modified_base (14)..(14): 5-methyl modified nucleotide
  modified_base (15)..(15): 5-methyl modified nucleotide
  source: /note="3' tri-ethylene glycol (TEG)"
guucuguccaagccc

SEQ ID NO: 13521 - RNA, 14 nt, Artificial Sequence
  source: /note="Description of Artificial Sequence: Synthetic oligonucleotide"
  source: /note="RNA"
  modified_base (1)..(1): bicyclic nucleic acid (BNA)
  modified_base (4)..(4): 5-methyl modified nucleotide
  modified_base (8)..(8): 5-methyl modified nucleotide
  modified_base (9)..(9): 5-methyl modified nucleotide
  modified_base (13)..(13): 5-methyl modified nucleotide
  modified_base (14)..(14): 5-methyl modified nucleotide
  source: /note="3' tri-ethylene glycol (TEG)"
guucuguccaagcc

SEQ ID NO: 13522 - RNA, 13 nt, Artificial Sequence
  source: /note="Description of Artificial Sequence: Synthetic oligonucleotide"
  source: /note="RNA"
  modified_base (1)..(1): bicyclic nucleic acid (BNA)
  modified_base (4)..(4): 5-methyl modified nucleotide
  modified_base (8)..(8): 5-methyl modified nucleotide
  modified_base (9)..(9): 5-methyl modified nucleotide
  modified_base (13)..(13): 5-methyl modified nucleotide
  source: /note="3' tri-ethylene glycol (TEG)"
guucuguccaagc

SEQ ID NO: 13523 - RNA, 12 nt, Artificial Sequence
  source: /note="Description of Artificial Sequence: Synthetic oligonucleotide"
  source: /note="RNA"
  modified_base (1)..(1): bicyclic nucleic acid (BNA)
  modified_base (4)..(4): 5-methyl modified nucleotide
  modified_base (8)..(8): 5-methyl modified nucleotide
  modified_base (9)..(9): 5-methyl modified nucleotide
  source: /note="3' tri-ethylene glycol (TEG)"
guucuguccaag

SEQ ID NO: 13524 - RNA, 11 nt, Artificial Sequence
  source: /note="Description of Artificial Sequence: Synthetic oligonucleotide"
  source: /note="RNA"
  modified_base (1)..(1): bicyclic nucleic acid (BNA)
  modified_base (4)..(4): 5-methyl modified nucleotide
  modified_base (8)..(8): 5-methyl modified nucleotide
  modified_base (9)..(9): 5-methyl modified nucleotide
  source: /note="3' tri-ethylene glycol (TEG)"
guucuguccaa

SEQ ID NO: 13525 - RNA, 10 nt, Artificial Sequence
  source: /note="Description of Artificial Sequence: Synthetic oligonucleotide"
  source: /note="RNA"
  modified_base (1)..(1): bicyclic nucleic acid (BNA)
  modified_base (4)..(4): 5-methyl modified nucleotide
  modified_base (8)..(8): 5-methyl modified nucleotide
  modified_base (9)..(9): 5-methyl modified nucleotide
  source: /note="3' tri-ethylene glycol (TEG)"
guucugucca

SEQ ID NO: 13526 - RNA, 9 nt, Artificial Sequence
  source: /note="Description of Artificial Sequence: Synthetic oligonucleotide"
  source: /note="RNA"
  modified_base (1)..(1): bicyclic nucleic acid (BNA)
  modified_base (4)..(4): 5-methyl modified nucleotide
  modified_base (8)..(8): 5-methyl modified nucleotide
  modified_base (9)..(9): 5-methyl modified nucleotide
  source: /note="3' tri-ethylene glycol (TEG)"
guucugucc

SEQ ID NO: 13527 - RNA, 8 nt, Artificial Sequence
  source: /note="Description of Artificial Sequence: Synthetic oligonucleotide"
  source: /note="RNA"
  modified_base (1)..(1): bicyclic nucleic acid (BNA)
  modified_base (4)..(4): 5-methyl modified nucleotide
  modified_base (8)..(8): 5-methyl modified nucleotide
  source: /note="3' tri-ethylene glycol (TEG)"
guucuguc

SEQ ID NO: 13528 - RNA, 20 nt, Artificial Sequence
  source: /note="Description of Artificial Sequence: Synthetic oligonucleotide"
  source: /note="RNA"
  modified_base (1)..(1): bicyclic nucleic acid (BNA)
  modified_base (5)..(5): 5-methyl modified nucleotide
  modified_base (9)..(9): 5-methyl modified nucleotide
  modified_base (10)..(10): 5-methyl modified nucleotide
  modified_base (14)..(14): 5-methyl modified nucleotide
  modified_base (15)..(15): 5-methyl modified nucleotide
  modified_base (16)..(16): 5-methyl modified nucleotide
  source: /note="3' tri-ethylene glycol (TEG)"
aguucuguccaagcccgguu

SEQ ID NO: 13529 - RNA, 19 nt, Artificial Sequence
  source: /note="Description of Artificial Sequence: Synthetic oligonucleotide"
  source: /note="RNA"
  modified_base (1)..(1): bicyclic nucleic acid (BNA)
  modified_base (5)..(5): 5-methyl modified nucleotide
  modified_base (9)..(9): 5-methyl modified nucleotide
  modified_base (10)..(10): 5-methyl modified nucleotide
  modified_base (14)..(14): 5-methyl modified nucleotide
  modified_base (15)..(15): 5-methyl modified nucleotide
  modified_base (16)..(16): 5-methyl modified nucleotide
  source: /note="3' tri-ethylene glycol (TEG)"
aguucuguccaagcccggu

SEQ ID NO: 13530 - RNA, 18 nt, Artificial Sequence
  source: /note="Description of Artificial Sequence: Synthetic oligonucleotide"
  source: /note="RNA"
  modified_base (1)..(1): bicyclic nucleic acid (BNA)
  modified_base (5)..(5): 5-methyl modified nucleotide
  modified_base (9)..(9): 5-methyl modified nucleotide
  modified_base (10)..(10): 5-methyl modified nucleotide
  modified_base (14)..(14): 5-methyl modified nucleotide
  modified_base (15)..(15): 5-methyl modified nucleotide
  modified_base (16)..(16): 5-methyl modified nucleotide
  source: /note="3' tri-ethylene glycol (TEG)"
aguucuguccaagcccgg

SEQ ID NO: 13531 - RNA, 17 nt, Artificial Sequence
  source: /note="Description of Artificial Sequence: Synthetic oligonucleotide"
  source: /note="RNA"
  modified_base (1)..(1): bicyclic nucleic acid (BNA)
  modified_base (5)..(5): 5-methyl modified nucleotide
  modified_base (9)..(9): 5-methyl modified nucleotide
  modified_base (10)..(10): 5-methyl modified nucleotide
  modified_base (14)..(14): 5-methyl modified nucleotide
  modified_base (15)..(15): 5-methyl modified nucleotide
  modified_base (16)..(16): 5-methyl modified nucleotide
  source: /note="3' tri-ethylene glycol (TEG)"
aguucuguccaagcccg

SEQ ID NO: 13532 - RNA, 16 nt, Artificial Sequence
  source: /note="Description of Artificial Sequence: Synthetic oligonucleotide"
  source: /note="RNA"
  modified_base (1)..(1): bicyclic nucleic acid (BNA)
  modified_base (5)..(5): 5-methyl modified nucleotide
  modified_base (9)..(9): 5-methyl modified nucleotide
  modified_base (10)..(10): 5-methyl modified nucleotide
  modified_base (14)..(14): 5-methyl modified nucleotide
  modified_base (15)..(15): 5-methyl modified nucleotide
  modified_base (16)..(16): 5-methyl modified nucleotide
  source: /note="3' tri-ethylene glycol (TEG)"
aguucuguccaagccc

SEQ ID NO: 13533 - RNA, 15 nt, Artificial Sequence
  source: /note="Description of Artificial Sequence: Synthetic oligonucleotide"
  source: /note="RNA"
  modified_base (1)..(1): bicyclic nucleic acid (BNA)
  modified_base (5)..(5): 5-methyl modified nucleotide
  modified_base (9)..(9): 5-methyl modified nucleotide
  modified_base (10)..(10): 5-methyl modified nucleotide
  modified_base (14)..(14): 5-methyl modified nucleotide
  modified_base (15)..(15): 5-methyl modified nucleotide
  source: /note="3' tri-ethylene glycol (TEG)"
aguucuguccaagcc

SEQ ID NO: 13534 - RNA, 14 nt, Artificial Sequence
  source: /note="Description of Artificial Sequence: Synthetic oligonucleotide"
  source: /note="RNA"
  modified_base (1)..(1): bicyclic nucleic acid (BNA)
  modified_base (5)..(5): 5-methyl modified nucleotide
  modified_base (9)..(9): 5-methyl modified nucleotide
  modified_base (10)..(10): 5-methyl modified nucleotide
  modified_base (14)..(14): 5-methyl modified nucleotide
  source: /note="3' tri-ethylene glycol (TEG)"
aguucuguccaagc

SEQ ID NO: 13535 - RNA, 13 nt, Artificial Sequence
  source: /note="Description of Artificial Sequence: Synthetic oligonucleotide"
  source: /note="RNA"
  modified_base (1)..(1): bicyclic nucleic acid (BNA)
  modified_base (5)..(5): 5-methyl modified nucleotide
  modified_base (9)..(9): 5-methyl modified nucleotide
  modified_base (10)..(10): 5-methyl modified nucleotide
  source: /note="3' tri-ethylene glycol (TEG)"
aguucuguccaag

SEQ ID NO: 13536 - RNA, 12 nt, Artificial Sequence
  source: /note="Description of Artificial Sequence: Synthetic oligonucleotide"
  source: /note="RNA"
  modified_base (1)..(1): bicyclic nucleic acid (BNA)
  modified_base (5)..(5): 5-methyl modified nucleotide
  modified_base (9)..(9): 5-methyl modified nucleotide
  modified_base (10)..(10): 5-methyl modified nucleotide
  source: /note="3' tri-ethylene glycol (TEG)"
aguucuguccaa

SEQ ID NO: 13537 - RNA, 11 nt, Artificial Sequence
  source: /note="Description of Artificial Sequence: Synthetic oligonucleotide"
  source: /note="RNA"
  modified_base (1)..(1): bicyclic nucleic acid (BNA)
  modified_base (5)..(5): 5-methyl modified nucleotide
  modified_base (9)..(9): 5-methyl modified nucleotide
  modified_base (10)..(10): 5-methyl modified nucleotide
  source: /note="3' tri-ethylene glycol (TEG)"
aguucugucca

SEQ ID NO: 13538 - RNA, 10 nt, Artificial Sequence
  source: /note="Description of Artificial Sequence: Synthetic oligonucleotide"
  source: /note="RNA"
  modified_base (1)..(1): bicyclic nucleic acid (BNA)
  modified_base (5)..(5): 5-methyl modified nucleotide
  modified_base (9)..(9): 5-methyl modified nucleotide
  modified_base (10)..(10): 5-methyl modified nucleotide
  source: /note="3' tri-ethylene glycol (TEG)"
aguucugucc

SEQ ID NO: 13539 - RNA, 9 nt, Artificial Sequence
  source: /note="Description of Artificial Sequence: Synthetic oligonucleotide"
  source: /note="RNA"
  modified_base (1)..(1): bicyclic nucleic acid (BNA)
  modified_base (5)..(5): 5-methyl modified nucleotide
  modified_base (9)..(9): 5-methyl modified nucleotide
  source: /note="3' tri-ethylene glycol (TEG)"
aguucuguc

SEQ ID NO: 13540 - RNA, 8 nt, Artificial Sequence
  source: /note="Description of Artificial Sequence: Synthetic oligonucleotide"
  source: /note="RNA"
  modified_base (1)..(1): bicyclic nucleic acid (BNA)
  modified_base (5)..(5): 5-methyl modified nucleotide
  source: /note="3' tri-ethylene glycol (TEG)"
aguucugu

SEQ ID NO: 13541 - RNA, 20 nt, Artificial Sequence
  source: /note="Description of Artificial Sequence: Synthetic oligonucleotide"
  source: /note="RNA"
  modified_base (1)..(1): bicyclic nucleic acid (BNA)
  modified_base (6)..(6): 5-methyl modified nucleotide
  modified_base (10)..(10): 5-methyl modified nucleotide
  modified_base (11)..(11): 5-methyl modified nucleotide
  modified_base (15)..(15): 5-methyl modified nucleotide
  modified_base (16)..(16): 5-methyl modified nucleotide
  modified_base (17)..(17): 5-methyl modified nucleotide
  source: /note="3' tri-ethylene glycol (TEG)"
aaguucuguccaagcccggu

SEQ ID NO: 13542 - RNA, 19 nt, Artificial Sequence
  source: /note="Description of Artificial Sequence: Synthetic oligonucleotide"
  source: /note="RNA"
  modified_base (1)..(1): bicyclic nucleic acid (BNA)
  modified_base (6)..(6): 5-methyl modified nucleotide
  modified_base (10)..(10): 5-methyl modified nucleotide
  modified_base (11)..(11): 5-methyl modified nucleotide
  modified_base (15)..(15): 5-methyl modified nucleotide
  modified_base (16)..(16): 5-methyl modified nucleotide
  modified_base (17)..(17): 5-methyl modified nucleotide
  source: /note="3' tri-ethylene glycol (TEG)"
aaguucuguccaagcccgg

SEQ ID NO: 13543 - RNA, 18 nt, Artificial Sequence
  source: /note="Description of Artificial Sequence: Synthetic oligonucleotide"
  source: /note="RNA"
  modified_base (1)..(1): bicyclic nucleic acid (BNA)
  modified_base (6)..(6): 5-methyl modified nucleotide
  modified_base (10)..(10): 5-methyl modified nucleotide
  modified_base (11)..(11): 5-methyl modified nucleotide
  modified_base (15)..(15): 5-methyl modified nucleotide
  modified_base (16)..(16): 5-methyl modified nucleotide
  modified_base (17)..(17): 5-methyl modified nucleotide
  source: /note="3' tri-ethylene glycol (TEG)"
aaguucuguccaagcccg

SEQ ID NO: 13544 - RNA, 17 nt, Artificial Sequence
  source: /note="Description of Artificial Sequence: Synthetic oligonucleotide"
  source: /note="RNA"
  modified_base (1)..(1): bicyclic nucleic acid (BNA)
  modified_base (6)..(6): 5-methyl modified nucleotide
  modified_base (10)..(10): 5-methyl modified nucleotide
  modified_base (11)..(11): 5-methyl modified nucleotide
  modified_base (15)..(15): 5-methyl modified nucleotide
  modified_base (16)..(16): 5-methyl modified nucleotide
  modified_base (17)..(17): 5-methyl modified nucleotide
  source: /note="3' tri-ethylene glycol (TEG)"
aaguucuguccaagccc

SEQ ID NO: 13545 - RNA, 16 nt, Artificial Sequence
  source: /note="Description of Artificial Sequence: Synthetic oligonucleotide"
  source: /note="RNA"
  modified_base (1)..(1): bicyclic nucleic acid (BNA)
  modified_base (6)..(6): 5-methyl modified nucleotide
  modified_base (10)..(10): 5-methyl modified nucleotide
  modified_base (11)..(11): 5-methyl modified nucleotide
  modified_base (15)..(15): 5-methyl modified nucleotide
  modified_base (16)..(16): 5-methyl modified nucleotide
  source: /note="3' tri-ethylene glycol (TEG)"
aaguucuguccaagcc

SEQ ID NO: 13546 - RNA, 15 nt, Artificial Sequence
  source: /note="Description of Artificial Sequence: Synthetic oligonucleotide"
  source: /note="RNA"
  modified_base (1)..(1): bicyclic nucleic acid (BNA)
  modified_base (6)..(6): 5-methyl modified nucleotide
  modified_base (10)..(10): 5-methyl modified nucleotide
  modified_base (11)..(11): 5-methyl modified nucleotide
  modified_base (15)..(15): 5-methyl modified nucleotide
  source: /note="3' tri-ethylene glycol (TEG)"
aaguucuguccaagc

SEQ ID NO: 13547 - RNA, 14 nt, Artificial Sequence
  source: /note="Description of Artificial Sequence: Synthetic oligonucleotide"
  source: /note="RNA"
  modified_base (1)..(1): bicyclic nucleic acid (BNA)
  modified_base (6)..(6): 5-methyl modified nucleotide
  modified_base (10)..(10): 5-methyl modified nucleotide
  modified_base (11)..(11): 5-methyl modified nucleotide
  source: /note="3' tri-ethylene glycol (TEG)"
aaguucuguccaag

SEQ ID NO: 13548 - RNA, 13 nt, Artificial Sequence
  source: /note="Description of Artificial Sequence: Synthetic oligonucleotide"
  source: /note="RNA"
  modified_base (1)..(1): bicyclic nucleic acid (BNA)
  modified_base (6)..(6): 5-methyl modified nucleotide
  modified_base (10)..(10): 5-methyl modified nucleotide
  modified_base (11)..(11): 5-methyl modified nucleotide
  source: /note="3' tri-ethylene glycol (TEG)"
aaguucuguccaa

SEQ ID NO: 13549 - RNA, 12 nt, Artificial Sequence
  source: /note="Description of Artificial Sequence: Synthetic oligonucleotide"
  source: /note="RNA"
  modified_base (1)..(1): bicyclic nucleic acid (BNA)
  modified_base (6)..(6): 5-methyl modified nucleotide
  modified_base (10)..(10): 5-methyl modified nucleotide
  modified_base (11)..(11): 5-methyl modified nucleotide
  source: /note="3' tri-ethylene glycol (TEG)"
aaguucugucca

SEQ ID NO: 13550 - RNA, 11 nt, Artificial Sequence
  source: /note="Description of Artificial Sequence: Synthetic oligonucleotide"
  source: /note="RNA"
  modified_base (1)..(1): bicyclic nucleic acid (BNA)
  modified_base (6)..(6): 5-methyl modified nucleotide
  modified_base (10)..(10): 5-methyl modified nucleotide
  modified_base (11)..(11): 5-methyl modified nucleotide
  source: /note="3' tri-ethylene glycol (TEG)"
aaguucugucc

SEQ ID NO: 13551 - RNA, 10 nt, Artificial Sequence
  source: /note="Description of Artificial Sequence: Synthetic oligonucleotide"
  source: /note="RNA"
  modified_base (1)..(1): bicyclic nucleic acid (BNA)
  modified_base (6)..(6): 5-methyl modified nucleotide
  modified_base (10)..(10): 5-methyl modified nucleotide
  source: /note="3' tri-ethylene glycol (TEG)"
aaguucuguc

SEQ ID NO: 13552 - RNA, 9 nt, Artificial Sequence
  source: /note="Description of Artificial Sequence: Synthetic oligonucleotide"
  source: /note="RNA"
  modified_base (1)..(1): bicyclic nucleic acid (BNA)
  modified_base (6)..(6): 5-methyl modified nucleotide
  source: /note="3' tri-ethylene glycol (TEG)"
aaguucugu

SEQ ID NO: 13553 - RNA, 8 nt, Artificial Sequence
  source: /note="Description of Artificial Sequence: Synthetic oligonucleotide"
  source: /note="RNA"
  modified_base (1)..(1): bicyclic nucleic acid (BNA)
  modified_base (6)..(6): 5-methyl modified nucleotide
  source: /note="3' tri-ethylene glycol (TEG)"
aaguucug

SEQ ID NO: 13554 - DNA, 20 bp, Artificial Sequence
  source: /note="Description of Artificial Sequence: Synthetic oligonucleotide"
  source: /note="Description of Combined DNA/RNA Molecule: Synthetic oligonucleotide"
  source: /note="DNA/RNA"
  modified_base (1)..(1): bicyclic nucleic acid (BNA)
  modified_base (7)..(7): 5-methyl modified nucleotide
  modified_base (11)..(11): 5-methyl modified nucleotide
  modified_base (12)..(12): 5-methyl modified nucleotide
  modified_base (16)..(16): 5-methyl modified nucleotide
  modified_base (17)..(17): 5-methyl modified nucleotide
  modified_base (18)..(18): 5-methyl modified nucleotide
  source: /note="3' tri-ethylene glycol (TEG)"
taaguucuguccaagcccgg

SEQ ID NO: 13555 - DNA, 19 bp, Artificial Sequence
  source: /note="Description of Artificial Sequence: Synthetic oligonucleotide"
  source: /note="Description of Combined DNA/RNA Molecule: Synthetic oligonucleotide"
  source: /note="DNA/RNA"
  modified_base (1)..(1): bicyclic nucleic acid (BNA)
  modified_base (7)..(7): 5-methyl modified nucleotide
  modified_base (11)..(11): 5-methyl modified nucleotide
  modified_base (12)..(12): 5-methyl modified nucleotide
  modified_base (16)..(16): 5-methyl modified nucleotide
  modified_base (17)..(17): 5-methyl modified nucleotide
  modified_base (18)..(18): 5-methyl modified nucleotide
  source: /note="3' tri-ethylene glycol (TEG)"
taaguucuguccaagcccg

SEQ ID NO: 13556 - DNA, 18 bp, Artificial Sequence
  source: /note="Description of Artificial Sequence: Synthetic oligonucleotide"
  source: /note="Description of Combined DNA/RNA Molecule: Synthetic oligonucleotide"
  source: /note="DNA/RNA"
  modified_base (1)..(1): bicyclic nucleic acid (BNA)
  modified_base (7)..(7): 5-methyl modified nucleotide
  modified_base (11)..(11): 5-methyl modified nucleotide
  modified_base (12)..(12): 5-methyl modified nucleotide
  modified_base (16)..(16): 5-methyl modified nucleotide
  modified_base (17)..(17): 5-methyl modified nucleotide
  modified_base (18)..(18): 5-methyl modified nucleotide
  source: /note="3' tri-ethylene glycol (TEG)"
taaguucuguccaagccc

SEQ ID NO: 13557 - DNA, 17 bp, Artificial Sequence
  source: /note="Description of Artificial Sequence: Synthetic oligonucleotide"
  source: /note="Description of Combined DNA/RNA Molecule: Synthetic oligonucleotide"
  source: /note="DNA/RNA"
  modified_base (1)..(1): bicyclic nucleic acid (BNA)
  modified_base (7)..(7): 5-methyl modified nucleotide
  modified_base (11)..(11): 5-methyl modified nucleotide
  modified_base (12)..(12): 5-methyl modified nucleotide
  modified_base (16)..(16): 5-methyl modified nucleotide
  modified_base (17)..(17): 5-methyl modified nucleotide
  source: /note="3' tri-ethylene glycol (TEG)"
taaguucuguccaagcc

SEQ ID NO: 13558 - DNA, 16 bp, Artificial Sequence
  source: /note="Description of Artificial Sequence: Synthetic oligonucleotide"
  source: /note="Description of Combined DNA/RNA Molecule: Synthetic oligonucleotide"
  source: /note="DNA/RNA"
  modified_base (1)..(1): bicyclic nucleic acid (BNA)
  modified_base (7)..(7): 5-methyl modified nucleotide
  modified_base (11)..(11): 5-methyl modified nucleotide
  modified_base (12)..(12): 5-methyl modified nucleotide
  modified_base (16)..(16): 5-methyl modified nucleotide
  source: /note="3' tri-ethylene glycol (TEG)"
taaguucuguccaagc

SEQ ID NO: 13559 - DNA, 14 bp, Artificial Sequence
  source: /note="Description of Artificial Sequence: Synthetic oligonucleotide"
  source: /note="Description of Combined DNA/RNA Molecule: Synthetic oligonucleotide"
  source: /note="DNA/RNA"
  modified_base (1)..(1): bicyclic nucleic acid (BNA)
  modified_base (7)..(7): 5-methyl modified nucleotide
  modified_base (11)..(11): 5-methyl modified nucleotide
  modified_base (12)..(12): 5-methyl modified nucleotide
  source: /note="3' tri-ethylene glycol (TEG)"
taaguucuguccaa

SEQ ID NO: 13560 - DNA, 13 bp, Artificial Sequence
  source: /note="Description of Artificial Sequence: Synthetic oligonucleotide"
  source: /note="Description of Combined DNA/RNA Molecule: Synthetic oligonucleotide"
  source: /note="DNA/RNA"
  modified_base (1)..(1): bicyclic nucleic acid (BNA)
  modified_base (7)..(7): 5-methyl modified nucleotide
  modified_base (11)..(11): 5-methyl modified nucleotide
  modified_base (12)..(12): 5-methyl modified nucleotide
  source: /note="3' tri-ethylene glycol (TEG)"
taaguucugucca

SEQ ID NO: 13561 - DNA, 12 bp, Artificial Sequence
  source: /note="Description of Artificial Sequence: Synthetic oligonucleotide"
  source: /note="Description of Combined DNA/RNA Molecule: Synthetic oligonucleotide"
  source: /note="DNA/RNA"
  modified_base (1)..(1): bicyclic nucleic acid (BNA)
  modified_base (7)..(7): 5-methyl modified nucleotide
  modified_base (11)..(11): 5-methyl modified nucleotide
  modified_base (12)..(12): 5-methyl modified nucleotide
  source: /note="3' tri-ethylene glycol (TEG)"
taaguucugucc

SEQ ID NO: 13562 - DNA, 11 bp, Artificial Sequence
  source: /note="Description of Artificial Sequence: Synthetic oligonucleotide"
  source: /note="Description of Combined DNA/RNA Molecule: Synthetic oligonucleotide"
  source: /note="DNA/RNA"
  modified_base (1)..(1): bicyclic nucleic acid (BNA)
  modified_base (7)..(7): 5-methyl modified nucleotide
  modified_base (11)..(11): 5-methyl modified nucleotide
  source: /note="3' tri-ethylene glycol (TEG)"
taaguucuguc

SEQ ID NO: 13563 - DNA, 10 bp, Artificial Sequence
  source: /note="Description of Artificial Sequence: Synthetic oligonucleotide"
  source: /note="Description of Combined DNA/RNA Molecule: Synthetic oligonucleotide"
  source: /note="DNA/RNA"
  modified_base (1)..(1): bicyclic nucleic acid (BNA)
  modified_base (7)..(7): 5-methyl modified nucleotide
  source: /note="3' tri-ethylene glycol (TEG)"
taaguucugu

SEQ ID NO: 13564 - DNA, 9 bp, Artificial Sequence
  source: /note="Description of Artificial Sequence: Synthetic oligonucleotide"
  source: /note="Description of Combined DNA/RNA Molecule: Synthetic oligonucleotide"
  source: /note="DNA/RNA"
  modified_base (1)..(1): bicyclic nucleic acid (BNA)
  modified_base (7)..(7): 5-methyl modified nucleotide
  source: /note="3' tri-ethylene glycol (TEG)"
taaguucug

SEQ ID NO: 13565 - DNA, 8 bp, Artificial Sequence
  source: /note="Description of Artificial Sequence: Synthetic oligonucleotide"
  source: /note="Description of Combined DNA/RNA Molecule: Synthetic oligonucleotide"
  source: /note="DNA/RNA"
  modified_base (1)..(1): bicyclic nucleic acid (BNA)
  modified_base (7)..(7): 5-methyl modified nucleotide
  source: /note="3' tri-ethylene glycol (TEG)"
taaguucu

SEQ ID NO: 13566 - RNA, 20 nt, Artificial Sequence
  source: /note="Description of Artificial Sequence: Synthetic oligonucleotide"
  source: /note="RNA"
  modified_base (1)..(1): bicyclic nucleic acid (BNA)
  modified_base (8)..(8): 5-methyl modified nucleotide
  modified_base (12)..(12): 5-methyl modified nucleotide
  modified_base (13)..(13): 5-methyl modified nucleotide
  modified_base (17)..(17): 5-methyl modified nucleotide
  modified_base (18)..(18): 5-methyl modified nucleotide
  modified_base (19)..(19): 5-methyl modified nucleotide
  source: /note="3' tri-ethylene glycol (TEG)"
guaaguucuguccaagcccg

SEQ ID NO: 13567 - RNA, 19 nt, Artificial Sequence
  source: /note="Description of Artificial Sequence: Synthetic oligonucleotide"
  source: /note="RNA"
  modified_base (1)..(1): bicyclic nucleic acid (BNA)
  modified_base (8)..(8): 5-methyl modified nucleotide
  modified_base (12)..(12): 5-methyl modified nucleotide
  modified_base (13)..(13): 5-methyl modified nucleotide
  modified_base (17)..(17): 5-methyl modified nucleotide
  modified_base (18)..(18): 5-methyl modified nucleotide
  modified_base (19)..(19): 5-methyl modified nucleotide
  source: /note="3' tri-ethylene glycol (TEG)"
guaaguucuguccaagccc

SEQ ID NO: 13568 - RNA, 17 nt, Artificial Sequence
  source: /note="Description of Artificial Sequence: Synthetic oligonucleotide"
  source: /note="RNA"
  modified_base (1)..(1): bicyclic nucleic acid (BNA)
  modified_base (8)..(8): 5-methyl modified nucleotide
  modified_base (12)..(12): 5-methyl modified nucleotide
  modified_base (13)..(13): 5-methyl modified nucleotide
  modified_base (17)..(17): 5-methyl modified nucleotide
  source: /note="3' tri-ethylene glycol (TEG)"
guaaguucuguccaagc

SEQ ID NO: 13569 - RNA, 16 nt, Artificial Sequence
  source: /note="Description of Artificial Sequence: Synthetic oligonucleotide"
  source: /note="RNA"
  modified_base (1)..(1): bicyclic nucleic acid (BNA)
  modified_base (8)..(8): 5-methyl modified nucleotide
  modified_base (12)..(12): 5-methyl modified nucleotide
  modified_base (13)..(13): 5-methyl modified nucleotide
  source: /note="3' tri-ethylene glycol (TEG)"
guaaguucuguccaag

SEQ ID NO: 13570 - RNA, 15 nt, Artificial Sequence
  source: /note="Description of Artificial Sequence: Synthetic oligonucleotide"
  source: /note="RNA"
  modified_base (1)..(1): bicyclic nucleic acid (BNA)
  modified_base (8)..(8): 5-methyl modified nucleotide
  modified_base (12)..(12): 5-methyl modified nucleotide
  modified_base (13)..(13): 5-methyl modified nucleotide
  source: /note="3' tri-ethylene glycol (TEG)"
guaaguucuguccaa

SEQ ID NO: 13571 - RNA, 14 nt, Artificial Sequence
  source: /note="Description of Artificial Sequence: Synthetic oligonucleotide"
  source: /note="RNA"
  modified_base (1)..(1): bicyclic nucleic acid (BNA)
  modified_base (8)..(8): 5-methyl modified nucleotide
  modified_base (12)..(12): 5-methyl modified nucleotide
  modified_base (13)..(13): 5-methyl modified nucleotide
  source: /note="3' tri-ethylene glycol (TEG)"
guaaguucugucca

SEQ ID NO: 13572 - RNA, 13 nt, Artificial Sequence
  source: /note="Description of Artificial Sequence: Synthetic oligonucleotide"
  source: /note="RNA"
  modified_base (1)..(1): bicyclic nucleic acid (BNA)
  modified_base (8)..(8): 5-methyl modified nucleotide
  modified_base (12)..(12): 5-methyl modified nucleotide
  modified_base (13)..(13): 5-methyl modified nucleotide
  source: /note="3' tri-ethylene glycol (TEG)"
guaaguucugucc

SEQ ID NO: 13573 - RNA, 12 nt, Artificial Sequence
  source: /note="Description of Artificial Sequence: Synthetic oligonucleotide"
  source: /note="RNA"
  modified_base (1)..(1): bicyclic nucleic acid (BNA)
  modified_base (8)..(8): 5-methyl modified nucleotide
  modified_base (12)..(12): 5-methyl modified nucleotide
  source: /note="3' tri-ethylene glycol (TEG)"
guaaguucuguc

SEQ ID NO: 13574 - RNA, 11 nt, Artificial Sequence
  source: /note="Description of Artificial Sequence: Synthetic oligonucleotide"
  source: /note="RNA"
  modified_base (1)..(1): bicyclic nucleic acid (BNA)
  modified_base (8)..(8): 5-methyl modified nucleotide
  source: /note="3' tri-ethylene glycol (TEG)"
guaaguucugu

SEQ ID NO: 13575 - RNA, 10 nt, Artificial Sequence
  source: /note="Description of Artificial Sequence: Synthetic oligonucleotide"
  source: /note="RNA"
  modified_base (1)..(1): bicyclic nucleic acid (BNA)
  modified_base (8)..(8): 5-methyl modified nucleotide
  source: /note="3' tri-ethylene glycol (TEG)"
guaaguucug

SEQ ID NO: 13576 - RNA, 9 nt, Artificial Sequence
  source: /note="Description of Artificial Sequence: Synthetic oligonucleotide"
  source: /note="RNA"
  modified_base (1)..(1): bicyclic nucleic acid (BNA)
  modified_base (8)..(8): 5-methyl modified nucleotide
  source: /note="3' tri-ethylene glycol (TEG)"
guaaguucu

SEQ ID NO: 13577 - RNA, 8 nt, Artificial Sequence
  source: /note="Description of Artificial Sequence: Synthetic oligonucleotide"
  source: /note="RNA"
  modified_base (1)..(1): bicyclic nucleic acid (BNA)
  modified_base (8)..(8): 5-methyl modified nucleotide
  source: /note="3' tri-ethylene glycol (TEG)"
guaaguuc

SEQ ID NO: 13578 - RNA, 20 nt, Artificial Sequence
  source: /note="Description of Artificial Sequence: Synthetic oligonucleotide"
  source: /note="RNA"
  modified_base (1)..(1): bicyclic nucleic acid (BNA)
  modified_base (9)..(9): 5-methyl modified nucleotide
  modified_base (13)..(13): 5-methyl modified nucleotide
  modified_base (14)..(14): 5-methyl modified nucleotide
  modified_base (18)..(18): 5-methyl modified nucleotide
  modified_base (19)..(19): 5-methyl modified nucleotide
  modified_base (20)..(20): 5-methyl modified nucleotide
  source: /note="3' tri-ethylene glycol (TEG)"
gguaaguucuguccaagccc

SEQ ID NO: 13579 - RNA, 19 nt, Artificial Sequence
  source: /note="Description of Artificial Sequence: Synthetic oligonucleotide"
  source: /note="RNA"
  modified_base (1)..(1): bicyclic nucleic acid (BNA)
  modified_base (9)..(9): 5-methyl modified nucleotide
  modified_base (13)..(13): 5-methyl modified nucleotide
  modified_base (14)..(14): 5-methyl modified nucleotide
  modified_base (18)..(18): 5-methyl modified nucleotide
  modified_base (19)..(19): 5-methyl modified nucleotide
  source: /note="3' tri-ethylene glycol (TEG)"
gguaaguucuguccaagcc

SEQ ID NO: 13580 - RNA, 17 nt, Artificial Sequence
  source: /note="Description of Artificial Sequence: Synthetic oligonucleotide"
  source: /note="RNA"
  modified_base (1)..(1): bicyclic nucleic acid (BNA)
  modified_base (9)..(9): 5-methyl modified nucleotide
  modified_base (13)..(13): 5-methyl modified nucleotide
  modified_base (14)..(14): 5-methyl modified nucleotide
  source: /note="3' tri-ethylene glycol (TEG)"
gguaaguucuguccaag

SEQ ID NO: 13581 - RNA, 16 nt, Artificial Sequence
  source: /note="Description of Artificial Sequence: Synthetic oligonucleotide"
  source: /note="RNA"
  modified_base (1)..(1): bicyclic nucleic acid (BNA)
  modified_base (9)..(9): 5-methyl modified nucleotide
  modified_base (13)..(13): 5-methyl modified nucleotide
  modified_base (14)..(14): 5-methyl modified nucleotide
  source: /note="3' tri-ethylene glycol (TEG)"
gguaaguucuguccaa

SEQ ID NO: 13582 - RNA, 15 nt, Artificial Sequence
  source: /note="Description of Artificial Sequence: Synthetic oligonucleotide"
  source: /note="RNA"
  modified_base (1)..(1): bicyclic nucleic acid (BNA)
  modified_base (9)..(9): 5-methyl modified nucleotide
  modified_base (13)..(13): 5-methyl modified nucleotide
  modified_base (14)..(14): 5-methyl modified nucleotide
  source: /note="3' tri-ethylene glycol (TEG)"
gguaaguucugucca

SEQ ID NO: 13583 - RNA, 14 nt, Artificial Sequence
  source: /note="Description of Artificial Sequence: Synthetic oligonucleotide"
  source: /note="RNA"
  modified_base (1)..(1): bicyclic nucleic acid (BNA)
  modified_base (9)..(9): 5-methyl modified nucleotide
  modified_base (13)..(13): 5-methyl modified nucleotide
  modified_base (14)..(14): 5-methyl modified nucleotide
  source: /note="3' tri-ethylene glycol (TEG)"
gguaaguucugucc

SEQ ID NO: 13584 - RNA, 13 nt, Artificial Sequence
  source: /note="Description of Artificial Sequence: Synthetic oligonucleotide"
  source: /note="RNA"
  modified_base (1)..(1): bicyclic nucleic acid (BNA)
  modified_base (9)..(9): 5-methyl modified nucleotide
  modified_base (13)..(13): 5-methyl modified nucleotide
  source: /note="3' tri-ethylene glycol (TEG)"
gguaaguucuguc

SEQ ID NO: 13585 - RNA, 12 nt, Artificial Sequence
  source: /note="Description of Artificial Sequence: Synthetic oligonucleotide"
  source: /note="RNA"
  modified_base (1)..(1): bicyclic nucleic acid (BNA)
  modified_base (9)..(9): 5-methyl modified nucleotide
  source: /note="3' tri-ethylene glycol (TEG)"
gguaaguucugu

SEQ ID NO: 13586 - RNA, 11 nt, Artificial Sequence
  source: /note="Description of Artificial Sequence: Synthetic oligonucleotide"
  source: /note="RNA"
  modified_base (1)..(1): bicyclic nucleic acid (BNA)
  modified_base (9)..(9): 5-methyl modified nucleotide
  source: /note="3' tri-ethylene glycol (TEG)"
gguaaguucug

SEQ ID NO: 13587 - RNA, 10 nt, Artificial Sequence
  source: /note="Description of Artificial Sequence: Synthetic oligonucleotide"
  source: /note="RNA"
  modified_base (1)..(1): bicyclic nucleic acid (BNA)
  modified_base (9)..(9): 5-methyl modified nucleotide
  source: /note="3' tri-ethylene glycol (TEG)"
gguaaguucu

SEQ ID NO: 13588 - RNA, 9 nt, Artificial Sequence
  source: /note="Description of Artificial Sequence: Synthetic oligonucleotide"
  source: /note="RNA"
  modified_base (1)..(1): bicyclic nucleic acid (BNA)
  modified_base (9)..(9): 5-methyl modified nucleotide
  source: /note="3' tri-ethylene glycol (TEG)"
gguaaguuc

SEQ ID NO: 13589 - RNA, 8 nt, Artificial Sequence
  source: /note="Description of Artificial Sequence: Synthetic oligonucleotide"
  source: /note="RNA"
  modified_base (1)..(1): bicyclic nucleic acid (BNA)
  source: /note="3' tri-ethylene glycol (TEG)"
gguaaguu

SEQ ID NO: 13590 - RNA, 20 nt, Artificial Sequence
  source: /note="Description of Artificial Sequence: Synthetic oligonucleotide"
  source: /note="RNA"
  modified_base (1)..(1): 5-methyl bicyclic nucleic acid
  modified_base (10)..(10): 5-methyl modified nucleotide
  modified_base (14)..(14): 5-methyl modified nucleotide
  modified_base (15)..(15): 5-methyl modified nucleotide
  modified_base (19)..(19): 5-methyl modified nucleotide
  modified_base (20)..(20): 5-methyl modified nucleotide
  source: /note="3' tri-ethylene glycol (TEG)"
cgguaaguucuguccaagcc

SEQ ID NO: 13591 - RNA, 19 nt, Artificial Sequence
  source: /note="Description of Artificial Sequence: Synthetic oligonucleotide"
  source: /note="RNA"
  modified_base (1)..(1): 5-methyl bicyclic nucleic acid
  modified_base (10)..(10): 5-methyl modified nucleotide
  modified_base (14)..(14): 5-methyl modified nucleotide
  modified_base (15)..(15): 5-methyl modified nucleotide
  modified_base (19)..(19): 5-methyl modified nucleotide
  source: /note="3' tri-ethylene glycol (TEG)"
cgguaaguucuguccaagc

SEQ ID NO: 13592 - RNA, 18 nt, Artificial Sequence
  source: /note="Description of Artificial Sequence: Synthetic oligonucleotide"
  source: /note="RNA"
  modified_base (1)..(1): 5-methyl bicyclic nucleic acid
  modified_base (10)..(10): 5-methyl modified nucleotide
  modified_base (14)..(14): 5-methyl modified nucleotide
  modified_base (15)..(15): 5-methyl modified nucleotide
  source: /note="3' tri-ethylene glycol (TEG)"
cgguaaguucuguccaag

SEQ ID NO: 13593 - RNA, 17 nt, Artificial Sequence
  source: /note="Description of Artificial Sequence: Synthetic oligonucleotide"
  source: /note="RNA"
  modified_base (1)..(1): 5-methyl bicyclic nucleic acid
  modified_base (10)..(10): 5-methyl modified nucleotide
  modified_base (14)..(14): 5-methyl modified nucleotide
  modified_base (15)..(15): 5-methyl modified nucleotide
  source: /note="3' tri-ethylene glycol (TEG)"
cgguaaguucuguccaa

SEQ ID NO: 13594 - RNA, 16 nt, Artificial Sequence
  source: /note="Description of Artificial Sequence: Synthetic oligonucleotide"
  source: /note="RNA"
  modified_base (1)..(1): 5-methyl bicyclic nucleic acid
  modified_base (10)..(10): 5-methyl modified nucleotide
  modified_base (14)..(14): 5-methyl modified nucleotide
  modified_base (15)..(15): 5-methyl modified nucleotide
  source: /note="3' tri-ethylene glycol (TEG)"
cgguaaguucugucca

SEQ ID NO: 13595 - RNA, 15 nt, Artificial Sequence
  source: /note="Description of Artificial Sequence: Synthetic oligonucleotide"
  source: /note="RNA"
  modified_base (1)..(1): 5-methyl bicyclic nucleic acid
  modified_base (10)..(10): 5-methyl modified nucleotide
  modified_base (14)..(14): 5-methyl modified nucleotide
  modified_base (15)..(15): 5-methyl modified nucleotide
  source: /note="3' tri-ethylene glycol (TEG)"
cgguaaguucugucc

SEQ ID NO: 13596 - RNA, 14 nt, Artificial Sequence
  source: /note="Description of Artificial Sequence: Synthetic oligonucleotide"
  source: /note="RNA"
  modified_base (1)..(1): 5-methyl bicyclic nucleic acid
  modified_base (10)..(10): 5-methyl modified nucleotide
  modified_base (14)..(14): 5-methyl modified nucleotide
  source: /note="3' tri-ethylene glycol (TEG)"
cgguaaguucuguc

SEQ ID NO: 13597 - RNA, 13 nt, Artificial Sequence
  source: /note="Description of Artificial Sequence: Synthetic oligonucleotide"
  source: /note="RNA"
  modified_base (1)..(1): 5-methyl bicyclic nucleic acid
  modified_base (10)..(10): 5-methyl modified nucleotide
  source: /note="3' tri-ethylene glycol (TEG)"
cgguaaguucugu

SEQ ID NO: 13598 - RNA, 12 nt, Artificial Sequence
  source: /note="Description of Artificial Sequence: Synthetic oligonucleotide"
  source: /note="RNA"
  modified_base (1)..(1): 5-methyl bicyclic nucleic acid
  modified_base (10)..(10): 5-methyl modified nucleotide
  source: /note="3' tri-ethylene glycol (TEG)"
cgguaaguucug

SEQ ID NO: 13599 - RNA, 11 nt, Artificial Sequence
  source: /note="Description of Artificial Sequence: Synthetic oligonucleotide"
  source: /note="RNA"
  modified_base (1)..(1): 5-methyl bicyclic nucleic acid
  modified_base (10)..(10): 5-methyl modified nucleotide
  source: /note="3' tri-ethylene glycol (TEG)"
cgguaaguucu

SEQ ID NO: 13600 - RNA, 10 nt, Artificial Sequence
  source: /note="Description of Artificial Sequence: Synthetic oligonucleotide"
  source: /note="RNA"
  modified_base (1)..(1): 5-methyl bicyclic nucleic acid
  modified_base (10)..(10): 5-methyl modified nucleotide
  source: /note="3' tri-ethylene glycol (TEG)"
cgguaaguuc

SEQ ID NO: 13601 - RNA, 9 nt, Artificial Sequence
  source: /note="Description of Artificial Sequence: Synthetic oligonucleotide"
  source: /note="RNA"
  modified_base (1)..(1): 5-methyl bicyclic nucleic acid
  source: /note="3' tri-ethylene glycol (TEG)"
cgguaaguu

SEQ ID NO: 13602 - RNA, 8 nt, Artificial Sequence
  source: /note="Description of Artificial Sequence: Synthetic oligonucleotide"
  source: /note="RNA"
  modified_base (1)..(1): 5-methyl bicyclic nucleic acid
  source: /note="3' tri-ethylene glycol (TEG)"
cgguaagu

SEQ ID NO: 13603 - DNA, 20 bp, Artificial Sequence
  source: /note="Description of Artificial Sequence: Synthetic oligonucleotide"
  source: /note="Description of Combined DNA/RNA Molecule: Synthetic oligonucleotide"
  source: /note="DNA/RNA"
  modified_base (1)..(1): bicyclic nucleic acid (BNA)
  modified_base (2)..(2): 5-methyl modified nucleotide
  modified_base (11)..(11): 5-methyl modified nucleotide
  modified_base (15)..(15): 5-methyl modified nucleotide
  modified_base (16)..(16): 5-methyl modified nucleotide
  modified_base (20)..(20): 5-methyl modified nucleotide
  source: /note="3' tri-ethylene glycol (TEG)"
tcgguaaguucuguccaagc

SEQ ID NO: 13604 - DNA, 19 bp, Artificial Sequence
  source: /note="Description of Artificial Sequence: Synthetic oligonucleotide"
  source: /note="Description of Combined DNA/RNA Molecule: Synthetic oligonucleotide"
  source: /note="DNA/RNA"
  modified_base (1)..(1): bicyclic nucleic acid (BNA)
  modified_base (2)..(2): 5-methyl modified nucleotide
  modified_base (11)..(11): 5-methyl modified nucleotide
  modified_base (15)..(15): 5-methyl modified nucleotide
  modified_base (16)..(16): 5-methyl modified nucleotide
  source: /note="3' tri-ethylene glycol (TEG)"
tcgguaaguucuguccaag

SEQ ID NO: 13605 - DNA, 18 bp, Artificial Sequence
  source: /note="Description of Artificial Sequence: Synthetic oligonucleotide"
  source: /note="Description of Combined DNA/RNA Molecule: Synthetic oligonucleotide"
  source: /note="DNA/RNA"
  modified_base (1)..(1): bicyclic nucleic acid (BNA)
  modified_base (2)..(2): 5-methyl modified nucleotide
  modified_base (11)..(11): 5-methyl modified nucleotide
  modified_base (15)..(15): 5-methyl modified nucleotide
  modified_base (16)..(16): 5-methyl modified nucleotide
  source: /note="3' tri-ethylene glycol (TEG)"
tcgguaaguucuguccaa

SEQ ID NO: 13606 - DNA, 17 bp, Artificial Sequence
  source: /note="Description of Artificial Sequence: Synthetic oligonucleotide"
  source: /note="Description of Combined DNA/RNA Molecule: Synthetic oligonucleotide"
  source: /note="DNA/RNA"
  modified_base (1)..(1): bicyclic nucleic acid (BNA)
  modified_base (2)..(2): 5-methyl modified nucleotide
  modified_base (11)..(11): 5-methyl modified nucleotide
  modified_base (15)..(15): 5-methyl modified nucleotide
  modified_base (16)..(16): 5-methyl modified nucleotide
  source: /note="3' tri-ethylene glycol (TEG)"
tcgguaaguucugucca

SEQ ID NO: 13607 - DNA, 16 bp, Artificial Sequence
  source: /note="Description of Artificial Sequence: Synthetic oligonucleotide"
  source: /note="Description of Combined DNA/RNA Molecule: Synthetic oligonucleotide"
  source: /note="DNA/RNA"
  modified_base (1)..(1): bicyclic nucleic acid (BNA)
  modified_base (2)..(2): 5-methyl modified nucleotide
  modified_base (11)..(11): 5-methyl modified nucleotide
  modified_base (15)..(15): 5-methyl modified nucleotide
  modified_base (16)..(16): 5-methyl modified nucleotide
  source: /note="3' tri-ethylene glycol (TEG)"
tcgguaaguucugucc

SEQ ID NO: 13608 - DNA, 15 bp, Artificial Sequence
  source: /note="Description of Artificial Sequence: Synthetic oligonucleotide"
  source: /note="Description of Combined DNA/RNA Molecule: Synthetic oligonucleotide"
  source: /note="DNA/RNA"
  modified_base (1)..(1): bicyclic nucleic acid (BNA)
  modified_base (2)..(2): 5-methyl modified nucleotide
  modified_base (11)..(11): 5-methyl modified nucleotide
  modified_base (15)..(15): 5-methyl modified nucleotide
  source: /note="3' tri-ethylene glycol (TEG)"
tcgguaaguucuguc

SEQ ID NO: 13609 - DNA, 14 bp, Artificial Sequence
  source: /note="Description of Artificial Sequence: Synthetic oligonucleotide"
  source: /note="Description of Combined DNA/RNA Molecule: Synthetic oligonucleotide"
  source: /note="DNA/RNA"
  modified_base (1)..(1): bicyclic nucleic acid (BNA)
  modified_base (2)..(2): 5-methyl modified nucleotide
  modified_base (11)..(11): 5-methyl modified nucleotide
  source: /note="3' tri-ethylene glycol (TEG)"
tcgguaaguucugu

SEQ ID NO: 13610 - DNA, 13 bp, Artificial Sequence
  source: /note="Description of Artificial Sequence: Synthetic oligonucleotide"
  source: /note="Description of Combined DNA/RNA Molecule: Synthetic oligonucleotide"
  source: /note="DNA/RNA"
  modified_base (1)..(1): bicyclic nucleic acid (BNA)
  modified_base (2)..(2): 5-methyl modified nucleotide
  modified_base (11)..(11): 5-methyl modified nucleotide
  source: /note="3' tri-ethylene glycol (TEG)"
tcgguaaguucug

SEQ ID NO: 13611 - DNA, 12 bp, Artificial Sequence
  source: /note="Description of Artificial Sequence: Synthetic oligonucleotide"
  source: /note="Description of Combined DNA/RNA Molecule: Synthetic oligonucleotide"
  source: /note="DNA/RNA"
  modified_base (1)..(1): bicyclic nucleic acid (BNA)
  modified_base (2)..(2): 5-methyl modified nucleotide
  modified_base (11)..(11): 5-methyl modified nucleotide
  source: /note="3' tri-ethylene glycol (TEG)"
tcgguaaguucu

SEQ ID NO: 13612 - DNA, 11 bp, Artificial Sequence
  source: /note="Description of Artificial Sequence: Synthetic oligonucleotide"
  source: /note="Description of Combined DNA/RNA Molecule: Synthetic oligonucleotide"
  source: /note="DNA/RNA"
  modified_base (1)..(1): bicyclic nucleic acid (BNA)
  modified_base (2)..(2): 5-methyl modified nucleotide
  modified_base (11)..(11): 5-methyl modified nucleotide
  source: /note="3' tri-ethylene glycol (TEG)"
tcgguaaguuc

SEQ ID NO: 13613 - DNA, 10 bp, Artificial Sequence
  source: /note="Description of Artificial Sequence: Synthetic oligonucleotide"
  source: /note="Description of Combined DNA/RNA Molecule: Synthetic oligonucleotide"
  source: /note="DNA/RNA"
  modified_base (1)..(1): bicyclic nucleic acid (BNA)
  modified_base (2)..(2): 5-methyl modified nucleotide
  source: /note="3' tri-ethylene glycol (TEG)"
tcgguaaguu

SEQ ID NO: 13614 - DNA, 9 bp, Artificial Sequence
  source: /note="Description of Artificial Sequence: Synthetic oligonucleotide"
  source: /note="Description of Combined DNA/RNA Molecule: Synthetic oligonucleotide"
  source: /note="DNA/RNA"
  modified_base (1)..(1): bicyclic nucleic acid (BNA)
  modified_base (2)..(2): 5-methyl modified nucleotide
  source: /note="3' tri-ethylene glycol (TEG)"
tcgguaagu

SEQ ID NO: 13615 - RNA, 20 nt, Artificial Sequence
  source: /note="Description of Artificial Sequence: Synthetic oligonucleotide"
  source: /note="RNA"
  modified_base (1)..(1): bicyclic nucleic acid (BNA)
  modified_base (3)..(3): 5-methyl modified nucleotide
  modified_base (12)..(12): 5-methyl modified nucleotide
  modified_base (16)..(16): 5-methyl modified nucleotide
  modified_base (17)..(17): 5-methyl modified nucleotide
  source: /note="3' tri-ethylene glycol (TEG)"
gucgguaaguucuguccaag

SEQ ID NO: 13616 - RNA, 19 nt, Artificial Sequence
  source: /note="Description of Artificial Sequence: Synthetic oligonucleotide"
  source: /note="RNA"
  modified_base (1)..(1): bicyclic nucleic acid (BNA)
  modified_base (3)..(3): 5-methyl modified nucleotide
  modified_base (12)..(12): 5-methyl modified nucleotide
  modified_base (16)..(16): 5-methyl modified nucleotide
  modified_base (17)..(17): 5-methyl modified nucleotide
  source: /note="3' tri-ethylene glycol (TEG)"
gucgguaaguucuguccaa

SEQ ID NO: 13617 - RNA, 18 nt, Artificial Sequence
  source: /note="Description of Artificial Sequence: Synthetic oligonucleotide"
  source: /note="RNA"
  modified_base (1)..(1): bicyclic nucleic acid (BNA)
  modified_base (3)..(3): 5-methyl modified nucleotide
  modified_base (12)..(12): 5-methyl modified nucleotide
  modified_base (16)..(16): 5-methyl modified nucleotide
  modified_base (17)..(17): 5-methyl modified nucleotide
  source: /note="3' tri-ethylene glycol (TEG)"
gucgguaaguucugucca

SEQ ID NO: 13618 - RNA, 17 nt, Artificial Sequence
  source: /note="Description of Artificial Sequence: Synthetic oligonucleotide"
  source: /note="RNA"
  modified_base (1)..(1): bicyclic nucleic acid (BNA)
  modified_base (3)..(3): 5-methyl modified nucleotide
  modified_base (12)..(12): 5-methyl modified nucleotide
  modified_base (16)..(16): 5-methyl modified nucleotide
  modified_base (17)..(17): 5-methyl modified nucleotide
  source: /note="3' tri-ethylene glycol (TEG)"
gucgguaaguucugucc

SEQ ID NO: 13619 - RNA, 16 nt, Artificial Sequence
  source: /note="Description of Artificial Sequence: Synthetic oligonucleotide"
  source: /note="RNA"
  modified_base (1)..(1): bicyclic nucleic acid (BNA)
  modified_base (3)..(3): 5-methyl modified nucleotide
  modified_base (12)..(12): 5-methyl modified nucleotide
  modified_base (16)..(16): 5-methyl modified nucleotide
  source: /note="3' tri-ethylene glycol (TEG)"
gucgguaaguucuguc

SEQ ID NO: 13620 - RNA, 15 nt, Artificial Sequence
  source: /note="Description of Artificial Sequence: Synthetic oligonucleotide"
  source: /note="RNA"
  modified_base (1)..(1): bicyclic nucleic acid (BNA)
  modified_base (3)..(3): 5-methyl modified nucleotide
  modified_base (12)..(12): 5-methyl modified nucleotide
  source: /note="3' tri-ethylene glycol (TEG)"
gucgguaaguucugu

SEQ ID NO: 13621 - RNA, 14 nt, Artificial Sequence
  source: /note="Description of Artificial Sequence: Synthetic oligonucleotide"
  source: /note="RNA"
  modified_base (1)..(1): bicyclic nucleic acid (BNA)
  modified_base (3)..(3): 5-methyl modified nucleotide
  modified_base (12)..(12): 5-methyl modified nucleotide
  source: /note="3' tri-ethylene glycol (TEG)"
gucgguaaguucug

SEQ ID NO: 13622 - RNA, 13 nt, Artificial Sequence
  source: /note="Description of Artificial Sequence: Synthetic oligonucleotide"
  source: /note="RNA"
  modified_base (1)..(1): bicyclic nucleic acid (BNA)
  modified_base (3)..(3): 5-methyl modified nucleotide
  modified_base (12)..(12): 5-methyl modified nucleotide
  source: /note="3' tri-ethylene glycol (TEG)"
gucgguaaguucu

SEQ ID NO: 13623 - RNA, 12 nt, Artificial Sequence
  source: /note="Description of Artificial Sequence: Synthetic oligonucleotide"
  source: /note="RNA"
  modified_base (1)..(1): bicyclic nucleic acid (BNA)
  modified_base (3)..(3): 5-methyl modified nucleotide
  modified_base (12)..(12): 5-methyl modified nucleotide
  source: /note="3' tri-ethylene glycol (TEG)"
gucgguaaguuc

SEQ ID NO: 13624 - RNA, 11 nt, Artificial Sequence
  source: /note="Description of Artificial Sequence: Synthetic oligonucleotide"
  source: /note="RNA"
  modified_base (1)..(1): bicyclic nucleic acid (BNA)
  modified_base (3)..(3): 5-methyl modified nucleotide
  source: /note="3' tri-ethylene glycol (TEG)"
gucgguaaguu

SEQ ID NO: 13625 - RNA, 10 nt, Artificial Sequence
  source: /note="Description of Artificial Sequence: Synthetic oligonucleotide"
  source: /note="RNA"
  modified_base (1)..(1): bicyclic nucleic acid (BNA)
  modified_base (3)..(3): 5-methyl modified nucleotide
  source: /note="3' tri-ethylene glycol (TEG)"
gucgguaagu

SEQ ID NO: 13626 - RNA, 20 nt, Artificial Sequence
  source: /note="Description of Artificial Sequence: Synthetic oligonucleotide"
  source: /note="RNA"
  modified_base (1)..(1): bicyclic nucleic acid (BNA)
  modified_base (4)..(4): 5-methyl modified nucleotide
  modified_base (13)..(13): 5-methyl modified nucleotide
  modified_base (17)..(17): 5-methyl modified nucleotide
  modified_base (18)..(18): 5-methyl modified nucleotide
  source: /note="3' tri-ethylene glycol (TEG)"
agucgguaaguucuguccaa

SEQ ID NO: 13627 - RNA, 19 nt, Artificial Sequence
  source: /note="Description of Artificial Sequence: Synthetic oligonucleotide"
  source: /note="RNA"
  modified_base (1)..(1): bicyclic nucleic acid (BNA)
  modified_base (4)..(4): 5-methyl modified nucleotide
  modified_base (13)..(13): 5-methyl modified nucleotide
  modified_base (17)..(17): 5-methyl modified nucleotide
  modified_base (18)..(18): 5-methyl modified nucleotide
  source: /note="3' tri-ethylene glycol (TEG)"
agucgguaaguucugucca

SEQ ID NO: 13628 - RNA, 17 nt, Artificial Sequence
  source: /note="Description of Artificial Sequence: Synthetic oligonucleotide"
  source: /note="RNA"
  modified_base (1)..(1): bicyclic nucleic acid (BNA)
  modified_base (4)..(4): 5-methyl modified nucleotide
  modified_base (13)..(13): 5-methyl modified nucleotide
  modified_base (17)..(17): 5-methyl modified nucleotide
  source: /note="3' tri-ethylene glycol (TEG)"
agucgguaaguucuguc

SEQ ID NO: 13629 - RNA, 16 nt, Artificial Sequence
  source: /note="Description of Artificial Sequence: Synthetic oligonucleotide"
  source: /note="RNA"
  modified_base (1)..(1): bicyclic nucleic acid (BNA)
  modified_base (4)..(4): 5-methyl modified nucleotide
  modified_base (13)..(13): 5-methyl modified nucleotide
  source: /note="3' tri-ethylene glycol (TEG)"
agucgguaaguucugu

SEQ ID NO: 13630 - RNA, 15 nt, Artificial Sequence
  source: /note="Description of Artificial Sequence: Synthetic oligonucleotide"
  source: /note="RNA"
  modified_base (1)..(1): bicyclic nucleic acid (BNA)
  modified_base (4)..(4): 5-methyl modified nucleotide
  modified_base (13)..(13): 5-methyl modified nucleotide
  source: /note="3' tri-ethylene glycol (TEG)"
agucgguaaguucug

SEQ ID NO: 13631 - RNA, 14 nt, Artificial Sequence
  source: /note="Description of Artificial Sequence: Synthetic oligonucleotide"
  source: /note="RNA"
  modified_base (1)..(1): bicyclic nucleic acid (BNA)
  modified_base (4)..(4): 5-methyl modified nucleotide
  modified_base (13)..(13): 5-methyl modified nucleotide
  source: /note="3' tri-ethylene glycol (TEG)"
agucgguaaguucu

SEQ ID NO: 13632 - RNA, 13 nt, Artificial Sequence
  source: /note="Description of Artificial Sequence: Synthetic oligonucleotide"
  source: /note="RNA"
  modified_base (1)..(1): bicyclic nucleic acid (BNA)
  modified_base (4)..(4): 5-methyl modified nucleotide
  modified_base (13)..(13): 5-methyl modified nucleotide
  source: /note="3' tri-ethylene glycol (TEG)"
agucgguaaguuc

SEQ ID NO: 13633 - RNA, 12 nt, Artificial Sequence
  source: /note="Description of Artificial Sequence: Synthetic oligonucleotide"
  source: /note="RNA"
  modified_base (1)..(1): bicyclic nucleic acid (BNA)
  modified_base (4)..(4): 5-methyl modified nucleotide
  source: /note="3' tri-ethylene glycol (TEG)"
agucgguaaguu

SEQ ID NO: 13634 - RNA, 11 nt, Artificial Sequence
  source: /note="Description of Artificial Sequence: Synthetic oligonucleotide"
  source: /note="RNA"
  modified_base (1)..(1): bicyclic nucleic acid (BNA)
  modified_base (4)..(4): 5-methyl modified nucleotide
  source: /note="3' tri-ethylene glycol (TEG)"
agucgguaagu

SEQ ID NO: 13635 - RNA, 20 nt, Artificial Sequence
  source: /note="Description of Artificial Sequence: Synthetic oligonucleotide"
  source: /note="RNA"
  modified_base (1)..(1): 5-methyl bicyclic nucleic acid
  modified_base (5)..(5): 5-methyl modified nucleotide
  modified_base (14)..(14): 5-methyl modified nucleotide
  modified_base (18)..(18): 5-methyl modified nucleotide
  modified_base (19)..(19): 5-methyl modified nucleotide
  source: /note="3' tri-ethylene glycol (TEG)"
cagucgguaaguucugucca

SEQ ID NO: 13636 - RNA, 19 nt, Artificial Sequence
  source: /note="Description of Artificial Sequence: Synthetic oligonucleotide"
  source: /note="RNA"
  modified_base (1)..(1): 5-methyl bicyclic nucleic acid
  modified_base (5)..(5): 5-methyl modified nucleotide
  modified_base (14)..(14): 5-methyl modified nucleotide
  modified_base (18)..(18): 5-methyl modified nucleotide
  modified_base (19)..(19): 5-methyl modified nucleotide
  source: /note="3' tri-ethylene glycol (TEG)"
cagucgguaaguucugucc

SEQ ID NO: 13637 - RNA, 18 nt, Artificial Sequence
  source: /note="Description of Artificial Sequence: Synthetic oligonucleotide"
  source: /note="RNA"
  modified_base (1)..(1): 5-methyl bicyclic nucleic acid
  modified_base (5)..(5): 5-methyl modified nucleotide
  modified_base (14)..(14): 5-methyl modified nucleotide
  modified_base (18)..(18): 5-methyl modified nucleotide
  source: /note="3' tri-ethylene glycol (TEG)"
cagucgguaaguucuguc

SEQ ID NO: 13638 - RNA, 17 nt, Artificial Sequence
  source: /note="Description of Artificial Sequence: Synthetic oligonucleotide"
  source: /note="RNA"
  modified_base (1)..(1): 5-methyl bicyclic nucleic acid
  modified_base (5)..(5): 5-methyl modified nucleotide
  modified_base (14)..(14): 5-methyl modified nucleotide
  source: /note="3' tri-ethylene glycol (TEG)"
cagucgguaaguucugu

SEQ ID NO: 13639 - RNA, 16 nt, Artificial Sequence
  source: /note="Description of Artificial Sequence: Synthetic oligonucleotide"
  source: /note="RNA"
  modified_base (1)..(1): 5-methyl bicyclic nucleic acid
  modified_base (5)..(5): 5-methyl modified nucleotide
  modified_base (14)..(14): 5-methyl modified nucleotide
  source: /note="3' tri-ethylene glycol (TEG)"
cagucgguaaguucug

SEQ ID NO: 13640 - RNA, 15 nt, Artificial Sequence
  source: /note="Description of Artificial Sequence: Synthetic oligonucleotide"
  source: /note="RNA"
  modified_base (1)..(1): 5-methyl bicyclic nucleic acid
  modified_base (5)..(5): 5-methyl modified nucleotide
  modified_base (14)..(14): 5-methyl modified nucleotide
  source: /note="3' tri-ethylene glycol (TEG)"
cagucgguaaguucu

SEQ ID NO: 13641 - RNA, 14 nt, Artificial Sequence
  source: /note="Description of Artificial Sequence: Synthetic oligonucleotide"
  source: /note="RNA"
  modified_base (1)..(1): 5-methyl bicyclic nucleic acid
  modified_base (5)..(5): 5-methyl modified nucleotide
  modified_base (14)..(14): 5-methyl modified nucleotide
  source: /note="3' tri-ethylene glycol (TEG)"
cagucgguaaguuc

SEQ ID NO: 13642 - RNA, 13 nt, Artificial Sequence
  source: /note="Description of Artificial Sequence: Synthetic oligonucleotide"
  source: /note="RNA"
  modified_base (1)..(1): 5-methyl bicyclic nucleic acid
  modified_base (5)..(5): 5-methyl modified nucleotide
  source: /note="3' tri-ethylene glycol (TEG)"
cagucgguaaguu

SEQ ID NO: 13643 - RNA, 12 nt, Artificial Sequence
  source: /note="Description of Artificial Sequence: Synthetic oligonucleotide"
  source: /note="RNA"
  modified_base (1)..(1): 5-methyl bicyclic nucleic acid
  modified_base (5)..(5): 5-methyl modified nucleotide
  source: /note="3' tri-ethylene glycol (TEG)"
cagucgguaagu

SEQ ID NO: 13644 - RNA, 20 nt, Artificial Sequence
  source: /note="Description of Artificial Sequence: Synthetic oligonucleotide"
  source: /note="RNA"
  modified_base (1)..(1): 5-methyl bicyclic nucleic acid
  modified_base (2)..(2): 5-methyl modified nucleotide
  modified_base (6)..(6): 5-methyl modified nucleotide
  modified_base (15)..(15): 5-methyl modified nucleotide
  modified_base (19)..(19): 5-methyl modified nucleotide
  modified_base (20)..(20): 5-methyl modified nucleotide
  source: /note="3' tri-ethylene glycol (TEG)"
ccagucgguaaguucugucc

SEQ ID NO: 13645 - RNA, 19 nt, Artificial Sequence
  source: /note="Description of Artificial Sequence: Synthetic oligonucleotide"
  source: /note="RNA"
  modified_base (1)..(1): 5-methyl bicyclic nucleic acid
  modified_base (2)..(2): 5-methyl modified nucleotide
  modified_base (6)..(6): 5-methyl modified nucleotide
  modified_base (15)..(15): 5-methyl modified nucleotide
  modified_base (19)..(19): 5-methyl modified nucleotide
  source: /note="3' tri-ethylene glycol (TEG)"
ccagucgguaaguucuguc

SEQ ID NO: 13646 - RNA, 18 nt, Artificial Sequence
  source: /note="Description of Artificial Sequence: Synthetic oligonucleotide"
  source: /note="RNA"
  modified_base (1)..(1): 5-methyl bicyclic nucleic acid
  modified_base (2)..(2): 5-methyl modified nucleotide
  modified_base (6)..(6): 5-methyl modified nucleotide
  modified_base (15)..(15): 5-methyl modified nucleotide
  source: /note="3' tri-ethylene glycol (TEG)"
ccagucgguaaguucugu

SEQ ID NO: 13647 - RNA, 17 nt, Artificial Sequence
  source: /note="Description of Artificial Sequence: Synthetic oligonucleotide"
  source: /note="RNA"
  modified_base (1)..(1): 5-methyl bicyclic nucleic acid
  modified_base (2)..(2): 5-methyl modified nucleotide
  modified_base (6)..(6): 5-methyl modified nucleotide
  modified_base (15)..(15): 5-methyl modified nucleotide
  source: /note="3' tri-ethylene glycol (TEG)"
ccagucgguaaguucug

SEQ ID NO: 13648 - RNA, 16 nt, Artificial Sequence
  source: /note="Description of Artificial Sequence: Synthetic oligonucleotide"
  source: /note="RNA"
  modified_base (1)..(1): 5-methyl bicyclic nucleic acid
  modified_base (2)..(2): 5-methyl modified nucleotide
  modified_base (6)..(6): 5-methyl modified nucleotide
  modified_base (15)..(15): 5-methyl modified nucleotide
  source: /note="3' tri-ethylene glycol (TEG)"
ccagucgguaaguucu

SEQ ID NO: 13649 - RNA, 15 nt, Artificial Sequence
  source: /note="Description of Artificial Sequence: Synthetic oligonucleotide"
  source: /note="RNA"
  modified_base (1)..(1): 5-methyl bicyclic nucleic acid
  modified_base (2)..(2): 5-methyl modified nucleotide
  modified_base (6)..(6): 5-methyl modified nucleotide
  modified_base (15)..(15): 5-methyl modified nucleotide
  source: /note="3' tri-ethylene glycol (TEG)"
ccagucgguaaguuc

SEQ ID NO: 13650 - RNA, 14 nt, Artificial Sequence
  source: /note="Description of Artificial Sequence: Synthetic oligonucleotide"
  source: /note="RNA"
  modified_base (1)..(1): 5-methyl bicyclic nucleic acid
  modified_base (2)..(2): 5-methyl modified nucleotide
  modified_base (6)..(6): 5-methyl modified nucleotide
  source: /note="3' tri-ethylene glycol (TEG)"
ccagucgguaaguu

SEQ ID NO: 13651 - RNA, 13 nt, Artificial Sequence
  source: /note="Description of Artificial Sequence: Synthetic oligonucleotide"
  source: /note="RNA"
  modified_base (1)..(1): 5-methyl bicyclic nucleic acid
  modified_base (2)..(2): 5-methyl modified nucleotide
  modified_base (6)..(6): 5-methyl modified nucleotide
  source: /note="3' tri-ethylene glycol (TEG)"
ccagucgguaagu

SEQ ID NO: 13652 - RNA, 20 nt, Artificial Sequence
  source: /note="Description of Artificial Sequence: Synthetic oligonucleotide"
  source: /note="RNA"
  modified_base (1)..(1): bicyclic nucleic acid (BNA)
  modified_base (2)..(2): 5-methyl modified nucleotide
  modified_base (3)..(3): 5-methyl modified nucleotide
  modified_base (7)..(7): 5-methyl modified nucleotide
  modified_base (16)..(16): 5-methyl modified nucleotide
  modified_base (20)..(20): 5-methyl modified nucleotide
  source: /note="3' tri-ethylene glycol (TEG)"
gccagucgguaaguucuguc

SEQ ID NO: 13653 - RNA, 19 nt, Artificial Sequence
  source: /note="Description of Artificial Sequence: Synthetic oligonucleotide"
  source: /note="RNA"
  modified_base (1)..(1): bicyclic nucleic acid (BNA)
  modified_base (2)..(2): 5-methyl modified nucleotide
  modified_base (3)..(3): 5-methyl modified nucleotide
  modified_base (7)..(7): 5-methyl modified nucleotide
  modified_base (16)..(16): 5-methyl modified nucleotide
  source: /note="3' tri-ethylene glycol (TEG)"
gccagucgguaaguucugu

SEQ ID NO: 13654 - RNA, 18 nt, Artificial Sequence
  source: /note="Description of Artificial Sequence: Synthetic oligonucleotide"
  source: /note="RNA"
  modified_base (1)..(1): bicyclic nucleic acid (BNA)
  modified_base (2)..(2): 5-methyl modified nucleotide
  modified_base (3)..(3): 5-methyl modified nucleotide
  modified_base (7)..(7): 5-methyl modified nucleotide
  modified_base (16)..(16): 5-methyl modified nucleotide
  source: /note="3' tri-ethylene glycol (TEG)"
gccagucgguaaguucug

SEQ ID NO: 13655 - RNA, 17 nt, Artificial Sequence
  source: /note="Description of Artificial Sequence: Synthetic oligonucleotide"
  source: /note="RNA"
  modified_base (1)..(1): bicyclic nucleic acid (BNA)
  modified_base (2)..(2): 5-methyl modified nucleotide
  modified_base (3)..(3): 5-methyl modified nucleotide
  modified_base (7)..(7): 5-methyl modified nucleotide
  modified_base (16)..(16): 5-methyl modified nucleotide
  source: /note="3' tri-ethylene glycol (TEG)"
gccagucgguaaguucu

SEQ ID NO: 13656 - RNA, 16 nt, Artificial Sequence
  source: /note="Description of Artificial Sequence: Synthetic oligonucleotide"
  source: /note="RNA"
  modified_base (1)..(1): bicyclic nucleic acid (BNA)
  modified_base (2)..(2): 5-methyl modified nucleotide
  modified_base (3)..(3): 5-methyl modified nucleotide
  modified_base (7)..(7): 5-methyl modified nucleotide
  modified_base (16)..(16): 5-methyl modified nucleotide
  source: /note="3' tri-ethylene glycol (TEG)"
gccagucgguaaguuc

SEQ ID NO: 13657 - RNA, 15 nt, Artificial Sequence
  source: /note="Description of Artificial Sequence: Synthetic oligonucleotide"
  source: /note="RNA"
  modified_base (1)..(1): bicyclic nucleic acid (BNA)
  modified_base (2)..(2): 5-methyl modified nucleotide
  modified_base (3)..(3): 5-methyl modified nucleotide
  modified_base (7)..(7): 5-methyl modified nucleotide
  source: /note="3' tri-ethylene glycol (TEG)"
gccagucgguaaguu

SEQ ID NO: 13658 - RNA, 14 nt, Artificial Sequence
  source: /note="Description of Artificial Sequence: Synthetic oligonucleotide"
  source: /note="RNA"
  modified_base (1)..(1): bicyclic nucleic acid (BNA)
  modified_base (2)..(2): 5-methyl modified nucleotide
  modified_base (3)..(3): 5-methyl modified nucleotide
  modified_base (7)..(7): 5-methyl modified nucleotide
  source: /note="3' tri-ethylene glycol (TEG)"
gccagucgguaagu

SEQ ID NO: 13659 - DNA, 20 bp, Artificial Sequence
  source: /note="Description of Artificial Sequence: Synthetic oligonucleotide"
  source: /note="Description of Combined DNA/RNA Molecule: Synthetic oligonucleotide"
  source: /note="DNA/RNA"
  modified_base (1)..(1): bicyclic nucleic acid (BNA)
  modified_base (2)..(2): 5-methyl modified nucleotide
  modified_base (14)..(14): 5-methyl modified nucleotide
  modified_base (19)..(19): 5-methyl modified nucleotide
  source: /note="3' tri-ethylene glycol (TEG)"
tcaaggaagauggcauuucu

SEQ ID NO: 13660 - DNA, 22 bp, Artificial Sequence
  source: /note="Description of Artificial Sequence: Synthetic oligonucleotide"
  source: /note="Description of Combined DNA/RNA Molecule: Synthetic oligonucleotide"
  source: /note="DNA/RNA"
  modified_base (1)..(1): bicyclic nucleic acid (BNA)
  modified_base (2)..(2): 5-methyl modified nucleotide
  modified_base (14)..(14): 5-methyl modified nucleotide
  modified_base (19)..(19): 5-methyl modified nucleotide
  source: /note="3' tri-ethylene glycol (TEG)"
tcaaggaagauggcauuucuag

SEQ ID NO: 13661 - DNA, 16 bp, Artificial Sequence
  source: /note="Description of Artificial Sequence: Synthetic oligonucleotide"
  source: /note="Description of Combined DNA/RNA Molecule: Synthetic oligonucleotide"
  source: /note="DNA/RNA"
  modified_base (1)..(1): bicyclic nucleic acid (BNA)
  modified_base (2)..(2): 5-methyl modified nucleotide
  modified_base (14)..(14): 5-methyl modified nucleotide
  source: /note="3' tri-ethylene glycol (TEG)"
tcaaggaagauggcau

SEQ ID NO: 13662 - RNA, 15 nt, Artificial Sequence
  source: /note="Description of Artificial Sequence: Synthetic oligonucleotide"
  source: /note="RNA"
  modified_base (1)..(1): bicyclic nucleic acid (BNA)
  modified_base (9)..(9): 5-methyl modified nucleotide
  modified_base (14)..(14): 5-methyl modified nucleotide
  source: /note="3' tri-ethylene glycol (TEG)"
gaagauggcauuucu

SEQ ID NO: 13663 - DNA, 21 bp, Artificial Sequence
  source: /note="Description of Artificial Sequence: Synthetic oligonucleotide"
  source: /note="Description of Combined DNA/RNA Molecule: Synthetic oligonucleotide"
  source: /note="DNA/RNA"
  modified_base (1)..(1): bicyclic nucleic acid (BNA)
  modified_base (2)..(2): 5-methyl modified nucleotide
  modified_base (14)..(14): 5-methyl modified nucleotide
  modified_base (19)..(19): 5-methyl modified nucleotide
  source: /note="3' tri-ethylene glycol (TEG)"
tcaaggaagauggcauuucua

SEQ ID NO: 13664 - DNA, 19 bp, Artificial Sequence
  source: /note="Description of Artificial Sequence: Synthetic oligonucleotide"
  source: /note="Description of Combined DNA/RNA Molecule: Synthetic oligonucleotide"
  source: /note="DNA/RNA"
  modified_base (1)..(1): bicyclic nucleic acid (BNA)
  modified_base (2)..(2): 5-methyl modified nucleotide
  modified_base (14)..(14): 5-methyl modified nucleotide
  modified_base (19)..(19): 5-methyl modified nucleotide
  source: /note="3' tri-ethylene glycol (TEG)"
tcaaggaagauggcauuuc

SEQ ID NO: 13665 - DNA, 18 bp, Artificial Sequence
  source: /note="Description of Artificial Sequence: Synthetic oligonucleotide"
  source: /note="Description of Combined DNA/RNA Molecule: Synthetic oligonucleotide"
  source: /note="DNA/RNA"
  modified_base (1)..(1): bicyclic nucleic acid (BNA)
  modified_base (2)..(2): 5-methyl modified nucleotide
  modified_base (14)..(14): 5-methyl modified nucleotide
  source: /note="3' tri-ethylene glycol (TEG)"
tcaaggaagauggcauuu

SEQ ID NO: 13666 - DNA, 17 bp, Artificial Sequence
  source: /note="Description of Artificial Sequence: Synthetic oligonucleotide"
  source: /note="Description of Combined DNA/RNA Molecule: Synthetic oligonucleotide"
  source: /note="DNA/RNA"
  modified_base (1)..(1): bicyclic nucleic acid (BNA)
  modified_base (2)..(2): 5-methyl modified nucleotide
  modified_base (14)..(14): 5-methyl modified nucleotide
  source: /note="3' tri-ethylene glycol (TEG)"
tcaaggaagauggcauu

SEQ ID NO: 13667 - DNA, 15 bp, Artificial Sequence
  source: /note="Description of Artificial Sequence: Synthetic oligonucleotide"
  source: /note="Description of Combined DNA/RNA Molecule: Synthetic oligonucleotide"
  source: /note="DNA/RNA"
  modified_base (1)..(1): bicyclic nucleic acid (BNA)
  modified_base (2)..(2): 5-methyl modified nucleotide
  modified_base (14)..(14): 5-methyl modified nucleotide
  source: /note="3' tri-ethylene glycol (TEG)"
tcaaggaagauggca

SEQ ID NO: 13668 - DNA, 14 bp, Artificial Sequence
  source: /note="Description of Artificial Sequence: Synthetic oligonucleotide"
  source: /note="Description of Combined DNA/RNA Molecule: Synthetic oligonucleotide"
  source: /note="DNA/RNA"
  modified_base (1)..(1): bicyclic nucleic acid (BNA)
  modified_base (2)..(2): 5-methyl modified nucleotide
  modified_base (14)..(14): 5-methyl modified nucleotide
  source: /note="3' tri-ethylene glycol (TEG)"
tcaaggaagauggc

SEQ ID NO: 13669 - DNA, 13 bp, Artificial Sequence
  source: /note="Description of Artificial Sequence: Synthetic oligonucleotide"
  source: /note="Description of Combined DNA/RNA Molecule: Synthetic oligonucleotide"
  source: /note="DNA/RNA"
  modified_base (1)..(1): bicyclic nucleic acid (BNA)
  modified_base (2)..(2): 5-methyl modified nucleotide
  source: /note="3' tri-ethylene glycol (TEG)"
tcaaggaagaugg

SEQ ID NO: 13670 - DNA, 12 bp, Artificial Sequence
  source: /note="Description of Artificial Sequence: Synthetic oligonucleotide"
  source: /note="Description of Combined DNA/RNA Molecule: Synthetic oligonucleotide"
  source: /note="DNA/RNA"
  modified_base (1)..(1): bicyclic nucleic acid (BNA)
  modified_base (2)..(2): 5-methyl modified nucleotide
  source: /note="3' tri-ethylene glycol (TEG)"
tcaaggaagaug

SEQ ID NO: 13671 - DNA, 11 bp, Artificial Sequence
  source: /note="Description of Artificial Sequence: Synthetic oligonucleotide"
  source: /note="Description of Combined DNA/RNA Molecule: Synthetic oligonucleotide"
  source: /note="DNA/RNA"
  modified_base (1)..(1): bicyclic nucleic acid (BNA)
  modified_base (2)..(2): 5-methyl modified nucleotide
  source: /note="3' tri-ethylene glycol (TEG)"
tcaaggaagau

SEQ ID NO: 13672 - DNA, 10 bp, Artificial Sequence
  source: /note="Description of Artificial Sequence: Synthetic oligonucleotide"
  source: /note="DNA/RNA"
  modified_base (1)..(1): bicyclic nucleic acid (BNA)
  modified_base (2)..(2): 5-methyl modified nucleotide
  source: /note="3' tri-ethylene glycol (TEG)"
tcaaggaaga

SEQ ID NO: 13673 - DNA, 9 bp, Artificial Sequence
  source: /note="Description of Artificial Sequence: Synthetic oligonucleotide"
  source: /note="DNA/RNA"
  modified_base (1)..(1): bicyclic nucleic acid (BNA)
  modified_base (2)..(2): 5-methyl modified nucleotide
  source: /note="3' tri-ethylene glycol (TEG)"
tcaaggaag

SEQ ID NO: 13674 - RNA, 21 nt, Artificial Sequence
  source: /note="Description of Artificial Sequence: Synthetic oligonucleotide"
  source: /note="RNA"
  modified_base (1)..(1): 5-methyl bicyclic nucleic acid
  modified_base (13)..(13): 5-methyl modified nucleotide
  modified_base (18)..(18): 5-methyl modified nucleotide
  source: /note="3' tri-ethylene glycol (TEG)"
caaggaagauggcauuucuag

SEQ ID NO: 13675 - RNA, 20 nt, Artificial Sequence
  source: /note="Description of Artificial Sequence: Synthetic oligonucleotide"
  source: /note="RNA"
  modified_base (1)..(1): 5-methyl bicyclic nucleic acid
  modified_base (13)..(13): 5-methyl modified nucleotide
  modified_base (18)..(18): 5-methyl modified nucleotide
  source: /note="3' tri-ethylene glycol (TEG)"
caaggaagauggcauuucua

SEQ ID NO: 13676 - RNA, 19 nt, Artificial Sequence
  source: /note="Description of Artificial Sequence: Synthetic oligonucleotide"
  source: /note="RNA"
  modified_base (1)..(1): 5-methyl bicyclic nucleic acid
  modified_base (13)..(13): 5-methyl modified nucleotide
  modified_base (18)..(18): 5-methyl modified nucleotide
  source: /note="3' tri-ethylene glycol (TEG)"
caaggaagauggcauuucu

SEQ ID NO: 13677 - RNA, 18 nt, Artificial Sequence
  source: /note="Description of Artificial Sequence: Synthetic oligonucleotide"
  source: /note="RNA"
  modified_base (1)..(1): 5-methyl bicyclic nucleic acid
  modified_base (13)..(13): 5-methyl modified nucleotide
  modified_base (18)..(18): 5-methyl modified nucleotide
  source: /note="3' tri-ethylene glycol (TEG)"
caaggaagauggcauuuc

SEQ ID NO: 13678 - RNA, 17 nt, Artificial Sequence
  source: /note="Description of Artificial Sequence: Synthetic oligonucleotide"
  source: /note="RNA"
  modified_base (1)..(1): 5-methyl bicyclic nucleic acid
  modified_base (13)..(13): 5-methyl modified nucleotide
  source: /note="3' tri-ethylene glycol (TEG)"
caaggaagauggcauuu

SEQ ID NO: 13679 - RNA, 16 nt, Artificial Sequence
  source: /note="Description of Artificial Sequence: Synthetic oligonucleotide"
  source: /note="RNA"
  modified_base (1)..(1): 5-methyl bicyclic nucleic acid
  modified_base (13)..(13): 5-methyl modified nucleotide
  source: /note="3' tri-ethylene glycol (TEG)"
caaggaagauggcauu

SEQ ID NO: 13680 - RNA, 15 nt, Artificial Sequence
  source: /note="Description of Artificial Sequence: Synthetic oligonucleotide"
  source: /note="RNA"
  modified_base (1)..(1): 5-methyl bicyclic nucleic acid
  modified_base (13)..(13): 5-methyl modified nucleotide
  source: /note="3' tri-ethylene glycol (TEG)"
caaggaagauggcau

SEQ ID NO: 13681 - RNA, 14 nt, Artificial Sequence
  source: /note="Description of Artificial Sequence: Synthetic oligonucleotide"
  source: /note="RNA"
  modified_base (1)..(1): 5-methyl bicyclic nucleic acid
  modified_base (13)..(13): 5-methyl modified nucleotide
  source: /note="3' tri-ethylene glycol (TEG)"
caaggaagauggca

SEQ ID NO: 13682 - RNA, 13 nt, Artificial Sequence
  source: /note="Description of Artificial Sequence: Synthetic oligonucleotide"
  source: /note="RNA"
  modified_base (1)..(1): 5-methyl bicyclic nucleic acid
  modified_base (13)..(13): 5-methyl modified nucleotide
  source: /note="3' tri-ethylene glycol (TEG)"
caaggaagauggc

SEQ ID NO: 13683 - RNA, 12 nt, Artificial Sequence
  source: /note="Description of Artificial Sequence: Synthetic oligonucleotide"
  source: /note="RNA"
  modified_base (1)..(1): 5-methyl bicyclic nucleic acid
  source: /note="3' tri-ethylene glycol (TEG)"
caaggaagaugg

SEQ ID NO: 13684 - RNA, 11 nt, Artificial Sequence
  source: /note="Description of Artificial Sequence: Synthetic oligonucleotide"
  source: /note="RNA"
  modified_base (1)..(1): 5-methyl bicyclic nucleic acid
  source: /note="3' tri-ethylene glycol (TEG)"
caaggaagaug

SEQ ID NO: 13685 - RNA, 10 nt, Artificial Sequence
  source: /note="Description of Artificial Sequence: Synthetic oligonucleotide"
  source: /note="RNA"
  modified_base (1)..(1): 5-methyl bicyclic nucleic acid
  source: /note="3' tri-ethylene glycol (TEG)"
caaggaagau

SEQ ID NO: 13686 - RNA, 9 nt, Artificial Sequence
  source: /note="Description of Artificial Sequence: Synthetic oligonucleotide"
  source: /note="RNA/Antisense Oligonucleotide"
  modified_base (1)..(1): 5-methyl bicyclic nucleic acid
  source: /note="3' tri-ethylene glycol (TEG)"
caaggaaga

SEQ ID NO: 13687 - RNA, 8 nt, Artificial Sequence
  source: /note="Description of Artificial Sequence: Synthetic oligonucleotide"
  source: /note="RNA/Antisense Oligonucleotide"
  modified_base (1)..(1): 5-methyl bicyclic nucleic acid
  source: /note="3' tri-ethylene glycol (TEG)"
caaggaag

SEQ ID NO: 13688 - RNA, 20 nt, Artificial Sequence
  source: /note="Description of Artificial Sequence: Synthetic oligonucleotide"
  source: /note="RNA"
  modified_base (1)..(1): bicyclic nucleic acid (BNA)
  modified_base (12)..(12): 5-methyl modified nucleotide
  modified_base (17)..(17): 5-methyl modified nucleotide
  source: /note="3' tri-ethylene glycol (TEG)"
aaggaagauggcauuucuag

SEQ ID NO: 13689 - RNA, 19 nt, Artificial Sequence
  source: /note="Description of Artificial Sequence: Synthetic oligonucleotide"
  source: /note="RNA"
  modified_base (1)..(1): bicyclic nucleic acid (BNA)
  modified_base (12)..(12): 5-methyl modified nucleotide
  modified_base (17)..(17): 5-methyl modified nucleotide
  source: /note="3' tri-ethylene glycol (TEG)"
aaggaagauggcauuucua

SEQ ID NO: 13690 - RNA, 18 nt, Artificial Sequence
  source: /note="Description of Artificial Sequence: Synthetic oligonucleotide"
  source: /note="RNA"
  modified_base (1)..(1): bicyclic nucleic acid (BNA)
  modified_base (12)..(12): 5-methyl modified nucleotide
  modified_base (17)..(17): 5-methyl modified nucleotide
  source: /note="3' tri-ethylene glycol (TEG)"
aaggaagauggcauuucu

SEQ ID NO: 13691 - RNA, 17 nt, Artificial Sequence
  source: /note="Description of Artificial Sequence: Synthetic oligonucleotide"
  source: /note="RNA"
  modified_base (1)..(1): bicyclic nucleic acid (BNA)
  modified_base (12)..(12): 5-methyl modified nucleotide
  modified_base (17)..(17): 5-methyl modified nucleotide
  source: /note="3' tri-ethylene glycol (TEG)"
aaggaagauggcauuuc

SEQ ID NO: 13692 - RNA, 16 nt, Artificial Sequence
  source: /note="Description of Artificial Sequence: Synthetic oligonucleotide"
  source: /note="RNA"
  modified_base (1)..(1): bicyclic nucleic acid (BNA)
  modified_base (12)..(12): 5-methyl modified nucleotide
  source: /note="3' tri-ethylene glycol (TEG)"
aaggaagauggcauuu

SEQ ID NO: 13693 - RNA, 15 nt, Artificial Sequence
  source: /note="Description of Artificial Sequence: Synthetic oligonucleotide"
  source: /note="RNA"
  modified_base (1)..(1): bicyclic nucleic acid (BNA)
  modified_base (12)..(12): 5-methyl modified nucleotide
  source: /note="3' tri-ethylene glycol (TEG)"
aaggaagauggcauu

SEQ ID NO: 13694 - RNA, 14 nt, Artificial Sequence
  source: /note="Description of Artificial Sequence: Synthetic oligonucleotide"
  source: /note="RNA"
  modified_base (1)..(1): bicyclic nucleic acid (BNA)
  modified_base (12)..(12): 5-methyl modified nucleotide
  source: /note="3' tri-ethylene glycol (TEG)"
aaggaagauggcau

SEQ ID NO: 13695 - RNA, 13 nt, Artificial Sequence
  source: /note="Description of Artificial Sequence: Synthetic oligonucleotide"
  source: /note="RNA"
  modified_base (1)..(1): bicyclic nucleic acid (BNA)
  modified_base (12)..(12): 5-methyl modified nucleotide
  source: /note="3' tri-ethylene glycol (TEG)"
aaggaagauggca

SEQ ID NO: 13696 - RNA, 12 nt, Artificial Sequence
  source: /note="Description of Artificial Sequence: Synthetic oligonucleotide"
  source: /note="RNA"
  modified_base (1)..(1): bicyclic nucleic acid (BNA)
  modified_base (12)..(12): 5-methyl modified nucleotide
  source: /note="3' tri-ethylene glycol (TEG)"
aaggaagauggc

SEQ ID NO: 13697 - RNA, 11 nt, Artificial Sequence
  source: /note="Description of Artificial Sequence: Synthetic oligonucleotide"
  source: /note="RNA"
  modified_base (1)..(1): bicyclic nucleic acid (BNA)
  source: /note="3' tri-ethylene glycol (TEG)"
aaggaagaugg

SEQ ID NO: 13698 - RNA, 10 nt, Artificial Sequence
  source: /note="Description of Artificial Sequence: Synthetic oligonucleotide"
  source: /note="RNA"
  modified_base (1)..(1): bicyclic nucleic acid (BNA)
  source: /note="3' tri-ethylene glycol (TEG)"
aaggaagaug

SEQ ID NO: 13699 - RNA, 9 nt, Artificial Sequence
  source: /note="Description of Artificial Sequence: Synthetic oligonucleotide"
  source: /note="RNA"
  modified_base (1)..(1): bicyclic nucleic acid (BNA)
  source: /note="3' tri-ethylene glycol (TEG)"
aaggaagau

SEQ ID NO: 13700 - RNA, 8 nt, Artificial Sequence
  source: /note="Description of Artificial Sequence: Synthetic oligonucleotide"
  source: /note="RNA/Antisense Oligonucleotide"
  modified_base (1)..(1): bicyclic nucleic acid (BNA)
  source: /note="3' tri-ethylene glycol (TEG)"
aaggaaga

SEQ ID NO: 13701 - RNA, 19 nt, Artificial Sequence
  source: /note="Description of Artificial Sequence: Synthetic oligonucleotide"
  source: /note="RNA"
  modified_base (1)..(1): bicyclic nucleic acid (BNA)
  modified_base (11)..(11): 5-methyl modified nucleotide
  modified_base (16)..(16): 5-methyl modified nucleotide
  source: /note="3' tri-ethylene glycol (TEG)"
aggaagauggcauuucuag

SEQ ID NO: 13702 - RNA, 18 nt, Artificial Sequence
  source: /note="Description of Artificial Sequence: Synthetic oligonucleotide"
  source: /note="RNA"
  modified_base (1)..(1): bicyclic nucleic acid (BNA)
  modified_base (11)..(11): 5-methyl modified nucleotide
  modified_base (16)..(16): 5-methyl modified nucleotide
  source: /note="3' tri-ethylene glycol (TEG)"
aggaagauggcauuucua

SEQ ID NO: 13703 - RNA, 17 nt, Artificial Sequence
  source: /note="Description of Artificial Sequence: Synthetic oligonucleotide"
  source: /note="RNA"
  modified_base (1)..(1): bicyclic nucleic acid (BNA)
  modified_base (11)..(11): 5-methyl modified nucleotide
  modified_base (16)..(16): 5-methyl modified nucleotide
  source: /note="3' tri-ethylene glycol (TEG)"
aggaagauggcauuucu

SEQ ID NO: 13704 - RNA, 16 nt, Artificial Sequence
  source: /note="Description of Artificial Sequence: Synthetic oligonucleotide"
  source: /note="RNA"
  modified_base (1)..(1): bicyclic nucleic acid (BNA)
  modified_base (11)..(11): 5-methyl modified nucleotide
  modified_base (16)..(16): 5-methyl modified nucleotide
  source: /note="3' tri-ethylene glycol (TEG)"
aggaagauggcauuuc

SEQ ID NO: 13705 - RNA, 15 nt, Artificial Sequence
  source: /note="Description of Artificial Sequence: Synthetic oligonucleotide"
  source: /note="RNA"
  modified_base (1)..(1): bicyclic nucleic acid (BNA)
  modified_base (11)..(11): 5-methyl modified nucleotide
  source: /note="3' tri-ethylene glycol (TEG)"
aggaagauggcauuu

SEQ ID NO: 13706 - RNA, 14 nt, Artificial Sequence
  source: /note="Description of Artificial Sequence: Synthetic oligonucleotide"
  source: /note="RNA"
  modified_base (1)..(1): bicyclic nucleic acid (BNA)
  modified_base (11)..(11): 5-methyl modified nucleotide
  source: /note="3' tri-ethylene glycol (TEG)"
aggaagauggcauu

SEQ ID NO: 13707 - RNA, 13 nt, Artificial Sequence
  source: /note="Description of Artificial Sequence: Synthetic oligonucleotide"
  source: /note="RNA"
  modified_base (1)..(1): bicyclic nucleic acid (BNA)
  modified_base (11)..(11): 5-methyl modified nucleotide
  source: /note="3' tri-ethylene glycol (TEG)"
aggaagauggcau

SEQ ID NO: 13708 - RNA, 12 nt, Artificial Sequence
  source: /note="Description of Artificial Sequence: Synthetic oligonucleotide"
  source: /note="RNA"
  modified_base (1)..(1): bicyclic nucleic acid (BNA)
  modified_base (11)..(11): 5-methyl modified nucleotide
  source: /note="3' tri-ethylene glycol (TEG)"
aggaagauggca

SEQ ID NO: 13709 - RNA, 10 nt, Artificial Sequence
  source: /note="Description of Artificial Sequence: Synthetic oligonucleotide"
  source: /note="RNA"
  modified_base (1)..(1): bicyclic nucleic acid (BNA)
  source: /note="3' tri-ethylene glycol (TEG)"
aggaagaugg

SEQ ID NO: 13710 - RNA, 9 nt, Artificial Sequence
  source: /note="Description of Artificial Sequence: Synthetic oligonucleotide"
  source: /note="RNA"
  modified_base (1)..(1): bicyclic nucleic acid (BNA)
  source: /note="3' tri-ethylene glycol (TEG)"
aggaagaug

SEQ ID NO: 13711 - RNA, 8 nt, Artificial Sequence
  source: /note="Description of Artificial Sequence: Synthetic oligonucleotide"
  source: /note="RNA"
  modified_base (1)..(1): bicyclic nucleic acid (BNA)
  source: /note="3' tri-ethylene glycol (TEG)"
aggaagau

SEQ ID NO: 13712 - RNA, 18 nt, Artificial Sequence
  source: /note="Description of Artificial Sequence: Synthetic oligonucleotide"
  source: /note="RNA"
  modified_base (1)..(1): bicyclic nucleic acid (BNA)
  modified_base (10)..(10): 5-methyl modified nucleotide
  modified_base (15)..(15): 5-methyl modified nucleotide
  source: /note="3' tri-ethylene glycol (TEG)"
ggaagauggcauuucuag

SEQ ID NO: 13713 - RNA, 17 nt, Artificial Sequence
  source: /note="Description of Artificial Sequence: Synthetic oligonucleotide"
  source: /note="RNA"
  modified_base (1)..(1): bicyclic nucleic acid (BNA)
  modified_base (10)..(10): 5-methyl modified nucleotide
  modified_base (15)..(15): 5-methyl modified nucleotide
  source: /note="3' tri-ethylene glycol (TEG)"
ggaagauggcauuucua

SEQ ID NO: 13714 - RNA, 16 nt, Artificial Sequence
  source: /note="Description of Artificial Sequence: Synthetic oligonucleotide"
  source: /note="RNA"
  modified_base (1)..(1): bicyclic nucleic acid (BNA)
  modified_base (10)..(10): 5-methyl modified nucleotide
  modified_base (15)..(15): 5-methyl modified nucleotide
  source: /note="3' tri-ethylene glycol (TEG)"
ggaagauggcauuucu

SEQ ID NO: 13715 - RNA, 15 nt, Artificial Sequence
  source: /note="Description of Artificial Sequence: Synthetic oligonucleotide"
  source: /note="RNA"
  modified_base (1)..(1): bicyclic nucleic acid (BNA)
  modified_base (10)..(10): 5-methyl modified nucleotide
  modified_base (15)..(15): 5-methyl modified nucleotide
  source: /note="3' tri-ethylene glycol (TEG)"
ggaagauggcauuuc

SEQ ID NO: 13716 - RNA, 14 nt, Artificial Sequence
  source: /note="Description of Artificial Sequence: Synthetic oligonucleotide"
  source: /note="RNA"
  modified_base (1)..(1): bicyclic nucleic acid (BNA)
  modified_base (10)..(10): 5-methyl modified nucleotide
  source: /note="3' tri-ethylene glycol (TEG)"
ggaagauggcauuu

SEQ ID NO: 13717 - RNA, 13 nt, Artificial Sequence
  source: /note="Description of Artificial Sequence: Synthetic oligonucleotide"
  source: /note="RNA"
  modified_base (1)..(1): bicyclic nucleic acid (BNA)
  modified_base (10)..(10): 5-methyl modified nucleotide
  source: /note="3' tri-ethylene glycol (TEG)"
ggaagauggcauu

SEQ ID NO: 13718 - RNA, 12 nt, Artificial Sequence
  source: /note="Description of Artificial Sequence: Synthetic oligonucleotide"
  source: /note="RNA"
  modified_base (1)..(1): bicyclic nucleic acid (BNA)
  modified_base (10)..(10): 5-methyl modified nucleotide
  source: /note="3' tri-ethylene glycol (TEG)"
ggaagauggcau

SEQ ID NO: 13719 - RNA, 11 nt, Artificial Sequence
  source: /note="Description of Artificial Sequence: Synthetic oligonucleotide"
  source: /note="RNA"
  modified_base (1)..(1): bicyclic nucleic acid (BNA)
  modified_base (10)..(10): 5-methyl modified nucleotide
  source: /note="3' tri-ethylene glycol (TEG)"
ggaagauggca

SEQ ID NO: 13720 - RNA, 10 nt, Artificial Sequence
  source: /note="Description of Artificial Sequence: Synthetic oligonucleotide"
  source: /note="RNA"
  modified_base (1)..(1): bicyclic nucleic acid (BNA)
  modified_base (10)..(10): 5-methyl modified nucleotide
  source: /note="3' tri-ethylene glycol (TEG)"
ggaagauggc

SEQ ID NO: 13721 - RNA, 8 nt, Artificial Sequence
  source: /note="Description of Artificial Sequence: Synthetic oligonucleotide"
  source: /note="RNA"
  modified_base (1)..(1): bicyclic nucleic acid (BNA)
  source: /note="3' tri-ethylene glycol (TEG)"
ggaagaug

SEQ ID NO: 13722 - RNA, 17 nt, Artificial Sequence
  source: /note="Description of Artificial Sequence: Synthetic oligonucleotide"
  source: /note="RNA"
  modified_base (1)..(1): bicyclic nucleic acid (BNA)
  modified_base (9)..(9): 5-methyl modified nucleotide
  modified_base (14)..(14): 5-methyl modified nucleotide
  source: /note="3' tri-ethylene glycol (TEG)"
gaagauggcauuucuag

SEQ ID NO: 13723 - RNA, 16 nt, Artificial Sequence
  source: /note="Description of Artificial Sequence: Synthetic oligonucleotide"
  source: /note="RNA"
  modified_base (1)..(1): bicyclic nucleic acid (BNA)
  modified_base (9)..(9): 5-methyl modified nucleotide
  modified_base (14)..(14): 5-methyl modified nucleotide
  source: /note="3' tri-ethylene glycol (TEG)"
gaagauggcauuucua

SEQ ID NO: 13724 - RNA, 14 nt, Artificial Sequence
  source: /note="Description of Artificial Sequence: Synthetic oligonucleotide"
  source: /note="RNA"
  modified_base (1)..(1): bicyclic nucleic acid (BNA)
  modified_base (9)..(9): 5-methyl modified nucleotide
  modified_base (14)..(14): 5-methyl modified nucleotide
  source: /note="3' tri-ethylene glycol (TEG)"
gaagauggcauuuc

SEQ ID NO: 13725 - RNA, 13 nt, Artificial Sequence
  source: /note="Description of Artificial Sequence: Synthetic oligonucleotide"
  source: /note="RNA"
  modified_base (1)..(1): bicyclic nucleic acid (BNA)
  modified_base (9)..(9): 5-methyl modified nucleotide
  source: /note="3' tri-ethylene glycol (TEG)"
gaagauggcauuu

SEQ ID NO: 13726 - RNA, 12 nt, Artificial Sequence
  source: /note="Description of Artificial Sequence: Synthetic oligonucleotide"
  source: /note="RNA"
  modified_base (1)..(1): bicyclic nucleic acid (BNA)
  modified_base (9)..(9): 5-methyl modified nucleotide
  source: /note="3' tri-ethylene glycol (TEG)"
gaagauggcauu

SEQ ID NO: 13727 - RNA, 11 nt, Artificial Sequence
  source: /note="Description of Artificial Sequence: Synthetic oligonucleotide"
  source: /note="RNA"
  modified_base (1)..(1): bicyclic nucleic acid (BNA)
  modified_base (9)..(9): 5-methyl modified nucleotide
  source: /note="3' tri-ethylene glycol (TEG)"
gaagauggcau

SEQ ID NO: 13728 - RNA, 10 nt, Artificial Sequence
  source: /note="Description of Artificial Sequence: Synthetic oligonucleotide"
  source: /note="RNA"
  modified_base (1)..(1): bicyclic nucleic acid (BNA)
  modified_base (9)..(9): 5-methyl modified nucleotide
  source: /note="3' tri-ethylene glycol (TEG)"
gaagauggca

SEQ ID NO: 13729 - RNA, 9 nt, Artificial Sequence
  source: /note="Description of Artificial Sequence: Synthetic oligonucleotide"
  source: /note="RNA"
  modified_base (1)..(1): bicyclic nucleic acid (BNA)
  modified_base (9)..(9): 5-methyl modified nucleotide
  source: /note="3' tri-ethylene glycol (TEG)"
gaagauggc

SEQ ID NO: 13730 - RNA, 8 nt, Artificial Sequence
  source: /note="Description of Artificial Sequence: Synthetic oligonucleotide"
  source: /note="RNA"
  modified_base (1)..(1): bicyclic nucleic acid (BNA)
  source: /note="3' tri-ethylene glycol (TEG)"
gaagaugg

SEQ ID NO: 13731 - RNA, 16 nt, Artificial Sequence
  source: /note="Description of Artificial Sequence: Synthetic oligonucleotide"
  source: /note="RNA"
  modified_base (1)..(1): bicyclic nucleic acid (BNA)
  modified_base (8)..(8): 5-methyl modified nucleotide
  modified_base (13)..(13): 5-methyl modified nucleotide
  source: /note="3' tri-ethylene glycol (TEG)"
aagauggcauuucuag

SEQ ID NO: 13732 - RNA, 15 nt, Artificial Sequence
  source: /note="Description of Artificial Sequence: Synthetic oligonucleotide"
  source: /note="RNA"
  modified_base (1)..(1): bicyclic nucleic acid (BNA)
  modified_base (8)..(8): 5-methyl modified nucleotide
  modified_base (13)..(13): 5-methyl modified nucleotide
  source: /note="3' tri-ethylene glycol (TEG)"
aagauggcauuucua

SEQ ID NO: 13733 - RNA, 14 nt, Artificial Sequence
  source: /note="Description of Artificial Sequence: Synthetic oligonucleotide"
  source: /note="RNA"
  modified_base (1)..(1): bicyclic nucleic acid (BNA)
  modified_base (8)..(8): 5-methyl modified nucleotide
  modified_base (13)..(13): 5-methyl modified nucleotide
  source: /note="3' tri-ethylene glycol (TEG)"
aagauggcauuucu

SEQ ID NO: 13734 - RNA, 13 nt, Artificial Sequence
  source: /note="Description of Artificial Sequence: Synthetic oligonucleotide"
  source: /note="RNA"
  modified_base (1)..(1): bicyclic nucleic acid (BNA)
  modified_base (8)..(8): 5-methyl modified nucleotide
  modified_base (13)..(13): 5-methyl modified nucleotide
  source: /note="3' tri-ethylene glycol (TEG)"
aagauggcauuuc

SEQ ID NO: 13735 - RNA, 12 nt, Artificial Sequence
  source: /note="Description of Artificial Sequence: Synthetic oligonucleotide"
  source: /note="RNA"
  modified_base (1)..(1): bicyclic nucleic acid (BNA)
  modified_base (8)..(8): 5-methyl modified nucleotide
  source: /note="3' tri-ethylene glycol (TEG)"
aagauggcauuu

SEQ ID NO: 13736 - RNA, 11 nt, Artificial Sequence
  source: /note="Description of Artificial Sequence: Synthetic oligonucleotide"
  source: /note="RNA"
  modified_base (1)..(1): bicyclic nucleic acid (BNA)
  modified_base (8)..(8): 5-methyl modified nucleotide
  source: /note="3' tri-ethylene glycol (TEG)"
aagauggcauu

SEQ ID NO: 13737 - RNA, 10 nt, Artificial Sequence
  source: /note="Description of Artificial Sequence: Synthetic oligonucleotide"
  source: /note="RNA"
  modified_base (1)..(1): bicyclic nucleic acid (BNA)
  modified_base (8)..(8): 5-methyl modified nucleotide
  source: /note="3' tri-ethylene glycol (TEG)"
aagauggcau

SEQ ID NO: 13738 - RNA, 9 nt, Artificial Sequence
  source: /note="Description of Artificial Sequence: Synthetic oligonucleotide"
  source: /note="RNA"
  modified_base (1)..(1): bicyclic nucleic acid (BNA)
  modified_base (8)..(8): 5-methyl modified nucleotide
  source: /note="3' tri-ethylene glycol (TEG)"
aagauggca

SEQ ID NO: 13739 - RNA, 8 nt, Artificial Sequence
  source: /note="Description of Artificial Sequence: Synthetic oligonucleotide"
  source: /note="RNA"
  modified_base (1)..(1): bicyclic nucleic acid (BNA)
  modified_base (8)..(8): 5-methyl modified nucleotide
  source: /note="3' tri-ethylene glycol (TEG)"
aagauggc

SEQ ID NO: 13740 - RNA, 15 nt, Artificial Sequence
  source: /note="Description of Artificial Sequence: Synthetic oligonucleotide"
  source: /note="RNA"
  modified_base (1)..(1): bicyclic nucleic acid (BNA)
  modified_base (7)..(7): 5-methyl modified nucleotide
  modified_base (12)..(12): 5-methyl modified nucleotide
  source: /note="3' tri-ethylene glycol (TEG)"
agauggcauuucuag

SEQ ID NO: 13741 - RNA, 14 nt, Artificial Sequence
  source: /note="Description of Artificial Sequence: Synthetic oligonucleotide"
  source: /note="RNA"
  modified_base (1)..(1): bicyclic nucleic acid (BNA)
  modified_base (7)..(7): 5-methyl modified nucleotide
  modified_base (12)..(12): 5-methyl modified nucleotide
  source: /note="3' tri-ethylene glycol (TEG)"
agauggcauuucua

SEQ ID NO: 13742 - RNA, 13 nt, Artificial Sequence
  source: /note="Description of Artificial Sequence: Synthetic oligonucleotide"
  source: /note="RNA"
  modified_base (1)..(1): bicyclic nucleic acid (BNA)
  modified_base (7)..(7): 5-methyl modified nucleotide
  modified_base (12)..(12): 5-methyl modified nucleotide
  source: /note="3' tri-ethylene glycol (TEG)"
agauggcauuucu

SEQ ID NO: 13743 - RNA, 12 nt, Artificial Sequence
  source: /note="Description of Artificial Sequence: Synthetic oligonucleotide"
  source: /note="RNA"
  modified_base (1)..(1): bicyclic nucleic acid (BNA)
  modified_base (7)..(7): 5-methyl modified nucleotide
  modified_base (12)..(12): 5-methyl modified nucleotide
  source: /note="3' tri-ethylene glycol (TEG)"
agauggcauuuc

SEQ ID NO: 13744 - RNA, 11 nt, Artificial Sequence
  source: /note="Description of Artificial Sequence: Synthetic oligonucleotide"
  source: /note="RNA"
  modified_base (1)..(1): bicyclic nucleic acid (BNA)
  modified_base (7)..(7): 5-methyl modified nucleotide
  source: /note="3' tri-ethylene glycol (TEG)"
agauggcauuu

SEQ ID NO: 13745 - RNA, 10 nt, Artificial Sequence
  source: /note="Description of Artificial Sequence: Synthetic oligonucleotide"
  source: /note="RNA"
  modified_base (1)..(1): bicyclic nucleic acid (BNA)
  modified_base (7)..(7): 5-methyl modified nucleotide
  source: /note="3' tri-ethylene glycol (TEG)"
agauggcauu

SEQ ID NO: 13746 - RNA, 9 nt, Artificial Sequence
  source: /note="Description of Artificial Sequence: Synthetic oligonucleotide"
  source: /note="RNA"
  modified_base (1)..(1): bicyclic nucleic acid (BNA)
  modified_base (7)..(7): 5-methyl modified nucleotide
  source: /note="3' tri-ethylene glycol (TEG)"
agauggcau

SEQ ID NO: 13747 - RNA, 8 nt, Artificial Sequence
  source: /note="Description of Artificial Sequence: Synthetic oligonucleotide"
  source: /note="RNA"
  modified_base (1)..(1): bicyclic nucleic acid (BNA)
  modified_base (7)..(7): 5-methyl modified nucleotide
  source: /note="3' tri-ethylene glycol (TEG)"
agauggca

SEQ ID NO: 13748 - RNA, 30 nt, Artificial Sequence; identical to SEQ ID NO: 284
  source: /note="Description of Artificial Sequence: Synthetic oligonucleotide"
  source: /note="RNA"
  modified_base (1)..(1): 5-methyl bicyclic nucleic acid
  modified_base (3)..(3): 5-methyl modified nucleotide
  modified_base (4)..(4): 5-methyl modified nucleotide
  modified_base (7)..(7): 5-methyl modified nucleotide
  modified_base (10)..(10): 5-methyl modified nucleotide
  modified_base (22)..(22): 5-methyl modified nucleotide
  modified_base (27)..(27): 5-methyl modified nucleotide
  source: /note="3' tri-ethylene glycol (TEG)"

SEQ ID NO: 13749 - RNA, 29 nt, Artificial Sequence
  source: /note="Description of Artificial Sequence: Synthetic oligonucleotide"
  source: /note="RNA"
  modified_base (1)..(1): 5-methyl bicyclic nucleic acid
  modified_base (3)..(3): 5-methyl modified nucleotide
  modified_base (4)..(4): 5-methyl modified nucleotide
  modified_base (7)..(7): 5-methyl modified nucleotide
  modified_base (10)..(10): 5-methyl modified nucleotide
  modified_base (22)..(22): 5-methyl modified nucleotide
  modified_base (27)..(27): 5-methyl modified nucleotide
  source: /note="3' tri-ethylene glycol (TEG)"
cuccaacaucaaggaagauggcauuucua

SEQ ID NO: 13750 - RNA, 28 nt, Artificial Sequence
  source: /note="Description of Artificial Sequence: Synthetic oligonucleotide"
  source: /note="RNA"
  modified_base (1)..(1): 5-methyl bicyclic nucleic acid
  modified_base (3)..(3): 5-methyl modified nucleotide
  modified_base (4)..(4): 5-methyl modified nucleotide
  modified_base (7)..(7): 5-methyl modified nucleotide
  modified_base (10)..(10): 5-methyl modified nucleotide
  modified_base (22)..(22): 5-methyl modified nucleotide
  modified_base (27)..(27): 5-methyl modified nucleotide
  source: /note="3' tri-ethylene glycol (TEG)"
cuccaacaucaaggaagauggcauuucu

SEQ ID NO: 13751 - RNA, 27 nt, Artificial Sequence
  source: /note="Description of Artificial Sequence: Synthetic oligonucleotide"
  source: /note="RNA"
  modified_base (1)..(1): 5-methyl bicyclic nucleic acid
  modified_base (3)..(3): 5-methyl modified nucleotide
  modified_base (4)..(4): 5-methyl modified nucleotide
  modified_base (7)..(7): 5-methyl modified nucleotide
  modified_base (10)..(10): 5-methyl modified nucleotide
  modified_base (22)..(22): 5-methyl modified nucleotide
  modified_base (27)..(27): 5-methyl modified nucleotide
  source: /note="3' tri-ethylene glycol (TEG)"
cuccaacaucaaggaagauggcauuuc

SEQ ID NO: 13752 - RNA, 26 nt, Artificial Sequence
  source: /note="Description of Artificial Sequence: Synthetic oligonucleotide"
  source: /note="RNA"
  modified_base (1)..(1): 5-methyl bicyclic nucleic acid
  modified_base (3)..(3): 5-methyl modified nucleotide
  modified_base (4)..(4): 5-methyl modified nucleotide
  modified_base (7)..(7): 5-methyl modified nucleotide
  modified_base (10)..(10): 5-methyl modified nucleotide
  modified_base (22)..(22): 5-methyl modified nucleotide
  source: /note="3' tri-ethylene glycol (TEG)"
cuccaacaucaaggaagauggcauuu

SEQ ID NO: 13753 - RNA, 25 nt, Artificial Sequence
  source: /note="Description of Artificial Sequence: Synthetic oligonucleotide"
  source: /note="RNA"
  modified_base (1)..(1): 5-methyl bicyclic nucleic acid
  modified_base (3)..(3): 5-methyl modified nucleotide
  modified_base (4)..(4): 5-methyl modified nucleotide
  modified_base (7)..(7): 5-methyl modified nucleotide
  modified_base (10)..(10): 5-methyl modified nucleotide
  modified_base (22)..(22): 5-methyl modified nucleotide
  source: /note="3' tri-ethylene glycol (TEG)"
cuccaacaucaaggaagauggcauu

SEQ ID NO: 13754 - RNA, 24 nt, Artificial Sequence
  source: /note="Description of Artificial Sequence: Synthetic oligonucleotide"
  source: /note="RNA"
  modified_base (1)..(1): 5-methyl bicyclic nucleic acid
  modified_base (3)..(3): 5-methyl modified nucleotide
  modified_base (4)..(4): 5-methyl modified nucleotide
  modified_base (7)..(7): 5-methyl modified nucleotide
  modified_base (10)..(10): 5-methyl modified nucleotide
  modified_base (22)..(22): 5-methyl modified nucleotide
  source: /note="3' tri-ethylene glycol (TEG)"
cuccaacaucaaggaagauggcau

SEQ ID NO: 13755 - RNA, 23 nt, Artificial Sequence
  source: /note="Description of Artificial Sequence: Synthetic oligonucleotide"
  source: /note="RNA"
  modified_base (1)..(1): 5-methyl bicyclic nucleic acid
  modified_base (3)..(3): 5-methyl modified nucleotide
  modified_base (4)..(4): 5-methyl modified nucleotide
  modified_base (7)..(7): 5-methyl modified nucleotide
  modified_base (10)..(10): 5-methyl modified nucleotide
  modified_base (22)..(22): 5-methyl modified nucleotide
  source: /note="3' tri-ethylene glycol (TEG)"
cuccaacaucaaggaagauggca

SEQ ID NO: 13756 - RNA, 22 nt, Artificial Sequence
  source: /note="Description of Artificial Sequence: Synthetic oligonucleotide"
  source: /note="RNA"
  modified_base (1)..(1): 5-methyl bicyclic nucleic acid
  modified_base (3)..(3): 5-methyl modified nucleotide
  modified_base (4)..(4): 5-methyl modified nucleotide
  modified_base (7)..(7): 5-methyl modified nucleotide
  modified_base (10)..(10): 5-methyl modified nucleotide
  modified_base (22)..(22): 5-methyl modified nucleotide
  source: /note="3' tri-ethylene glycol (TEG)"
cuccaacaucaaggaagauggc

SEQ ID NO: 13757 - RNA, 21 nt, Artificial Sequence
  source: /note="Description of Artificial Sequence: Synthetic oligonucleotide"
  source: /note="RNA"
  modified_base (1)..(1): 5-methyl bicyclic nucleic acid
  modified_base (3)..(3): 5-methyl modified nucleotide
  modified_base (4)..(4): 5-methyl modified nucleotide
  modified_base (7)..(7): 5-methyl modified nucleotide
  modified_base (10)..(10): 5-methyl modified nucleotide
  source: /note="3' tri-ethylene glycol (TEG)"
cuccaacaucaaggaagaugg

SEQ ID NO: 13758 - RNA, 20 nt, Artificial Sequence
  source: /note="Description of Artificial Sequence: Synthetic oligonucleotide"
  source: /note="RNA"
  modified_base (1)..(1): 5-methyl bicyclic nucleic acid
  modified_base (3)..(3): 5-methyl modified nucleotide
  modified_base (4)..(4): 5-methyl modified nucleotide
  modified_base (7)..(7): 5-methyl modified nucleotide
  modified_base (10)..(10): 5-methyl modified nucleotide
  source: /note="3' tri-ethylene glycol (TEG)"
cuccaacaucaaggaagaug

SEQ ID NO: 13759 - RNA, 19 nt, Artificial Sequence
  source: /note="Description of Artificial Sequence: Synthetic oligonucleotide"
  source: /note="RNA"
  modified_base (1)..(1): 5-methyl bicyclic nucleic acid
  modified_base (3)..(3): 5-methyl modified nucleotide
  modified_base (4)..(4): 5-methyl modified nucleotide
  modified_base (7)..(7): 5-methyl modified nucleotide
  modified_base (10)..(10): 5-methyl modified nucleotide
  source: /note="3' tri-ethylene glycol (TEG)"
cuccaacaucaaggaagau

SEQ ID NO: 13760 - RNA, 18 nt, Artificial Sequence
  source: /note="Description of Artificial Sequence: Synthetic oligonucleotide"
  source: /note="RNA"
  modified_base (1)..(1): 5-methyl bicyclic nucleic acid
  modified_base (3)..(3): 5-methyl modified nucleotide
  modified_base (4)..(4): 5-methyl modified nucleotide
  modified_base (7)..(7): 5-methyl modified nucleotide
  modified_base (10)..(10): 5-methyl modified nucleotide
  source: /note="3' tri-ethylene glycol (TEG)"
cuccaacaucaaggaaga

SEQ ID NO: 13761 - RNA, 17 nt, Artificial Sequence
  source: /note="Description of Artificial Sequence: Synthetic oligonucleotide"
  source: /note="RNA"
  modified_base (1)..(1): 5-methyl bicyclic nucleic acid
  modified_base (3)..(3): 5-methyl modified nucleotide
  modified_base (4)..(4): 5-methyl modified nucleotide
  modified_base (7)..(7): 5-methyl modified nucleotide
  modified_base (10)..(10): 5-methyl modified nucleotide
  source: /note="3' tri-ethylene glycol (TEG)"
cuccaacaucaaggaag

SEQ ID NO: 13762 - DNA, 29 bp, Artificial Sequence
  source: /note="Description of Artificial Sequence: Synthetic oligonucleotide"
  source: /note="Description of Combined DNA/RNA Molecule: Synthetic oligonucleotide"
  source: /note="DNA/RNA"
  modified_base (1)..(1): bicyclic nucleic acid (BNA)
  modified_base (2)..(2): 5-methyl modified nucleotide
  modified_base (3)..(3): 5-methyl modified nucleotide
  modified_base (6)..(6): 5-methyl modified nucleotide
  modified_base (9)..(9): 5-methyl modified nucleotide
  modified_base (21)..(21): 5-methyl modified nucleotide
  modified_base (26)..(26): 5-methyl modified nucleotide
  source: /note="3' tri-ethylene glycol (TEG)"
tccaacaucaaggaagauggcauuucuag

SEQ ID NO: 13763 - DNA, 28 bp, Artificial Sequence
  source: /note="Description of Artificial Sequence: Synthetic oligonucleotide"
  source: /note="Description of Combined DNA/RNA Molecule: Synthetic oligonucleotide"
  source: /note="DNA/RNA"
  modified_base (1)..(1): bicyclic nucleic acid (BNA)
  modified_base (2)..(2): 5-methyl modified nucleotide
  modified_base (3)..(3): 5-methyl modified nucleotide
  modified_base (6)..(6): 5-methyl modified nucleotide
  modified_base (9)..(9): 5-methyl modified nucleotide
  modified_base (21)..(21): 5-methyl modified nucleotide
  modified_base (26)..(26): 5-methyl modified nucleotide
  source: /note="3' tri-ethylene glycol (TEG)"
tccaacaucaaggaagauggcauuucua

SEQ ID NO: 13764 - DNA, 27 bp, Artificial Sequence
  source: /note="Description of Artificial Sequence: Synthetic oligonucleotide"
  source: /note="Description of Combined DNA/RNA Molecule: Synthetic oligonucleotide"
  source: /note="DNA/RNA"
  modified_base (1)..(1): bicyclic nucleic acid (BNA)
  modified_base (2)..(2): 5-methyl modified nucleotide
  modified_base (3)..(3): 5-methyl modified nucleotide
  modified_base (6)..(6): 5-methyl modified nucleotide
  modified_base (9)..(9): 5-methyl modified nucleotide
  modified_base (21)..(21): 5-methyl modified nucleotide
  modified_base (26)..(26): 5-methyl modified nucleotide
  source: /note="3' tri-ethylene glycol (TEG)"
tccaacaucaaggaagauggcauuucu

SEQ ID NO: 13765 - DNA, 26 bp, Artificial Sequence
  source: /note="Description of Artificial Sequence: Synthetic oligonucleotide"
  source: /note="Description of Combined DNA/RNA Molecule: Synthetic oligonucleotide"
  source: /note="DNA/RNA"
  modified_base (1)..(1): bicyclic nucleic acid (BNA)
  modified_base (2)..(2): 5-methyl modified nucleotide
  modified_base (3)..(3): 5-methyl modified nucleotide
  modified_base (6)..(6): 5-methyl modified nucleotide
  modified_base (9)..(9): 5-methyl modified nucleotide
  modified_base (21)..(21): 5-methyl modified nucleotide
  modified_base (26)..(26): 5-methyl modified nucleotide
  source: /note="3' tri-ethylene glycol (TEG)"
tccaacaucaaggaagauggcauuuc

SEQ ID NO: 13766 - DNA, 25 bp, Artificial Sequence
  source: /note="Description of Artificial Sequence: Synthetic oligonucleotide"
  source: /note="Description of Combined DNA/RNA Molecule: Synthetic oligonucleotide"
  source: /note="DNA/RNA"
  modified_base (1)..(1): bicyclic nucleic acid (BNA)
  modified_base (2)..(2): 5-methyl modified nucleotide
  modified_base (3)..(3): 5-methyl modified nucleotide
  modified_base (6)..(6): 5-methyl modified nucleotide
  modified_base (9)..(9): 5-methyl modified nucleotide
  modified_base (21)..(21): 5-methyl modified nucleotide
  source: /note="3' tri-ethylene glycol (TEG)"
tccaacaucaaggaagauggcauuu

SEQ ID NO: 13767 - DNA, 24 bp, Artificial Sequence
  source: /note="Description of Artificial Sequence: Synthetic oligonucleotide"
  source: /note="Description of Combined DNA/RNA Molecule: Synthetic oligonucleotide"
  source: /note="DNA/RNA"
  modified_base (1)..(1): bicyclic nucleic acid (BNA)
  modified_base (2)..(2): 5-methyl modified nucleotide
  modified_base (3)..(3): 5-methyl modified nucleotide
  modified_base (6)..(6): 5-methyl modified nucleotide
  modified_base (9)..(9): 5-methyl modified nucleotide
  modified_base (21)..(21): 5-methyl modified nucleotide
  source: /note="3' tri-ethylene glycol (TEG)"
tccaacaucaaggaagauggcauu

SEQ ID NO: 13768 - DNA, 23 bp, Artificial Sequence
  source: /note="Description of Artificial Sequence: Synthetic oligonucleotide"
  source: /note="Description of Combined DNA/RNA Molecule: Synthetic oligonucleotide"
  source: /note="DNA/RNA"
  modified_base (1)..(1): bicyclic nucleic acid (BNA)
  modified_base (2)..(2): 5-methyl modified nucleotide
  modified_base (3)..(3): 5-methyl modified nucleotide
  modified_base (6)..(6): 5-methyl modified nucleotide
  modified_base (9)..(9): 5-methyl modified nucleotide
  modified_base (21)..(21): 5-methyl modified nucleotide
  source: /note="3' tri-ethylene glycol (TEG)"
tccaacaucaaggaagauggcau

SEQ ID NO: 13769 - DNA, 22 bp, Artificial Sequence
  source: /note="Description of Artificial Sequence: Synthetic oligonucleotide"
  source: /note="Description of Combined DNA/RNA Molecule: Synthetic oligonucleotide"
  source: /note="DNA/RNA"
  modified_base (1)..(1): bicyclic nucleic acid (BNA)
  modified_base (2)..(2): 5-methyl modified nucleotide
  modified_base (3)..(3): 5-methyl modified nucleotide
  modified_base (6)..(6): 5-methyl modified nucleotide
  modified_base (9)..(9): 5-methyl modified nucleotide
  modified_base (21)..(21): 5-methyl modified nucleotide
  source: /note="3' tri-ethylene glycol (TEG)"
tccaacaucaaggaagauggca

SEQ ID NO: 13770 - DNA, 21 bp, Artificial Sequence
  source: /note="Description of Artificial Sequence: Synthetic oligonucleotide"
  source: /note="Description of Combined DNA/RNA Molecule: Synthetic oligonucleotide"
  source: /note="DNA/RNA"
  modified_base (1)..(1): bicyclic nucleic acid (BNA)
  modified_base (2)..(2): 5-methyl modified nucleotide
  modified_base (3)..(3): 5-methyl modified nucleotide
  modified_base (6)..(6): 5-methyl modified nucleotide
  modified_base (9)..(9): 5-methyl modified nucleotide
  modified_base (21)..(21): 5-methyl modified nucleotide
  source: /note="3' tri-ethylene glycol (TEG)"
tccaacaucaaggaagauggc

SEQ ID NO: 13771 - DNA, 20 bp, Artificial Sequence
  source: /note="Description of Artificial Sequence: Synthetic oligonucleotide"
  source: /note="Description of Combined DNA/RNA Molecule: Synthetic oligonucleotide"
  source: /note="DNA/RNA"
  modified_base (1)..(1): bicyclic nucleic acid (BNA)
  modified_base (2)..(2): 5-methyl modified nucleotide
  modified_base (3)..(3): 5-methyl modified nucleotide
  modified_base (6)..(6): 5-methyl modified nucleotide
  modified_base (9)..(9): 5-methyl modified nucleotide
  source: /note="3' tri-ethylene glycol (TEG)"
tccaacaucaaggaagaugg

SEQ ID NO: 13772 - DNA, 19 bp, Artificial Sequence
  source: /note="Description of Artificial Sequence: Synthetic oligonucleotide"
  source: /note="Description of Combined DNA/RNA Molecule: Synthetic oligonucleotide"
  source: /note="DNA/RNA"
  modified_base (1)..(1): bicyclic nucleic acid (BNA)
  modified_base (2)..(2): 5-methyl modified nucleotide
  modified_base (3)..(3): 5-methyl modified nucleotide
  modified_base (6)..(6): 5-methyl modified nucleotide
  modified_base (9)..(9): 5-methyl modified nucleotide
  source: /note="3' tri-ethylene glycol (TEG)"
tccaacaucaaggaagaug

SEQ ID NO: 13773 - DNA, 18 bp, Artificial Sequence
  source: /note="Description of Artificial Sequence: Synthetic oligonucleotide"
  source: /note="Description of Combined DNA/RNA Molecule: Synthetic oligonucleotide"
  source: /note="DNA/RNA"
  modified_base (1)..(1): bicyclic nucleic acid (BNA)
  modified_base (2)..(2): 5-methyl modified nucleotide
  modified_base (3)..(3): 5-methyl modified nucleotide
  modified_base (6)..(6): 5-methyl modified nucleotide
  modified_base (9)..(9): 5-methyl modified nucleotide
  source: /note="3' tri-ethylene glycol (TEG)"
tccaacaucaaggaagau

SEQ ID NO: 13774 - DNA, 17 bp, Artificial Sequence
  source: /note="Description of Artificial Sequence: Synthetic oligonucleotide"
  source: /note="Description of Combined DNA/RNA Molecule: Synthetic oligonucleotide"
  source: /note="DNA/RNA"
  modified_base (1)..(1): bicyclic nucleic acid (BNA)
  modified_base (2)..(2): 5-methyl modified nucleotide
  modified_base (3)..(3): 5-methyl modified nucleotide
  modified_base (6)..(6): 5-methyl modified nucleotide
  modified_base (9)..(9): 5-methyl modified nucleotide
  source: /note="3' tri-ethylene glycol (TEG)"
tccaacaucaaggaaga

SEQ ID NO: 13775 - DNA, 16 bp, Artificial Sequence
  source: /note="Description of Artificial Sequence: Synthetic oligonucleotide"
  source: /note="Description of Combined DNA/RNA Molecule: Synthetic oligonucleotide"
  source: /note="DNA/RNA"
  modified_base (1)..(1): bicyclic nucleic acid (BNA)
  modified_base (2)..(2): 5-methyl modified nucleotide
  modified_base (3)..(3): 5-methyl modified nucleotide
  modified_base (6)..(6): 5-methyl modified nucleotide
  modified_base (9)..(9): 5-methyl modified nucleotide
  source: /note="3' tri-ethylene glycol (TEG)"
tccaacaucaaggaag

SEQ ID NO: 13776 - RNA, 28 nt, Artificial Sequence
  source: /note="Description of Artificial Sequence: Synthetic oligonucleotide"
  source: /note="RNA"
  modified_base (1)..(1): 5-methyl bicyclic nucleic acid
  modified_base (2)..(2): 5-methyl modified nucleotide
  modified_base (5)..(5): 5-methyl modified nucleotide
  modified_base (8)..(8): 5-methyl modified nucleotide
  modified_base (20)..(20): 5-methyl modified nucleotide
  modified_base (25)..(25): 5-methyl modified nucleotide
  source: /note="3' tri-ethylene glycol (TEG)"
ccaacaucaaggaagauggcauuucuag

SEQ ID NO: 13777 - RNA, 27 nt, Artificial Sequence
  source: /note="Description of Artificial Sequence: Synthetic oligonucleotide"
  source: /note="RNA"
  modified_base (1)..(1): 5-methyl bicyclic nucleic acid
  modified_base (2)..(2): 5-methyl modified nucleotide
  modified_base (5)..(5): 5-methyl modified nucleotide
  modified_base (8)..(8): 5-methyl modified nucleotide
  modified_base (20)..(20): 5-methyl modified nucleotide
  modified_base (25)..(25): 5-methyl modified nucleotide
  source: /note="3' tri-ethylene glycol (TEG)"
ccaacaucaaggaagauggcauuucua

SEQ ID NO: 13778 - RNA, 26 nt, Artificial Sequence
  source: /note="Description of Artificial Sequence: Synthetic oligonucleotide"
  source: /note="RNA"
  modified_base (1)..(1): 5-methyl bicyclic nucleic acid
  modified_base (2)..(2): 5-methyl modified nucleotide
  modified_base (5)..(5): 5-methyl modified nucleotide
  modified_base (8)..(8): 5-methyl modified nucleotide
  modified_base (20)..(20): 5-methyl modified nucleotide
  modified_base (25)..(25): 5-methyl modified nucleotide
  source: /note="3' tri-ethylene glycol (TEG)"
ccaacaucaaggaagauggcauuucu

SEQ ID NO: 13779 - RNA, 25 nt, Artificial Sequence
  source: /note="Description of Artificial Sequence: Synthetic oligonucleotide"
  source: /note="RNA"
  modified_base (1)..(1): 5-methyl bicyclic nucleic acid
  modified_base (2)..(2): 5-methyl modified nucleotide
  modified_base (5)..(5): 5-methyl modified nucleotide
  modified_base (8)..(8): 5-methyl modified nucleotide
  modified_base (20)..(20): 5-methyl modified nucleotide
  modified_base (25)..(25): 5-methyl modified nucleotide
  source: /note="3' tri-ethylene glycol (TEG)"
ccaacaucaaggaagauggcauuuc

SEQ ID NO: 13780 - RNA, 24 nt, Artificial Sequence
  source: /note="Description of Artificial Sequence: Synthetic oligonucleotide"
  source: /note="RNA"
  modified_base (1)..(1): 5-methyl bicyclic nucleic acid
  modified_base (2)..(2): 5-methyl modified nucleotide
  modified_base (5)..(5): 5-methyl modified nucleotide
  modified_base (8)..(8): 5-methyl modified nucleotide
  modified_base (20)..(20): 5-methyl modified nucleotide
  source: /note="3' tri-ethylene glycol (TEG)"
ccaacaucaaggaagauggcauuu

SEQ ID NO: 13781 - RNA, 23 nt, Artificial Sequence
  source: /note="Description of Artificial Sequence: Synthetic oligonucleotide"
  source: /note="RNA"
  modified_base (1)..(1): 5-methyl bicyclic nucleic acid
  modified_base (2)..(2): 5-methyl modified nucleotide
  modified_base (5)..(5): 5-methyl modified nucleotide
  modified_base (8)..(8): 5-methyl modified nucleotide
  modified_base (20)..(20): 5-methyl modified nucleotide
  source: /note="3' tri-ethylene glycol (TEG)"
ccaacaucaaggaagauggcauu

SEQ ID NO: 13782 - RNA, 22 nt, Artificial Sequence
  source: /note="Description of Artificial Sequence: Synthetic oligonucleotide"
  source: /note="RNA"
  modified_base (1)..(1): 5-methyl bicyclic nucleic acid
  modified_base (2)..(2): 5-methyl modified nucleotide
  modified_base (5)..(5): 5-methyl modified nucleotide
  modified_base (8)..(8): 5-methyl modified nucleotide
  modified_base (20)..(20): 5-methyl modified nucleotide
  source: /note="3' tri-ethylene glycol (TEG)"
ccaacaucaaggaagauggcau

SEQ ID NO: 13783 - RNA, 21 nt, Artificial Sequence
  source: /note="Description of Artificial Sequence: Synthetic oligonucleotide"
  source: /note="RNA"
  modified_base (1)..(1): 5-methyl bicyclic nucleic acid
  modified_base (2)..(2): 5-methyl modified nucleotide
  modified_base (5)..(5): 5-methyl modified nucleotide
  modified_base (8)..(8): 5-methyl modified nucleotide
  modified_base (20)..(20): 5-methyl modified nucleotide
  source: /note="3' tri-ethylene glycol (TEG)"
ccaacaucaaggaagauggca

SEQ ID NO: 13784 - RNA, 20 nt, Artificial Sequence
  source: /note="Description of Artificial Sequence: Synthetic oligonucleotide"
  source: /note="RNA"
  modified_base (1)..(1): 5-methyl bicyclic nucleic acid
  modified_base (2)..(2): 5-methyl modified nucleotide
  modified_base (5)..(5): 5-methyl modified nucleotide
  modified_base (8)..(8): 5-methyl modified nucleotide
  modified_base (20)..(20): 5-methyl modified nucleotide
  source: /note="3' tri-ethylene glycol (TEG)"
ccaacaucaaggaagauggc

SEQ ID NO: 13785 - RNA, 19 nt, Artificial Sequence
  source: /note="Description of Artificial Sequence: Synthetic oligonucleotide"
  source: /note="RNA"
  modified_base (1)..(1): 5-methyl bicyclic nucleic acid
  modified_base (2)..(2): 5-methyl modified nucleotide
  modified_base (5)..(5): 5-methyl modified nucleotide
  modified_base (8)..(8): 5-methyl modified nucleotide
  source: /note="3' tri-ethylene glycol (TEG)"
ccaacaucaaggaagaugg

SEQ ID NO: 13786 - RNA, 18 nt, Artificial Sequence
  source: /note="Description of Artificial Sequence: Synthetic oligonucleotide"
  source: /note="RNA"
  modified_base (1)..(1): 5-methyl bicyclic nucleic acid
  modified_base (2)..(2): 5-methyl modified nucleotide
  modified_base (5)..(5): 5-methyl modified nucleotide
  modified_base (8)..(8): 5-methyl modified nucleotide
  source: /note="3' tri-ethylene glycol (TEG)"
ccaacaucaaggaagaug

SEQ ID NO: 13787 - RNA, 17 nt, Artificial Sequence
  source: /note="Description of Artificial Sequence: Synthetic oligonucleotide"
  source: /note="RNA"
  modified_base (1)..(1): 5-methyl bicyclic nucleic acid
  modified_base (2)..(2): 5-methyl modified nucleotide
  modified_base (5)..(5): 5-methyl modified nucleotide
  modified_base (8)..(8): 5-methyl modified nucleotide
  source: /note="3' tri-ethylene glycol (TEG)"
ccaacaucaaggaagau

SEQ ID NO: 13788 - RNA, 16 nt, Artificial Sequence
  source: /note="Description of Artificial Sequence: Synthetic oligonucleotide"
  source: /note="RNA"
  modified_base (1)..(1): 5-methyl bicyclic nucleic acid
  modified_base (2)..(2): 5-methyl modified nucleotide
  modified_base (5)..(5): 5-methyl modified nucleotide
  modified_base (8)..(8): 5-methyl modified nucleotide
  source: /note="3' tri-ethylene glycol (TEG)"
ccaacaucaaggaaga

SEQ ID NO: 13789 - RNA, 15 nt, Artificial Sequence
  source: /note="Description of Artificial Sequence: Synthetic oligonucleotide"
  source: /note="RNA"
  modified_base (1)..(1): 5-methyl bicyclic nucleic acid
  modified_base (2)..(2): 5-methyl modified nucleotide
  modified_base (5)..(5): 5-methyl modified nucleotide
  modified_base (8)..(8): 5-methyl modified nucleotide
  source: /note="3' tri-ethylene glycol (TEG)"
ccaacaucaaggaag

SEQ ID NO: 13790 - RNA, 27 nt, Artificial Sequence
  source: /note="Description of Artificial Sequence: Synthetic oligonucleotide"
  source: /note="RNA"
  modified_base (1)..(1): 5-methyl bicyclic nucleic acid
  modified_base (4)..(4): 5-methyl modified nucleotide
  modified_base (7)..(7): 5-methyl modified nucleotide
  modified_base (19)..(19): 5-methyl modified nucleotide
  modified_base (24)..(24): 5-methyl modified nucleotide
  source: /note="3' tri-ethylene glycol (TEG)"
caacaucaaggaagauggcauuucuag

SEQ ID NO: 13791 - RNA, 26 nt, Artificial Sequence
  source: /note="Description of Artificial Sequence: Synthetic oligonucleotide"
  source: /note="RNA"
  modified_base (1)..(1): 5-methyl bicyclic nucleic acid
  modified_base (4)..(4): 5-methyl modified nucleotide
  modified_base (7)..(7): 5-methyl modified nucleotide
  modified_base (19)..(19): 5-methyl modified nucleotide
  modified_base (24)..(24): 5-methyl modified nucleotide
  source: /note="3' tri-ethylene glycol (TEG)"
caacaucaaggaagauggcauuucua

SEQ ID NO: 13792 - RNA, 25 nt, Artificial Sequence
  source: /note="Description of Artificial Sequence: Synthetic oligonucleotide"
  source: /note="RNA"
  modified_base (1)..(1): 5-methyl bicyclic nucleic acid
  modified_base (4)..(4): 5-methyl modified nucleotide
  modified_base (7)..(7): 5-methyl modified nucleotide
  modified_base (19)..(19): 5-methyl modified nucleotide
  modified_base (24)..(24): 5-methyl modified nucleotide
  source: /note="3' tri-ethylene glycol (TEG)"
caacaucaaggaagauggcauuucu

SEQ ID NO: 13793 - RNA, 24 nt, Artificial Sequence
  source: /note="Description of Artificial Sequence: Synthetic oligonucleotide"
  source: /note="RNA"
  modified_base (1)..(1): 5-methyl bicyclic nucleic acid
  modified_base (4)..(4): 5-methyl modified nucleotide
  modified_base (7)..(7): 5-methyl modified nucleotide
  modified_base (19)..(19): 5-methyl modified nucleotide
  modified_base (24)..(24): 5-methyl modified nucleotide
  source: /note="3' tri-ethylene glycol (TEG)"
caacaucaaggaagauggcauuuc

SEQ ID NO: 13794 - RNA, 23 nt, Artificial Sequence
  source: /note="Description of Artificial Sequence: Synthetic oligonucleotide"
  source: /note="RNA"
  modified_base (1)..(1): 5-methyl bicyclic nucleic acid
  modified_base (4)..(4): 5-methyl modified nucleotide
  modified_base (7)..(7): 5-methyl modified nucleotide
  modified_base (19)..(19): 5-methyl modified nucleotide
  source: /note="3' tri-ethylene glycol (TEG)"
caacaucaaggaagauggcauuu

SEQ ID NO: 13795 - RNA, 22 nt, Artificial Sequence
  source: /note="Description of Artificial Sequence: Synthetic oligonucleotide"
  source: /note="RNA"
  modified_base (1)..(1): 5-methyl bicyclic nucleic acid
  modified_base (4)..(4): 5-methyl modified nucleotide
  modified_base (7)..(7): 5-methyl modified nucleotide
  modified_base (19)..(19): 5-methyl modified nucleotide
  source: /note="3' tri-ethylene glycol (TEG)"
caacaucaaggaagauggcauu

SEQ ID NO: 13796 - RNA, 21 nt, Artificial Sequence
  source: /note="Description of Artificial Sequence: Synthetic oligonucleotide"
  source: /note="RNA"
  modified_base (1)..(1): 5-methyl bicyclic nucleic acid
  modified_base (4)..(4): 5-methyl modified nucleotide
  modified_base (7)..(7): 5-methyl modified nucleotide
  modified_base (19)..(19): 5-methyl modified nucleotide
  source: /note="3' tri-ethylene glycol (TEG)"
caacaucaaggaagauggcau

SEQ ID NO: 13797 - RNA, 20 nt, Artificial Sequence
  source: /note="Description of Artificial Sequence: Synthetic oligonucleotide"
  source: /note="RNA"
  modified_base (1)..(1): 5-methyl bicyclic nucleic acid
  modified_base (4)..(4): 5-methyl modified nucleotide
  modified_base (7)..(7): 5-methyl modified nucleotide
  modified_base (19)..(19): 5-methyl modified nucleotide
  source: /note="3' tri-ethylene glycol (TEG)"
caacaucaaggaagauggca

SEQ ID NO: 13798 - RNA, 19 nt, Artificial Sequence
  source: /note="Description of Artificial Sequence: Synthetic oligonucleotide"
  source: /note="RNA"
  modified_base (1)..(1): 5-methyl bicyclic nucleic acid
  modified_base (4)..(4): 5-methyl modified nucleotide
  modified_base (7)..(7): 5-methyl modified nucleotide
  modified_base (19)..(19): 5-methyl modified nucleotide
  source: /note="3' tri-ethylene glycol (TEG)"
caacaucaaggaagauggc

SEQ ID NO: 13799 - RNA, 18 nt, Artificial Sequence
  source: /note="Description of Artificial Sequence: Synthetic oligonucleotide"
  source: /note="RNA"
  modified_base (1)..(1): 5-methyl bicyclic nucleic acid
  modified_base (4)..(4): 5-methyl modified nucleotide
  modified_base (7)..(7): 5-methyl modified nucleotide
  source: /note="3' tri-ethylene glycol (TEG)"
caacaucaaggaagaugg

SEQ ID NO: 13800 - RNA, 17 nt, Artificial Sequence
  source: /note="Description of Artificial Sequence: Synthetic oligonucleotide"
  source: /note="RNA"
  modified_base (1)..(1): 5-methyl bicyclic nucleic acid
  modified_base (4)..(4): 5-methyl modified nucleotide
  modified_base (7)..(7): 5-methyl modified nucleotide
  source: /note="3' tri-ethylene glycol (TEG)"
caacaucaaggaagaug

SEQ ID NO: 13801 - RNA, 16 nt, Artificial Sequence
  source: /note="Description of Artificial Sequence: Synthetic oligonucleotide"
  source: /note="RNA"
  modified_base (1)..(1): 5-methyl bicyclic nucleic acid
  modified_base (4)..(4): 5-methyl modified nucleotide
  modified_base (7)..(7): 5-methyl modified nucleotide
  source: /note="3' tri-ethylene glycol (TEG)"
caacaucaaggaagau

SEQ ID NO: 13802 - RNA, 15 nt, Artificial Sequence
  source: /note="Description of Artificial Sequence: Synthetic oligonucleotide"
  source: /note="RNA"
  modified_base (1)..(1): 5-methyl bicyclic nucleic acid
  modified_base (4)..(4): 5-methyl modified nucleotide
  modified_base (7)..(7): 5-methyl modified nucleotide
  source: /note="3' tri-ethylene glycol (TEG)"
caacaucaaggaaga

SEQ ID NO: 13803 - RNA, 14 nt, Artificial Sequence
  source: /note="Description of Artificial Sequence: Synthetic oligonucleotide"
  source: /note="RNA"
  modified_base (1)..(1): 5-methyl bicyclic nucleic acid
  modified_base (4)..(4): 5-methyl modified nucleotide
  modified_base (7)..(7): 5-methyl modified nucleotide
  source: /note="3' tri-ethylene glycol (TEG)"
caacaucaaggaag

SEQ ID NO: 13804 - RNA, 26 nt, Artificial Sequence
  source: /note="Description of Artificial Sequence: Synthetic oligonucleotide"
  source: /note="RNA"
  modified_base (1)..(1): bicyclic nucleic acid (BNA)
  modified_base (3)..(3): 5-methyl modified nucleotide
  modified_base (6)..(6): 5-methyl modified nucleotide
  modified_base (18)..(18): 5-methyl modified nucleotide
  modified_base (23)..(23): 5-methyl modified nucleotide
  source: /note="3' tri-ethylene glycol (TEG)"
aacaucaaggaagauggcauuucuag

SEQ ID NO: 13805 - RNA, 25 nt, Artificial Sequence
  source: /note="Description of Artificial Sequence: Synthetic oligonucleotide"
  source: /note="RNA"
  modified_base (1)..(1): bicyclic nucleic acid (BNA)
  modified_base (3)..(3): 5-methyl modified nucleotide
  modified_base (6)..(6): 5-methyl modified nucleotide
  modified_base (18)..(18): 5-methyl modified nucleotide
  modified_base (23)..(23): 5-methyl modified nucleotide
  source: /note="3' tri-ethylene glycol (TEG)"
aacaucaaggaagauggcauuucua

SEQ ID NO: 13806 - RNA, 24 nt, Artificial Sequence
  source: /note="Description of Artificial Sequence: Synthetic oligonucleotide"
  source: /note="RNA"
  modified_base (1)..(1): bicyclic nucleic acid (BNA)
  modified_base (3)..(3): 5-methyl modified nucleotide
  modified_base (6)..(6): 5-methyl modified nucleotide
  modified_base (18)..(18): 5-methyl modified nucleotide
  modified_base (23)..(23): 5-methyl modified nucleotide
  source: /note="3' tri-ethylene glycol (TEG)"
aacaucaaggaagauggcauuucu

SEQ ID NO: 13807 - RNA, 23 nt, Artificial Sequence
  source: /note="Description of Artificial Sequence: Synthetic oligonucleotide"
  source: /note="RNA"
  modified_base (1)..(1): bicyclic nucleic acid (BNA)
  modified_base (3)..(3): 5-methyl modified nucleotide
  modified_base (6)..(6): 5-methyl modified nucleotide
  modified_base (18)..(18): 5-methyl modified nucleotide
  modified_base (23)..(23): 5-methyl modified nucleotide
  source: /note="3' tri-ethylene glycol (TEG)"
aacaucaaggaagauggcauuuc

SEQ ID NO: 13808 - RNA, 22 nt, Artificial Sequence
  source: /note="Description of Artificial Sequence: Synthetic oligonucleotide"
  source: /note="RNA"
  modified_base (1)..(1): bicyclic nucleic acid (BNA)
  modified_base (3)..(3): 5-methyl modified nucleotide
  modified_base (6)..(6): 5-methyl modified nucleotide
  modified_base (18)..(18): 5-methyl modified nucleotide
  source: /note="3' tri-ethylene glycol (TEG)"
aacaucaaggaagauggcauuu

SEQ ID NO: 13809 - RNA, 21 nt, Artificial Sequence
  source: /note="Description of Artificial Sequence: Synthetic oligonucleotide"
  source: /note="RNA"
  modified_base (1)..(1): bicyclic nucleic acid (BNA)
  modified_base (3)..(3): 5-methyl modified nucleotide
  modified_base (6)..(6): 5-methyl modified nucleotide
  modified_base (18)..(18): 5-methyl modified nucleotide
  source: /note="3' tri-ethylene glycol (TEG)"
aacaucaaggaagauggcauu

SEQ ID NO: 13810 - RNA, 20 nt, Artificial Sequence
  source: /note="Description of Artificial Sequence: Synthetic oligonucleotide"
  source: /note="RNA"
  modified_base (1)..(1): bicyclic nucleic acid (BNA)
  modified_base (3)..(3): 5-methyl modified nucleotide
  modified_base (6)..(6): 5-methyl modified nucleotide
  modified_base (18)..(18): 5-methyl modified nucleotide
  source: /note="3' tri-ethylene glycol (TEG)"
aacaucaaggaagauggcau

SEQ ID NO: 13811 - RNA, 19 nt, Artificial Sequence
  source: /note="Description of Artificial Sequence: Synthetic oligonucleotide"
  source: /note="RNA"
  modified_base (1)..(1): bicyclic nucleic acid (BNA)
  modified_base (3)..(3): 5-methyl modified nucleotide
  modified_base (6)..(6): 5-methyl modified nucleotide
  modified_base (18)..(18): 5-methyl modified nucleotide
  source: /note="3' tri-ethylene glycol (TEG)"
aacaucaaggaagauggca

SEQ ID NO: 13812 - RNA, 18 nt, Artificial Sequence
  source: /note="Description of Artificial Sequence: Synthetic oligonucleotide"
  source: /note="RNA"
  modified_base (1)..(1): bicyclic nucleic acid (BNA)
  modified_base (3)..(3): 5-methyl modified nucleotide
  modified_base (6)..(6): 5-methyl modified nucleotide
  modified_base (18)..(18): 5-methyl modified nucleotide
  source: /note="3' tri-ethylene glycol (TEG)"
aacaucaaggaagauggc

SEQ ID NO: 13813 - RNA, 17 nt, Artificial Sequence
  source: /note="Description of Artificial Sequence: Synthetic oligonucleotide"
  source: /note="RNA"
  modified_base (1)..(1): bicyclic nucleic acid (BNA)
  modified_base (3)..(3): 5-methyl modified nucleotide
  modified_base (6)..(6): 5-methyl modified nucleotide
  source: /note="3' tri-ethylene glycol (TEG)"
aacaucaaggaagaugg

SEQ ID NO: 13814 - RNA, 16 nt, Artificial Sequence
  source: /note="Description of Artificial Sequence: Synthetic oligonucleotide"
  source: /note="RNA"
  modified_base (1)..(1): bicyclic nucleic acid (BNA)
  modified_base (3)..(3): 5-methyl modified nucleotide
  modified_base (6)..(6): 5-methyl modified nucleotide
  source: /note="3' tri-ethylene glycol (TEG)"
aacaucaaggaagaug

SEQ ID NO: 13815 - RNA, 15 nt, Artificial Sequence
  source: /note="Description of Artificial Sequence: Synthetic oligonucleotide"
  source: /note="RNA"
  modified_base (1)..(1): bicyclic nucleic acid (BNA)
  modified_base (3)..(3): 5-methyl modified nucleotide
  modified_base (6)..(6): 5-methyl modified nucleotide
  source: /note="3' tri-ethylene glycol (TEG)"
aacaucaaggaagau

SEQ ID NO: 13816 - RNA, 14 nt, Artificial Sequence
  source: /note="Description of Artificial Sequence: Synthetic oligonucleotide"
  source: /note="RNA"
  modified_base (1)..(1): bicyclic nucleic acid (BNA)
  modified_base (3)..(3): 5-methyl modified nucleotide
  modified_base (6)..(6): 5-methyl modified nucleotide
  source: /note="3' tri-ethylene glycol (TEG)"
aacaucaaggaaga

SEQ ID NO: 13817 - RNA, 13 nt, Artificial Sequence
  source: /note="Description of Artificial Sequence: Synthetic oligonucleotide"
  source: /note="RNA"
  modified_base (1)..(1): bicyclic nucleic acid (BNA)
  modified_base (3)..(3): 5-methyl modified nucleotide
  modified_base (6)..(6): 5-methyl modified nucleotide
  source: /note="3' tri-ethylene glycol (TEG)"
aacaucaaggaag

SEQ ID NO: 13818 - RNA, 25 nt, Artificial Sequence
  source: /note="Description of Artificial Sequence: Synthetic oligonucleotide"
  source: /note="RNA"
  modified_base (1)..(1): bicyclic nucleic acid (BNA)
  modified_base (2)..(2): 5-methyl modified nucleotide
  modified_base (5)..(5): 5-methyl modified nucleotide
  modified_base (17)..(17): 5-methyl modified nucleotide
  modified_base (22)..(22): 5-methyl modified nucleotide
  source: /note="3' tri-ethylene glycol (TEG)"
acaucaaggaagauggcauuucuag

SEQ ID NO: 13819 - RNA, 24 nt, Artificial Sequence
  source: /note="Description of Artificial Sequence: Synthetic oligonucleotide"
  source: /note="RNA"
  modified_base (1)..(1): bicyclic nucleic acid (BNA)
  modified_base (2)..(2): 5-methyl modified nucleotide
  modified_base (5)..(5): 5-methyl modified nucleotide
  modified_base (17)..(17): 5-methyl modified nucleotide
  modified_base (22)..(22): 5-methyl modified nucleotide
  source: /note="3' tri-ethylene glycol (TEG)"
acaucaaggaagauggcauuucua

SEQ ID NO: 13820 - RNA, 23 nt, Artificial Sequence
  source: /note="Description of Artificial Sequence: Synthetic oligonucleotide"
  source: /note="RNA"
  modified_base (1)..(1): bicyclic nucleic acid (BNA)
  modified_base (2)..(2): 5-methyl modified nucleotide
  modified_base (5)..(5): 5-methyl modified nucleotide
  modified_base (17)..(17): 5-methyl modified nucleotide
  modified_base (22)..(22): 5-methyl modified nucleotide
  source: /note="3' tri-ethylene glycol (TEG)"
acaucaaggaagauggcauuucu

SEQ ID NO: 13821 - RNA, 22 nt, Artificial Sequence
  source: /note="Description of Artificial Sequence: Synthetic oligonucleotide"
  source: /note="RNA"
  modified_base (1)..(1): bicyclic nucleic acid (BNA)
  modified_base (2)..(2): 5-methyl modified nucleotide
  modified_base (5)..(5): 5-methyl modified nucleotide
  modified_base (17)..(17): 5-methyl modified nucleotide
  modified_base (22)..(22): 5-methyl modified nucleotide
  source: /note="3' tri-ethylene glycol (TEG)"
acaucaaggaagauggcauuuc

SEQ ID NO: 13822 - RNA, 21 nt, Artificial Sequence
  source: /note="Description of Artificial Sequence: Synthetic oligonucleotide"
  source: /note="RNA"
  modified_base (1)..(1): bicyclic nucleic acid (BNA)
  modified_base (2)..(2): 5-methyl modified nucleotide
  modified_base (5)..(5): 5-methyl modified nucleotide
  modified_base (17)..(17): 5-methyl modified nucleotide
  source: /note="3' tri-ethylene glycol (TEG)"
acaucaaggaagauggcauuu

SEQ ID NO: 13823 - RNA, 20 nt, Artificial Sequence
  source: /note="Description of Artificial Sequence: Synthetic oligonucleotide"
  source: /note="RNA"
  modified_base (1)..(1): bicyclic nucleic acid (BNA)
  modified_base (2)..(2): 5-methyl modified nucleotide
  modified_base (5)..(5): 5-methyl modified nucleotide
  modified_base (17)..(17): 5-methyl modified nucleotide
  source: /note="3' tri-ethylene glycol (TEG)"
acaucaaggaagauggcauu

SEQ ID NO: 13824 - RNA, 19 nt, Artificial Sequence
  source: /note="Description of Artificial Sequence: Synthetic oligonucleotide"
  source: /note="RNA"
  modified_base (1)..(1): bicyclic nucleic acid (BNA)
  modified_base (2)..(2): 5-methyl modified nucleotide
  modified_base (5)..(5): 5-methyl modified nucleotide
  modified_base (17)..(17): 5-methyl modified nucleotide
  source: /note="3' tri-ethylene glycol (TEG)"
acaucaaggaagauggcau

SEQ ID NO: 13825 - RNA, 18 nt, Artificial Sequence
  source: /note="Description of Artificial Sequence: Synthetic oligonucleotide"
  source: /note="RNA"
  modified_base (1)..(1): bicyclic nucleic acid (BNA)
  modified_base (2)..(2): 5-methyl modified nucleotide
  modified_base (5)..(5): 5-methyl modified nucleotide
  modified_base (17)..(17): 5-methyl modified nucleotide
  source: /note="3' tri-ethylene glycol (TEG)"
acaucaaggaagauggca

SEQ ID NO: 13826 - RNA, 17 nt, Artificial Sequence
  source: /note="Description of Artificial Sequence: Synthetic oligonucleotide"
  source: /note="RNA"
  modified_base (1)..(1): bicyclic nucleic acid (BNA)
  modified_base (2)..(2): 5-methyl modified nucleotide
  modified_base (5)..(5): 5-methyl modified nucleotide
  modified_base (17)..(17): 5-methyl modified nucleotide
  source: /note="3' tri-ethylene glycol (TEG)"
acaucaaggaagauggc

SEQ ID NO: 13827 - RNA, 16 nt, Artificial Sequence
  source: /note="Description of Artificial Sequence: Synthetic oligonucleotide"
  source: /note="RNA"
  modified_base (1)..(1): bicyclic nucleic acid (BNA)
  modified_base (2)..(2): 5-methyl modified nucleotide
  modified_base (5)..(5): 5-methyl modified nucleotide
  source: /note="3' tri-ethylene glycol (TEG)"
acaucaaggaagaugg

SEQ ID NO: 13828 - RNA, 15 nt, Artificial Sequence
  source: /note="Description of Artificial Sequence: Synthetic oligonucleotide"
  source: /note="RNA"
  modified_base (1)..(1): bicyclic nucleic acid (BNA)
  modified_base (2)..(2): 5-methyl modified nucleotide
  modified_base (5)..(5): 5-methyl modified nucleotide
  source: /note="3' tri-ethylene glycol (TEG)"
acaucaaggaagaug

SEQ ID NO: 13829 - RNA, 14 nt, Artificial Sequence
  source: /note="Description of Artificial Sequence: Synthetic oligonucleotide"
  source: /note="RNA"
  modified_base (1)..(1): bicyclic nucleic acid (BNA)
  modified_base (2)..(2): 5-methyl modified nucleotide
  modified_base (5)..(5): 5-methyl modified nucleotide
  source: /note="3' tri-ethylene glycol (TEG)"
acaucaaggaagau

SEQ ID NO: 13830 - RNA, 13 nt, Artificial Sequence
  source: /note="Description of Artificial Sequence: Synthetic oligonucleotide"
  source: /note="RNA"
  modified_base (1)..(1): bicyclic nucleic acid (BNA)
  modified_base (2)..(2): 5-methyl modified nucleotide
  modified_base (5)..(5): 5-methyl modified nucleotide
  source: /note="3' tri-ethylene glycol (TEG)"
acaucaaggaaga

SEQ ID NO: 13831 - RNA, 12 nt, Artificial Sequence
  source: /note="Description of Artificial Sequence: Synthetic oligonucleotide"
  source: /note="RNA"
  modified_base (1)..(1): bicyclic nucleic acid (BNA)
  modified_base (2)..(2): 5-methyl modified nucleotide
  modified_base (5)..(5): 5-methyl modified nucleotide
  source: /note="3' tri-ethylene glycol (TEG)"
acaucaaggaag

SEQ ID NO: 13832 - RNA, 24 nt, Artificial Sequence
  source: /note="Description of Artificial Sequence: Synthetic oligonucleotide"
  source: /note="RNA"
  modified_base (1)..(1): 5-methyl bicyclic nucleic acid
  modified_base (4)..(4): 5-methyl modified nucleotide
  modified_base (16)..(16): 5-methyl modified nucleotide
  modified_base (21)..(21): 5-methyl modified nucleotide
  source: /note="3' tri-ethylene glycol (TEG)"
caucaaggaagauggcauuucuag

SEQ ID NO: 13833 - RNA, 23 nt, Artificial Sequence
  source: /note="Description of Artificial Sequence: Synthetic oligonucleotide"
  source: /note="RNA"
  modified_base (1)..(1): 5-methyl bicyclic nucleic acid
  modified_base (4)..(4): 5-methyl modified nucleotide
  modified_base (16)..(16): 5-methyl modified nucleotide
  modified_base (21)..(21): 5-methyl modified nucleotide
  source: /note="3' tri-ethylene glycol (TEG)"
caucaaggaagauggcauuucua

SEQ ID NO: 13834 - RNA, 22 nt, Artificial Sequence
  source: /note="Description of Artificial Sequence: Synthetic oligonucleotide"
  source: /note="RNA"
  modified_base (1)..(1): 5-methyl bicyclic nucleic acid
  modified_base (4)..(4): 5-methyl modified nucleotide
  modified_base (16)..(16): 5-methyl modified nucleotide
  modified_base (21)..(21): 5-methyl modified nucleotide
  source: /note="3' tri-ethylene glycol (TEG)"
caucaaggaagauggcauuucu

SEQ ID NO: 13835 - RNA, 21 nt, Artificial Sequence
  source: /note="Description of Artificial Sequence: Synthetic oligonucleotide"
  source: /note="RNA"
  modified_base (1)..(1): 5-methyl bicyclic nucleic acid
  modified_base (4)..(4): 5-methyl modified nucleotide
  modified_base (16)..(16): 5-methyl modified nucleotide
  modified_base (21)..(21): 5-methyl modified nucleotide
  source: /note="3' tri-ethylene glycol (TEG)"
caucaaggaagauggcauuuc

SEQ ID NO: 13836 - RNA, 20 nt, Artificial Sequence
  source: /note="Description of Artificial Sequence: Synthetic oligonucleotide"
  source: /note="RNA"
  modified_base (1)..(1): 5-methyl bicyclic nucleic acid
  modified_base (4)..(4): 5-methyl modified nucleotide
  modified_base (16)..(16): 5-methyl modified nucleotide
  source: /note="3' tri-ethylene glycol (TEG)"
caucaaggaagauggcauuu

SEQ ID NO: 13837 - RNA, 19 nt, Artificial Sequence
  source: /note="Description of Artificial Sequence: Synthetic oligonucleotide"
  source: /note="RNA"
  modified_base (1)..(1): 5-methyl bicyclic nucleic acid
  modified_base (4)..(4): 5-methyl modified nucleotide
  modified_base (16)..(16): 5-methyl modified nucleotide
  source: /note="3' tri-ethylene glycol (TEG)"
caucaaggaagauggcauu

SEQ ID NO: 13838 - RNA, 18 nt, Artificial Sequence
  source: /note="Description of Artificial Sequence: Synthetic oligonucleotide"
  source: /note="RNA"
  modified_base (1)..(1): 5-methyl bicyclic nucleic acid
  modified_base (4)..(4): 5-methyl modified nucleotide
  modified_base (16)..(16): 5-methyl modified nucleotide
  source: /note="3' tri-ethylene glycol (TEG)"
caucaaggaagauggcau

SEQ ID NO: 13839 - RNA, 17 nt, Artificial Sequence
  source: /note="Description of Artificial Sequence: Synthetic oligonucleotide"
  source: /note="RNA"
  modified_base (1)..(1): 5-methyl bicyclic nucleic acid
  modified_base (4)..(4): 5-methyl modified nucleotide
  modified_base (16)..(16): 5-methyl modified nucleotide
  source: /note="3' tri-ethylene glycol (TEG)"
caucaaggaagauggca

SEQ ID NO: 13840 - RNA, 16 nt, Artificial Sequence
  source: /note="Description of Artificial Sequence: Synthetic oligonucleotide"
  source: /note="RNA"
  modified_base (1)..(1): 5-methyl bicyclic nucleic acid
  modified_base (4)..(4): 5-methyl modified nucleotide
  modified_base (16)..(16): 5-methyl modified nucleotide
  source: /note="3' tri-ethylene glycol (TEG)"
caucaaggaagauggc

SEQ ID NO: 13841 - RNA, 15 nt, Artificial Sequence
  source: /note="Description of Artificial Sequence: Synthetic oligonucleotide"
  source: /note="RNA"
  modified_base (1)..(1): 5-methyl bicyclic nucleic acid
  modified_base (4)..(4): 5-methyl modified nucleotide
  source: /note="3' tri-ethylene glycol (TEG)"
caucaaggaagaugg

SEQ ID NO: 13842 - RNA, 14 nt, Artificial Sequence
  source: /note="Description of Artificial Sequence: Synthetic oligonucleotide"
  source: /note="RNA"
  modified_base (1)..(1): 5-methyl bicyclic nucleic acid
  modified_base (4)..(4): 5-methyl modified nucleotide
  source: /note="3' tri-ethylene glycol (TEG)"
caucaaggaagaug

SEQ ID NO: 13843 - RNA, 13 nt, Artificial Sequence
  source: /note="Description of Artificial Sequence: Synthetic oligonucleotide"
  source: /note="RNA"
  modified_base (1)..(1): 5-methyl bicyclic nucleic acid
  modified_base (4)..(4): 5-methyl modified nucleotide
  source: /note="3' tri-ethylene glycol (TEG)"
caucaaggaagau

SEQ ID NO: 13844 - RNA, 12 nt, Artificial Sequence
  source: /note="Description of Artificial Sequence: Synthetic oligonucleotide"
  source: /note="RNA"
  modified_base (1)..(1): 5-methyl bicyclic nucleic acid
  modified_base (4)..(4): 5-methyl modified nucleotide
  source: /note="3' tri-ethylene glycol (TEG)"
caucaaggaaga

SEQ ID NO: 13845 - RNA, 11 nt, Artificial Sequence
  source: /note="Description of Artificial Sequence: Synthetic oligonucleotide"
  source: /note="RNA"
  modified_base (1)..(1): 5-methyl bicyclic nucleic acid
  modified_base (4)..(4): 5-methyl modified nucleotide
  source: /note="3' tri-ethylene glycol (TEG)"
caucaaggaag

SEQ ID NO: 13846 - RNA, 23 nt, Artificial Sequence
  source: /note="Description of Artificial Sequence: Synthetic oligonucleotide"
  source: /note="RNA"
  modified_base (1)..(1): bicyclic nucleic acid (BNA)
  modified_base (3)..(3): 5-methyl modified nucleotide
  modified_base (15)..(15): 5-methyl modified nucleotide
  modified_base (20)..(20): 5-methyl modified nucleotide
  source: /note="3' tri-ethylene glycol (TEG)"
aucaaggaagauggcauuucuag

SEQ ID NO: 13847 - RNA, 22 nt, Artificial Sequence
  source: /note="Description of Artificial Sequence: Synthetic oligonucleotide"
  source: /note="RNA"
  modified_base (1)..(1): bicyclic nucleic acid (BNA)
  modified_base (3)..(3): 5-methyl modified nucleotide
  modified_base (15)..(15): 5-methyl modified nucleotide
  modified_base (20)..(20): 5-methyl modified nucleotide
  source: /note="3' tri-ethylene glycol (TEG)"
aucaaggaagauggcauuucua

SEQ ID NO: 13848 - RNA, 21 nt, Artificial Sequence
  source: /note="Description of Artificial Sequence: Synthetic oligonucleotide"
  source: /note="RNA"
  modified_base (1)..(1): bicyclic nucleic acid (BNA)
  modified_base (3)..(3): 5-methyl modified nucleotide
  modified_base (15)..(15): 5-methyl modified nucleotide
  modified_base (20)..(20): 5-methyl modified nucleotide
  source: /note="3' tri-ethylene glycol (TEG)"
aucaaggaagauggcauuucu

SEQ ID NO: 13849 - RNA, 20 nt, Artificial Sequence
  source: /note="Description of Artificial Sequence: Synthetic oligonucleotide"
  source: /note="RNA"
  modified_base (1)..(1): bicyclic nucleic acid (BNA)
  modified_base (3)..(3): 5-methyl modified nucleotide
  modified_base (15)..(15): 5-methyl modified nucleotide
  modified_base (20)..(20): 5-methyl modified nucleotide
  source: /note="3' tri-ethylene glycol (TEG)"
aucaaggaagauggcauuuc

SEQ ID NO: 13850 - RNA, 19 nt, Artificial Sequence
  source: /note="Description of Artificial Sequence: Synthetic oligonucleotide"
  source: /note="RNA"
  modified_base (1)..(1): bicyclic nucleic acid (BNA)
  modified_base (3)..(3): 5-methyl modified nucleotide
  modified_base (15)..(15): 5-methyl modified nucleotide
  source: /note="3' tri-ethylene glycol (TEG)"
aucaaggaagauggcauuu

SEQ ID NO: 13851 - RNA, 18 nt, Artificial Sequence
  source: /note="Description of Artificial Sequence: Synthetic oligonucleotide"
  source: /note="RNA"
  modified_base (1)..(1): bicyclic nucleic acid (BNA)
  modified_base (3)..(3): 5-methyl modified nucleotide
  modified_base (15)..(15): 5-methyl modified nucleotide
  source: /note="3' tri-ethylene glycol (TEG)"
aucaaggaagauggcauu

SEQ ID NO: 13852 - RNA, 17 nt, Artificial Sequence
  source: /note="Description of Artificial Sequence: Synthetic oligonucleotide"
  source: /note="RNA"
  modified_base (1)..(1): bicyclic nucleic acid (BNA)
  modified_base (3)..(3): 5-methyl modified nucleotide
  modified_base (15)..(15): 5-methyl modified nucleotide
  source: /note="3' tri-ethylene glycol (TEG)"
aucaaggaagauggcau

SEQ ID NO: 13853 - RNA, 16 nt, Artificial Sequence
  source: /note="Description of Artificial Sequence: Synthetic oligonucleotide"
  source: /note="RNA"
  modified_base (1)..(1): bicyclic nucleic acid (BNA)
  modified_base (3)..(3): 5-methyl modified nucleotide
  modified_base (15)..(15): 5-methyl modified nucleotide
  source: /note="3' tri-ethylene glycol (TEG)"
aucaaggaagauggca

SEQ ID NO: 13854 - RNA, 15 nt, Artificial Sequence
  source: /note="Description of Artificial Sequence: Synthetic oligonucleotide"
  source: /note="RNA"
  modified_base (1)..(1): bicyclic nucleic acid (BNA)
  modified_base (3)..(3): 5-methyl modified nucleotide
  modified_base (15)..(15): 5-methyl modified nucleotide
  source: /note="3' tri-ethylene glycol (TEG)"
aucaaggaagauggc

SEQ ID NO: 13855 - RNA, 14 nt, Artificial Sequence
  source: /note="Description of Artificial Sequence: Synthetic oligonucleotide"
  source: /note="RNA"
  modified_base (1)..(1): bicyclic nucleic acid (BNA)
  modified_base (3)..(3): 5-methyl modified nucleotide
  source: /note="3' tri-ethylene glycol (TEG)"
aucaaggaagaugg

SEQ ID NO: 13856 - RNA, 13 nt, Artificial Sequence
  source: /note="Description of Artificial Sequence: Synthetic oligonucleotide"
  source: /note="RNA"
  modified_base (1)..(1): bicyclic nucleic acid (BNA)
  modified_base (3)..(3): 5-methyl modified nucleotide
  source: /note="3' tri-ethylene glycol (TEG)"
aucaaggaagaug

SEQ ID NO: 13857 - RNA, 12 nt, Artificial Sequence
  source: /note="Description of Artificial Sequence: Synthetic oligonucleotide"
  source: /note="RNA"
  modified_base (1)..(1): bicyclic nucleic acid (BNA)
  modified_base (3)..(3): 5-methyl modified nucleotide
  source: /note="3' tri-ethylene glycol (TEG)"
aucaaggaagau

SEQ ID NO: 13858 - RNA, 11 nt, Artificial Sequence
  source: /note="Description of Artificial Sequence: Synthetic oligonucleotide"
  source: /note="RNA"
  modified_base (1)..(1): bicyclic nucleic acid (BNA)
  modified_base (3)..(3): 5-methyl modified nucleotide
  source: /note="3' tri-ethylene glycol (TEG)"
aucaaggaaga

SEQ ID NO: 13859 - RNA, 10 nt, Artificial Sequence
  source: /note="Description of Artificial Sequence: Synthetic oligonucleotide"
  source: /note="RNA"
  modified_base (1)..(1): bicyclic nucleic acid (BNA)
  modified_base (3)..(3): 5-methyl modified nucleotide
  source: /note="3' tri-ethylene glycol (TEG)"
aucaaggaag

SEQ ID NO: 13860 - RNA, 23 nt, Artificial Sequence
  source: /note="Description of Artificial Sequence: Synthetic oligonucleotide"
  source: /note="RNA"
  modified_base (1)..(1): 5-methyl bicyclic nucleic acid
  modified_base (2)..(2): 5-methyl modified nucleotide
  modified_base (7)..(7): 5-methyl modified nucleotide
  modified_base (13)..(13): 5-methyl modified nucleotide
  modified_base (14)..(14): 5-methyl modified nucleotide
  modified_base (16)..(16): 5-methyl modified nucleotide
  modified_base (17)..(17): 5-methyl modified nucleotide
  modified_base (20)..(20): 5-methyl modified nucleotide
  modified_base (23)..(23): 5-methyl modified nucleotide
  source: /note="3' tri-ethylene glycol (TEG)"
ccagagcagguaccuccaacauc

SEQ ID NO: 13861 - RNA, 18 nt, Artificial Sequence
  source: /note="Description of Artificial Sequence: Synthetic oligonucleotide"
  source: /note="RNA"
  modified_base (1)..(1): 5-methyl bicyclic nucleic acid
  modified_base (2)..(2): 5-methyl modified nucleotide
  modified_base (7)..(7): 5-methyl modified nucleotide
  modified_base (13)..(13): 5-methyl modified nucleotide
  modified_base (14)..(14): 5-methyl modified nucleotide
  modified_base (16)..(16): 5-methyl modified nucleotide
  modified_base (17)..(17): 5-methyl modified nucleotide
  source: /note="3' tri-ethylene glycol (TEG)"
ccagagcagguaccucca

SEQ ID NO: 13862 - RNA, 23 nt, Artificial Sequence
  source: /note="Description of Artificial Sequence: Synthetic oligonucleotide"
  source: /note="RNA"
  modified_base (1)..(1): 5-methyl bicyclic nucleic acid
  modified_base (2)..(2): 5-methyl modified nucleotide
  modified_base (4)..(4): 5-methyl modified nucleotide
  modified_base (18)..(18): 5-methyl modified nucleotide
  source: /note="3' tri-ethylene glycol (TEG)"
ccucugugauuuuauaacuugau

SEQ ID NO: 13863 - DNA, 17 bp, Artificial Sequence
  source: /note="Description of Artificial Sequence: Synthetic oligonucleotide"
  source: /note="Description of Combined DNA/RNA Molecule: Synthetic oligonucleotide"
  source: /note="DNA/RNA"
  modified_base (1)..(1): bicyclic nucleic acid (BNA)
  modified_base (2)..(2): 5-methyl modified nucleotide
  modified_base (4)..(4): 5-methyl modified nucleotide
  modified_base (5)..(5): 5-methyl modified nucleotide
  modified_base (6)..(6): 5-methyl modified nucleotide
  modified_base (8)..(8): 5-methyl modified nucleotide
  modified_base (9)..(9): 5-methyl modified nucleotide
  modified_base (12)..(12): 5-methyl modified nucleotide
  modified_base (14)..(14): 5-methyl modified nucleotide
  modified_base (15)..(15): 5-methyl modified nucleotide
  modified_base (16)..(16): 5-methyl modified nucleotide
  source: /note="3' tri-ethylene glycol (TEG)"
tcacccaccaucacccu

SEQ ID NO: 13864 - DNA, 20 bp, Artificial Sequence
  source: /note="Description of Artificial Sequence: Synthetic oligonucleotide"
  source: /note="Description of Combined DNA/RNA Molecule: Synthetic oligonucleotide"
  source: /note="DNA/RNA"
  modified_base (1)..(1): bicyclic nucleic acid (BNA)
  modified_base (7)..(7): 5-methyl modified nucleotide
  modified_base (8)..(8): 5-methyl modified nucleotide
  modified_base (10)..(10): 5-methyl modified nucleotide
  modified_base (16)..(16): 5-methyl modified nucleotide
  modified_base (18)..(18): 5-methyl modified nucleotide
  modified_base (19)..(19): 5-methyl modified nucleotide
  modified_base (20)..(20): 5-methyl modified nucleotide
  source: /note="3' tri-ethylene glycol (TEG)"
tgauauccucaaggucaccc

SEQ ID NO: 13865 - RNA, 22 nt, Artificial Sequence
  source: /note="Description of Artificial Sequence: Synthetic oligonucleotide"
  source: /note="RNA"
  modified_base (1)..(1): 5-methyl bicyclic nucleic acid
  modified_base (4)..(4): 5-methyl modified nucleotide
  modified_base (13)..(13): 5-methyl modified nucleotide
  modified_base (16)..(16): 5-methyl modified nucleotide
  modified_base (18)..(18): 5-methyl modified nucleotide
  source: /note="3' tri-ethylene glycol (TEG)"
cugcuugaugaucaucucguug

SEQ ID NO: 13866 - RNA, 18 nt, Artificial Sequence
  source: /note="Description of Artificial Sequence: Synthetic oligonucleotide"
  source: /note="RNA"
  modified_base (1)..(1): 5-methyl bicyclic nucleic acid
  modified_base (4)..(4): 5-methyl modified nucleotide
  modified_base (13)..(13): 5-methyl modified nucleotide
  modified_base (16)..(16): 5-methyl modified nucleotide
  modified_base (18)..(18): 5-methyl modified nucleotide
  source: /note="3' tri-ethylene glycol (TEG)"
cugcuugaugaucaucuc

SEQ ID NO: 13867 - RNA, 19 nt, Artificial Sequence
  source: /note="Description of Artificial Sequence: Synthetic oligonucleotide"
  source: /note="RNA"
  modified_base (1)..(1): bicyclic nucleic acid (BNA)
  modified_base (5)..(5): 5-methyl modified nucleotide
  modified_base (6)..(6): 5-methyl modified nucleotide
  modified_base (14)..(14): 5-methyl modified nucleotide
  modified_base (15)..(15): 5-methyl modified nucleotide
  modified_base (17)..(17): 5-methyl modified nucleotide
  source: /note="3' tri-ethylene glycol (TEG)"
guuuccuuaguaaccacag

SEQ ID NO: 13868 - RNA, 17 nt, Artificial Sequence
  source: /note="Description of Artificial Sequence: Synthetic oligonucleotide"
  source: /note="RNA"
  modified_base (1)..(1): bicyclic nucleic acid (BNA)
  modified_base (5)..(5): 5-methyl modified nucleotide
  modified_base (6)..(6): 5-methyl modified nucleotide
  modified_base (14)..(14): 5-methyl modified nucleotide
  modified_base (15)..(15): 5-methyl modified nucleotide
  modified_base (17)..(17): 5-methyl modified nucleotide
  source: /note="3' tri-ethylene glycol (TEG)"
guuuccuuaguaaccac

SEQ ID NO: 13869 - DNA, 20 bp, Artificial Sequence
  source: /note="Description of Artificial Sequence: Synthetic oligonucleotide"
  source: /note="Description of Combined DNA/RNA Molecule: Synthetic oligonucleotide"
  source: /note="DNA/RNA"
  source: /note="5' tri-ethylene glycol (TEG)"
  modified_base (1)..(1): bicyclic nucleic acid (BNA)
  modified_base (2)..(2): 5-methyl modified nucleotide
  modified_base (14)..(14): 5-methyl modified nucleotide
  modified_base (19)..(19): 5-methyl modified nucleotide
  source: /note="3' tri-ethylene glycol (TEG)"
tcaaggaagauggcauuucu

SEQ ID NO: 13870 - DNA, 22 bp, Artificial Sequence
  source: /note="Description of Artificial Sequence: Synthetic oligonucleotide"
  source: /note="Description of Combined DNA/RNA Molecule: Synthetic oligonucleotide"
  source: /note="DNA/RNA"
  source: /note="5' tri-ethylene glycol (TEG)"
  modified_base (1)..(1): bicyclic nucleic acid (BNA)
  modified_base (2)..(2): 5-methyl modified nucleotide
  modified_base (14)..(14): 5-methyl modified nucleotide
  modified_base (19)..(19): 5-methyl modified nucleotide
  source: /note="3' tri-ethylene glycol (TEG)"
tcaaggaagauggcauuucuag

SEQ ID NO: 13871 - RNA, 18 nt, Artificial Sequence
  source: /note="Description of Artificial Sequence: Synthetic oligonucleotide"
  source: /note="RNA"
  source: /note="5' tri-ethylene glycol (TEG)"
  modified_base (1)..(1): bicyclic nucleic acid (BNA)
  modified_base (9)..(9): 5-methyl modified nucleotide
  modified_base (13)..(13): 5-methyl modified nucleotide
  modified_base (14)..(14): 5-methyl modified nucleotide
  modified_base (18)..(18): 5-methyl modified nucleotide
  source: /note="3' tri-ethylene glycol (TEG)"
gguaaguucuguccaagc

SEQ ID NO: 13872 - RNA, 18 nt, Artificial Sequence
  source: /note="Description of Artificial Sequence: Synthetic oligonucleotide"
  source: /note="RNA"
  source: /note="5' tri-ethylene glycol (TEG)"
  modified_base (1)..(1): bicyclic nucleic acid (BNA)
  modified_base (8)..(8): 5-methyl modified nucleotide
  modified_base (12)..(12): 5-methyl modified nucleotide
  modified_base (13)..(13): 5-methyl modified nucleotide
  modified_base (17)..(17): 5-methyl modified nucleotide
  modified_base (18)..(18): 5-methyl modified nucleotide
  source: /note="3' tri-ethylene glycol (TEG)"
guaaguucuguccaagcc

SEQ ID NO: 13873 - RNA, 18 nt, Artificial Sequence
  source: /note="Description of Artificial Sequence: Synthetic oligonucleotide"
  source: /note="RNA"
  source: /note="5' tri-ethylene glycol (TEG)"
  modified_base (1)..(1): bicyclic nucleic acid (BNA)
  modified_base (4)..(4): 5-methyl modified nucleotide
  modified_base (13)..(13): 5-methyl modified nucleotide
  modified_base (17)..(17): 5-methyl modified nucleotide
  modified_base (18)..(18): 5-methyl modified nucleotide
  source: /note="3' tri-ethylene glycol (TEG)"
agucgguaaguucugucc

SEQ ID NO: 13874 - RNA, 18 nt, Artificial Sequence
  source: /note="Description of Artificial Sequence: Synthetic oligonucleotide"
  source: /note="RNA"
  source: /note="5' tri-ethylene glycol (TEG)"
  modified_base (1)..(1): 5-methyl bicyclic nucleic acid
  modified_base (5)..(5): 5-methyl modified nucleotide
  modified_base (6)..(6): 5-methyl modified nucleotide
  modified_base (10)..(10): 5-methyl modified nucleotide
  modified_base (11)..(11): 5-methyl modified nucleotide
  modified_base (12)..(12): 5-methyl modified nucleotide
  source: /note="3' tri-ethylene glycol (TEG)"
cuguccaagcccgguuga

SEQ ID NO: 13875 - DNA, 15 bp, Artificial Sequence
  source: /note="Description of Artificial Sequence: Synthetic oligonucleotide"
  source: /note="Description of Combined DNA/RNA Molecule: Synthetic oligonucleotide"
  source: /note="DNA/RNA"
  source: /note="5' tri-ethylene glycol (TEG)"
  modified_base (1)..(1): bicyclic nucleic acid (BNA)
  modified_base (7)..(7): 5-methyl modified nucleotide
  modified_base (11)..(11): 5-methyl modified nucleotide
  modified_base (12)..(12): 5-methyl modified nucleotide
  source: /note="3' tri-ethylene glycol (TEG)"
taaguucuguccaag

SEQ ID NO: 13876 - DNA, 20 bp, Artificial Sequence
  source: /note="Description of Artificial Sequence: Synthetic oligonucleotide"
  source: /note="Description of Combined DNA/RNA Molecule: Synthetic oligonucleotide"
  source: /note="DNA/RNA"
  source: /note="5' tri-ethylene glycol (TEG)"
  modified_base (1)..(1): bicyclic nucleic acid (BNA)
  modified_base (3)..(3): 5-methyl modified nucleotide
  modified_base (7)..(7): 5-methyl modified nucleotide
  modified_base (8)..(8): 5-methyl modified nucleotide
  modified_base (12)..(12): 5-methyl modified nucleotide
  modified_base (13)..(13): 5-methyl modified nucleotide
  modified_base (14)..(14): 5-methyl modified nucleotide
  source: /note="3' tri-ethylene glycol (TEG)"
tucuguccaagcccgguuga

SEQ ID NO: 13877 - DNA, 19 bp, Artificial Sequence
  source: /note="Description of Artificial Sequence: Synthetic oligonucleotide"
  source: /note="Description of Combined DNA/RNA Molecule: Synthetic oligonucleotide"
  source: /note="DNA/RNA"
  source: /note="5' tri-ethylene glycol (TEG)"
  modified_base (1)..(1): bicyclic nucleic acid (BNA)
  modified_base (3)..(3): 5-methyl modified nucleotide
  modified_base (7)..(7): 5-methyl modified nucleotide
  modified_base (8)..(8): 5-methyl modified nucleotide
  modified_base (12)..(12): 5-methyl modified nucleotide
  modified_base (13)..(13): 5-methyl modified nucleotide
  modified_base (14)..(14): 5-methyl modified nucleotide
  source: /note="3' tri-ethylene glycol (TEG)"
tucuguccaagcccgguug

SEQ ID NO: 13878 - DNA, 18 bp, Artificial Sequence
  source: /note="Description of Artificial Sequence: Synthetic oligonucleotide"
  source: /note="Description of Combined DNA/RNA Molecule: Synthetic oligonucleotide"
  source: /note="DNA/RNA"
  source: /note="5' tri-ethylene glycol (TEG)"
  modified_base (1)..(1): bicyclic nucleic acid (BNA)
  modified_base (3)..(3): 5-methyl modified nucleotide
  modified_base (7)..(7): 5-methyl modified nucleotide
  modified_base (8)..(8): 5-methyl modified nucleotide
  modified_base (12)..(12): 5-methyl modified nucleotide
  modified_base (13)..(13): 5-methyl modified nucleotide
  modified_base (14)..(14): 5-methyl modified nucleotide
  source: /note="3' tri-ethylene glycol (TEG)"
tucuguccaagcccgguu

SEQ ID NO: 13879 - DNA, 17 bp, Artificial Sequence
  source: /note="Description of Artificial Sequence: Synthetic oligonucleotide"
  source: /note="Description of Combined DNA/RNA Molecule: Synthetic oligonucleotide"
  source: /note="DNA/RNA"
  source: /note="5' tri-ethylene glycol (TEG)"
  modified_base (1)..(1): bicyclic nucleic acid (BNA)
  modified_base (3)..(3): 5-methyl modified nucleotide
  modified_base (7)..(7): 5-methyl modified nucleotide
  modified_base (8)..(8): 5-methyl modified nucleotide
  modified_base (12)..(12): 5-methyl modified nucleotide
  modified_base (13)..(13): 5-methyl modified nucleotide
  modified_base (14)..(14): 5-methyl modified nucleotide
  source: /note="3' tri-ethylene glycol (TEG)"
tucuguccaagcccggu

SEQ ID NO: 13880 - DNA, 16 bp, Artificial Sequence
  source: /note="Description of Artificial Sequence: Synthetic oligonucleotide"
  source: /note="Description of Combined DNA/RNA Molecule: Synthetic oligonucleotide"
  source: /note="DNA/RNA"
  source: /note="5' tri-ethylene glycol (TEG)"
  modified_base (1)..(1): bicyclic nucleic acid (BNA)
  modified_base (3)..(3): 5-methyl modified nucleotide
  modified_base (7)..(7): 5-methyl modified nucleotide
  modified_base (8)..(8): 5-methyl modified nucleotide
  modified_base (12)..(12): 5-methyl modified nucleotide
  modified_base (13)..(13): 5-methyl modified nucleotide
  modified_base (14)..(14): 5-methyl modified nucleotide
  source: /note="3' tri-ethylene glycol (TEG)"
tucuguccaagcccgg

SEQ ID NO: 13881 - DNA, 15 bp, Artificial Sequence
  source: /note="Description of Artificial Sequence: Synthetic oligonucleotide"
  source: /note="Description of Combined DNA/RNA Molecule: Synthetic oligonucleotide"
  source: /note="DNA/RNA"
  source: /note="5' tri-ethylene glycol (TEG)"
  modified_base (1)..(1): bicyclic nucleic acid (BNA)
  modified_base (3)..(3): 5-methyl modified nucleotide
  modified_base (7)..(7): 5-methyl modified nucleotide
  modified_base (8)..(8): 5-methyl modified nucleotide
  modified_base (12)..(12): 5-methyl modified nucleotide
  modified_base (13)..(13): 5-methyl modified nucleotide
  modified_base (14)..(14): 5-methyl modified nucleotide
  source: /note="3' tri-ethylene glycol (TEG)"
tucuguccaagcccg

SEQ ID NO: 13882 - DNA, 14 bp, Artificial Sequence
  source: /note="Description of Artificial Sequence: Synthetic oligonucleotide"
  source: /note="Description of Combined DNA/RNA Molecule: Synthetic oligonucleotide"
  source: /note="DNA/RNA"
  source: /note="5' tri-ethylene glycol (TEG)"
  modified_base (1)..(1): bicyclic nucleic acid (BNA)
  modified_base (3)..(3): 5-methyl modified nucleotide
  modified_base (7)..(7): 5-methyl modified nucleotide
  modified_base (8)..(8): 5-methyl modified nucleotide
  modified_base (12)..(12): 5-methyl modified nucleotide
  modified_base (13)..(13): 5-methyl modified nucleotide
  modified_base (14)..(14): 5-methyl modified nucleotide
  source: /note="3' tri-ethylene glycol (TEG)"
tucuguccaagccc

SEQ ID NO: 13883 - DNA, 13 bp, Artificial Sequence
  source: /note="Description of Artificial Sequence: Synthetic oligonucleotide"
  source: /note="Description of Combined DNA/RNA Molecule: Synthetic oligonucleotide"
  source: /note="DNA/RNA"
  source: /note="5' tri-ethylene glycol (TEG)"
  modified_base (1)..(1): bicyclic nucleic acid (BNA)
  modified_base (3)..(3): 5-methyl modified nucleotide
  modified_base (7)..(7): 5-methyl modified nucleotide
  modified_base (8)..(8): 5-methyl modified nucleotide
  modified_base (12)..(12): 5-methyl modified nucleotide
  modified_base (13)..(13): 5-methyl modified nucleotide
  source: /note="3' tri-ethylene glycol (TEG)"
tucuguccaagcc

SEQ ID NO: 13884 - DNA, 12 bp, Artificial Sequence
  source: /note="Description of Artificial Sequence: Synthetic oligonucleotide"
  source: /note="Description of Combined DNA/RNA Molecule: Synthetic oligonucleotide"
  source: /note="DNA/RNA"
  source: /note="5' tri-ethylene glycol (TEG)"
  modified_base (1)..(1): bicyclic nucleic acid (BNA)
  modified_base (3)..(3): 5-methyl modified nucleotide
  modified_base (7)..(7): 5-methyl modified nucleotide
  modified_base (8)..(8): 5-methyl modified nucleotide
  modified_base (12)..(12): 5-methyl modified nucleotide
  source: /note="3' tri-ethylene glycol (TEG)"
tucuguccaagc

SEQ ID NO: 13885 - DNA, 11 bp, Artificial Sequence
  source: /note="Description of Artificial Sequence: Synthetic oligonucleotide"
  source: /note="Description of Combined DNA/RNA Molecule: Synthetic oligonucleotide"
  source: /note="DNA/RNA"
  source: /note="5' tri-ethylene glycol (TEG)"
  modified_base (1)..(1): bicyclic nucleic acid (BNA)
  modified_base (3)..(3): 5-methyl modified nucleotide
  modified_base (7)..(7): 5-methyl modified nucleotide
  modified_base (8)..(8): 5-methyl modified nucleotide
  source: /note="3' tri-ethylene glycol (TEG)"
tucuguccaag

SEQ ID NO: 13886 - DNA, 10 bp, Artificial Sequence
  source: /note="Description of Artificial Sequence: Synthetic oligonucleotide"
  source: /note="Description of Combined DNA/RNA Molecule: Synthetic oligonucleotide"
  source: /note="DNA/RNA"
  source: /note="5' tri-ethylene glycol (TEG)"
  modified_base (1)..(1): bicyclic nucleic acid (BNA)
  modified_base (3)..(3): 5-methyl modified nucleotide
  modified_base (7)..(7): 5-methyl modified nucleotide
  modified_base (8)..(8): 5-methyl modified nucleotide
  source: /note="3' tri-ethylene glycol (TEG)"
tucuguccaa

SEQ ID NO: 13887 - DNA, 9 bp, Artificial Sequence
  source: /note="Description of Artificial Sequence: Synthetic oligonucleotide"
  source: /note="Description of Combined DNA/RNA Molecule: Synthetic oligonucleotide"
  source: /note="DNA/RNA"
  source: /note="5' tri-ethylene glycol (TEG)"
  modified_base (1)..(1): bicyclic nucleic acid (BNA)
  modified_base (3)..(3): 5-methyl modified nucleotide
  modified_base (7)..(7): 5-methyl modified nucleotide
  modified_base (8)..(8): 5-methyl modified nucleotide
  source: /note="3' tri-ethylene glycol (TEG)"
tucugucca

SEQ ID NO: 13888 - DNA, 8 bp, Artificial Sequence
  source: /note="Description of Artificial Sequence: Synthetic oligonucleotide"
  source: /note="Description of Combined DNA/RNA Molecule: Synthetic oligonucleotide"
  source: /note="DNA/RNA"
  source: /note="5' tri-ethylene glycol (TEG)"
  modified_base (1)..(1): bicyclic nucleic acid (BNA)
  modified_base (3)..(3): 5-methyl modified nucleotide
  modified_base (7)..(7): 5-methyl modified nucleotide
  modified_base (8)..(8): 5-methyl modified nucleotide
  source: /note="3' tri-ethylene glycol (TEG)"
tucugucc

SEQ ID NO: 13889 - DNA, 19 bp, Artificial Sequence
  source: /note="Description of Artificial Sequence: Synthetic oligonucleotide"
  source: /note="Description of Combined DNA/RNA Molecule: Synthetic oligonucleotide"
  source: /note="DNA/RNA"
  source: /note="5' tri-ethylene glycol (TEG)"
  modified_base (1)..(1): bicyclic nucleic acid (BNA)
  modified_base (2)..(2): 5-methyl modified nucleotide
  modified_base (6)..(6): 5-methyl modified nucleotide
  modified_base (7)..(7): 5-methyl modified nucleotide
  modified_base (11)..(11): 5-methyl modified nucleotide
  modified_base (12)..(12): 5-methyl modified nucleotide
  modified_base (13)..(13): 5-methyl modified nucleotide
  source: /note="3' tri-ethylene glycol (TEG)"
tcuguccaagcccgguuga

SEQ ID NO: 13890 - DNA, 18 bp, Artificial Sequence
  source: /note="Description of Artificial Sequence: Synthetic oligonucleotide"
  source: /note="Description of Combined DNA/RNA Molecule: Synthetic oligonucleotide"
  source: /note="DNA/RNA"
  source: /note="5' tri-ethylene glycol (TEG)"
  modified_base (1)..(1): bicyclic nucleic acid (BNA)
  modified_base (2)..(2): 5-methyl modified nucleotide
  modified_base (6)..(6): 5-methyl modified nucleotide
  modified_base (7)..(7): 5-methyl modified nucleotide
  modified_base (11)..(11): 5-methyl modified nucleotide
  modified_base (12)..(12): 5-methyl modified nucleotide
  modified_base (13)..(13): 5-methyl modified nucleotide
  source: /note="3' tri-ethylene glycol (TEG)"
tcuguccaagcccgguug

SEQ ID NO: 13891 - DNA, 17 bp, Artificial Sequence
  source: /note="Description of Artificial Sequence: Synthetic oligonucleotide"
  source: /note="Description of Combined DNA/RNA Molecule: Synthetic oligonucleotide"
  source: /note="DNA/RNA"
  source: /note="5' tri-ethylene glycol (TEG)"
  modified_base (1)..(1): bicyclic nucleic acid (BNA)
  modified_base (2)..(2): 5-methyl modified nucleotide
  modified_base (6)..(6): 5-methyl modified nucleotide
  modified_base (7)..(7): 5-methyl modified nucleotide
  modified_base (11)..(11): 5-methyl modified nucleotide
  modified_base (12)..(12): 5-methyl modified nucleotide
  modified_base (13)..(13): 5-methyl modified nucleotide
  source: /note="3' tri-ethylene glycol (TEG)"
tcuguccaagcccgguu

SEQ ID NO: 13892 - DNA, 16 bp, Artificial Sequence
  source: /note="Description of Artificial Sequence: Synthetic oligonucleotide"
  source: /note="Description of Combined DNA/RNA Molecule: Synthetic oligonucleotide"
  source: /note="DNA/RNA"
  source: /note="5' tri-ethylene glycol (TEG)"
  modified_base (1)..(1): bicyclic nucleic acid (BNA)
  modified_base (2)..(2): 5-methyl modified nucleotide
  modified_base (6)..(6): 5-methyl modified nucleotide
  modified_base (7)..(7): 5-methyl modified nucleotide
  modified_base (11)..(11): 5-methyl modified nucleotide
  modified_base (12)..(12): 5-methyl modified nucleotide
  modified_base (13)..(13): 5-methyl modified nucleotide
  source: /note="3' tri-ethylene glycol (TEG)"
tcuguccaagcccggu

SEQ ID NO: 13893 - DNA, 15 bp, Artificial Sequence
  source: /note="Description of Artificial Sequence: Synthetic oligonucleotide"
  source: /note="Description of Combined DNA/RNA Molecule: Synthetic oligonucleotide"
  source: /note="DNA/RNA"
  source: /note="5' tri-ethylene glycol (TEG)"
  modified_base (1)..(1): bicyclic nucleic acid (BNA)
  modified_base (2)..(2): 5-methyl modified nucleotide
  modified_base (6)..(6): 5-methyl modified nucleotide
  modified_base (7)..(7): 5-methyl modified nucleotide
  modified_base (11)..(11): 5-methyl modified nucleotide
  modified_base (12)..(12): 5-methyl modified nucleotide
  modified_base (13)..(13): 5-methyl modified nucleotide
  source: /note="3' tri-ethylene glycol (TEG)"
tcuguccaagcccgg

SEQ ID NO: 13894 - DNA, 14 bp, Artificial Sequence
  source: /note="Description of Artificial Sequence: Synthetic oligonucleotide"
  source: /note="Description of Combined DNA/RNA Molecule: Synthetic oligonucleotide"
  source: /note="DNA/RNA"
  source: /note="5' tri-ethylene glycol (TEG)"
  modified_base (1)..(1): bicyclic nucleic acid (BNA)
  modified_base (2)..(2): 5-methyl modified nucleotide
  modified_base (6)..(6): 5-methyl modified nucleotide
  modified_base (7)..(7): 5-methyl modified nucleotide
  modified_base (11)..(11): 5-methyl modified nucleotide
  modified_base (12)..(12): 5-methyl modified nucleotide
  modified_base (13)..(13): 5-methyl modified nucleotide
  source: /note="3' tri-ethylene glycol (TEG)"
tcuguccaagcccg

SEQ ID NO: 13895 - DNA, 13 bp, Artificial Sequence
  source: /note="Description of Artificial Sequence: Synthetic oligonucleotide"
  source: /note="Description of Combined DNA/RNA Molecule: Synthetic oligonucleotide"
  source: /note="DNA/RNA"
  source: /note="5' tri-ethylene glycol (TEG)"
  modified_base (1)..(1): bicyclic nucleic acid (BNA)
  modified_base (2)..(2): 5-methyl modified nucleotide
  modified_base (6)..(6): 5-methyl modified nucleotide
  modified_base (7)..(7): 5-methyl modified nucleotide
  modified_base (11)..(11): 5-methyl modified nucleotide
  modified_base (12)..(12): 5-methyl modified nucleotide
  modified_base (13)..(13): 5-methyl modified nucleotide
  source: /note="3' tri-ethylene glycol (TEG)"
tcuguccaagccc

SEQ ID NO: 13896 - DNA, 12 bp, Artificial Sequence
  source: /note="Description of Artificial Sequence: Synthetic oligonucleotide"
  source: /note="Description of Combined DNA/RNA Molecule: Synthetic oligonucleotide"
  source: /note="DNA/RNA"
  source: /note="5' tri-ethylene glycol (TEG)"
  modified_base (1)..(1): bicyclic nucleic acid (BNA)
  modified_base (2)..(2): 5-methyl modified nucleotide
  modified_base (6)..(6): 5-methyl modified nucleotide
  modified_base (7)..(7): 5-methyl modified nucleotide
  modified_base (11)..(11): 5-methyl modified nucleotide
  modified_base (12)..(12): 5-methyl modified nucleotide
  source: /note="3' tri-ethylene glycol (TEG)"
tcuguccaagcc

SEQ ID NO: 13897 - DNA, 11 bp, Artificial Sequence
  source: /note="Description of Artificial Sequence: Synthetic oligonucleotide"
  source: /note="Description of Combined DNA/RNA Molecule: Synthetic oligonucleotide"
  source: /note="DNA/RNA"
  source: /note="5' tri-ethylene glycol (TEG)"
  modified_base (1)..(1): bicyclic nucleic acid (BNA)
  modified_base (2)..(2): 5-methyl modified nucleotide
  modified_base (6)..(6): 5-methyl modified nucleotide
  modified_base (7)..(7): 5-methyl modified nucleotide
  modified_base (11)..(11): 5-methyl modified nucleotide
  source: /note="3' tri-ethylene glycol (TEG)"
tcuguccaagc

SEQ ID NO: 13898 - DNA, 10 bp, Artificial Sequence
  source: /note="Description of Artificial Sequence: Synthetic oligonucleotide"
  source: /note="Description of Combined DNA/RNA Molecule: Synthetic oligonucleotide"
  source: /note="DNA/RNA"
  source: /note="5' tri-ethylene glycol (TEG)"
  modified_base (1)..(1): bicyclic nucleic acid (BNA)
  modified_base (2)..(2): 5-methyl modified nucleotide
  modified_base (6)..(6): 5-methyl modified nucleotide
  modified_base (7)..(7): 5-methyl modified nucleotide
  source: /note="3' tri-ethylene glycol (TEG)"
tcuguccaag

SEQ ID NO: 13899 - DNA, 9 bp, Artificial Sequence
  source: /note="Description of Artificial Sequence: Synthetic oligonucleotide"
  source: /note="Description of Combined DNA/RNA Molecule: Synthetic oligonucleotide"
  source: /note="DNA/RNA"
  source: /note="5' tri-ethylene glycol (TEG)"
  modified_base (1)..(1): bicyclic nucleic acid (BNA)
  modified_base (2)..(2): 5-methyl modified nucleotide
  modified_base (6)..(6): 5-methyl modified nucleotide
  modified_base (7)..(7): 5-methyl modified nucleotide
  source: /note="3' tri-ethylene glycol (TEG)"
tcuguccaa

SEQ ID NO: 13900 - DNA, 8 bp, Artificial Sequence
  source: /note="Description of Artificial Sequence: Synthetic oligonucleotide"
  source: /note="Description of Combined DNA/RNA Molecule: Synthetic oligonucleotide"
  source: /note="DNA/RNA"
  source: /note="5' tri-ethylene glycol (TEG)"
  modified_base (1)..(1): bicyclic nucleic acid (BNA)
  modified_base (2)..(2): 5-methyl modified nucleotide
  modified_base (6)..(6): 5-methyl modified nucleotide
  modified_base (7)..(7): 5-methyl modified nucleotide
  source: /note="3' tri-ethylene glycol (TEG)"
tcugucca

SEQ ID NO: 13901 - RNA, 17 nt, Artificial Sequence
  source: /note="Description of Artificial Sequence: Synthetic oligonucleotide"
  source: /note="RNA"
  source: /note="5' tri-ethylene glycol (TEG)"
  modified_base (1)..(1): 5-methyl bicyclic nucleic acid
  modified_base (5)..(5): 5-methyl modified nucleotide
  modified_base (6)..(6): 5-methyl modified nucleotide
  modified_base (10)..(10): 5-methyl modified nucleotide
  modified_base (11)..(11): 5-methyl modified nucleotide
  modified_base (12)..(12): 5-methyl modified nucleotide
  source: /note="3' tri-ethylene glycol (TEG)"
cuguccaagcccgguug

SEQ ID NO: 13902 - RNA, 16 nt, Artificial Sequence
  source: /note="Description of Artificial Sequence: Synthetic oligonucleotide"
  source: /note="RNA"
  source: /note="5' tri-ethylene glycol (TEG)"
  modified_base (1)..(1): 5-methyl bicyclic nucleic acid
  modified_base (5)..(5): 5-methyl modified nucleotide
  modified_base (6)..(6): 5-methyl modified nucleotide
  modified_base (10)..(10): 5-methyl modified nucleotide
  modified_base (11)..(11): 5-methyl modified nucleotide
  modified_base (12)..(12): 5-methyl modified nucleotide
  source: /note="3' tri-ethylene glycol (TEG)"
cuguccaagcccgguu

SEQ ID NO: 13903 - RNA, 15 nt, Artificial Sequence
  source: /note="Description of Artificial Sequence: Synthetic oligonucleotide"
  source: /note="RNA"
  source: /note="5' tri-ethylene glycol (TEG)"
  modified_base (1)..(1): 5-methyl bicyclic nucleic acid
  modified_base (5)..(5): 5-methyl modified nucleotide
  modified_base (6)..(6): 5-methyl modified nucleotide
  modified_base (10)..(10): 5-methyl modified nucleotide
  modified_base (11)..(11): 5-methyl modified nucleotide
  modified_base (12)..(12): 5-methyl modified nucleotide
  source: /note="3' tri-ethylene glycol (TEG)"
cuguccaagcccggu

SEQ ID NO: 13904 - RNA, 14 nt, Artificial Sequence
  source: /note="Description of Artificial Sequence: Synthetic oligonucleotide"
  source: /note="RNA"
  source: /note="5' tri-ethylene glycol (TEG)"
  modified_base (1)..(1): 5-methyl bicyclic nucleic acid
  modified_base (5)..(5): 5-methyl modified nucleotide
  modified_base (6)..(6): 5-methyl modified nucleotide
  modified_base (10)..(10): 5-methyl modified nucleotide
  modified_base (11)..(11): 5-methyl modified nucleotide
  modified_base (12)..(12): 5-methyl modified nucleotide
  source: /note="3' tri-ethylene glycol (TEG)"
cuguccaagcccgg

SEQ ID NO: 13905 - RNA, 13 nt, Artificial Sequence
  source: /note="Description of Artificial Sequence: Synthetic oligonucleotide"
  source: /note="RNA"
  source: /note="5' tri-ethylene glycol (TEG)"
  modified_base (1)..(1): 5-methyl bicyclic nucleic acid
  modified_base (5)..(5): 5-methyl modified nucleotide
  modified_base (6)..(6): 5-methyl modified nucleotide
  modified_base (10)..(10): 5-methyl modified nucleotide
  modified_base (11)..(11): 5-methyl modified nucleotide
  modified_base (12)..(12): 5-methyl modified nucleotide
  source: /note="3' tri-ethylene glycol (TEG)"
cuguccaagcccg

SEQ ID NO: 13906 - RNA, 12 nt, Artificial Sequence
  source: /note="Description of Artificial Sequence: Synthetic oligonucleotide"
  source: /note="RNA"
  source: /note="5' tri-ethylene glycol (TEG)"
  modified_base (1)..(1): 5-methyl bicyclic nucleic acid
  modified_base (5)..(5): 5-methyl modified nucleotide
  modified_base (6)..(6): 5-methyl modified nucleotide
  modified_base (10)..(10): 5-methyl modified nucleotide
  modified_base (11)..(11): 5-methyl modified nucleotide
  modified_base (12)..(12): 5-methyl modified nucleotide
  source: /note="3' tri-ethylene glycol (TEG)"
cuguccaagccc

SEQ ID NO: 13907 - RNA, 11 nt, Artificial Sequence
  source: /note="Description of Artificial Sequence: Synthetic oligonucleotide"
  source: /note="RNA"
  source: /note="5' tri-ethylene glycol (TEG)"
  modified_base (1)..(1): 5-methyl bicyclic nucleic acid
  modified_base (5)..(5): 5-methyl modified nucleotide
  modified_base (6)..(6): 5-methyl modified nucleotide
  modified_base (10)..(10): 5-methyl modified nucleotide
  modified_base (11)..(11): 5-methyl modified nucleotide
  source: /note="3' tri-ethylene glycol (TEG)"
cuguccaagcc

SEQ ID NO: 13908 - RNA, 10 nt, Artificial Sequence
  source: /note="Description of Artificial Sequence: Synthetic oligonucleotide"
  source: /note="RNA"
  source: /note="5' tri-ethylene glycol (TEG)"
  modified_base (1)..(1): 5-methyl bicyclic nucleic acid
  modified_base (5)..(5): 5-methyl modified nucleotide
  modified_base (6)..(6): 5-methyl modified nucleotide
  modified_base (10)..(10): 5-methyl modified nucleotide
  source: /note="3' tri-ethylene glycol (TEG)"
cuguccaagc

SEQ ID NO: 13909 - RNA, 9 nt, Artificial Sequence
  source: /note="Description of Artificial Sequence: Synthetic oligonucleotide"
  source: /note="RNA"
  source: /note="5' tri-ethylene glycol (TEG)"
  modified_base (1)..(1): 5-methyl bicyclic nucleic acid
  modified_base (5)..(5): 5-methyl modified nucleotide
  modified_base (6)..(6): 5-methyl modified nucleotide
  source: /note="3' tri-ethylene glycol (TEG)"
cuguccaag

SEQ ID NO: 13910 - RNA, 8 nt, Artificial Sequence
  source: /note="Description of Artificial Sequence: Synthetic oligonucleotide"
  source: /note="RNA"
  source: /note="5' tri-ethylene glycol (TEG)"
  modified_base (1)..(1): 5-methyl bicyclic nucleic acid
  modified_base (5)..(5): 5-methyl modified nucleotide
  modified_base (6)..(6): 5-methyl modified nucleotide
  source: /note="3' tri-ethylene glycol (TEG)"
cuguccaa

SEQ ID NO: 13911 - RNA, 20 nt, Artificial Sequence
  source: /note="Description of Artificial Sequence: Synthetic oligonucleotide"
  source: /note="RNA"
  source: /note="5' tri-ethylene glycol (TEG)"
  modified_base (1)..(1): bicyclic nucleic acid (BNA)
  modified_base (4)..(4): 5-methyl modified nucleotide
  modified_base (8)..(8): 5-methyl modified nucleotide
  modified_base (9)..(9): 5-methyl modified nucleotide
  modified_base (13)..(13): 5-methyl modified nucleotide
  modified_base (14)..(14): 5-methyl modified nucleotide
  modified_base (15)..(15): 5-methyl modified nucleotide
  source: /note="3' tri-ethylene glycol (TEG)"
guucuguccaagcccgguug

SEQ ID NO: 13912 - RNA, 19 nt, Artificial Sequence
  source: /note="Description of Artificial Sequence: Synthetic oligonucleotide"
  source: /note="RNA"
  source: /note="5' tri-ethylene glycol (TEG)"
  modified_base (1)..(1): bicyclic nucleic acid (BNA)
  modified_base (4)..(4): 5-methyl modified nucleotide
  modified_base (8)..(8): 5-methyl modified nucleotide
  modified_base (9)..(9): 5-methyl modified nucleotide
  modified_base (13)..(13): 5-methyl modified nucleotide
  modified_base (14)..(14): 5-methyl modified nucleotide
  modified_base (15)..(15): 5-methyl modified nucleotide
  source: /note="3' tri-ethylene glycol (TEG)"
guucuguccaagcccgguu

SEQ ID NO: 13913 - RNA, 18 nt, Artificial Sequence
  source: /note="Description of Artificial Sequence: Synthetic oligonucleotide"
  source: /note="RNA"
  source: /note="5' tri-ethylene glycol (TEG)"
  modified_base (1)..(1): bicyclic nucleic acid (BNA)
  modified_base (4)..(4): 5-methyl modified nucleotide
  modified_base (8)..(8): 5-methyl modified nucleotide
  modified_base (9)..(9): 5-methyl modified nucleotide
  modified_base (13)..(13): 5-methyl modified nucleotide
  modified_base (14)..(14): 5-methyl modified nucleotide
  modified_base (15)..(15): 5-methyl modified nucleotide
  source: /note="3' tri-ethylene glycol (TEG)"
guucuguccaagcccggu

SEQ ID NO: 13914 - RNA, 17 nt, Artificial Sequence
  source: /note="Description of Artificial Sequence: Synthetic oligonucleotide"
  source: /note="RNA"
  source: /note="5' tri-ethylene glycol (TEG)"
  modified_base (1)..(1): bicyclic nucleic acid (BNA)
  modified_base (4)..(4): 5-methyl modified nucleotide
  modified_base (8)..(8): 5-methyl modified nucleotide
  modified_base (9)..(9): 5-methyl modified nucleotide
  modified_base (13)..(13): 5-methyl modified nucleotide
  modified_base (14)..(14): 5-methyl modified nucleotide
  modified_base (15)..(15): 5-methyl modified nucleotide
  source: /note="3' tri-ethylene glycol (TEG)"
guucuguccaagcccgg

SEQ ID NO: 13915 - RNA, 16 nt, Artificial Sequence
  source: /note="Description of Artificial Sequence: Synthetic oligonucleotide"
  source: /note="RNA"
  source: /note="5' tri-ethylene glycol (TEG)"
  modified_base (1)..(1): bicyclic nucleic acid (BNA)
  modified_base (4)..(4): 5-methyl modified nucleotide
  modified_base (8)..(8): 5-methyl modified nucleotide
  modified_base (9)..(9): 5-methyl modified nucleotide
  modified_base (13)..(13): 5-methyl modified nucleotide
  modified_base (14)..(14): 5-methyl modified nucleotide
  modified_base (15)..(15): 5-methyl modified nucleotide
  source: /note="3' tri-ethylene glycol (TEG)"
guucuguccaagcccg

SEQ ID NO: 13916 - RNA, 15 nt, Artificial Sequence
  source: /note="Description of Artificial Sequence: Synthetic oligonucleotide"
  source: /note="RNA"
  source: /note="5' tri-ethylene glycol (TEG)"
  modified_base (1)..(1): bicyclic nucleic acid (BNA)
  modified_base (4)..(4): 5-methyl modified nucleotide
  modified_base (8)..(8): 5-methyl modified nucleotide
  modified_base (9)..(9): 5-methyl modified nucleotide
  modified_base (13)..(13): 5-methyl modified nucleotide
  modified_base (14)..(14): 5-methyl modified nucleotide
  modified_base (15)..(15): 5-methyl modified nucleotide
  source: /note="3' tri-ethylene glycol (TEG)"
guucuguccaagccc

SEQ ID NO: 13917 - RNA, 14 nt, Artificial Sequence
  source: /note="Description of Artificial Sequence: Synthetic oligonucleotide"
  source: /note="RNA"
  source: /note="5' tri-ethylene glycol (TEG)"
  modified_base (1)..(1): bicyclic nucleic acid (BNA)
  modified_base (4)..(4): 5-methyl modified nucleotide
  modified_base (8)..(8): 5-methyl modified nucleotide
  modified_base (9)..(9): 5-methyl modified nucleotide
  modified_base (13)..(13): 5-methyl modified nucleotide
  modified_base (14)..(14): 5-methyl modified nucleotide
  source: /note="3' tri-ethylene glycol (TEG)"
guucuguccaagcc

SEQ ID NO: 13918 - RNA, 13 nt, Artificial Sequence
  source: /note="Description of Artificial Sequence: Synthetic oligonucleotide"
  source: /note="RNA"
  source: /note="5' tri-ethylene glycol (TEG)"
  modified_base (1)..(1): bicyclic nucleic acid (BNA)
  modified_base (4)..(4): 5-methyl modified nucleotide
  modified_base (8)..(8): 5-methyl modified nucleotide
  modified_base (9)..(9): 5-methyl modified nucleotide
  modified_base (13)..(13): 5-methyl modified nucleotide
  source: /note="3' tri-ethylene glycol (TEG)"
guucuguccaagc

SEQ ID NO: 13919 - RNA, 12 nt, Artificial Sequence
  source: /note="Description of Artificial Sequence: Synthetic oligonucleotide"
  source: /note="RNA"
  source: /note="5' tri-ethylene glycol (TEG)"
  modified_base (1)..(1): bicyclic nucleic acid (BNA)
  modified_base (4)..(4): 5-methyl modified nucleotide
  modified_base (8)..(8): 5-methyl modified nucleotide
  modified_base (9)..(9): 5-methyl modified nucleotide
  source: /note="3' tri-ethylene glycol (TEG)"
guucuguccaag

SEQ ID NO: 13920 - RNA, 11 nt, Artificial Sequence
  source: /note="Description of Artificial Sequence: Synthetic oligonucleotide"
  source: /note="RNA"
  source: /note="5' tri-ethylene glycol (TEG)"
  modified_base (1)..(1): bicyclic nucleic acid (BNA)
  modified_base (4)..(4): 5-methyl modified nucleotide
  modified_base (8)..(8): 5-methyl modified nucleotide
  modified_base (9)..(9): 5-methyl modified nucleotide
  source: /note="3' tri-ethylene glycol (TEG)"
guucuguccaa

SEQ ID NO: 13921 - RNA, 10 nt, Artificial Sequence
  source: /note="Description of Artificial Sequence: Synthetic oligonucleotide"
  source: /note="RNA"
  source: /note="5' tri-ethylene glycol (TEG)"
  modified_base (1)..(1): bicyclic nucleic acid (BNA)
  modified_base (4)..(4): 5-methyl modified nucleotide
  modified_base (8)..(8): 5-methyl modified nucleotide
  modified_base (9)..(9): 5-methyl modified nucleotide
  source: /note="3' tri-ethylene glycol (TEG)"
guucugucca

SEQ ID NO: 13922 - RNA, 9 nt, Artificial Sequence
  source: /note="Description of Artificial Sequence: Synthetic oligonucleotide"
  source: /note="RNA"
  source: /note="5' tri-ethylene glycol (TEG)"
  modified_base (1)..(1): bicyclic nucleic acid (BNA)
  modified_base (4)..(4): 5-methyl modified nucleotide
  modified_base (8)..(8): 5-methyl modified nucleotide
  modified_base (9)..(9): 5-methyl modified nucleotide
  source: /note="3' tri-ethylene glycol (TEG)"
guucugucc

SEQ ID NO: 13923 - RNA, 8 nt, Artificial Sequence
  source: /note="Description of Artificial Sequence: Synthetic oligonucleotide"
  source: /note="RNA"
  source: /note="5' tri-ethylene glycol (TEG)"
  modified_base (1)..(1): bicyclic nucleic acid (BNA)
  modified_base (4)..(4): 5-methyl modified nucleotide
  modified_base (8)..(8): 5-methyl modified nucleotide
  source: /note="3' tri-ethylene glycol (TEG)"
guucuguc

SEQ ID NO: 13924 - RNA, 20 nt, Artificial Sequence
  source: /note="Description of Artificial Sequence: Synthetic oligonucleotide"
  source: /note="RNA"
  source: /note="5' tri-ethylene glycol (TEG)"
  modified_base (1)..(1): bicyclic nucleic acid (BNA)
  modified_base (5)..(5): 5-methyl modified nucleotide
  modified_base (9)..(9): 5-methyl modified nucleotide
  modified_base (10)..(10): 5-methyl modified nucleotide
  modified_base (14)..(14): 5-methyl modified nucleotide
  modified_base (15)..(15): 5-methyl modified nucleotide
  modified_base (16)..(16): 5-methyl modified nucleotide
  source: /note="3' tri-ethylene glycol (TEG)"
aguucuguccaagcccgguu

SEQ ID NO: 13925 - RNA, 19 nt, Artificial Sequence
  source: /note="Description of Artificial Sequence: Synthetic oligonucleotide"
  source: /note="RNA"
  source: /note="5' tri-ethylene glycol (TEG)"
  modified_base (1)..(1): bicyclic nucleic acid (BNA)
  modified_base (5)..(5): 5-methyl modified nucleotide
  modified_base (9)..(9): 5-methyl modified nucleotide
  modified_base (10)..(10): 5-methyl modified nucleotide
  modified_base (14)..(14): 5-methyl modified nucleotide
  modified_base (15)..(15): 5-methyl modified nucleotide
  modified_base (16)..(16): 5-methyl modified nucleotide
  source: /note="3' tri-ethylene glycol (TEG)"
aguucuguccaagcccggu

SEQ ID NO: 13926 - RNA, 18 nt, Artificial Sequence
  source: /note="Description of Artificial Sequence: Synthetic oligonucleotide"
  source: /note="RNA"
  source: /note="5' tri-ethylene glycol (TEG)"
  modified_base (1)..(1): bicyclic nucleic acid (BNA)
  modified_base (5)..(5): 5-methyl modified nucleotide
  modified_base (9)..(9): 5-methyl modified nucleotide
  modified_base (10)..(10): 5-methyl modified nucleotide
  modified_base (14)..(14): 5-methyl modified nucleotide
  modified_base (15)..(15): 5-methyl modified nucleotide
  modified_base (16)..(16): 5-methyl modified nucleotide
  source: /note="3' tri-ethylene glycol (TEG)"
aguucuguccaagcccgg

SEQ ID NO: 13927 - RNA, 17 nt, Artificial Sequence
  source: /note="Description of Artificial Sequence: Synthetic oligonucleotide"
  source: /note="RNA"
  source: /note="5' tri-ethylene glycol (TEG)"
  modified_base (1)..(1): bicyclic nucleic acid (BNA)
  modified_base (5)..(5): 5-methyl modified nucleotide
  modified_base (9)..(9): 5-methyl modified nucleotide
  modified_base (10)..(10): 5-methyl modified nucleotide
  modified_base (14)..(14): 5-methyl modified nucleotide
  modified_base (15)..(15): 5-methyl modified nucleotide
  modified_base (16)..(16): 5-methyl modified nucleotide
  source: /note="3' tri-ethylene glycol (TEG)"
aguucuguccaagcccg

SEQ ID NO: 13928 - RNA, 16 nt, Artificial Sequence
  source: /note="Description of Artificial Sequence: Synthetic oligonucleotide"
  source: /note="RNA"
  source: /note="5' tri-ethylene glycol (TEG)"
  modified_base (1)..(1): bicyclic nucleic acid (BNA)
  modified_base (5)..(5): 5-methyl modified nucleotide
  modified_base (9)..(9): 5-methyl modified nucleotide
  modified_base (10)..(10): 5-methyl modified nucleotide
  modified_base (14)..(14): 5-methyl modified nucleotide
  modified_base (15)..(15): 5-methyl modified nucleotide
  modified_base (16)..(16): 5-methyl modified nucleotide
  source: /note="3' tri-ethylene glycol (TEG)"
aguucuguccaagccc

SEQ ID NO: 13929 - RNA, 15 nt, Artificial Sequence
  source: /note="Description of Artificial Sequence: Synthetic oligonucleotide"
  source: /note="RNA"
  source: /note="5' tri-ethylene glycol (TEG)"
  modified_base (1)..(1): bicyclic nucleic acid (BNA)
  modified_base (5)..(5): 5-methyl modified nucleotide
  modified_base (9)..(9): 5-methyl modified nucleotide
  modified_base (10)..(10): 5-methyl modified nucleotide
  modified_base (14)..(14): 5-methyl modified nucleotide
  modified_base (15)..(15): 5-methyl modified nucleotide
  source: /note="3' tri-ethylene glycol (TEG)"
aguucuguccaagcc

SEQ ID NO: 13930 - RNA, 14 nt, Artificial Sequence
  source: /note="Description of Artificial Sequence: Synthetic oligonucleotide"
  source: /note="RNA"
  source: /note="5' tri-ethylene glycol (TEG)"
  modified_base (1)..(1): bicyclic nucleic acid (BNA)
  modified_base (5)..(5): 5-methyl modified nucleotide
  modified_base (9)..(9): 5-methyl modified nucleotide
  modified_base (10)..(10): 5-methyl modified nucleotide
  modified_base (14)..(14): 5-methyl modified nucleotide
  source: /note="3' tri-ethylene glycol (TEG)"
aguucuguccaagc

SEQ ID NO: 13931 - RNA, 13 nt, Artificial Sequence
  source: /note="Description of Artificial Sequence: Synthetic oligonucleotide"
  source: /note="RNA"
  source: /note="5' tri-ethylene glycol (TEG)"
  modified_base (1)..(1): bicyclic nucleic acid (BNA)
  modified_base (5)..(5): 5-methyl modified nucleotide
  modified_base (9)..(9): 5-methyl modified nucleotide
  modified_base (10)..(10): 5-methyl modified nucleotide
  source: /note="3' tri-ethylene glycol (TEG)"
aguucuguccaag

SEQ ID NO: 13932 - RNA, 12 nt, Artificial Sequence
  source: /note="Description of Artificial Sequence: Synthetic oligonucleotide"
  source: /note="RNA"
  source: /note="5' tri-ethylene glycol (TEG)"
  modified_base (1)..(1): bicyclic nucleic acid (BNA)
  modified_base (5)..(5): 5-methyl modified nucleotide
  modified_base (9)..(9): 5-methyl modified nucleotide
  modified_base (10)..(10): 5-methyl modified nucleotide
  source: /note="3' tri-ethylene glycol (TEG)"
aguucuguccaa

SEQ ID NO: 13933 - RNA, 11 nt, Artificial Sequence
  source: /note="Description of Artificial Sequence: Synthetic oligonucleotide"
  source: /note="RNA"
  source: /note="5' tri-ethylene glycol (TEG)"
  modified_base (1)..(1): bicyclic nucleic acid (BNA)
  modified_base (5)..(5): 5-methyl modified nucleotide
  modified_base (9)..(9): 5-methyl modified nucleotide
  modified_base (10)..(10): 5-methyl modified nucleotide
  source: /note="3' tri-ethylene glycol (TEG)"
aguucugucca

SEQ ID NO: 13934 - RNA, 10 nt, Artificial Sequence
  source: /note="Description of Artificial Sequence: Synthetic oligonucleotide"
  source: /note="RNA"
  source: /note="5' tri-ethylene glycol (TEG)"
  modified_base (1)..(1): bicyclic nucleic acid (BNA)
  modified_base (5)..(5): 5-methyl modified nucleotide
  modified_base (9)..(9): 5-methyl modified nucleotide
  modified_base (10)..(10): 5-methyl modified nucleotide
  source: /note="3' tri-ethylene glycol (TEG)"
aguucugucc

SEQ ID NO: 13935 - RNA, 9 nt, Artificial Sequence
  source: /note="Description of Artificial Sequence: Synthetic oligonucleotide"
  source: /note="RNA"
  source: /note="5' tri-ethylene glycol (TEG)"
  modified_base (1)..(1): bicyclic nucleic acid (BNA)
  modified_base (5)..(5): 5-methyl modified nucleotide
  modified_base (9)..(9): 5-methyl modified nucleotide
  source: /note="3' tri-ethylene glycol (TEG)"
aguucuguc

SEQ ID NO: 13936 - RNA, 8 nt, Artificial Sequence
  source: /note="Description of Artificial Sequence: Synthetic oligonucleotide"
  source: /note="RNA"
  source: /note="5' tri-ethylene glycol (TEG)"
  modified_base (1)..(1): bicyclic nucleic acid (BNA)
  modified_base (5)..(5): 5-methyl modified nucleotide
  source: /note="3' tri-ethylene glycol (TEG)"
aguucugu

SEQ ID NO: 13937 - RNA, 20 nt, Artificial Sequence
  source: /note="Description of Artificial Sequence: Synthetic oligonucleotide"
  source: /note="RNA"
  source: /note="5' tri-ethylene glycol (TEG)"
  modified_base (1)..(1): bicyclic nucleic acid (BNA)
  modified_base (6)..(6): 5-methyl modified nucleotide
  modified_base (10)..(10): 5-methyl modified nucleotide
  modified_base (11)..(11): 5-methyl modified nucleotide
  modified_base (15)..(15): 5-methyl modified nucleotide
  modified_base (16)..(16): 5-methyl modified nucleotide
  modified_base (17)..(17): 5-methyl modified nucleotide
  source: /note="3' tri-ethylene glycol (TEG)"
aaguucuguccaagcccggu

SEQ ID NO: 13938 - RNA, 19 nt, Artificial Sequence
  source: /note="Description of Artificial Sequence: Synthetic oligonucleotide"
  source: /note="RNA"
  source: /note="5' tri-ethylene glycol (TEG)"
  modified_base (1)..(1): bicyclic nucleic acid (BNA)
  modified_base (6)..(6): 5-methyl modified nucleotide
  modified_base (10)..(10): 5-methyl modified nucleotide
  modified_base (11)..(11): 5-methyl modified nucleotide
  modified_base (15)..(15): 5-methyl modified nucleotide
  modified_base (16)..(16): 5-methyl modified nucleotide
  modified_base (17)..(17): 5-methyl modified nucleotide
  source: /note="3' tri-ethylene glycol (TEG)"
aaguucuguccaagcccgg

SEQ ID NO: 13939 - RNA, 18 nt, Artificial Sequence
  source: /note="Description of Artificial Sequence: Synthetic oligonucleotide"
  source: /note="RNA"
  source: /note="5' tri-ethylene glycol (TEG)"
  modified_base (1)..(1): bicyclic nucleic acid (BNA)
  modified_base (6)..(6): 5-methyl modified nucleotide
  modified_base (10)..(10): 5-methyl modified nucleotide
  modified_base (11)..(11): 5-methyl modified nucleotide
  modified_base (15)..(15): 5-methyl modified nucleotide
  modified_base (16)..(16): 5-methyl modified nucleotide
  modified_base (17)..(17): 5-methyl modified nucleotide
  source: /note="3' tri-ethylene glycol (TEG)"
aaguucuguccaagcccg

SEQ ID NO: 13940 - RNA, 17 nt, Artificial Sequence
  source: /note="Description of Artificial Sequence: Synthetic oligonucleotide"
  source: /note="RNA"
  source: /note="5' tri-ethylene glycol (TEG)"
  modified_base (1)..(1): bicyclic nucleic acid (BNA)
  modified_base (6)..(6): 5-methyl modified nucleotide
  modified_base (10)..(10): 5-methyl modified nucleotide
  modified_base (11)..(11): 5-methyl modified nucleotide
  modified_base (15)..(15): 5-methyl modified nucleotide
  modified_base (16)..(16): 5-methyl modified nucleotide
  modified_base (17)..(17): 5-methyl modified nucleotide
  source: /note="3' tri-ethylene glycol (TEG)"
aaguucuguccaagccc

SEQ ID NO: 13941 - RNA, 16 nt, Artificial Sequence
  source: /note="Description of Artificial Sequence: Synthetic oligonucleotide"
  source: /note="RNA"
  source: /note="5' tri-ethylene glycol (TEG)"
  modified_base (1)..(1): bicyclic nucleic acid (BNA)
  modified_base (6)..(6): 5-methyl modified nucleotide
  modified_base (10)..(10): 5-methyl modified nucleotide
  modified_base (11)..(11): 5-methyl modified nucleotide
  modified_base (15)..(15): 5-methyl modified nucleotide
  modified_base (16)..(16): 5-methyl modified nucleotide
  source: /note="3' tri-ethylene glycol (TEG)"
aaguucuguccaagcc

SEQ ID NO: 13942 - RNA, 15 nt, Artificial Sequence
  source: /note="Description of Artificial Sequence: Synthetic oligonucleotide"
  source: /note="RNA"
  source: /note="5' tri-ethylene glycol (TEG)"
  modified_base (1)..(1): bicyclic nucleic acid (BNA)
  modified_base (6)..(6): 5-methyl modified nucleotide
  modified_base (10)..(10): 5-methyl modified nucleotide
  modified_base (11)..(11): 5-methyl modified nucleotide
  modified_base (15)..(15): 5-methyl modified nucleotide
  source: /note="3' tri-ethylene glycol (TEG)"
aaguucuguccaagc

SEQ ID NO: 13943 - RNA, 14 nt, Artificial Sequence
  source: /note="Description of Artificial Sequence: Synthetic oligonucleotide"
  source: /note="RNA"
  source: /note="5' tri-ethylene glycol (TEG)"
  modified_base (1)..(1): bicyclic nucleic acid (BNA)
  modified_base (6)..(6): 5-methyl modified nucleotide
  modified_base (10)..(10): 5-methyl modified nucleotide
  modified_base (11)..(11): 5-methyl modified nucleotide
  source: /note="3' tri-ethylene glycol (TEG)"
aaguucuguccaag

SEQ ID NO: 13944 - RNA, 13 nt, Artificial Sequence
  source: /note="Description of Artificial Sequence: Synthetic oligonucleotide"
  source: /note="RNA"
  source: /note="5' tri-ethylene glycol (TEG)"
  modified_base (1)..(1): bicyclic nucleic acid (BNA)
  modified_base (6)..(6): 5-methyl modified nucleotide
  modified_base (10)..(10): 5-methyl modified nucleotide
  modified_base (11)..(11): 5-methyl modified nucleotide
  source: /note="3' tri-ethylene glycol (TEG)"
aaguucuguccaa

SEQ ID NO: 13945 - RNA, 12 nt, Artificial Sequence
  source: /note="Description of Artificial Sequence: Synthetic oligonucleotide"
  source: /note="RNA"
  source: /note="5' tri-ethylene glycol (TEG)"
  modified_base (1)..(1): bicyclic nucleic acid (BNA)
  modified_base (6)..(6): 5-methyl modified nucleotide
  modified_base (10)..(10): 5-methyl modified nucleotide
  modified_base (11)..(11): 5-methyl modified nucleotide
  source: /note="3' tri-ethylene glycol (TEG)"
aaguucugucca

SEQ ID NO: 13946 - RNA, 11 nt, Artificial Sequence
  source: /note="Description of Artificial Sequence: Synthetic oligonucleotide"
  source: /note="RNA"
  source: /note="5' tri-ethylene glycol (TEG)"
  modified_base (1)..(1): bicyclic nucleic acid (BNA)
  modified_base (6)..(6): 5-methyl modified nucleotide
  modified_base (10)..(10): 5-methyl modified nucleotide
  modified_base (11)..(11): 5-methyl modified nucleotide
  source: /note="3' tri-ethylene glycol (TEG)"
aaguucugucc

SEQ ID NO: 13947 - RNA, 10 nt, Artificial Sequence
  source: /note="Description of Artificial Sequence: Synthetic oligonucleotide"
  source: /note="RNA"
  source: /note="5' tri-ethylene glycol (TEG)"
  modified_base (1)..(1): bicyclic nucleic acid (BNA)
  modified_base (6)..(6): 5-methyl modified nucleotide
  modified_base (10)..(10): 5-methyl modified nucleotide
  source: /note="3' tri-ethylene glycol (TEG)"
aaguucuguc

SEQ ID NO: 13948 - RNA, 9 nt, Artificial Sequence
  source: /note="Description of Artificial Sequence: Synthetic oligonucleotide"
  source: /note="RNA"
  source: /note="5' tri-ethylene glycol (TEG)"
  modified_base (1)..(1): bicyclic nucleic acid (BNA)
  modified_base (6)..(6): 5-methyl modified nucleotide
  source: /note="3' tri-ethylene glycol (TEG)"
aaguucugu

SEQ ID NO: 13949 - RNA, 8 nt, Artificial Sequence
  source: /note="Description of Artificial Sequence: Synthetic oligonucleotide"
  source: /note="RNA"
  source: /note="5' tri-ethylene glycol (TEG)"
  modified_base (1)..(1): bicyclic nucleic acid (BNA)
  modified_base (6)..(6): 5-methyl modified nucleotide
  source: /note="3' tri-ethylene glycol (TEG)"
aaguucug

SEQ ID NO: 13950 - DNA, 20 bp, Artificial Sequence
  source: /note="Description of Artificial Sequence: Synthetic oligonucleotide"
  source: /note="Description of Combined DNA/RNA Molecule: Synthetic oligonucleotide"
  source: /note="DNA/RNA"
  source: /note="5' tri-ethylene glycol (TEG)"
  modified_base (1)..(1): bicyclic nucleic acid (BNA)
  modified_base (7)..(7): 5-methyl modified nucleotide
  modified_base (11)..(11): 5-methyl modified nucleotide
  modified_base (12)..(12): 5-methyl modified nucleotide
  modified_base (16)..(16): 5-methyl modified nucleotide
  modified_base (17)..(17): 5-methyl modified nucleotide
  modified_base (18)..(18): 5-methyl modified nucleotide
  source: /note="3' tri-ethylene glycol (TEG)"
taaguucuguccaagcccgg

SEQ ID NO: 13951 - DNA, 19 bp, Artificial Sequence
  source: /note="Description of Artificial Sequence: Synthetic oligonucleotide"
  source: /note="Description of Combined DNA/RNA Molecule: Synthetic oligonucleotide"
  source: /note="DNA/RNA"
  source: /note="5' tri-ethylene glycol (TEG)"
  modified_base (1)..(1): bicyclic nucleic acid (BNA)
  modified_base (7)..(7): 5-methyl modified nucleotide
  modified_base (11)..(11): 5-methyl modified nucleotide
  modified_base (12)..(12): 5-methyl modified nucleotide
  modified_base (16)..(16): 5-methyl modified nucleotide
  modified_base (17)..(17): 5-methyl modified nucleotide
  modified_base (18)..(18): 5-methyl modified nucleotide
  source: /note="3' tri-ethylene glycol (TEG)"
taaguucuguccaagcccg

SEQ ID NO: 13952 - DNA, 18 bp, Artificial Sequence
  source: /note="Description of Artificial Sequence: Synthetic oligonucleotide"
  source: /note="Description of Combined DNA/RNA Molecule: Synthetic oligonucleotide"
  source: /note="DNA/RNA"
  source: /note="5' tri-ethylene glycol (TEG)"
  modified_base (1)..(1): bicyclic nucleic acid (BNA)
  modified_base (7)..(7): 5-methyl modified nucleotide
  modified_base (11)..(11): 5-methyl modified nucleotide
  modified_base (12)..(12): 5-methyl modified nucleotide
  modified_base (16)..(16): 5-methyl modified nucleotide
  modified_base (17)..(17): 5-methyl modified nucleotide
  modified_base (18)..(18): 5-methyl modified nucleotide
  source: /note="3' tri-ethylene glycol (TEG)"
taaguucuguccaagccc

SEQ ID NO: 13953 - DNA, 17 bp, Artificial Sequence
  source: /note="Description of Artificial Sequence: Synthetic oligonucleotide"
  source: /note="Description of Combined DNA/RNA Molecule: Synthetic oligonucleotide"
  source: /note="DNA/RNA"
  source: /note="5' tri-ethylene glycol (TEG)"
  modified_base (1)..(1): bicyclic nucleic acid (BNA)
  modified_base (7)..(7): 5-methyl modified nucleotide
  modified_base (11)..(11): 5-methyl modified nucleotide
  modified_base (12)..(12): 5-methyl modified nucleotide
  modified_base (16)..(16): 5-methyl modified nucleotide
  modified_base (17)..(17): 5-methyl modified nucleotide
  source: /note="3' tri-ethylene glycol (TEG)"
taaguucuguccaagcc

SEQ ID NO: 13954 - DNA, 16 bp, Artificial Sequence
  source: /note="Description of Artificial Sequence: Synthetic oligonucleotide"
  source: /note="Description of Combined DNA/RNA Molecule: Synthetic oligonucleotide"
  source: /note="DNA/RNA"
  source: /note="5' tri-ethylene glycol (TEG)"
  modified_base (1)..(1): bicyclic nucleic acid (BNA)
  modified_base (7)..(7): 5-methyl modified nucleotide
  modified_base (11)..(11): 5-methyl modified nucleotide
  modified_base (12)..(12): 5-methyl modified nucleotide
  modified_base (16)..(16): 5-methyl modified nucleotide
  source: /note="3' tri-ethylene glycol (TEG)"
taaguucuguccaagc

SEQ ID NO: 13955 - DNA, 14 bp, Artificial Sequence
  source: /note="Description of Artificial Sequence: Synthetic oligonucleotide"
  source: /note="Description of Combined DNA/RNA Molecule: Synthetic oligonucleotide"
  source: /note="DNA/RNA"
  source: /note="5' tri-ethylene glycol (TEG)"
  modified_base (1)..(1): bicyclic nucleic acid (BNA)
  modified_base (7)..(7): 5-methyl modified nucleotide
  modified_base (11)..(11): 5-methyl modified nucleotide
  modified_base (12)..(12): 5-methyl modified nucleotide
  source: /note="3' tri-ethylene glycol (TEG)"
taaguucuguccaa

SEQ ID NO: 13956 - DNA, 13 bp, Artificial Sequence
  source: /note="Description of Artificial Sequence: Synthetic oligonucleotide"
  source: /note="Description of Combined DNA/RNA Molecule: Synthetic oligonucleotide"
  source: /note="DNA/RNA"
  source: /note="5' tri-ethylene glycol (TEG)"
  modified_base (1)..(1): bicyclic nucleic acid (BNA)
  modified_base (7)..(7): 5-methyl modified nucleotide
  modified_base (11)..(11): 5-methyl modified nucleotide
  modified_base (12)..(12): 5-methyl modified nucleotide
  source: /note="3' tri-ethylene glycol (TEG)"
taaguucugucca

SEQ ID NO: 13957 - DNA, 12 bp, Artificial Sequence
  source: /note="Description of Artificial Sequence: Synthetic oligonucleotide"
  source: /note="Description of Combined DNA/RNA Molecule: Synthetic oligonucleotide"
  source: /note="DNA/RNA"
  source: /note="5' tri-ethylene glycol (TEG)"
  modified_base (1)..(1): bicyclic nucleic acid (BNA)
  modified_base (7)..(7): 5-methyl modified nucleotide
  modified_base (11)..(11): 5-methyl modified nucleotide
  modified_base (12)..(12): 5-methyl modified nucleotide
  source: /note="3' tri-ethylene glycol (TEG)"
taaguucugucc

SEQ ID NO: 13958 - DNA, 11 bp, Artificial Sequence
  source: /note="Description of Artificial Sequence: Synthetic oligonucleotide"
  source: /note="Description of Combined DNA/RNA Molecule: Synthetic oligonucleotide"
  source: /note="DNA/RNA"
  source: /note="5' tri-ethylene glycol (TEG)"
  modified_base (1)..(1): bicyclic nucleic acid (BNA)
  modified_base (7)..(7): 5-methyl modified nucleotide
  modified_base (11)..(11): 5-methyl modified nucleotide
  source: /note="3' tri-ethylene glycol (TEG)"
taaguucuguc

SEQ ID NO: 13959 - DNA, 10 bp, Artificial Sequence
  source: /note="Description of Artificial Sequence: Synthetic oligonucleotide"
  source: /note="Description of Combined DNA/RNA Molecule: Synthetic oligonucleotide"
  source: /note="DNA/RNA"
  source: /note="5' tri-ethylene glycol (TEG)"
  modified_base (1)..(1): bicyclic nucleic acid (BNA)
  modified_base (7)..(7): 5-methyl modified nucleotide
  source: /note="3' tri-ethylene glycol (TEG)"
taaguucugu

SEQ ID NO: 13960 - DNA, 9 bp, Artificial Sequence
  source: /note="Description of Artificial Sequence: Synthetic oligonucleotide"
  source: /note="Description of Combined DNA/RNA Molecule: Synthetic oligonucleotide"
  source: /note="DNA/RNA"
  source: /note="5' tri-ethylene glycol (TEG)"
  modified_base (1)..(1): bicyclic nucleic acid (BNA)
  modified_base (7)..(7): 5-methyl modified nucleotide
  source: /note="3' tri-ethylene glycol (TEG)"
taaguucug

SEQ ID NO: 13961 - DNA, 8 bp, Artificial Sequence
  source: /note="Description of Artificial Sequence: Synthetic oligonucleotide"
  source: /note="Description of Combined DNA/RNA Molecule: Synthetic oligonucleotide"
  source: /note="DNA/RNA"
  source: /note="5' tri-ethylene glycol (TEG)"
  modified_base (1)..(1): bicyclic nucleic acid (BNA)
  modified_base (7)..(7): 5-methyl modified nucleotide
  source: /note="3' tri-ethylene glycol (TEG)"
taaguucu

SEQ ID NO: 13962 - RNA, 20 nt, Artificial Sequence
  source: /note="Description of Artificial Sequence: Synthetic oligonucleotide"
  source: /note="RNA"
  source: /note="5' tri-ethylene glycol (TEG)"
  modified_base (1)..(1): bicyclic nucleic acid (BNA)
  modified_base (8)..(8): 5-methyl modified nucleotide
  modified_base (12)..(12): 5-methyl modified nucleotide
  modified_base (13)..(13): 5-methyl modified nucleotide
  modified_base (17)..(17): 5-methyl modified nucleotide
  modified_base (18)..(18): 5-methyl modified nucleotide
  modified_base (19)..(19): 5-methyl modified nucleotide
  source: /note="3' tri-ethylene glycol (TEG)"
guaaguucuguccaagcccg

SEQ ID NO: 13963 - RNA, 19 nt, Artificial Sequence
  source: /note="Description of Artificial Sequence: Synthetic oligonucleotide"
  source: /note="RNA"
  source: /note="5' tri-ethylene glycol (TEG)"
  modified_base (1)..(1): bicyclic nucleic acid (BNA)
  modified_base (8)..(8): 5-methyl modified nucleotide
  modified_base (12)..(12): 5-methyl modified nucleotide
  modified_base (13)..(13): 5-methyl modified nucleotide
  modified_base (17)..(17): 5-methyl modified nucleotide
  modified_base (18)..(18): 5-methyl modified nucleotide
  modified_base (19)..(19): 5-methyl modified nucleotide
  source: /note="3' tri-ethylene glycol (TEG)"
guaaguucuguccaagccc

SEQ ID NO: 13964 - RNA, 17 nt, Artificial Sequence
  source: /note="Description of Artificial Sequence: Synthetic oligonucleotide"
  source: /note="RNA"
  source: /note="5' tri-ethylene glycol (TEG)"
  modified_base (1)..(1): bicyclic nucleic acid (BNA)
  modified_base (8)..(8): 5-methyl modified nucleotide
  modified_base (12)..(12): 5-methyl modified nucleotide
  modified_base (13)..(13): 5-methyl modified nucleotide
  modified_base (17)..(17): 5-methyl modified nucleotide
  source: /note="3' tri-ethylene glycol (TEG)"
guaaguucuguccaagc

SEQ ID NO: 13965 - RNA, 16 nt, Artificial Sequence
  source: /note="Description of Artificial Sequence: Synthetic oligonucleotide"
  source: /note="RNA"
  source: /note="5' tri-ethylene glycol (TEG)"
  modified_base (1)..(1): bicyclic nucleic acid (BNA)
  modified_base (8)..(8): 5-methyl modified nucleotide
  modified_base (12)..(12): 5-methyl modified nucleotide
  modified_base (13)..(13): 5-methyl modified nucleotide
  source: /note="3' tri-ethylene glycol (TEG)"
guaaguucuguccaag

SEQ ID NO: 13966 - RNA, 15 nt, Artificial Sequence
  source: /note="Description of Artificial Sequence: Synthetic oligonucleotide"
  source: /note="RNA"
  source: /note="5' tri-ethylene glycol (TEG)"
  modified_base (1)..(1): bicyclic nucleic acid (BNA)
  modified_base (8)..(8): 5-methyl modified nucleotide
  modified_base (12)..(12): 5-methyl modified nucleotide
  modified_base (13)..(13): 5-methyl modified nucleotide
  source: /note="3' tri-ethylene glycol (TEG)"
guaaguucuguccaa

SEQ ID NO: 13967 - RNA, 14 nt, Artificial Sequence
  source: /note="Description of Artificial Sequence: Synthetic oligonucleotide"
  source: /note="RNA"
  source: /note="5' tri-ethylene glycol (TEG)"
  modified_base (1)..(1): bicyclic nucleic acid (BNA)
  modified_base (8)..(8): 5-methyl modified nucleotide
  modified_base (12)..(12): 5-methyl modified nucleotide
  modified_base (13)..(13): 5-methyl modified nucleotide
  source: /note="3' tri-ethylene glycol (TEG)"
guaaguucugucca

SEQ ID NO: 13968 - RNA, 13 nt, Artificial Sequence
  source: /note="Description of Artificial Sequence: Synthetic oligonucleotide"
  source: /note="RNA"
  source: /note="5' tri-ethylene glycol (TEG)"
  modified_base (1)..(1): bicyclic nucleic acid (BNA)
  modified_base (8)..(8): 5-methyl modified nucleotide
  modified_base (12)..(12): 5-methyl modified nucleotide
  modified_base (13)..(13): 5-methyl modified nucleotide
  source: /note="3' tri-ethylene glycol (TEG)"
guaaguucugucc

SEQ ID NO: 13969 - RNA, 12 nt, Artificial Sequence
  source: /note="Description of Artificial Sequence: Synthetic oligonucleotide"
  source: /note="RNA"
  source: /note="5' tri-ethylene glycol (TEG)"
  modified_base (1)..(1): bicyclic nucleic acid (BNA)
  modified_base (8)..(8): 5-methyl modified nucleotide
  modified_base (12)..(12): 5-methyl modified nucleotide
  source: /note="3' tri-ethylene glycol (TEG)"
guaaguucuguc

SEQ ID NO: 13970 - RNA, 11 nt, Artificial Sequence
  source: /note="Description of Artificial Sequence: Synthetic oligonucleotide"
  source: /note="RNA"
  source: /note="5' tri-ethylene glycol (TEG)"
  modified_base (1)..(1): bicyclic nucleic acid (BNA)
  modified_base (8)..(8): 5-methyl modified nucleotide
  source: /note="3' tri-ethylene glycol (TEG)"
guaaguucugu

SEQ ID NO: 13971 - RNA, 10 nt, Artificial Sequence
  source: /note="Description of Artificial Sequence: Synthetic oligonucleotide"
  source: /note="RNA"
  source: /note="5' tri-ethylene glycol (TEG)"
  modified_base (1)..(1): bicyclic nucleic acid (BNA)
  modified_base (8)..(8): 5-methyl modified nucleotide
  source: /note="3' tri-ethylene glycol (TEG)"
guaaguucug

SEQ ID NO: 13972 - RNA, 9 nt, Artificial Sequence
  source: /note="Description of Artificial Sequence: Synthetic oligonucleotide"
  source: /note="RNA"
  source: /note="5' tri-ethylene glycol (TEG)"
  modified_base (1)..(1): bicyclic nucleic acid (BNA)
  modified_base (8)..(8): 5-methyl modified nucleotide
  source: /note="3' tri-ethylene glycol (TEG)"
guaaguucu

SEQ ID NO: 13973 - RNA, 8 nt, Artificial Sequence
  source: /note="Description of Artificial Sequence: Synthetic oligonucleotide"
  source: /note="RNA"
  source: /note="5' tri-ethylene glycol (TEG)"
  modified_base (1)..(1): bicyclic nucleic acid (BNA)
  modified_base (8)..(8): 5-methyl modified nucleotide
  source: /note="3' tri-ethylene glycol (TEG)"
guaaguuc

SEQ ID NO: 13974 - RNA, 20 nt, Artificial Sequence
  source: /note="Description of Artificial Sequence: Synthetic oligonucleotide"
  source: /note="RNA"
  source: /note="5' tri-ethylene glycol (TEG)"
  modified_base (1)..(1): bicyclic nucleic acid (BNA)
  modified_base (9)..(9): 5-methyl modified nucleotide
  modified_base (13)..(13): 5-methyl modified nucleotide
  modified_base (14)..(14): 5-methyl modified nucleotide
  modified_base (18)..(18): 5-methyl modified nucleotide
  modified_base (19)..(19): 5-methyl modified nucleotide
  modified_base (20)..(20): 5-methyl modified nucleotide
  source: /note="3' tri-ethylene glycol (TEG)"
gguaaguucuguccaagccc

SEQ ID NO: 13975 - RNA, 19 nt, Artificial Sequence
  source: /note="Description of Artificial Sequence: Synthetic oligonucleotide"
  source: /note="RNA"
  source: /note="5' tri-ethylene glycol (TEG)"
  modified_base (1)..(1): bicyclic nucleic acid (BNA)
  modified_base (9)..(9): 5-methyl modified nucleotide
  modified_base (13)..(13): 5-methyl modified nucleotide
  modified_base (14)..(14): 5-methyl modified nucleotide
  modified_base (18)..(18): 5-methyl modified nucleotide
  modified_base (19)..(19): 5-methyl modified nucleotide
  source: /note="3' tri-ethylene glycol (TEG)"
gguaaguucuguccaagcc

SEQ ID NO: 13976 - RNA, 17 nt, Artificial Sequence
  source: /note="Description of Artificial Sequence: Synthetic oligonucleotide"
  source: /note="RNA"
  source: /note="5' tri-ethylene glycol (TEG)"
  modified_base (1)..(1): bicyclic nucleic acid (BNA)
  modified_base (9)..(9): 5-methyl modified nucleotide
  modified_base (13)..(13): 5-methyl modified nucleotide
  modified_base (14)..(14): 5-methyl modified nucleotide
  source: /note="3' tri-ethylene glycol (TEG)"
gguaaguucuguccaag

SEQ ID NO: 13977 - RNA, 16 nt, Artificial Sequence
  source: /note="Description of Artificial Sequence: Synthetic oligonucleotide"
  source: /note="RNA"
  source: /note="5' tri-ethylene glycol (TEG)"
  modified_base (1)..(1): bicyclic nucleic acid (BNA)
  modified_base (9)..(9): 5-methyl modified nucleotide
  modified_base (13)..(13): 5-methyl modified nucleotide
  modified_base (14)..(14): 5-methyl modified nucleotide
  source: /note="3' tri-ethylene glycol (TEG)"
gguaaguucuguccaa

SEQ ID NO: 13978 - RNA, 15 nt, Artificial Sequence
  source: /note="Description of Artificial Sequence: Synthetic oligonucleotide"
  source: /note="RNA"
  source: /note="5' tri-ethylene glycol (TEG)"
  modified_base (1)..(1): bicyclic nucleic acid (BNA)
  modified_base (9)..(9): 5-methyl modified nucleotide
  modified_base (13)..(13): 5-methyl modified nucleotide
  modified_base (14)..(14): 5-methyl modified nucleotide
  source: /note="3' tri-ethylene glycol (TEG)"
gguaaguucugucca

SEQ ID NO: 13979 - RNA, 14 nt, Artificial Sequence
  source: /note="Description of Artificial Sequence: Synthetic oligonucleotide"
  source: /note="RNA"
  source: /note="5' tri-ethylene glycol (TEG)"
  modified_base (1)..(1): bicyclic nucleic acid (BNA)
  modified_base (9)..(9): 5-methyl modified nucleotide
  modified_base (13)..(13): 5-methyl modified nucleotide
  modified_base (14)..(14): 5-methyl modified nucleotide
  source: /note="3' tri-ethylene glycol (TEG)"
gguaaguucugucc

SEQ ID NO: 13980 - RNA, 13 nt, Artificial Sequence
  source: /note="Description of Artificial Sequence: Synthetic oligonucleotide"
  source: /note="RNA"
  source: /note="5' tri-ethylene glycol (TEG)"
  modified_base (1)..(1): bicyclic nucleic acid (BNA)
  modified_base (9)..(9): 5-methyl modified nucleotide
  modified_base (13)..(13): 5-methyl modified nucleotide
  source: /note="3' tri-ethylene glycol (TEG)"
gguaaguucuguc

SEQ ID NO: 13981 - RNA, 12 nt, Artificial Sequence
  source: /note="Description of Artificial Sequence: Synthetic oligonucleotide"
  source: /note="RNA"
  source: /note="5' tri-ethylene glycol (TEG)"
  modified_base (1)..(1): bicyclic nucleic acid (BNA)
  modified_base (9)..(9): 5-methyl modified nucleotide
  source: /note="3' tri-ethylene glycol (TEG)"
gguaaguucugu

SEQ ID NO: 13982 - RNA, 11 nt, Artificial Sequence
  source: /note="Description of Artificial Sequence: Synthetic oligonucleotide"
  source: /note="RNA"
  source: /note="5' tri-ethylene glycol (TEG)"
  modified_base (1)..(1): bicyclic nucleic acid (BNA)
  modified_base (9)..(9): 5-methyl modified nucleotide
  source: /note="3' tri-ethylene glycol (TEG)"
gguaaguucug

SEQ ID NO: 13983 - RNA, 10 nt, Artificial Sequence
  source: /note="Description of Artificial Sequence: Synthetic oligonucleotide"
  source: /note="RNA"
  source: /note="5' tri-ethylene glycol (TEG)"
  modified_base (1)..(1): bicyclic nucleic acid (BNA)
  modified_base (9)..(9): 5-methyl modified nucleotide
  source: /note="3' tri-ethylene glycol (TEG)"
gguaaguucu

SEQ ID NO: 13984 - RNA, 9 nt, Artificial Sequence
  source: /note="Description of Artificial Sequence: Synthetic oligonucleotide"
  source: /note="RNA"
  source: /note="5' tri-ethylene glycol (TEG)"
  modified_base (1)..(1): bicyclic nucleic acid (BNA)
  modified_base (9)..(9): 5-methyl modified nucleotide
  source: /note="3' tri-ethylene glycol (TEG)"
gguaaguuc

SEQ ID NO: 13985 - RNA, 8 nt, Artificial Sequence
  source: /note="Description of Artificial Sequence: Synthetic oligonucleotide"
  source: /note="RNA"
  source: /note="5' tri-ethylene glycol (TEG)"
  modified_base (1)..(1): bicyclic nucleic acid (BNA)
  source: /note="3' tri-ethylene glycol (TEG)"
gguaaguu

SEQ ID NO: 13986 - RNA, 20 nt, Artificial Sequence
  source: /note="Description of Artificial Sequence: Synthetic oligonucleotide"
  source: /note="RNA"
  source: /note="5' tri-ethylene glycol (TEG)"
  modified_base (1)..(1): 5-methyl bicyclic nucleic acid
  modified_base (10)..(10): 5-methyl modified nucleotide
  modified_base (14)..(14): 5-methyl modified nucleotide
  modified_base (15)..(15): 5-methyl modified nucleotide
  modified_base (19)..(19): 5-methyl modified nucleotide
  modified_base (20)..(20): 5-methyl modified nucleotide
  source: /note="3' tri-ethylene glycol (TEG)"
cgguaaguucuguccaagcc

SEQ ID NO: 13987 - RNA, 19 nt, Artificial Sequence
  source: /note="Description of Artificial Sequence: Synthetic oligonucleotide"
  source: /note="RNA"
  source: /note="5' tri-ethylene glycol (TEG)"
  modified_base (1)..(1): 5-methyl bicyclic nucleic acid
  modified_base (10)..(10): 5-methyl modified nucleotide
  modified_base (14)..(14): 5-methyl modified nucleotide
  modified_base (15)..(15): 5-methyl modified nucleotide
  modified_base (19)..(19): 5-methyl modified nucleotide
  source: /note="3' tri-ethylene glycol (TEG)"
cgguaaguucuguccaagc

SEQ ID NO: 13988 - RNA, 18 nt, Artificial Sequence
  source: /note="Description of Artificial Sequence: Synthetic oligonucleotide"
  source: /note="RNA"
  source: /note="5' tri-ethylene glycol (TEG)"
  modified_base (1)..(1): 5-methyl bicyclic nucleic acid
  modified_base (10)..(10): 5-methyl modified nucleotide
  modified_base (14)..(14): 5-methyl modified nucleotide
  modified_base (15)..(15): 5-methyl modified nucleotide
  source: /note="3' tri-ethylene glycol (TEG)"
cgguaaguucuguccaag

SEQ ID NO: 13989 - RNA, 17 nt, Artificial Sequence
  source: /note="Description of Artificial Sequence: Synthetic oligonucleotide"
  source: /note="RNA"
  source: /note="5' tri-ethylene glycol (TEG)"
  modified_base (1)..(1): 5-methyl bicyclic nucleic acid
  modified_base (10)..(10): 5-methyl modified nucleotide
  modified_base (14)..(14): 5-methyl modified nucleotide
  modified_base (15)..(15): 5-methyl modified nucleotide
  source: /note="3' tri-ethylene glycol (TEG)"
cgguaaguucuguccaa

SEQ ID NO: 13990 - RNA, 16 nt, Artificial Sequence
  source: /note="Description of Artificial Sequence: Synthetic oligonucleotide"
  source: /note="RNA"
  source: /note="5' tri-ethylene glycol (TEG)"
  modified_base (1)..(1): 5-methyl bicyclic nucleic acid
  modified_base (10)..(10): 5-methyl modified nucleotide
  modified_base (14)..(14): 5-methyl modified nucleotide
  modified_base (15)..(15): 5-methyl modified nucleotide
  source: /note="3' tri-ethylene glycol (TEG)"
cgguaaguucugucca

SEQ ID NO: 13991 - RNA, 15 nt, Artificial Sequence
  source: /note="Description of Artificial Sequence: Synthetic oligonucleotide"
  source: /note="RNA"
  source: /note="5' tri-ethylene glycol (TEG)"
  modified_base (1)..(1): 5-methyl bicyclic nucleic acid
  modified_base (10)..(10): 5-methyl modified nucleotide
  modified_base (14)..(14): 5-methyl modified nucleotide
  modified_base (15)..(15): 5-methyl modified nucleotide
  source: /note="3' tri-ethylene glycol (TEG)"
cgguaaguucugucc

SEQ ID NO: 13992 - RNA, 14 nt, Artificial Sequence
  source: /note="Description of Artificial Sequence: Synthetic oligonucleotide"
  source: /note="RNA"
  source: /note="5' tri-ethylene glycol (TEG)"
  modified_base (1)..(1): 5-methyl bicyclic nucleic acid
  modified_base (10)..(10): 5-methyl modified nucleotide
  modified_base (14)..(14): 5-methyl modified nucleotide
  source: /note="3' tri-ethylene glycol (TEG)"
cgguaaguucuguc

SEQ ID NO: 13993 - RNA, 13 nt, Artificial Sequence
  source: /note="Description of Artificial Sequence: Synthetic oligonucleotide"
  source: /note="RNA"
  source: /note="5' tri-ethylene glycol (TEG)"
  modified_base (1)..(1): 5-methyl bicyclic nucleic acid
  modified_base (10)..(10): 5-methyl modified nucleotide
  source: /note="3' tri-ethylene glycol (TEG)"
cgguaaguucugu

SEQ ID NO: 13994 - RNA, 12 nt, Artificial Sequence
  source: /note="Description of Artificial Sequence: Synthetic oligonucleotide"
  source: /note="RNA"
  source: /note="5' tri-ethylene glycol (TEG)"
  modified_base (1)..(1): 5-methyl bicyclic nucleic acid
  modified_base (10)..(10): 5-methyl modified nucleotide
  source: /note="3' tri-ethylene glycol (TEG)"
cgguaaguucug

SEQ ID NO: 13995 - RNA, 11 nt, Artificial Sequence
  source: /note="Description of Artificial Sequence: Synthetic oligonucleotide"
  source: /note="RNA"
  source: /note="5' tri-ethylene glycol (TEG)"
  modified_base (1)..(1): 5-methyl bicyclic nucleic acid
  modified_base (10)..(10): 5-methyl modified nucleotide
  source: /note="3' tri-ethylene glycol (TEG)"
cgguaaguucu

SEQ ID NO: 13996 - RNA, 10 nt, Artificial Sequence
  source: /note="Description of Artificial Sequence: Synthetic oligonucleotide"
  source: /note="RNA"
  source: /note="5' tri-ethylene glycol (TEG)"
  modified_base (1)..(1): 5-methyl bicyclic nucleic acid
  modified_base (10)..(10): 5-methyl modified nucleotide
  source: /note="3' tri-ethylene glycol (TEG)"
cgguaaguuc

SEQ ID NO: 13997 - RNA, 9 nt, Artificial Sequence
  source: /note="Description of Artificial Sequence: Synthetic oligonucleotide"
  source: /note="RNA"
  source: /note="5' tri-ethylene glycol (TEG)"
  modified_base (1)..(1): 5-methyl bicyclic nucleic acid
  source: /note="3' tri-ethylene glycol (TEG)"
cgguaaguu

SEQ ID NO: 13998 - RNA, 8 nt, Artificial Sequence
  source: /note="Description of Artificial Sequence: Synthetic oligonucleotide"
  source: /note="RNA"
  source: /note="5' tri-ethylene glycol (TEG)"
  modified_base (1)..(1): 5-methyl bicyclic nucleic acid
  source: /note="3' tri-ethylene glycol (TEG)"
cgguaagu

SEQ ID NO: 13999 - DNA, 20 bp, Artificial Sequence
  source: /note="Description of Artificial Sequence: Synthetic oligonucleotide"
  source: /note="Description of Combined DNA/RNA Molecule: Synthetic oligonucleotide"
  source: /note="DNA/RNA"
  source: /note="5' tri-ethylene glycol (TEG)"
  modified_base (1)..(1): bicyclic nucleic acid (BNA)
  modified_base (2)..(2): 5-methyl modified nucleotide
  modified_base (11)..(11): 5-methyl modified nucleotide
  modified_base (15)..(15): 5-methyl modified nucleotide
  modified_base (16)..(16): 5-methyl modified nucleotide
  modified_base (20)..(20): 5-methyl modified nucleotide
  source: /note="3' tri-ethylene glycol (TEG)"
tcgguaaguucuguccaagc

SEQ ID NO: 14000 - DNA, 19 bp, Artificial Sequence
  source: /note="Description of Artificial Sequence: Synthetic oligonucleotide"
  source: /note="Description of Combined DNA/RNA Molecule: Synthetic oligonucleotide"
  source: /note="DNA/RNA"
  source: /note="5' tri-ethylene glycol (TEG)"
  modified_base (1)..(1): bicyclic nucleic acid (BNA)
  modified_base (2)..(2): 5-methyl modified nucleotide
  modified_base (11)..(11): 5-methyl modified nucleotide
  modified_base (15)..(15): 5-methyl modified nucleotide
  modified_base (16)..(16): 5-methyl modified nucleotide
  source: /note="3' tri-ethylene glycol (TEG)"
tcgguaaguucuguccaag

SEQ ID NO: 14001 - DNA, 18 bp, Artificial Sequence
  source: /note="Description of Artificial Sequence: Synthetic oligonucleotide"
  source: /note="Description of Combined DNA/RNA Molecule: Synthetic oligonucleotide"
  source: /note="DNA/RNA"
  source: /note="5' tri-ethylene glycol (TEG)"
  modified_base (1)..(1): bicyclic nucleic acid (BNA)
  modified_base (2)..(2): 5-methyl modified nucleotide
  modified_base (11)..(11): 5-methyl modified nucleotide
  modified_base (15)..(15): 5-methyl modified nucleotide
  modified_base (16)..(16): 5-methyl modified nucleotide
  source: /note="3' tri-ethylene glycol (TEG)"
tcgguaaguucuguccaa

SEQ ID NO: 14002 - DNA, 17 bp, Artificial Sequence
  source: /note="Description of Artificial Sequence: Synthetic oligonucleotide"
  source: /note="Description of Combined DNA/RNA Molecule: Synthetic oligonucleotide"
  source: /note="DNA/RNA"
  source: /note="5' tri-ethylene glycol (TEG)"
  modified_base (1)..(1): bicyclic nucleic acid (BNA)
  modified_base (2)..(2): 5-methyl modified nucleotide
  modified_base (11)..(11): 5-methyl modified nucleotide
  modified_base (15)..(15): 5-methyl modified nucleotide
  modified_base (16)..(16): 5-methyl modified nucleotide
  source: /note="3' tri-ethylene glycol (TEG)"
tcgguaaguucugucca

SEQ ID NO: 14003 - DNA, 16 bp, Artificial Sequence
  source: /note="Description of Artificial Sequence: Synthetic oligonucleotide"
  source: /note="Description of Combined DNA/RNA Molecule: Synthetic oligonucleotide"
  source: /note="DNA/RNA"
  source: /note="5' tri-ethylene glycol (TEG)"
  modified_base (1)..(1): bicyclic nucleic acid (BNA)
  modified_base (2)..(2): 5-methyl modified nucleotide
  modified_base (11)..(11): 5-methyl modified nucleotide
  modified_base (15)..(15): 5-methyl modified nucleotide
  modified_base (16)..(16): 5-methyl modified nucleotide
  source: /note="3' tri-ethylene glycol (TEG)"
tcgguaaguucugucc

SEQ ID NO: 14004 - DNA, 15 bp, Artificial Sequence
  source: /note="Description of Artificial Sequence: Synthetic oligonucleotide"
  source: /note="Description of Combined DNA/RNA Molecule: Synthetic oligonucleotide"
  source: /note="DNA/RNA"
  source: /note="5' tri-ethylene glycol (TEG)"
  modified_base (1)..(1): bicyclic nucleic acid (BNA)
  modified_base (2)..(2): 5-methyl modified nucleotide
  modified_base (11)..(11): 5-methyl modified nucleotide
  modified_base (15)..(15): 5-methyl modified nucleotide
  source: /note="3' tri-ethylene glycol (TEG)"
tcgguaaguucuguc

SEQ ID NO: 14005 - DNA, 14 bp, Artificial Sequence
  source: /note="Description of Artificial Sequence: Synthetic oligonucleotide"
  source: /note="Description of Combined DNA/RNA Molecule: Synthetic oligonucleotide"
  source: /note="DNA/RNA"
  source: /note="5' tri-ethylene glycol (TEG)"
  modified_base (1)..(1): bicyclic nucleic acid (BNA)
  modified_base (2)..(2): 5-methyl modified nucleotide
  modified_base (11)..(11): 5-methyl modified nucleotide
  source: /note="3' tri-ethylene glycol (TEG)"
tcgguaaguucugu

SEQ ID NO: 14006 - DNA, 13 bp, Artificial Sequence
  source: /note="Description of Artificial Sequence: Synthetic oligonucleotide"
  source: /note="Description of Combined DNA/RNA Molecule: Synthetic oligonucleotide"
  source: /note="DNA/RNA"
  source: /note="5' tri-ethylene glycol (TEG)"
  modified_base (1)..(1): bicyclic nucleic acid (BNA)
  modified_base (2)..(2): 5-methyl modified nucleotide
  modified_base (11)..(11): 5-methyl modified nucleotide
  source: /note="3' tri-ethylene glycol (TEG)"
tcgguaaguucug

SEQ ID NO: 14007 - DNA, 12 bp, Artificial Sequence
  source: /note="Description of Artificial Sequence: Synthetic oligonucleotide"
  source: /note="Description of Combined DNA/RNA Molecule: Synthetic oligonucleotide"
  source: /note="DNA/RNA"
  source: /note="5' tri-ethylene glycol (TEG)"
  modified_base (1)..(1): bicyclic nucleic acid (BNA)
  modified_base (2)..(2): 5-methyl modified nucleotide
  modified_base (11)..(11): 5-methyl modified nucleotide
  source: /note="3' tri-ethylene glycol (TEG)"
tcgguaaguucu

SEQ ID NO: 14008 - DNA, 11 bp, Artificial Sequence
  source: /note="Description of Artificial Sequence: Synthetic oligonucleotide"
  source: /note="Description of Combined DNA/RNA Molecule: Synthetic oligonucleotide"
  source: /note="DNA/RNA"
  source: /note="5' tri-ethylene glycol (TEG)"
  modified_base (1)..(1): bicyclic nucleic acid (BNA)
  modified_base (2)..(2): 5-methyl modified nucleotide
  modified_base (11)..(11): 5-methyl modified nucleotide
  source: /note="3' tri-ethylene glycol (TEG)"
tcgguaaguuc

SEQ ID NO: 14009 - DNA, 10 bp, Artificial Sequence
  source: /note="Description of Artificial Sequence: Synthetic oligonucleotide"
  source: /note="Description of Combined DNA/RNA Molecule: Synthetic oligonucleotide"
  source: /note="DNA/RNA"
  source: /note="5' tri-ethylene glycol (TEG)"
  modified_base (1)..(1): bicyclic nucleic acid (BNA)
  modified_base (2)..(2): 5-methyl modified nucleotide
  source: /note="3' tri-ethylene glycol (TEG)"
tcgguaaguu

SEQ ID NO: 14010 - DNA, 9 bp, Artificial Sequence
  source: /note="Description of Artificial Sequence: Synthetic oligonucleotide"
  source: /note="Description of Combined DNA/RNA Molecule: Synthetic oligonucleotide"
  source: /note="DNA/RNA"
  source: /note="5' tri-ethylene glycol (TEG)"
  modified_base (1)..(1): bicyclic nucleic acid (BNA)
  modified_base (2)..(2): 5-methyl modified nucleotide
  source: /note="3' tri-ethylene glycol (TEG)"
tcgguaagu

SEQ ID NO: 14011 - RNA, 20 nt, Artificial Sequence
  source: /note="Description of Artificial Sequence: Synthetic oligonucleotide"
  source: /note="RNA"
  source: /note="5' tri-ethylene glycol (TEG)"
  modified_base (1)..(1): bicyclic nucleic acid (BNA)
  modified_base (3)..(3): 5-methyl modified nucleotide
  modified_base (12)..(12): 5-methyl modified nucleotide
  modified_base (16)..(16): 5-methyl modified nucleotide
  modified_base (17)..(17): 5-methyl modified nucleotide
  source: /note="3' tri-ethylene glycol (TEG)"
gucgguaaguucuguccaag

SEQ ID NO: 14012 - RNA, 19 nt, Artificial Sequence
  source: /note="Description of Artificial Sequence: Synthetic oligonucleotide"
  source: /note="RNA"
  source: /note="5' tri-ethylene glycol (TEG)"
  modified_base (1)..(1): bicyclic nucleic acid (BNA)
  modified_base (3)..(3): 5-methyl modified nucleotide
  modified_base (12)..(12): 5-methyl modified nucleotide
  modified_base (16)..(16): 5-methyl modified nucleotide
  modified_base (17)..(17): 5-methyl modified nucleotide
  source: /note="3' tri-ethylene glycol (TEG)"
gucgguaaguucuguccaa

SEQ ID NO: 14013 - RNA, 18 nt, Artificial Sequence
  source: /note="Description of Artificial Sequence: Synthetic oligonucleotide"
  source: /note="RNA"
  source: /note="5' tri-ethylene glycol (TEG)"
  modified_base (1)..(1): bicyclic nucleic acid (BNA)
  modified_base (3)..(3): 5-methyl modified nucleotide
  modified_base (12)..(12): 5-methyl modified nucleotide
  modified_base (16)..(16): 5-methyl modified nucleotide
  modified_base (17)..(17): 5-methyl modified nucleotide
  source: /note="3' tri-ethylene glycol (TEG)"
gucgguaaguucugucca

SEQ ID NO: 14014 - RNA, 17 nt, Artificial Sequence
  source: /note="Description of Artificial Sequence: Synthetic oligonucleotide"
  source: /note="RNA"
  source: /note="5' tri-ethylene glycol (TEG)"
  modified_base (1)..(1): bicyclic nucleic acid (BNA)
  modified_base (3)..(3): 5-methyl modified nucleotide
  modified_base (12)..(12): 5-methyl modified nucleotide
  modified_base (16)..(16): 5-methyl modified nucleotide
  modified_base (17)..(17): 5-methyl modified nucleotide
  source: /note="3' tri-ethylene glycol (TEG)"
gucgguaaguucugucc

SEQ ID NO: 14015 - RNA, 16 nt, Artificial Sequence
  source: /note="Description of Artificial Sequence: Synthetic oligonucleotide"
  source: /note="RNA"
  source: /note="5' tri-ethylene glycol (TEG)"
  modified_base (1)..(1): bicyclic nucleic acid (BNA)
  modified_base (3)..(3): 5-methyl modified nucleotide
  modified_base (12)..(12): 5-methyl modified nucleotide
  modified_base (16)..(16): 5-methyl modified nucleotide
  source: /note="3' tri-ethylene glycol (TEG)"
gucgguaaguucuguc

SEQ ID NO: 14016 - RNA, 15 nt, Artificial Sequence
  source: /note="Description of Artificial Sequence: Synthetic oligonucleotide"
  source: /note="RNA"
  source: /note="5' tri-ethylene glycol (TEG)"
  modified_base (1)..(1): bicyclic nucleic acid (BNA)
  modified_base (3)..(3): 5-methyl modified nucleotide
  modified_base (12)..(12): 5-methyl modified nucleotide
  source: /note="3' tri-ethylene glycol (TEG)"
gucgguaaguucugu

SEQ ID NO: 14017 - RNA, 14 nt, Artificial Sequence
  source: /note="Description of Artificial Sequence: Synthetic oligonucleotide"
  source: /note="RNA"
  source: /note="5' tri-ethylene glycol (TEG)"
  modified_base (1)..(1): bicyclic nucleic acid (BNA)
  modified_base (3)..(3): 5-methyl modified nucleotide
  modified_base (12)..(12): 5-methyl modified nucleotide
  source: /note="3' tri-ethylene glycol (TEG)"
gucgguaaguucug

SEQ ID NO: 14018 - RNA, 13 nt, Artificial Sequence
  source: /note="Description of Artificial Sequence: Synthetic oligonucleotide"
  source: /note="RNA"
  source: /note="5' tri-ethylene glycol (TEG)"
  modified_base (1)..(1): bicyclic nucleic acid (BNA)
  modified_base (3)..(3): 5-methyl modified nucleotide
  modified_base (12)..(12): 5-methyl modified nucleotide
  source: /note="3' tri-ethylene glycol (TEG)"
gucgguaaguucu

SEQ ID NO: 14019 - RNA, 12 nt, Artificial Sequence
  source: /note="Description of Artificial Sequence: Synthetic oligonucleotide"
  source: /note="RNA"
  source: /note="5' tri-ethylene glycol (TEG)"
  modified_base (1)..(1): bicyclic nucleic acid (BNA)
  modified_base (3)..(3): 5-methyl modified nucleotide
  modified_base (12)..(12): 5-methyl modified nucleotide
  source: /note="3' tri-ethylene glycol (TEG)"
gucgguaaguuc

SEQ ID NO: 14020 - RNA, 11 nt, Artificial Sequence
  source: /note="Description of Artificial Sequence: Synthetic oligonucleotide"
  source: /note="RNA"
  source: /note="5' tri-ethylene glycol (TEG)"
  modified_base (1)..(1): bicyclic nucleic acid (BNA)
  modified_base (3)..(3): 5-methyl modified nucleotide
  source: /note="3' tri-ethylene glycol (TEG)"
gucgguaaguu

SEQ ID NO: 14021 - RNA, 10 nt, Artificial Sequence
  source: /note="Description of Artificial Sequence: Synthetic oligonucleotide"
  source: /note="RNA"
  source: /note="5' tri-ethylene glycol (TEG)"
  modified_base (1)..(1): bicyclic nucleic acid (BNA)
  modified_base (3)..(3): 5-methyl modified nucleotide
  source: /note="3' tri-ethylene glycol (TEG)"
gucgguaagu

SEQ ID NO: 14022 - RNA, 20 nt, Artificial Sequence
  source: /note="Description of Artificial Sequence: Synthetic oligonucleotide"
  source: /note="RNA"
  source: /note="5' tri-ethylene glycol (TEG)"
  modified_base (1)..(1): bicyclic nucleic acid (BNA)
  modified_base (4)..(4): 5-methyl modified nucleotide
  modified_base (13)..(13): 5-methyl modified nucleotide
  modified_base (17)..(17): 5-methyl modified nucleotide
  modified_base (18)..(18): 5-methyl modified nucleotide
  source: /note="3' tri-ethylene glycol (TEG)"
agucgguaaguucuguccaa

SEQ ID NO: 14023 - RNA, 19 nt, Artificial Sequence
  source: /note="Description of Artificial Sequence: Synthetic oligonucleotide"
  source: /note="RNA"
  source: /note="5' tri-ethylene glycol (TEG)"
  modified_base (1)..(1): bicyclic nucleic acid (BNA)
  modified_base (4)..(4): 5-methyl modified nucleotide
  modified_base (13)..(13): 5-methyl modified nucleotide
  modified_base (17)..(17): 5-methyl modified nucleotide
  modified_base (18)..(18): 5-methyl modified nucleotide
  source: /note="3' tri-ethylene glycol (TEG)"
agucgguaaguucugucca

SEQ ID NO: 14024 - RNA, 17 nt, Artificial Sequence
  source: /note="Description of Artificial Sequence: Synthetic oligonucleotide"
  source: /note="RNA"
  source: /note="5' tri-ethylene glycol (TEG)"
  modified_base (1)..(1): bicyclic nucleic acid (BNA)
  modified_base (4)..(4): 5-methyl modified nucleotide
  modified_base (13)..(13): 5-methyl modified nucleotide
  modified_base (17)..(17): 5-methyl modified nucleotide
  source: /note="3' tri-ethylene glycol (TEG)"
agucgguaaguucuguc

SEQ ID NO: 14025 - RNA, 16 nt, Artificial Sequence
  source: /note="Description of Artificial Sequence: Synthetic oligonucleotide"
  source: /note="RNA"
  source: /note="5' tri-ethylene glycol (TEG)"
  modified_base (1)..(1): bicyclic nucleic acid (BNA)
  modified_base (4)..(4): 5-methyl modified nucleotide
  modified_base (13)..(13): 5-methyl modified nucleotide
  source: /note="3' tri-ethylene glycol (TEG)"
agucgguaaguucugu

SEQ ID NO: 14026 - RNA, 15 nt, Artificial Sequence
  source: /note="Description of Artificial Sequence: Synthetic oligonucleotide"
  source: /note="RNA"
  source: /note="5' tri-ethylene glycol (TEG)"
  modified_base (1)..(1): bicyclic nucleic acid (BNA)
  modified_base (4)..(4): 5-methyl modified nucleotide
  modified_base (13)..(13): 5-methyl modified nucleotide
  source: /note="3' tri-ethylene glycol (TEG)"
agucgguaaguucug

SEQ ID NO: 14027 - RNA, 14 nt, Artificial Sequence
  source: /note="Description of Artificial Sequence: Synthetic oligonucleotide"
  source: /note="RNA"
  source: /note="5' tri-ethylene glycol (TEG)"
  modified_base (1)..(1): bicyclic nucleic acid (BNA)
  modified_base (4)..(4): 5-methyl modified nucleotide
  modified_base (13)..(13): 5-methyl modified nucleotide
  source: /note="3' tri-ethylene glycol (TEG)"
agucgguaaguucu

SEQ ID NO: 14028 - RNA, 13 nt, Artificial Sequence
  source: /note="Description of Artificial Sequence: Synthetic oligonucleotide"
  source: /note="RNA"
  source: /note="5' tri-ethylene glycol (TEG)"
  modified_base (1)..(1): bicyclic nucleic acid (BNA)
  modified_base (4)..(4): 5-methyl modified nucleotide
  modified_base (13)..(13): 5-methyl modified nucleotide
  source: /note="3' tri-ethylene glycol (TEG)"
agucgguaaguuc

SEQ ID NO: 14029 - RNA, 12 nt, Artificial Sequence
  source: /note="Description of Artificial Sequence: Synthetic oligonucleotide"
  source: /note="RNA"
  source: /note="5' tri-ethylene glycol (TEG)"
  modified_base (1)..(1): bicyclic nucleic acid (BNA)
  modified_base (4)..(4): 5-methyl modified nucleotide
  source: /note="3' tri-ethylene glycol (TEG)"
agucgguaaguu

SEQ ID NO: 14030 - RNA, 11 nt, Artificial Sequence
  source: /note="Description of Artificial Sequence: Synthetic oligonucleotide"
  source: /note="RNA"
  source: /note="5' tri-ethylene glycol (TEG)"
  modified_base (1)..(1): bicyclic nucleic acid (BNA)
  modified_base (4)..(4): 5-methyl modified nucleotide
  source: /note="3' tri-ethylene glycol (TEG)"
agucgguaagu

SEQ ID NO: 14031 - RNA, 20 nt, Artificial Sequence
  source: /note="Description of Artificial Sequence: Synthetic oligonucleotide"
  source: /note="RNA"
  source: /note="5' tri-ethylene glycol (TEG)"
  modified_base (1)..(1): 5-methyl bicyclic nucleic acid
  modified_base (5)..(5): 5-methyl modified nucleotide
  modified_base (14)..(14): 5-methyl modified nucleotide
  modified_base (18)..(18): 5-methyl modified nucleotide
  modified_base (19)..(19): 5-methyl modified nucleotide
  source: /note="3' tri-ethylene glycol (TEG)"
cagucgguaaguucugucca

SEQ ID NO: 14032 - RNA, 19 nt, Artificial Sequence
  source: /note="Description of Artificial Sequence: Synthetic oligonucleotide"
  source: /note="RNA"
  source: /note="5' tri-ethylene glycol (TEG)"
  modified_base (1)..(1): 5-methyl bicyclic nucleic acid
  modified_base (5)..(5): 5-methyl modified nucleotide
  modified_base (14)..(14): 5-methyl modified nucleotide
  modified_base (18)..(18): 5-methyl modified nucleotide
  modified_base (19)..(19): 5-methyl modified nucleotide
  source: /note="3' tri-ethylene glycol (TEG)"
cagucgguaaguucugucc

SEQ ID NO: 14033 - RNA, 18 nt, Artificial Sequence
  source: /note="Description of Artificial Sequence: Synthetic oligonucleotide"
  source: /note="RNA"
  source: /note="5' tri-ethylene glycol (TEG)"
  modified_base (1)..(1): 5-methyl bicyclic nucleic acid
  modified_base (5)..(5): 5-methyl modified nucleotide
  modified_base (14)..(14): 5-methyl modified nucleotide
  modified_base (18)..(18): 5-methyl modified nucleotide
  source: /note="3' tri-ethylene glycol (TEG)"
cagucgguaaguucuguc

SEQ ID NO: 14034 - RNA, 17 nt, Artificial Sequence
  source: /note="Description of Artificial Sequence: Synthetic oligonucleotide"
  source: /note="RNA"
  source: /note="5' tri-ethylene glycol (TEG)"
  modified_base (1)..(1): 5-methyl bicyclic nucleic acid
  modified_base (5)..(5): 5-methyl modified nucleotide
  modified_base (14)..(14): 5-methyl modified nucleotide
  source: /note="3' tri-ethylene glycol (TEG)"
cagucgguaaguucugu

SEQ ID NO: 14035 - RNA, 16 nt, Artificial Sequence
  source: /note="Description of Artificial Sequence: Synthetic oligonucleotide"
  source: /note="RNA"
  source: /note="5' tri-ethylene glycol (TEG)"
  modified_base (1)..(1): 5-methyl bicyclic nucleic acid
  modified_base (5)..(5): 5-methyl modified nucleotide
  modified_base (14)..(14): 5-methyl modified nucleotide
  source: /note="3' tri-ethylene glycol (TEG)"
cagucgguaaguucug

SEQ ID NO: 14036 - RNA, 15 nt, Artificial Sequence
  source: /note="Description of Artificial Sequence: Synthetic oligonucleotide"
  source: /note="RNA"
  source: /note="5' tri-ethylene glycol (TEG)"
  modified_base (1)..(1): 5-methyl bicyclic nucleic acid
  modified_base (5)..(5): 5-methyl modified nucleotide
  modified_base (14)..(14): 5-methyl modified nucleotide
  source: /note="3' tri-ethylene glycol (TEG)"
cagucgguaaguucu

SEQ ID NO: 14037 - RNA, 14 nt, Artificial Sequence
  source: /note="Description of Artificial Sequence: Synthetic oligonucleotide"
  source: /note="RNA"
  source: /note="5' tri-ethylene glycol (TEG)"
  modified_base (1)..(1): 5-methyl bicyclic nucleic acid
  modified_base (5)..(5): 5-methyl modified nucleotide
  modified_base (14)..(14): 5-methyl modified nucleotide
  source: /note="3' tri-ethylene glycol (TEG)"
cagucgguaaguuc

SEQ ID NO: 14038 - RNA, 13 nt, Artificial Sequence
  source: /note="Description of Artificial Sequence: Synthetic oligonucleotide"
  source: /note="RNA"
  source: /note="5' tri-ethylene glycol (TEG)"
  modified_base (1)..(1): 5-methyl bicyclic nucleic acid
  modified_base (5)..(5): 5-methyl modified nucleotide
  source: /note="3' tri-ethylene glycol (TEG)"
cagucgguaaguu

SEQ ID NO: 14039 - RNA, 12 nt, Artificial Sequence
  source: /note="Description of Artificial Sequence: Synthetic oligonucleotide"
  source: /note="RNA"
  source: /note="5' tri-ethylene glycol (TEG)"
  modified_base (1)..(1): 5-methyl bicyclic nucleic acid
  modified_base (5)..(5): 5-methyl modified nucleotide
  source: /note="3' tri-ethylene glycol (TEG)"
cagucgguaagu

SEQ ID NO: 14040 - RNA, 20 nt, Artificial Sequence
  source: /note="Description of Artificial Sequence: Synthetic oligonucleotide"
  source: /note="RNA"
  source: /note="5' tri-ethylene glycol (TEG)"
  modified_base (1)..(1): 5-methyl bicyclic nucleic acid
  modified_base (2)..(2): 5-methyl modified nucleotide
  modified_base (6)..(6): 5-methyl modified nucleotide
  modified_base (15)..(15): 5-methyl modified nucleotide
  modified_base (19)..(19): 5-methyl modified nucleotide
  modified_base (20)..(20): 5-methyl modified nucleotide
  source: /note="3' tri-ethylene glycol (TEG)"
ccagucgguaaguucugucc

SEQ ID NO: 14041 - RNA, 19 nt, Artificial Sequence
  source: /note="Description of Artificial Sequence: Synthetic oligonucleotide"
  source: /note="RNA"
  source: /note="5' tri-ethylene glycol (TEG)"
  modified_base (1)..(1): 5-methyl bicyclic nucleic acid
  modified_base (2)..(2): 5-methyl modified nucleotide
  modified_base (6)..(6): 5-methyl modified nucleotide
  modified_base (15)..(15): 5-methyl modified nucleotide
  modified_base (19)..(19): 5-methyl modified nucleotide
  source: /note="3' tri-ethylene glycol (TEG)"
ccagucgguaaguucuguc

SEQ ID NO: 14042 - RNA, 18 nt, Artificial Sequence
  source: /note="Description of Artificial Sequence: Synthetic oligonucleotide"
  source: /note="RNA"
  source: /note="5' tri-ethylene glycol (TEG)"
  modified_base (1)..(1): 5-methyl bicyclic nucleic acid
  modified_base (2)..(2): 5-methyl modified nucleotide
  modified_base (6)..(6): 5-methyl modified nucleotide
  modified_base (15)..(15): 5-methyl modified nucleotide
  source: /note="3' tri-ethylene glycol (TEG)"
ccagucgguaaguucugu

SEQ ID NO: 14043 - RNA, 17 nt, Artificial Sequence
  source: /note="Description of Artificial Sequence: Synthetic oligonucleotide"
  source: /note="RNA"
  source: /note="5' tri-ethylene glycol (TEG)"
  modified_base (1)..(1): 5-methyl bicyclic nucleic acid
  modified_base (2)..(2): 5-methyl modified nucleotide
  modified_base (6)..(6): 5-methyl modified nucleotide
  modified_base (15)..(15): 5-methyl modified nucleotide
  source: /note="3' tri-ethylene glycol (TEG)"
ccagucgguaaguucug

SEQ ID NO: 14044 - RNA, 16 nt, Artificial Sequence
  source: /note="Description of Artificial Sequence: Synthetic oligonucleotide"
  source: /note="RNA"
  source: /note="5' tri-ethylene glycol (TEG)"
  modified_base (1)..(1): 5-methyl bicyclic nucleic acid
  modified_base (2)..(2): 5-methyl modified nucleotide
  modified_base (6)..(6): 5-methyl modified nucleotide
  modified_base (15)..(15): 5-methyl modified nucleotide
  source: /note="3' tri-ethylene glycol (TEG)"
ccagucgguaaguucu

SEQ ID NO: 14045 - RNA, 15 nt, Artificial Sequence
  source: /note="Description of Artificial Sequence: Synthetic oligonucleotide"
  source: /note="RNA"
  source: /note="5' tri-ethylene glycol (TEG)"
  modified_base (1)..(1): 5-methyl bicyclic nucleic acid
  modified_base (2)..(2): 5-methyl modified nucleotide
  modified_base (6)..(6): 5-methyl modified nucleotide
  modified_base (15)..(15): 5-methyl modified nucleotide
  source: /note="3' tri-ethylene glycol (TEG)"
ccagucgguaaguuc

SEQ ID NO: 14046 - RNA, 14 nt, Artificial Sequence
  source: /note="Description of Artificial Sequence: Synthetic oligonucleotide"
  source: /note="RNA"
  source: /note="5' tri-ethylene glycol (TEG)"
  modified_base (1)..(1): 5-methyl bicyclic nucleic acid
  modified_base (2)..(2): 5-methyl modified nucleotide
  modified_base (6)..(6): 5-methyl modified nucleotide
  source: /note="3' tri-ethylene glycol (TEG)"
ccagucgguaaguu

SEQ ID NO: 14047 - RNA, 13 nt, Artificial Sequence
  source: /note="Description of Artificial Sequence: Synthetic oligonucleotide"
  source: /note="RNA"
  source: /note="5' tri-ethylene glycol (TEG)"
  modified_base (1)..(1): 5-methyl bicyclic nucleic acid
  modified_base (2)..(2): 5-methyl modified nucleotide
  modified_base (6)..(6): 5-methyl modified nucleotide
  source: /note="3' tri-ethylene glycol (TEG)"
ccagucgguaagu

SEQ ID NO: 14048 - RNA, 20 nt, Artificial Sequence
  source: /note="Description of Artificial Sequence: Synthetic oligonucleotide"
  source: /note="RNA"
  source: /note="5' tri-ethylene glycol (TEG)"
  modified_base (1)..(1): bicyclic nucleic acid (BNA)
  modified_base (2)..(2): 5-methyl modified nucleotide
  modified_base (3)..(3): 5-methyl modified nucleotide
  modified_base (7)..(7): 5-methyl modified nucleotide
  modified_base (16)..(16): 5-methyl modified nucleotide
  modified_base (20)..(20): 5-methyl modified nucleotide
  source: /note="3' tri-ethylene glycol (TEG)"
gccagucgguaaguucuguc

SEQ ID NO: 14049 - RNA, 19 nt, Artificial Sequence
  source: /note="Description of Artificial Sequence: Synthetic oligonucleotide"
  source: /note="RNA"
  source: /note="5' tri-ethylene glycol (TEG)"
  modified_base (1)..(1): bicyclic nucleic acid (BNA)
  modified_base (2)..(2): 5-methyl modified nucleotide
  modified_base (3)..(3): 5-methyl modified nucleotide
  modified_base (7)..(7): 5-methyl modified nucleotide
  modified_base (16)..(16): 5-methyl modified nucleotide
  source: /note="3' tri-ethylene glycol (TEG)"
gccagucgguaaguucugu

SEQ ID NO: 14050 - RNA, 18 nt, Artificial Sequence
  source: /note="Description of Artificial Sequence: Synthetic oligonucleotide"
  source: /note="RNA"
  source: /note="5' tri-ethylene glycol (TEG)"
  modified_base (1)..(1): bicyclic nucleic acid (BNA)
  modified_base (2)..(2): 5-methyl modified nucleotide
  modified_base (3)..(3): 5-methyl modified nucleotide
  modified_base (7)..(7): 5-methyl modified nucleotide
  modified_base (16)..(16): 5-methyl modified nucleotide
  source: /note="3' tri-ethylene glycol (TEG)"
gccagucgguaaguucug

SEQ ID NO: 14051 - RNA, 17 nt, Artificial Sequence
  source: /note="Description of Artificial Sequence: Synthetic oligonucleotide"
  source: /note="RNA"
  source: /note="5' tri-ethylene glycol (TEG)"
  modified_base (1)..(1): bicyclic nucleic acid (BNA)
  modified_base (2)..(2): 5-methyl modified nucleotide
  modified_base (3)..(3): 5-methyl modified nucleotide
  modified_base (7)..(7): 5-methyl modified nucleotide
  modified_base (16)..(16): 5-methyl modified nucleotide
  source: /note="3' tri-ethylene glycol (TEG)"
gccagucgguaaguucu

SEQ ID NO: 14052 - RNA, 16 nt, Artificial Sequence
  source: /note="Description of Artificial Sequence: Synthetic oligonucleotide"
  source: /note="RNA"
  source: /note="5' tri-ethylene glycol (TEG)"
  modified_base (1)..(1): bicyclic nucleic acid (BNA)
  modified_base (2)..(2): 5-methyl modified nucleotide
  modified_base (3)..(3): 5-methyl modified nucleotide
  modified_base (7)..(7): 5-methyl modified nucleotide
  modified_base (16)..(16): 5-methyl modified nucleotide
  source: /note="3' tri-ethylene glycol (TEG)"
gccagucgguaaguuc

SEQ ID NO: 14053 - RNA, 15 nt, Artificial Sequence
  source: /note="Description of Artificial Sequence: Synthetic oligonucleotide"
  source: /note="RNA"
  source: /note="5' tri-ethylene glycol (TEG)"
  modified_base (1)..(1): bicyclic nucleic acid (BNA)
  modified_base (2)..(2): 5-methyl modified nucleotide
  modified_base (3)..(3): 5-methyl modified nucleotide
  modified_base (7)..(7): 5-methyl modified nucleotide
  source: /note="3' tri-ethylene glycol (TEG)"
gccagucgguaaguu

SEQ ID NO: 14054 - RNA, 14 nt, Artificial Sequence
  source: /note="Description of Artificial Sequence: Synthetic oligonucleotide"
  source: /note="RNA"
  source: /note="5' tri-ethylene glycol (TEG)"
  modified_base (1)..(1): bicyclic nucleic acid (BNA)
  modified_base (2)..(2): 5-methyl modified nucleotide
  modified_base (3)..(3): 5-methyl modified nucleotide
  modified_base (7)..(7): 5-methyl modified nucleotide
  source: /note="3' tri-ethylene glycol (TEG)"
gccagucgguaagu

SEQ ID NO: 14055 - DNA, 20 bp, Artificial Sequence
  source: /note="Description of Artificial Sequence: Synthetic oligonucleotide"
  source: /note="Description of Combined DNA/RNA Molecule: Synthetic oligonucleotide"
  source: /note="DNA/RNA"
  source: /note="5' tri-ethylene glycol (TEG)"
  modified_base (1)..(1): bicyclic nucleic acid (BNA)
  modified_base (2)..(2): 5-methyl modified nucleotide
  modified_base (14)..(14): 5-methyl modified nucleotide
  modified_base (19)..(19): 5-methyl modified nucleotide
  source: /note="3' tri-ethylene glycol (TEG)"
tcaaggaagauggcauuucu

SEQ ID NO: 14056 - DNA, 22 bp, Artificial Sequence
  source: /note="Description of Artificial Sequence: Synthetic oligonucleotide"
  source: /note="Description of Combined DNA/RNA Molecule: Synthetic oligonucleotide"
  source: /note="DNA/RNA"
  source: /note="5' tri-ethylene glycol (TEG)"
  modified_base (1)..(1): bicyclic nucleic acid (BNA)
  modified_base (2)..(2): 5-methyl modified nucleotide
  modified_base (14)..(14): 5-methyl modified nucleotide
  modified_base (19)..(19): 5-methyl modified nucleotide
  source: /note="3' tri-ethylene glycol (TEG)"
tcaaggaagauggcauuucuag

SEQ ID NO: 14057 - DNA, 16 bp, Artificial Sequence
  source: /note="Description of Artificial Sequence: Synthetic oligonucleotide"
  source: /note="Description of Combined DNA/RNA Molecule: Synthetic oligonucleotide"
  source: /note="DNA/RNA"
  source: /note="5' tri-ethylene glycol (TEG)"
  modified_base (1)..(1): bicyclic nucleic acid (BNA)
  modified_base (2)..(2): 5-methyl modified nucleotide
  modified_base (14)..(14): 5-methyl modified nucleotide
  source: /note="3' tri-ethylene glycol (TEG)"
tcaaggaagauggcau

SEQ ID NO: 14058 - RNA, 15 nt, Artificial Sequence
  source: /note="Description of Artificial Sequence: Synthetic oligonucleotide"
  source: /note="RNA"
  source: /note="5' tri-ethylene glycol (TEG)"
  modified_base (1)..(1): bicyclic nucleic acid (BNA)
  modified_base (9)..(9): 5-methyl modified nucleotide
  modified_base (14)..(14): 5-methyl modified nucleotide
  source: /note="3' tri-ethylene glycol (TEG)"
gaagauggcauuucu

SEQ ID NO: 14059 - DNA, 21 bp, Artificial Sequence
  source: /note="Description of Artificial Sequence: Synthetic oligonucleotide"
  source: /note="Description of Combined DNA/RNA Molecule: Synthetic oligonucleotide"
  source: /note="DNA/RNA"
  source: /note="5' tri-ethylene glycol (TEG)"
  modified_base (1)..(1): bicyclic nucleic acid (BNA)
  modified_base (2)..(2): 5-methyl modified nucleotide
  modified_base (14)..(14): 5-methyl modified nucleotide
  modified_base (19)..(19): 5-methyl modified nucleotide
  source: /note="3' tri-ethylene glycol (TEG)"
tcaaggaagauggcauuucua

SEQ ID NO: 14060 - DNA, 19 bp, Artificial Sequence
  source: /note="Description of Artificial Sequence: Synthetic oligonucleotide"
  source: /note="Description of Combined DNA/RNA Molecule: Synthetic oligonucleotide"
  source: /note="DNA/RNA"
  source: /note="5' tri-ethylene glycol (TEG)"
  modified_base (1)..(1): bicyclic nucleic acid (BNA)
  modified_base (2)..(2): 5-methyl modified nucleotide
  modified_base (14)..(14): 5-methyl modified nucleotide
  modified_base (19)..(19): 5-methyl modified nucleotide
  source: /note="3' tri-ethylene glycol (TEG)"
tcaaggaagauggcauuuc

SEQ ID NO: 14061 - DNA, 18 bp, Artificial Sequence
  source: /note="Description of Artificial Sequence: Synthetic oligonucleotide"
  source: /note="Description of Combined DNA/RNA Molecule: Synthetic oligonucleotide"
  source: /note="DNA/RNA"
  source: /note="5' tri-ethylene glycol (TEG)"
  modified_base (1)..(1): bicyclic nucleic acid (BNA)
  modified_base (2)..(2): 5-methyl modified nucleotide
  modified_base (14)..(14): 5-methyl modified nucleotide
  source: /note="3' tri-ethylene glycol (TEG)"
tcaaggaagauggcauuu

SEQ ID NO: 14062 - DNA, 17 bp, Artificial Sequence
  source: /note="Description of Artificial Sequence: Synthetic oligonucleotide"
  source: /note="Description of Combined DNA/RNA Molecule: Synthetic oligonucleotide"
  source: /note="DNA/RNA"
  source: /note="5' tri-ethylene glycol (TEG)"
  modified_base (1)..(1): bicyclic nucleic acid (BNA)
  modified_base (2)..(2): 5-methyl modified nucleotide
  modified_base (14)..(14): 5-methyl modified nucleotide
  source: /note="3' tri-ethylene glycol (TEG)"
tcaaggaagauggcauu

SEQ ID NO: 14063 - DNA, 15 bp, Artificial Sequence
  source: /note="Description of Artificial Sequence: Synthetic oligonucleotide"
  source: /note="Description of Combined DNA/RNA Molecule: Synthetic oligonucleotide"
  source: /note="DNA/RNA"
  source: /note="5' tri-ethylene glycol (TEG)"
  modified_base (1)..(1): bicyclic nucleic acid (BNA)
  modified_base (2)..(2): 5-methyl modified nucleotide
  modified_base (14)..(14): 5-methyl modified nucleotide
  source: /note="3' tri-ethylene glycol (TEG)"
tcaaggaagauggca

SEQ ID NO: 14064 - DNA, 14 bp, Artificial Sequence
  source: /note="Description of Artificial Sequence: Synthetic oligonucleotide"
  source: /note="Description of Combined DNA/RNA Molecule: Synthetic oligonucleotide"
  source: /note="DNA/RNA"
  source: /note="5' tri-ethylene glycol (TEG)"
  modified_base (1)..(1): bicyclic nucleic acid (BNA)
  modified_base (2)..(2): 5-methyl modified nucleotide
  modified_base (14)..(14): 5-methyl modified nucleotide
  source: /note="3' tri-ethylene glycol (TEG)"
tcaaggaagauggc

SEQ ID NO: 14065 - DNA, 13 bp, Artificial Sequence
  source: /note="Description of Artificial Sequence: Synthetic oligonucleotide"
  source: /note="Description of Combined DNA/RNA Molecule: Synthetic oligonucleotide"
  source: /note="DNA/RNA"
  source: /note="5' tri-ethylene glycol (TEG)"
  modified_base (1)..(1): bicyclic nucleic acid (BNA)
  modified_base (2)..(2): 5-methyl modified nucleotide
  source: /note="3' tri-ethylene glycol (TEG)"
tcaaggaagaugg

SEQ ID NO: 14066 - DNA, 12 bp, Artificial Sequence
  source: /note="Description of Artificial Sequence: Synthetic oligonucleotide"
  source: /note="Description of Combined DNA/RNA Molecule: Synthetic oligonucleotide"
  source: /note="DNA/RNA"
  source: /note="5' tri-ethylene glycol (TEG)"
  modified_base (1)..(1): bicyclic nucleic acid (BNA)
  modified_base (2)..(2): 5-methyl modified nucleotide
  source: /note="3' tri-ethylene glycol (TEG)"
tcaaggaagaug

SEQ ID NO: 14067 - DNA, 11 bp, Artificial Sequence
  source: /note="Description of Artificial Sequence: Synthetic oligonucleotide"
  source: /note="Description of Combined DNA/RNA Molecule: Synthetic oligonucleotide"
  source: /note="DNA/RNA"
  source: /note="5' tri-ethylene glycol (TEG)"
  modified_base (1)..(1): bicyclic nucleic acid (BNA)
  modified_base (2)..(2): 5-methyl modified nucleotide
  source: /note="3' tri-ethylene glycol (TEG)"
tcaaggaagau

SEQ ID NO: 14068 - DNA, 10 bp, Artificial Sequence
  source: /note="Description of Artificial Sequence: Synthetic oligonucleotide"
  source: /note="DNA/RNA"
  source: /note="5' tri-ethylene glycol (TEG)"
  modified_base (1)..(1): bicyclic nucleic acid (BNA)
  modified_base (2)..(2): 5-methyl modified nucleotide
  source: /note="3' tri-ethylene glycol (TEG)"
tcaaggaaga

SEQ ID NO: 14069 - DNA, 9 bp, Artificial Sequence
  source: /note="Description of Artificial Sequence: Synthetic oligonucleotide"
  source: /note="DNA/RNA"
  source: /note="5' tri-ethylene glycol (TEG)"
  modified_base (1)..(1): bicyclic nucleic acid (BNA)
  modified_base (2)..(2): 5-methyl modified nucleotide
  source: /note="3' tri-ethylene glycol (TEG)"
tcaaggaag

SEQ ID NO: 14070 - RNA, 21 nt, Artificial Sequence
  source: /note="Description of Artificial Sequence: Synthetic oligonucleotide"
  source: /note="RNA"
  source: /note="5' tri-ethylene glycol (TEG)"
  modified_base (1)..(1): 5-methyl bicyclic nucleic acid
  modified_base (13)..(13): 5-methyl modified nucleotide
  modified_base (18)..(18): 5-methyl modified nucleotide
  source: /note="3' tri-ethylene glycol (TEG)"
caaggaagauggcauuucuag

SEQ ID NO: 14071 - RNA, 20 nt, Artificial Sequence
  source: /note="Description of Artificial Sequence: Synthetic oligonucleotide"
  source: /note="RNA"
  source: /note="5' tri-ethylene glycol (TEG)"
  modified_base (1)..(1): 5-methyl bicyclic nucleic acid
  modified_base (13)..(13): 5-methyl modified nucleotide
  modified_base (18)..(18): 5-methyl modified nucleotide
  source: /note="3' tri-ethylene glycol (TEG)"
caaggaagauggcauuucua

SEQ ID NO: 14072 - RNA, 19 nt, Artificial Sequence
  source: /note="Description of Artificial Sequence: Synthetic oligonucleotide"
  source: /note="RNA"
  source: /note="5' tri-ethylene glycol (TEG)"
  modified_base (1)..(1): 5-methyl bicyclic nucleic acid
  modified_base (13)..(13): 5-methyl modified nucleotide
  modified_base (18)..(18): 5-methyl modified nucleotide
  source: /note="3' tri-ethylene glycol (TEG)"
caaggaagauggcauuucu

SEQ ID NO: 14073 - RNA, 18 nt, Artificial Sequence
  source: /note="Description of Artificial Sequence: Synthetic oligonucleotide"
  source: /note="RNA"
  source: /note="5' tri-ethylene glycol (TEG)"
  modified_base (1)..(1): 5-methyl bicyclic nucleic acid
  modified_base (13)..(13): 5-methyl modified nucleotide
  modified_base (18)..(18): 5-methyl modified nucleotide
  source: /note="3' tri-ethylene glycol (TEG)"
caaggaagauggcauuuc

SEQ ID NO: 14074 - RNA, 17 nt, Artificial Sequence
  source: /note="Description of Artificial Sequence: Synthetic oligonucleotide"
  source: /note="RNA"
  source: /note="5' tri-ethylene glycol (TEG)"
  modified_base (1)..(1): 5-methyl bicyclic nucleic acid
  modified_base (13)..(13): 5-methyl modified nucleotide
  source: /note="3' tri-ethylene glycol (TEG)"
caaggaagauggcauuu

SEQ ID NO: 14075 - RNA, 16 nt, Artificial Sequence
  source: /note="Description of Artificial Sequence: Synthetic oligonucleotide"
  source: /note="RNA"
  source: /note="5' tri-ethylene glycol (TEG)"
  modified_base (1)..(1): 5-methyl bicyclic nucleic acid
  modified_base (13)..(13): 5-methyl modified nucleotide
  source: /note="3' tri-ethylene glycol (TEG)"
caaggaagauggcauu

SEQ ID NO: 14076 - RNA, 15 nt, Artificial Sequence
  source: /note="Description of Artificial Sequence: Synthetic oligonucleotide"
  source: /note="RNA"
  source: /note="5' tri-ethylene glycol (TEG)"
  modified_base (1)..(1): 5-methyl bicyclic nucleic acid
  modified_base (13)..(13): 5-methyl modified nucleotide
  source: /note="3' tri-ethylene glycol (TEG)"
caaggaagauggcau

SEQ ID NO: 14077 - RNA, 14 nt, Artificial Sequence
  source: /note="Description of Artificial Sequence: Synthetic oligonucleotide"
  source: /note="RNA"
  source: /note="5' tri-ethylene glycol (TEG)"
  modified_base (1)..(1): 5-methyl bicyclic nucleic acid
  modified_base (13)..(13): 5-methyl modified nucleotide
  source: /note="3' tri-ethylene glycol (TEG)"
caaggaagauggca

SEQ ID NO: 14078 - RNA, 13 nt, Artificial Sequence
  source: /note="Description of Artificial Sequence: Synthetic oligonucleotide"
  source: /note="RNA"
  source: /note="5' tri-ethylene glycol (TEG)"
  modified_base (1)..(1): 5-methyl bicyclic nucleic acid
  modified_base (13)..(13): 5-methyl modified nucleotide
  source: /note="3' tri-ethylene glycol (TEG)"
caaggaagauggc

SEQ ID NO: 14079 - RNA, 12 nt, Artificial Sequence
  source: /note="Description of Artificial Sequence: Synthetic oligonucleotide"
  source: /note="RNA"
  source: /note="5' tri-ethylene glycol (TEG)"
  modified_base (1)..(1): 5-methyl bicyclic nucleic acid
  source: /note="3' tri-ethylene glycol (TEG)"
caaggaagaugg

SEQ ID NO: 14080 - RNA, 11 nt, Artificial Sequence
  source: /note="Description of Artificial Sequence: Synthetic oligonucleotide"
  source: /note="RNA"
  source: /note="5' tri-ethylene glycol (TEG)"
  modified_base (1)..(1): 5-methyl bicyclic nucleic acid
  source: /note="3' tri-ethylene glycol (TEG)"
caaggaagaug

SEQ ID NO: 14081 - RNA, 10 nt, Artificial Sequence
  source: /note="Description of Artificial Sequence: Synthetic oligonucleotide"
  source: /note="RNA"
  source: /note="5' tri-ethylene glycol (TEG)"
  modified_base (1)..(1): 5-methyl bicyclic nucleic acid
  source: /note="3' tri-ethylene glycol (TEG)"
caaggaagau

SEQ ID NO: 14082 - RNA, 9 nt, Artificial Sequence
  source: /note="Description of Artificial Sequence: Synthetic oligonucleotide"
  source: /note="RNA/Antisense Oligonucleotide"
  source: /note="5' tri-ethylene glycol (TEG)"
  modified_base (1)..(1): 5-methyl bicyclic nucleic acid
  source: /note="3' tri-ethylene glycol (TEG)"
caaggaaga

SEQ ID NO: 14083 - RNA, 8 nt, Artificial Sequence
  source: /note="Description of Artificial Sequence: Synthetic oligonucleotide"
  source: /note="RNA/Antisense Oligonucleotide"
  source: /note="5' tri-ethylene glycol (TEG)"
  modified_base (1)..(1): 5-methyl bicyclic nucleic acid
  source: /note="3' tri-ethylene glycol (TEG)"
caaggaag

SEQ ID NO: 14084 - RNA, 20 nt, Artificial Sequence
  source: /note="Description of Artificial Sequence: Synthetic oligonucleotide"
  source: /note="RNA"
  source: /note="5' tri-ethylene glycol (TEG)"
  modified_base (1)..(1): bicyclic nucleic acid (BNA)
  modified_base (12)..(12): 5-methyl modified nucleotide
  modified_base (17)..(17): 5-methyl modified nucleotide
  source: /note="3' tri-ethylene glycol (TEG)"
aaggaagauggcauuucuag

SEQ ID NO: 14085 - RNA, 19 nt, Artificial Sequence
  source: /note="Description of Artificial Sequence: Synthetic oligonucleotide"
  source: /note="RNA"
  source: /note="5' tri-ethylene glycol (TEG)"
  modified_base (1)..(1): bicyclic nucleic acid (BNA)
  modified_base (12)..(12): 5-methyl modified nucleotide
  modified_base (17)..(17): 5-methyl modified nucleotide
  source: /note="3' tri-ethylene glycol (TEG)"
aaggaagauggcauuucua

SEQ ID NO: 14086 - RNA, 18 nt, Artificial Sequence
  source: /note="Description of Artificial Sequence: Synthetic oligonucleotide"
  source: /note="RNA"
  source: /note="5' tri-ethylene glycol (TEG)"
  modified_base (1)..(1): bicyclic nucleic acid (BNA)
  modified_base (12)..(12): 5-methyl modified nucleotide
  modified_base (17)..(17): 5-methyl modified nucleotide
  source: /note="3' tri-ethylene glycol (TEG)"
aaggaagauggcauuucu

SEQ ID NO: 14087 - RNA, 17 nt, Artificial Sequence
  source: /note="Description of Artificial Sequence: Synthetic oligonucleotide"
  source: /note="RNA"
  source: /note="5' tri-ethylene glycol (TEG)"
  modified_base (1)..(1): bicyclic nucleic acid (BNA)
  modified_base (12)..(12): 5-methyl modified nucleotide
  modified_base (17)..(17): 5-methyl modified nucleotide
  source: /note="3' tri-ethylene glycol (TEG)"
aaggaagauggcauuuc

SEQ ID NO: 14088 - RNA, 16 nt, Artificial Sequence
  source: /note="Description of Artificial Sequence: Synthetic oligonucleotide"
  source: /note="RNA"
  source: /note="5' tri-ethylene glycol (TEG)"
  modified_base (1)..(1): bicyclic nucleic acid (BNA)
  modified_base (12)..(12): 5-methyl modified nucleotide
  source: /note="3' tri-ethylene glycol (TEG)"
aaggaagauggcauuu

SEQ ID NO: 14089 - RNA, 15 nt, Artificial Sequence
  source: /note="Description of Artificial Sequence: Synthetic oligonucleotide"
  source: /note="RNA"
  source: /note="5' tri-ethylene glycol (TEG)"
  modified_base (1)..(1): bicyclic nucleic acid (BNA)
  modified_base (12)..(12): 5-methyl modified nucleotide
  source: /note="3' tri-ethylene glycol (TEG)"
aaggaagauggcauu

SEQ ID NO: 14090 - RNA, 14 nt, Artificial Sequence
  source: /note="Description of Artificial Sequence: Synthetic oligonucleotide"
  source: /note="RNA"
  source: /note="5' tri-ethylene glycol (TEG)"
  modified_base (1)..(1): bicyclic nucleic acid (BNA)
  modified_base (12)..(12): 5-methyl modified nucleotide
  source: /note="3' tri-ethylene glycol (TEG)"
aaggaagauggcau

SEQ ID NO: 14091 - RNA, 13 nt, Artificial Sequence
  source: /note="Description of Artificial Sequence: Synthetic oligonucleotide"
  source: /note="RNA"
  source: /note="5' tri-ethylene glycol (TEG)"
  modified_base (1)..(1): bicyclic nucleic acid (BNA)
  modified_base (12)..(12): 5-methyl modified nucleotide
  source: /note="3' tri-ethylene glycol (TEG)"
aaggaagauggca

SEQ ID NO: 14092 - RNA, 12 nt, Artificial Sequence
  source: /note="Description of Artificial Sequence: Synthetic oligonucleotide"
  source: /note="RNA"
  source: /note="5' tri-ethylene glycol (TEG)"
  modified_base (1)..(1): bicyclic nucleic acid (BNA)
  modified_base (12)..(12): 5-methyl modified nucleotide
  source: /note="3' tri-ethylene glycol (TEG)"
aaggaagauggc

SEQ ID NO: 14093 - RNA, 11 nt, Artificial Sequence
  source: /note="Description of Artificial Sequence: Synthetic oligonucleotide"
  source: /note="RNA"
  source: /note="5' tri-ethylene glycol (TEG)"
  modified_base (1)..(1): bicyclic nucleic acid (BNA)
  source: /note="3' tri-ethylene glycol (TEG)"
aaggaagaugg

SEQ ID NO: 14094 - RNA, 10 nt, Artificial Sequence
  source: /note="Description of Artificial Sequence: Synthetic oligonucleotide"
  source: /note="RNA"
  source: /note="5' tri-ethylene glycol (TEG)"
  modified_base (1)..(1): bicyclic nucleic acid (BNA)
  source: /note="3' tri-ethylene glycol (TEG)"
aaggaagaug

SEQ ID NO: 14095 - RNA, 9 nt, Artificial Sequence
  source: /note="Description of Artificial Sequence: Synthetic oligonucleotide"
  source: /note="RNA"
  source: /note="5' tri-ethylene glycol (TEG)"
  modified_base (1)..(1): bicyclic nucleic acid (BNA)
  source: /note="3' tri-ethylene glycol (TEG)"
aaggaagau

SEQ ID NO: 14096 - RNA, 8 nt, Artificial Sequence
  source: /note="Description of Artificial Sequence: Synthetic oligonucleotide"
  source: /note="RNA/Antisense Oligonucleotide"
  source: /note="5' tri-ethylene glycol (TEG)"
  modified_base (1)..(1): bicyclic nucleic acid (BNA)
  source: /note="3' tri-ethylene glycol (TEG)"
aaggaaga

SEQ ID NO: 14097 - RNA, 19 nt, Artificial Sequence
  source: /note="Description of Artificial Sequence: Synthetic oligonucleotide"
  source: /note="RNA"
  source: /note="5' tri-ethylene glycol (TEG)"
  modified_base (1)..(1): bicyclic nucleic acid (BNA)
  modified_base (11)..(11): 5-methyl modified nucleotide
  modified_base (16)..(16): 5-methyl modified nucleotide
  source: /note="3' tri-ethylene glycol (TEG)"
aggaagauggcauuucuag

SEQ ID NO: 14098 - RNA, 18 nt, Artificial Sequence
  source: /note="Description of Artificial Sequence: Synthetic oligonucleotide"
  source: /note="RNA"
  source: /note="5' tri-ethylene glycol (TEG)"
  modified_base (1)..(1): bicyclic nucleic acid (BNA)
  modified_base (11)..(11): 5-methyl modified nucleotide
  modified_base (16)..(16): 5-methyl modified nucleotide
  source: /note="3' tri-ethylene glycol (TEG)"
aggaagauggcauuucua

SEQ ID NO: 14099 - RNA, 17 nt, Artificial Sequence
  source: /note="Description of Artificial Sequence: Synthetic oligonucleotide"
  source: /note="RNA"
  source: /note="5' tri-ethylene glycol (TEG)"
  modified_base (1)..(1): bicyclic nucleic acid (BNA)
  modified_base (11)..(11): 5-methyl modified nucleotide
  modified_base (16)..(16): 5-methyl modified nucleotide
  source: /note="3' tri-ethylene glycol (TEG)"
aggaagauggcauuucu

SEQ ID NO: 14100 - RNA, 16 nt, Artificial Sequence
  source: /note="Description of Artificial Sequence: Synthetic oligonucleotide"
  source: /note="RNA"
  source: /note="5' tri-ethylene glycol (TEG)"
  modified_base (1)..(1): bicyclic nucleic acid (BNA)
  modified_base (11)..(11): 5-methyl modified nucleotide
  modified_base (16)..(16): 5-methyl modified nucleotide
  source: /note="3' tri-ethylene glycol (TEG)"
aggaagauggcauuuc

SEQ ID NO: 14101 - RNA, 15 nt, Artificial Sequence
  source: /note="Description of Artificial Sequence: Synthetic oligonucleotide"
  source: /note="RNA"
  source: /note="5' tri-ethylene glycol (TEG)"
  modified_base (1)..(1): bicyclic nucleic acid (BNA)
  modified_base (11)..(11): 5-methyl modified nucleotide
  source: /note="3' tri-ethylene glycol (TEG)"
aggaagauggcauuu

SEQ ID NO: 14102 - RNA, 14 nt, Artificial Sequence
  source: /note="Description of Artificial Sequence: Synthetic oligonucleotide"
  source: /note="RNA"
  source: /note="5' tri-ethylene glycol (TEG)"
  modified_base (1)..(1): bicyclic nucleic acid (BNA)
  modified_base (11)..(11): 5-methyl modified nucleotide
  source: /note="3' tri-ethylene glycol (TEG)"
aggaagauggcauu

SEQ ID NO: 14103 - RNA, 13 nt, Artificial Sequence
  source: /note="Description of Artificial Sequence: Synthetic oligonucleotide"
  source: /note="RNA"
  source: /note="5' tri-ethylene glycol (TEG)"
  modified_base (1)..(1): bicyclic nucleic acid (BNA)
  modified_base (11)..(11): 5-methyl modified nucleotide
  source: /note="3' tri-ethylene glycol (TEG)"
aggaagauggcau

SEQ ID NO: 14104 - RNA, 12 nt, Artificial Sequence
  source: /note="Description of Artificial Sequence: Synthetic oligonucleotide"
  source: /note="RNA"
  source: /note="5' tri-ethylene glycol (TEG)"
  modified_base (1)..(1): bicyclic nucleic acid (BNA)
  modified_base (11)..(11): 5-methyl modified nucleotide
  source: /note="3' tri-ethylene glycol (TEG)"
aggaagauggca

SEQ ID NO: 14105 - RNA, 10 nt, Artificial Sequence
  source: /note="Description of Artificial Sequence: Synthetic oligonucleotide"
  source: /note="RNA"
  source: /note="5' tri-ethylene glycol (TEG)"
  modified_base (1)..(1): bicyclic nucleic acid (BNA)
  source: /note="3' tri-ethylene glycol (TEG)"
aggaagaugg

SEQ ID NO: 14106 - RNA, 9 nt, Artificial Sequence
  source: /note="Description of Artificial Sequence: Synthetic oligonucleotide"
  source: /note="RNA"
  source: /note="5' tri-ethylene glycol (TEG)"
  modified_base (1)..(1): bicyclic nucleic acid (BNA)
  source: /note="3' tri-ethylene glycol (TEG)"
aggaagaug

SEQ ID NO: 14107 - RNA, 8 nt, Artificial Sequence
  source: /note="Description of Artificial Sequence: Synthetic oligonucleotide"
  source: /note="RNA"
  source: /note="5' tri-ethylene glycol (TEG)"
  modified_base (1)..(1): bicyclic nucleic acid (BNA)
  source: /note="3' tri-ethylene glycol (TEG)"
aggaagau

SEQ ID NO: 14108 - RNA, 18 nt, Artificial Sequence
  source: /note="Description of Artificial Sequence: Synthetic oligonucleotide"
  source: /note="RNA"
  source: /note="5' tri-ethylene glycol (TEG)"
  modified_base (1)..(1): bicyclic nucleic acid (BNA)
  modified_base (10)..(10): 5-methyl modified nucleotide
  modified_base (15)..(15): 5-methyl modified nucleotide
  source: /note="3' tri-ethylene glycol (TEG)"
ggaagauggcauuucuag

SEQ ID NO: 14109 - RNA, 17 nt, Artificial Sequence
  source: /note="Description of Artificial Sequence: Synthetic oligonucleotide"
  source: /note="RNA"
  source: /note="5' tri-ethylene glycol (TEG)"
  modified_base (1)..(1): bicyclic nucleic acid (BNA)
  modified_base (10)..(10): 5-methyl modified nucleotide
  modified_base (15)..(15): 5-methyl modified nucleotide
  source: /note="3' tri-ethylene glycol (TEG)"
ggaagauggcauuucua

SEQ ID NO: 14110 - RNA, 16 nt, Artificial Sequence
  source: /note="Description of Artificial Sequence: Synthetic oligonucleotide"
  source: /note="RNA"
  source: /note="5' tri-ethylene glycol (TEG)"
  modified_base (1)..(1): bicyclic nucleic acid (BNA)
  modified_base (10)..(10): 5-methyl modified nucleotide
  modified_base (15)..(15): 5-methyl modified nucleotide
  source: /note="3' tri-ethylene glycol (TEG)"
ggaagauggcauuucu

SEQ ID NO: 14111 - RNA, 15 nt, Artificial Sequence
  source: /note="Description of Artificial Sequence: Synthetic oligonucleotide"
  source: /note="RNA"
  source: /note="5' tri-ethylene glycol (TEG)"
  modified_base (1)..(1): bicyclic nucleic acid (BNA)
  modified_base (10)..(10): 5-methyl modified nucleotide
  modified_base (15)..(15): 5-methyl modified nucleotide
  source: /note="3' tri-ethylene glycol (TEG)"
ggaagauggcauuuc

SEQ ID NO: 14112 - RNA, 14 nt, Artificial Sequence
  source: /note="Description of Artificial Sequence: Synthetic oligonucleotide"
  source: /note="RNA"
  source: /note="5' tri-ethylene glycol (TEG)"
  modified_base (1)..(1): bicyclic nucleic acid (BNA)
  modified_base (10)..(10): 5-methyl modified nucleotide
  source: /note="3' tri-ethylene glycol (TEG)"
ggaagauggcauuu

SEQ ID NO: 14113 - RNA, 13 nt, Artificial Sequence
  source: /note="Description of Artificial Sequence: Synthetic oligonucleotide"
  source: /note="RNA"
  source: /note="5' tri-ethylene glycol (TEG)"
  modified_base (1)..(1): bicyclic nucleic acid (BNA)
  modified_base (10)..(10): 5-methyl modified nucleotide
  source: /note="3' tri-ethylene glycol (TEG)"
ggaagauggcauu

SEQ ID NO: 14114 - RNA, 12 nt, Artificial Sequence
  source: /note="Description of Artificial Sequence: Synthetic oligonucleotide"
  source: /note="RNA"
  source: /note="5' tri-ethylene glycol (TEG)"
  modified_base (1)..(1): bicyclic nucleic acid (BNA)
  modified_base (10)..(10): 5-methyl modified nucleotide
  source: /note="3' tri-ethylene glycol (TEG)"
ggaagauggcau

SEQ ID NO: 14115 - RNA, 11 nt, Artificial Sequence
  source: /note="Description of Artificial Sequence: Synthetic oligonucleotide"
  source: /note="RNA"
  source: /note="5' tri-ethylene glycol (TEG)"
  modified_base (1)..(1): bicyclic nucleic acid (BNA)
  modified_base (10)..(10): 5-methyl modified nucleotide
  source: /note="3' tri-ethylene glycol (TEG)"
ggaagauggca

SEQ ID NO: 14116 - RNA, 10 nt, Artificial Sequence
  source: /note="Description of Artificial Sequence: Synthetic oligonucleotide"
  source: /note="RNA"
  source: /note="5' tri-ethylene glycol (TEG)"
  modified_base (1)..(1): bicyclic nucleic acid (BNA)
  modified_base (10)..(10): 5-methyl modified nucleotide
  source: /note="3' tri-ethylene glycol (TEG)"
ggaagauggc

SEQ ID NO: 14117 - RNA, 8 nt, Artificial Sequence
  source: /note="Description of Artificial Sequence: Synthetic oligonucleotide"
  source: /note="RNA"
  source: /note="5' tri-ethylene glycol (TEG)"
  modified_base (1)..(1): bicyclic nucleic acid (BNA)
  source: /note="3' tri-ethylene glycol (TEG)"
ggaagaug

SEQ ID NO: 14118 - RNA, 17 nt, Artificial Sequence
  source: /note="Description of Artificial Sequence: Synthetic oligonucleotide"
  source: /note="RNA"
  source: /note="5' tri-ethylene glycol (TEG)"
  modified_base (1)..(1): bicyclic nucleic acid (BNA)
  modified_base (9)..(9): 5-methyl modified nucleotide
  modified_base (14)..(14): 5-methyl modified nucleotide
  source: /note="3' tri-ethylene glycol (TEG)"
gaagauggcauuucuag

SEQ ID NO: 14119 - RNA, 16 nt, Artificial Sequence
  source: /note="Description of Artificial Sequence: Synthetic oligonucleotide"
  source: /note="RNA"
  source: /note="5' tri-ethylene glycol (TEG)"
  modified_base (1)..(1): bicyclic nucleic acid (BNA)
  modified_base (9)..(9): 5-methyl modified nucleotide
  modified_base (14)..(14): 5-methyl modified nucleotide
  source: /note="3' tri-ethylene glycol (TEG)"
gaagauggcauuucua

SEQ ID NO: 14120 - RNA, 14 nt, Artificial Sequence
  source: /note="Description of Artificial Sequence: Synthetic oligonucleotide"
  source: /note="RNA"
  source: /note="5' tri-ethylene glycol (TEG)"
  modified_base (1)..(1): bicyclic nucleic acid (BNA)
  modified_base (9)..(9): 5-methyl modified nucleotide
  modified_base (14)..(14): 5-methyl modified nucleotide
  source: /note="3' tri-ethylene glycol (TEG)"
gaagauggcauuuc

SEQ ID NO: 14121 - RNA, 13 nt, Artificial Sequence
  source: /note="Description of Artificial Sequence: Synthetic oligonucleotide"
  source: /note="RNA"
  source: /note="5' tri-ethylene glycol (TEG)"
  modified_base (1)..(1): bicyclic nucleic acid (BNA)
  modified_base (9)..(9): 5-methyl modified nucleotide
  source: /note="3' tri-ethylene glycol (TEG)"
gaagauggcauuu

SEQ ID NO: 14122 - RNA, 12 nt, Artificial Sequence
  source: /note="Description of Artificial Sequence: Synthetic oligonucleotide"
  source: /note="RNA"
  source: /note="5' tri-ethylene glycol (TEG)"
  modified_base (1)..(1): bicyclic nucleic acid (BNA)
  modified_base (9)..(9): 5-methyl modified nucleotide
  source: /note="3' tri-ethylene glycol (TEG)"
gaagauggcauu

SEQ ID NO: 14123 - RNA, 11 nt, Artificial Sequence
  source: /note="Description of Artificial Sequence: Synthetic oligonucleotide"
  source: /note="RNA"
  source: /note="5' tri-ethylene glycol (TEG)"
  modified_base (1)..(1): bicyclic nucleic acid (BNA)
  modified_base (9)..(9): 5-methyl modified nucleotide
  source: /note="3' tri-ethylene glycol (TEG)"
gaagauggcau

SEQ ID NO: 14124 - RNA, 10 nt, Artificial Sequence
  source: /note="Description of Artificial Sequence: Synthetic oligonucleotide"
  source: /note="RNA"
  source: /note="5' tri-ethylene glycol (TEG)"
  modified_base (1)..(1): bicyclic nucleic acid (BNA)
  modified_base (9)..(9): 5-methyl modified nucleotide
  source: /note="3' tri-ethylene glycol (TEG)"
gaagauggca

SEQ ID NO: 14125 - RNA, 9 nt, Artificial Sequence
  source: /note="Description of Artificial Sequence: Synthetic oligonucleotide"
  source: /note="RNA"
  source: /note="5' tri-ethylene glycol (TEG)"
  modified_base (1)..(1): bicyclic nucleic acid (BNA)
  modified_base (9)..(9): 5-methyl modified nucleotide
  source: /note="3' tri-ethylene glycol (TEG)"
gaagauggc

SEQ ID NO: 14126 - RNA, 8 nt, Artificial Sequence
  source: /note="Description of Artificial Sequence: Synthetic oligonucleotide"
  source: /note="RNA"
  source: /note="5' tri-ethylene glycol (TEG)"
  modified_base (1)..(1): bicyclic nucleic acid (BNA)
  source: /note="3' tri-ethylene glycol (TEG)"
gaagaugg

SEQ ID NO: 14127 - RNA, 16 nt, Artificial Sequence
  source: /note="Description of Artificial Sequence: Synthetic oligonucleotide"
  source: /note="RNA"
  source: /note="5' tri-ethylene glycol (TEG)"
  modified_base (1)..(1): bicyclic nucleic acid (BNA)
  modified_base (8)..(8): 5-methyl modified nucleotide
  modified_base (13)..(13): 5-methyl modified nucleotide
  source: /note="3' tri-ethylene glycol (TEG)"
aagauggcauuucuag

SEQ ID NO: 14128 - RNA, 15 nt, Artificial Sequence
  source: /note="Description of Artificial Sequence: Synthetic oligonucleotide"
  source: /note="RNA"
  source: /note="5' tri-ethylene glycol (TEG)"
  modified_base (1)..(1): bicyclic nucleic acid (BNA)
  modified_base (8)..(8): 5-methyl modified nucleotide
  modified_base (13)..(13): 5-methyl modified nucleotide
  source: /note="3' tri-ethylene glycol (TEG)"
aagauggcauuucua

SEQ ID NO: 14129 - RNA, 14 nt, Artificial Sequence
  source: /note="Description of Artificial Sequence: Synthetic oligonucleotide"
  source: /note="RNA"
  source: /note="5' tri-ethylene glycol (TEG)"
  modified_base (1)..(1): bicyclic nucleic acid (BNA)
  modified_base (8)..(8): 5-methyl modified nucleotide
  modified_base (13)..(13): 5-methyl modified nucleotide
  source: /note="3' tri-ethylene glycol (TEG)"
aagauggcauuucu

SEQ ID NO: 14130 - RNA, 13 nt, Artificial Sequence
  source: /note="Description of Artificial Sequence: Synthetic oligonucleotide"
  source: /note="RNA"
  source: /note="5' tri-ethylene glycol (TEG)"
  modified_base (1)..(1): bicyclic nucleic acid (BNA)
  modified_base (8)..(8): 5-methyl modified nucleotide
  modified_base (13)..(13): 5-methyl modified nucleotide
  source: /note="3' tri-ethylene glycol (TEG)"
aagauggcauuuc

SEQ ID NO: 14131 - RNA, 12 nt, Artificial Sequence
  source: /note="Description of Artificial Sequence: Synthetic oligonucleotide"
  source: /note="RNA"
  source: /note="5' tri-ethylene glycol (TEG)"
  modified_base (1)..(1): bicyclic nucleic acid (BNA)
  modified_base (8)..(8): 5-methyl modified nucleotide
  source: /note="3' tri-ethylene glycol (TEG)"
aagauggcauuu

SEQ ID NO: 14132 - RNA, 11 nt, Artificial Sequence
  source: /note="Description of Artificial Sequence: Synthetic oligonucleotide"
  source: /note="RNA"
  source: /note="5' tri-ethylene glycol (TEG)"
  modified_base (1)..(1): bicyclic nucleic acid (BNA)
  modified_base (8)..(8): 5-methyl modified nucleotide
  source: /note="3' tri-ethylene glycol (TEG)"
aagauggcauu

SEQ ID NO: 14133 - RNA, 10 nt, Artificial Sequence
  source: /note="Description of Artificial Sequence: Synthetic oligonucleotide"
  source: /note="RNA"
  source: /note="5' tri-ethylene glycol (TEG)"
  modified_base (1)..(1): bicyclic nucleic acid (BNA)
  modified_base (8)..(8): 5-methyl modified nucleotide
  source: /note="3' tri-ethylene glycol (TEG)"
aagauggcau

SEQ ID NO: 14134 - RNA, 9 nt, Artificial Sequence
  source: /note="Description of Artificial Sequence: Synthetic oligonucleotide"
  source: /note="RNA"
  source: /note="5' tri-ethylene glycol (TEG)"
  modified_base (1)..(1): bicyclic nucleic acid (BNA)
  modified_base (8)..(8): 5-methyl modified nucleotide
  source: /note="3' tri-ethylene glycol (TEG)"
aagauggca

SEQ ID NO: 14135 - RNA, 8 nt, Artificial Sequence
  source: /note="Description of Artificial Sequence: Synthetic oligonucleotide"
  source: /note="RNA"
  source: /note="5' tri-ethylene glycol (TEG)"
  modified_base (1)..(1): bicyclic nucleic acid (BNA)
  modified_base (8)..(8): 5-methyl modified nucleotide
  source: /note="3' tri-ethylene glycol (TEG)"
aagauggc

SEQ ID NO: 14136 - RNA, 15 nt, Artificial Sequence
  source: /note="Description of Artificial Sequence: Synthetic oligonucleotide"
  source: /note="RNA"
  source: /note="5' tri-ethylene glycol (TEG)"
  modified_base (1)..(1): bicyclic nucleic acid (BNA)
  modified_base (7)..(7): 5-methyl modified nucleotide
  modified_base (12)..(12): 5-methyl modified nucleotide
  source: /note="3' tri-ethylene glycol (TEG)"
agauggcauuucuag

SEQ ID NO: 14137 - RNA, 14 nt, Artificial Sequence
  source: /note="Description of Artificial Sequence: Synthetic oligonucleotide"
  source: /note="RNA"
  source: /note="5' tri-ethylene glycol (TEG)"
  modified_base (1)..(1): bicyclic nucleic acid (BNA)
  modified_base (7)..(7): 5-methyl modified nucleotide
  modified_base (12)..(12): 5-methyl modified nucleotide
  source: /note="3' tri-ethylene glycol (TEG)"
agauggcauuucua

SEQ ID NO: 14138 - RNA, 13 nt, Artificial Sequence
  source: /note="Description of Artificial Sequence: Synthetic oligonucleotide"
  source: /note="RNA"
  source: /note="5' tri-ethylene glycol (TEG)"
  modified_base (1)..(1): bicyclic nucleic acid (BNA)
  modified_base (7)..(7): 5-methyl modified nucleotide
  modified_base (12)..(12): 5-methyl modified nucleotide
  source: /note="3' tri-ethylene glycol (TEG)"
agauggcauuucu

SEQ ID NO: 14139 - RNA, 12 nt, Artificial Sequence
  source: /note="Description of Artificial Sequence: Synthetic oligonucleotide"
  source: /note="RNA"
  source: /note="5' tri-ethylene glycol (TEG)"
  modified_base (1)..(1): bicyclic nucleic acid (BNA)
  modified_base (7)..(7): 5-methyl modified nucleotide
  modified_base (12)..(12): 5-methyl modified nucleotide
  source: /note="3' tri-ethylene glycol (TEG)"
agauggcauuuc

SEQ ID NO: 14140 - RNA, 11 nt, Artificial Sequence
  source: /note="Description of Artificial Sequence: Synthetic oligonucleotide"
  source: /note="RNA"
  source: /note="5' tri-ethylene glycol (TEG)"
  modified_base (1)..(1): bicyclic nucleic acid (BNA)
  modified_base (7)..(7): 5-methyl modified nucleotide
  source: /note="3' tri-ethylene glycol (TEG)"
agauggcauuu

SEQ ID NO: 14141 - RNA, 10 nt, Artificial Sequence
  source: /note="Description of Artificial Sequence: Synthetic oligonucleotide"
  source: /note="RNA"
  source: /note="5' tri-ethylene glycol (TEG)"
  modified_base (1)..(1): bicyclic nucleic acid (BNA)
  modified_base (7)..(7): 5-methyl modified nucleotide
  source: /note="3' tri-ethylene glycol (TEG)"
agauggcauu

SEQ ID NO: 14142 - RNA, 9 nt, Artificial Sequence
  source: /note="Description of Artificial Sequence: Synthetic oligonucleotide"
  source: /note="RNA"
  source: /note="5' tri-ethylene glycol (TEG)"
  modified_base (1)..(1): bicyclic nucleic acid (BNA)
  modified_base (7)..(7): 5-methyl modified nucleotide
  source: /note="3' tri-ethylene glycol (TEG)"
agauggcau

SEQ ID NO: 14143 - RNA, 8 nt, Artificial Sequence
  source: /note="Description of Artificial Sequence: Synthetic oligonucleotide"
  source: /note="RNA"
  source: /note="5' tri-ethylene glycol (TEG)"
  modified_base (1)..(1): bicyclic nucleic acid (BNA)
  modified_base (7)..(7): 5-methyl modified nucleotide
  source: /note="3' tri-ethylene glycol (TEG)"
agauggca

SEQ ID NO: 14144 - RNA, 30 nt, Artificial Sequence; identical to SEQ ID NO: 284
  source: /note="Description of Artificial Sequence: Synthetic oligonucleotide"
  source: /note="RNA"
  source: /note="5' tri-ethylene glycol (TEG)"
  modified_base (1)..(1): 5-methyl bicyclic nucleic acid
  modified_base (3)..(3): 5-methyl modified nucleotide
  modified_base (4)..(4): 5-methyl modified nucleotide
  modified_base (7)..(7): 5-methyl modified nucleotide
  modified_base (10)..(10): 5-methyl modified nucleotide
  modified_base (22)..(22): 5-methyl modified nucleotide
  modified_base (27)..(27): 5-methyl modified nucleotide
  source: /note="3' tri-ethylene glycol (TEG)"

SEQ ID NO: 14145 - RNA, 29 nt, Artificial Sequence
  source: /note="Description of Artificial Sequence: Synthetic oligonucleotide"
  source: /note="RNA"
  source: /note="5' tri-ethylene glycol (TEG)"
  modified_base (1)..(1): 5-methyl bicyclic nucleic acid
  modified_base (3)..(3): 5-methyl modified nucleotide
  modified_base (4)..(4): 5-methyl modified nucleotide
  modified_base (7)..(7): 5-methyl modified nucleotide
  modified_base (10)..(10): 5-methyl modified nucleotide
  modified_base (22)..(22): 5-methyl modified nucleotide
  modified_base (27)..(27): 5-methyl modified nucleotide
  source: /note="3' tri-ethylene glycol (TEG)"
cuccaacaucaaggaagauggcauuucua

SEQ ID NO: 14146 - RNA, 28 nt, Artificial Sequence
  source: /note="Description of Artificial Sequence: Synthetic oligonucleotide"
  source: /note="RNA"
  source: /note="5' tri-ethylene glycol (TEG)"
  modified_base (1)..(1): 5-methyl bicyclic nucleic acid
  modified_base (3)..(3): 5-methyl modified nucleotide
  modified_base (4)..(4): 5-methyl modified nucleotide
  modified_base (7)..(7): 5-methyl modified nucleotide
  modified_base (10)..(10): 5-methyl modified nucleotide
  modified_base (22)..(22): 5-methyl modified nucleotide
  modified_base (27)..(27): 5-methyl modified nucleotide
  source: /note="3' tri-ethylene glycol (TEG)"
cuccaacaucaaggaagauggcauuucu

SEQ ID NO: 14147 - RNA, 27 nt, Artificial Sequence
  source: /note="Description of Artificial Sequence: Synthetic oligonucleotide"
  source: /note="RNA"
  source: /note="5' tri-ethylene glycol (TEG)"
  modified_base (1)..(1): 5-methyl bicyclic nucleic acid
  modified_base (3)..(3): 5-methyl modified nucleotide
  modified_base (4)..(4): 5-methyl modified nucleotide
  modified_base (7)..(7): 5-methyl modified nucleotide
  modified_base (10)..(10): 5-methyl modified nucleotide
  modified_base (22)..(22): 5-methyl modified nucleotide
  modified_base (27)..(27): 5-methyl modified nucleotide
  source: /note="3' tri-ethylene glycol (TEG)"
cuccaacaucaaggaagauggcauuuc

SEQ ID NO: 14148 - RNA, 26 nt, Artificial Sequence
  source: /note="Description of Artificial Sequence: Synthetic oligonucleotide"
  source: /note="RNA"
  source: /note="5' tri-ethylene glycol (TEG)"
  modified_base (1)..(1): 5-methyl bicyclic nucleic acid
  modified_base (3)..(3): 5-methyl modified nucleotide
  modified_base (4)..(4): 5-methyl modified nucleotide
  modified_base (7)..(7): 5-methyl modified nucleotide
  modified_base (10)..(10): 5-methyl modified nucleotide
  modified_base (22)..(22): 5-methyl modified nucleotide
  source: /note="3' tri-ethylene glycol (TEG)"
cuccaacaucaaggaagauggcauuu

SEQ ID NO: 14149 - RNA, 25 nt, Artificial Sequence
  source: /note="Description of Artificial Sequence: Synthetic oligonucleotide"
  source: /note="RNA"
  source: /note="5' tri-ethylene glycol (TEG)"
  modified_base (1)..(1): 5-methyl bicyclic nucleic acid
  modified_base (3)..(3): 5-methyl modified nucleotide
  modified_base (4)..(4): 5-methyl modified nucleotide
  modified_base (7)..(7): 5-methyl modified nucleotide
  modified_base (10)..(10): 5-methyl modified nucleotide
  modified_base (22)..(22): 5-methyl modified nucleotide
  source: /note="3' tri-ethylene glycol (TEG)"
cuccaacaucaaggaagauggcauu

SEQ ID NO: 14150 - RNA, 24 nt, Artificial Sequence
  source: /note="Description of Artificial Sequence: Synthetic oligonucleotide"
  source: /note="RNA"
  source: /note="5' tri-ethylene glycol (TEG)"
  modified_base (1)..(1): 5-methyl bicyclic nucleic acid
  modified_base (3)..(3): 5-methyl modified nucleotide
  modified_base (4)..(4): 5-methyl modified nucleotide
  modified_base (7)..(7): 5-methyl modified nucleotide
  modified_base (10)..(10): 5-methyl modified nucleotide
  modified_base (22)..(22): 5-methyl modified nucleotide
  source: /note="3' tri-ethylene glycol (TEG)"
cuccaacaucaaggaagauggcau

SEQ ID NO: 14151 - RNA, 23 nt, Artificial Sequence
  source: /note="Description of Artificial Sequence: Synthetic oligonucleotide"
  source: /note="RNA"
  source: /note="5' tri-ethylene glycol (TEG)"
  modified_base (1)..(1): 5-methyl bicyclic nucleic acid
  modified_base (3)..(3): 5-methyl modified nucleotide
  modified_base (4)..(4): 5-methyl modified nucleotide
  modified_base (7)..(7): 5-methyl modified nucleotide
  modified_base (10)..(10): 5-methyl modified nucleotide
  modified_base (22)..(22): 5-methyl modified nucleotide
  source: /note="3' tri-ethylene glycol (TEG)"
cuccaacaucaaggaagauggca

SEQ ID NO: 14152 - RNA, 22 nt, Artificial Sequence
  source: /note="Description of Artificial Sequence: Synthetic oligonucleotide"
  source: /note="RNA"
  source: /note="5' tri-ethylene glycol (TEG)"
  modified_base (1)..(1): 5-methyl bicyclic nucleic acid
  modified_base (3)..(3): 5-methyl modified nucleotide
  modified_base (4)..(4): 5-methyl modified nucleotide
  modified_base (7)..(7): 5-methyl modified nucleotide
  modified_base (10)..(10): 5-methyl modified nucleotide
  modified_base (22)..(22): 5-methyl modified nucleotide
  source: /note="3' tri-ethylene glycol (TEG)"
cuccaacaucaaggaagauggc

SEQ ID NO: 14153 - RNA, 21 nt, Artificial Sequence
  source: /note="Description of Artificial Sequence: Synthetic oligonucleotide"
  source: /note="RNA"
  source: /note="5' tri-ethylene glycol (TEG)"
  modified_base (1)..(1): 5-methyl bicyclic nucleic acid
  modified_base (3)..(3): 5-methyl modified nucleotide
  modified_base (4)..(4): 5-methyl modified nucleotide
  modified_base (7)..(7): 5-methyl modified nucleotide
  modified_base (10)..(10): 5-methyl modified nucleotide
  source: /note="3' tri-ethylene glycol (TEG)"
cuccaacaucaaggaagaugg

SEQ ID NO: 14154 - RNA, 20 nt, Artificial Sequence
  source: /note="Description of Artificial Sequence: Synthetic oligonucleotide"
  source: /note="RNA"
  source: /note="5' tri-ethylene glycol (TEG)"
  modified_base (1)..(1): 5-methyl bicyclic nucleic acid
  modified_base (3)..(3): 5-methyl modified nucleotide
  modified_base (4)..(4): 5-methyl modified nucleotide
  modified_base (7)..(7): 5-methyl modified nucleotide
  modified_base (10)..(10): 5-methyl modified nucleotide
  source: /note="3' tri-ethylene glycol (TEG)"
cuccaacaucaaggaagaug

SEQ ID NO: 14155 - RNA, 19 nt, Artificial Sequence
  source: /note="Description of Artificial Sequence: Synthetic oligonucleotide"
  source: /note="RNA"
  source: /note="5' tri-ethylene glycol (TEG)"
  modified_base (1)..(1): 5-methyl bicyclic nucleic acid
  modified_base (3)..(3): 5-methyl modified nucleotide
  modified_base (4)..(4): 5-methyl modified nucleotide
  modified_base (7)..(7): 5-methyl modified nucleotide
  modified_base (10)..(10): 5-methyl modified nucleotide
  source: /note="3' tri-ethylene glycol (TEG)"
cuccaacaucaaggaagau

SEQ ID NO: 14156 - RNA, 18 nt, Artificial Sequence
  source: /note="Description of Artificial Sequence: Synthetic oligonucleotide"
  source: /note="RNA"
  source: /note="5' tri-ethylene glycol (TEG)"
  modified_base (1)..(1): 5-methyl bicyclic nucleic acid
  modified_base (3)..(3): 5-methyl modified nucleotide
  modified_base (4)..(4): 5-methyl modified nucleotide
  modified_base (7)..(7): 5-methyl modified nucleotide
  modified_base (10)..(10): 5-methyl modified nucleotide
  source: /note="3' tri-ethylene glycol (TEG)"
cuccaacaucaaggaaga

SEQ ID NO: 14157 - RNA, 17 nt, Artificial Sequence
  source: /note="Description of Artificial Sequence: Synthetic oligonucleotide"
  source: /note="RNA"
  source: /note="5' tri-ethylene glycol (TEG)"
  modified_base (1)..(1): 5-methyl bicyclic nucleic acid
  modified_base (3)..(3): 5-methyl modified nucleotide
  modified_base (4)..(4): 5-methyl modified nucleotide
  modified_base (7)..(7): 5-methyl modified nucleotide
  modified_base (10)..(10): 5-methyl modified nucleotide
  source: /note="3' tri-ethylene glycol (TEG)"
cuccaacaucaaggaag

SEQ ID NO: 14158 - DNA, 29 bp, Artificial Sequence
  source: /note="Description of Artificial Sequence: Synthetic oligonucleotide"
  source: /note="Description of Combined DNA/RNA Molecule: Synthetic oligonucleotide"
  source: /note="DNA/RNA"
  source: /note="5' tri-ethylene glycol (TEG)"
  modified_base (1)..(1): bicyclic nucleic acid (BNA)
  modified_base (2)..(2): 5-methyl modified nucleotide
  modified_base (3)..(3): 5-methyl modified nucleotide
  modified_base (6)..(6): 5-methyl modified nucleotide
  modified_base (9)..(9): 5-methyl modified nucleotide
  modified_base (21)..(21): 5-methyl modified nucleotide
  modified_base (26)..(26): 5-methyl modified nucleotide
  source: /note="3' tri-ethylene glycol (TEG)"
tccaacaucaaggaagauggcauuucuag

SEQ ID NO: 14159 - DNA, 28 bp, Artificial Sequence
  source: /note="Description of Artificial Sequence: Synthetic oligonucleotide"
  source: /note="Description of Combined DNA/RNA Molecule: Synthetic oligonucleotide"
  source: /note="DNA/RNA"
  source: /note="5' tri-ethylene glycol (TEG)"
  modified_base (1)..(1): bicyclic nucleic acid (BNA)
  modified_base (2)..(2): 5-methyl modified nucleotide
  modified_base (3)..(3): 5-methyl modified nucleotide
  modified_base (6)..(6): 5-methyl modified nucleotide
  modified_base (9)..(9): 5-methyl modified nucleotide
  modified_base (21)..(21): 5-methyl modified nucleotide
  modified_base (26)..(26): 5-methyl modified nucleotide
  source: /note="3' tri-ethylene glycol (TEG)"
tccaacaucaaggaagauggcauuucua

SEQ ID NO: 14160 - DNA, 27 bp, Artificial Sequence
  source: /note="Description of Artificial Sequence: Synthetic oligonucleotide"
  source: /note="Description of Combined DNA/RNA Molecule: Synthetic oligonucleotide"
  source: /note="DNA/RNA"
  source: /note="5' tri-ethylene glycol (TEG)"
  modified_base (1)..(1): bicyclic nucleic acid (BNA)
  modified_base (2)..(2): 5-methyl modified nucleotide
  modified_base (3)..(3): 5-methyl modified nucleotide
  modified_base (6)..(6): 5-methyl modified nucleotide
  modified_base (9)..(9): 5-methyl modified nucleotide
  modified_base (21)..(21): 5-methyl modified nucleotide
  modified_base (26)..(26): 5-methyl modified nucleotide
  source: /note="3' tri-ethylene glycol (TEG)"
tccaacaucaaggaagauggcauuucu

SEQ ID NO: 14161 - DNA, 26 bp, Artificial Sequence
  source: /note="Description of Artificial Sequence: Synthetic oligonucleotide"
  source: /note="Description of Combined DNA/RNA Molecule: Synthetic oligonucleotide"
  source: /note="DNA/RNA"
  source: /note="5' tri-ethylene glycol (TEG)"
  modified_base (1)..(1): bicyclic nucleic acid (BNA)
  modified_base (2)..(2): 5-methyl modified nucleotide
  modified_base (3)..(3): 5-methyl modified nucleotide
  modified_base (6)..(6): 5-methyl modified nucleotide
  modified_base (9)..(9): 5-methyl modified nucleotide
  modified_base (21)..(21): 5-methyl modified nucleotide
  modified_base (26)..(26): 5-methyl modified nucleotide
  source: /note="3' tri-ethylene glycol (TEG)"
tccaacaucaaggaagauggcauuuc

SEQ ID NO: 14162 - DNA, 25 bp, Artificial Sequence
  source: /note="Description of Artificial Sequence: Synthetic oligonucleotide"
  source: /note="Description of Combined DNA/RNA Molecule: Synthetic oligonucleotide"
  source: /note="DNA/RNA"
  source: /note="5' tri-ethylene glycol (TEG)"
  modified_base (1)..(1): bicyclic nucleic acid (BNA)
  modified_base (2)..(2): 5-methyl modified nucleotide
  modified_base (3)..(3): 5-methyl modified nucleotide
  modified_base (6)..(6): 5-methyl modified nucleotide
  modified_base (9)..(9): 5-methyl modified nucleotide
  modified_base (21)..(21): 5-methyl modified nucleotide
  source: /note="3' tri-ethylene glycol (TEG)"
tccaacaucaaggaagauggcauuu

SEQ ID NO: 14163 - DNA, 24 bp, Artificial Sequence
  source: /note="Description of Artificial Sequence: Synthetic oligonucleotide"
  source: /note="Description of Combined DNA/RNA Molecule: Synthetic oligonucleotide"
  source: /note="DNA/RNA"
  source: /note="5' tri-ethylene glycol (TEG)"
  modified_base (1)..(1): bicyclic nucleic acid (BNA)
  modified_base (2)..(2): 5-methyl modified nucleotide
  modified_base (3)..(3): 5-methyl modified nucleotide
  modified_base (6)..(6): 5-methyl modified nucleotide
  modified_base (9)..(9): 5-methyl modified nucleotide
  modified_base (21)..(21): 5-methyl modified nucleotide
  source: /note="3' tri-ethylene glycol (TEG)"
tccaacaucaaggaagauggcauu

SEQ ID NO: 14164 - DNA, 23 bp, Artificial Sequence
  source: /note="Description of Artificial Sequence: Synthetic oligonucleotide"
  source: /note="Description of Combined DNA/RNA Molecule: Synthetic oligonucleotide"
  source: /note="DNA/RNA"
  source: /note="5' tri-ethylene glycol (TEG)"
  modified_base (1)..(1): bicyclic nucleic acid (BNA)
  modified_base (2)..(2): 5-methyl modified nucleotide
  modified_base (3)..(3): 5-methyl modified nucleotide
  modified_base (6)..(6): 5-methyl modified nucleotide
  modified_base (9)..(9): 5-methyl modified nucleotide
  modified_base (21)..(21): 5-methyl modified nucleotide
  source: /note="3' tri-ethylene glycol (TEG)"
tccaacaucaaggaagauggcau

SEQ ID NO: 14165 - DNA, 22 bp, Artificial Sequence
  source: /note="Description of Artificial Sequence: Synthetic oligonucleotide"
  source: /note="Description of Combined DNA/RNA Molecule: Synthetic oligonucleotide"
  source: /note="DNA/RNA"
  source: /note="5' tri-ethylene glycol (TEG)"
  modified_base (1)..(1): bicyclic nucleic acid (BNA)
  modified_base (2)..(2): 5-methyl modified nucleotide
  modified_base (3)..(3): 5-methyl modified nucleotide
  modified_base (6)..(6): 5-methyl modified nucleotide
  modified_base (9)..(9): 5-methyl modified nucleotide
  modified_base (21)..(21): 5-methyl modified nucleotide
  source: /note="3' tri-ethylene glycol (TEG)"
tccaacaucaaggaagauggca

SEQ ID NO: 14166 - DNA, 21 bp, Artificial Sequence
  source: /note="Description of Artificial Sequence: Synthetic oligonucleotide"
  source: /note="Description of Combined DNA/RNA Molecule: Synthetic oligonucleotide"
  source: /note="DNA/RNA"
  source: /note="5' tri-ethylene glycol (TEG)"
  modified_base (1)..(1): bicyclic nucleic acid (BNA)
  modified_base (2)..(2): 5-methyl modified nucleotide
  modified_base (3)..(3): 5-methyl modified nucleotide
  modified_base (6)..(6): 5-methyl modified nucleotide
  modified_base (9)..(9): 5-methyl modified nucleotide
  modified_base (21)..(21): 5-methyl modified nucleotide
  source: /note="3' tri-ethylene glycol (TEG)"
tccaacaucaaggaagauggc

SEQ ID NO: 14167 - DNA, 20 bp, Artificial Sequence
  source: /note="Description of Artificial Sequence: Synthetic oligonucleotide"
  source: /note="Description of Combined DNA/RNA Molecule: Synthetic oligonucleotide"
  source: /note="DNA/RNA"
  source: /note="5' tri-ethylene glycol (TEG)"
  modified_base (1)..(1): bicyclic nucleic acid (BNA)
  modified_base (2)..(2): 5-methyl modified nucleotide
  modified_base (3)..(3): 5-methyl modified nucleotide
  modified_base (6)..(6): 5-methyl modified nucleotide
  modified_base (9)..(9): 5-methyl modified nucleotide
  source: /note="3' tri-ethylene glycol (TEG)"
tccaacaucaaggaagaugg

SEQ ID NO: 14168 - DNA, 19 bp, Artificial Sequence
  source: /note="Description of Artificial Sequence: Synthetic oligonucleotide"
  source: /note="Description of Combined DNA/RNA Molecule: Synthetic oligonucleotide"
  source: /note="DNA/RNA"
  source: /note="5' tri-ethylene glycol (TEG)"
  modified_base (1)..(1): bicyclic nucleic acid (BNA)
  modified_base (2)..(2): 5-methyl modified nucleotide
  modified_base (3)..(3): 5-methyl modified nucleotide
  modified_base (6)..(6): 5-methyl modified nucleotide
  modified_base (9)..(9): 5-methyl modified nucleotide
  source: /note="3' tri-ethylene glycol (TEG)"
tccaacaucaaggaagaug

SEQ ID NO: 14169 - DNA, 18 bp, Artificial Sequence
  source: /note="Description of Artificial Sequence: Synthetic oligonucleotide"
  source: /note="Description of Combined DNA/RNA Molecule: Synthetic oligonucleotide"
  source: /note="DNA/RNA"
  source: /note="5' tri-ethylene glycol (TEG)"
  modified_base (1)..(1): bicyclic nucleic acid (BNA)
  modified_base (2)..(2): 5-methyl modified nucleotide
  modified_base (3)..(3): 5-methyl modified nucleotide
  modified_base (6)..(6): 5-methyl modified nucleotide
  modified_base (9)..(9): 5-methyl modified nucleotide
  source: /note="3' tri-ethylene glycol (TEG)"
tccaacaucaaggaagau

SEQ ID NO: 14170 - DNA, 17 bp, Artificial Sequence
  source: /note="Description of Artificial Sequence: Synthetic oligonucleotide"
  source: /note="Description of Combined DNA/RNA Molecule: Synthetic oligonucleotide"
  source: /note="DNA/RNA"
  source: /note="5' tri-ethylene glycol (TEG)"
  modified_base (1)..(1): bicyclic nucleic acid (BNA)
  modified_base (2)..(2): 5-methyl modified nucleotide
  modified_base (3)..(3): 5-methyl modified nucleotide
  modified_base (6)..(6): 5-methyl modified nucleotide
  modified_base (9)..(9): 5-methyl modified nucleotide
  source: /note="3' tri-ethylene glycol (TEG)"
tccaacaucaaggaaga

SEQ ID NO: 14171 - DNA, 16 bp, Artificial Sequence
  source: /note="Description of Artificial Sequence: Synthetic oligonucleotide"
  source: /note="Description of Combined DNA/RNA Molecule: Synthetic oligonucleotide"
  source: /note="DNA/RNA"
  source: /note="5' tri-ethylene glycol (TEG)"
  modified_base (1)..(1): bicyclic nucleic acid (BNA)
  modified_base (2)..(2): 5-methyl modified nucleotide
  modified_base (3)..(3): 5-methyl modified nucleotide
  modified_base (6)..(6): 5-methyl modified nucleotide
  modified_base (9)..(9): 5-methyl modified nucleotide
  source: /note="3' tri-ethylene glycol (TEG)"
tccaacaucaaggaag

SEQ ID NO: 14172 - RNA, 28 nt, Artificial Sequence
  source: /note="Description of Artificial Sequence: Synthetic oligonucleotide"
  source: /note="RNA"
  source: /note="5' tri-ethylene glycol (TEG)"
  modified_base (1)..(1): 5-methyl bicyclic nucleic acid
  modified_base (2)..(2): 5-methyl modified nucleotide
  modified_base (5)..(5): 5-methyl modified nucleotide
  modified_base (8)..(8): 5-methyl modified nucleotide
  modified_base (20)..(20): 5-methyl modified nucleotide
  modified_base (25)..(25): 5-methyl modified nucleotide
  source: /note="3' tri-ethylene glycol (TEG)"
ccaacaucaaggaagauggcauuucuag

SEQ ID NO: 14173 - RNA, 27 nt, Artificial Sequence
  source: /note="Description of Artificial Sequence: Synthetic oligonucleotide"
  source: /note="RNA"
  source: /note="5' tri-ethylene glycol (TEG)"
  modified_base (1)..(1): 5-methyl bicyclic nucleic acid
  modified_base (2)..(2): 5-methyl modified nucleotide
  modified_base (5)..(5): 5-methyl modified nucleotide
  modified_base (8)..(8): 5-methyl modified nucleotide
  modified_base (20)..(20): 5-methyl modified nucleotide
  modified_base (25)..(25): 5-methyl modified nucleotide
  source: /note="3' tri-ethylene glycol (TEG)"
ccaacaucaaggaagauggcauuucua

SEQ ID NO: 14174 - RNA, 26 nt, Artificial Sequence
  source: /note="Description of Artificial Sequence: Synthetic oligonucleotide"
  source: /note="RNA"
  source: /note="5' tri-ethylene glycol (TEG)"
  modified_base (1)..(1): 5-methyl bicyclic nucleic acid
  modified_base (2)..(2): 5-methyl modified nucleotide
  modified_base (5)..(5): 5-methyl modified nucleotide
  modified_base (8)..(8): 5-methyl modified nucleotide
  modified_base (20)..(20): 5-methyl modified nucleotide
  modified_base (25)..(25): 5-methyl modified nucleotide
  source: /note="3' tri-ethylene glycol (TEG)"
ccaacaucaaggaagauggcauuucu

SEQ ID NO: 14175 - RNA, 25 nt, Artificial Sequence
  source: /note="Description of Artificial Sequence: Synthetic oligonucleotide"
  source: /note="RNA"
  source: /note="5' tri-ethylene glycol (TEG)"
  modified_base (1)..(1): 5-methyl bicyclic nucleic acid
  modified_base (2)..(2): 5-methyl modified nucleotide
  modified_base (5)..(5): 5-methyl modified nucleotide
  modified_base (8)..(8): 5-methyl modified nucleotide
  modified_base (20)..(20): 5-methyl modified nucleotide
  modified_base (25)..(25): 5-methyl modified nucleotide
  source: /note="3' tri-ethylene glycol (TEG)"
ccaacaucaaggaagauggcauuuc

SEQ ID NO: 14176 - RNA, 24 nt, Artificial Sequence
  source: /note="Description of Artificial Sequence: Synthetic oligonucleotide"
  source: /note="RNA"
  source: /note="5' tri-ethylene glycol (TEG)"
  modified_base (1)..(1): 5-methyl bicyclic nucleic acid
  modified_base (2)..(2): 5-methyl modified nucleotide
  modified_base (5)..(5): 5-methyl modified nucleotide
  modified_base (8)..(8): 5-methyl modified nucleotide
  modified_base (20)..(20): 5-methyl modified nucleotide
  source: /note="3' tri-ethylene glycol (TEG)"
ccaacaucaaggaagauggcauuu

SEQ ID NO: 14177 - RNA, 23 nt, Artificial Sequence
  source: /note="Description of Artificial Sequence: Synthetic oligonucleotide"
  source: /note="RNA"
  source: /note="5' tri-ethylene glycol (TEG)"
  modified_base (1)..(1): 5-methyl bicyclic nucleic acid
  modified_base (2)..(2): 5-methyl modified nucleotide
  modified_base (5)..(5): 5-methyl modified nucleotide
  modified_base (8)..(8): 5-methyl modified nucleotide
  modified_base (20)..(20): 5-methyl modified nucleotide
  source: /note="3' tri-ethylene glycol (TEG)"
ccaacaucaaggaagauggcauu

SEQ ID NO: 14178 - RNA, 22 nt, Artificial Sequence
  source: /note="Description of Artificial Sequence: Synthetic oligonucleotide"
  source: /note="RNA"
  source: /note="5' tri-ethylene glycol (TEG)"
  modified_base (1)..(1): 5-methyl bicyclic nucleic acid
  modified_base (2)..(2): 5-methyl modified nucleotide
  modified_base (5)..(5): 5-methyl modified nucleotide
  modified_base (8)..(8): 5-methyl modified nucleotide
  modified_base (20)..(20): 5-methyl modified nucleotide
  source: /note="3' tri-ethylene glycol (TEG)"
ccaacaucaaggaagauggcau

SEQ ID NO: 14179 - RNA, 21 nt, Artificial Sequence
  source: /note="Description of Artificial Sequence: Synthetic oligonucleotide"
  source: /note="RNA"
  source: /note="5' tri-ethylene glycol (TEG)"
  modified_base (1)..(1): 5-methyl bicyclic nucleic acid
  modified_base (2)..(2): 5-methyl modified nucleotide
  modified_base (5)..(5): 5-methyl modified nucleotide
  modified_base (8)..(8): 5-methyl modified nucleotide
  modified_base (20)..(20): 5-methyl modified nucleotide
  source: /note="3' tri-ethylene glycol (TEG)"
ccaacaucaaggaagauggca

SEQ ID NO: 14180 - RNA, 20 nt, Artificial Sequence
  source: /note="Description of Artificial Sequence: Synthetic oligonucleotide"
  source: /note="RNA"
  source: /note="5' tri-ethylene glycol (TEG)"
  modified_base (1)..(1): 5-methyl bicyclic nucleic acid
  modified_base (2)..(2): 5-methyl modified nucleotide
  modified_base (5)..(5): 5-methyl modified nucleotide
  modified_base (8)..(8): 5-methyl modified nucleotide
  modified_base (20)..(20): 5-methyl modified nucleotide
  source: /note="3' tri-ethylene glycol (TEG)"
ccaacaucaaggaagauggc

SEQ ID NO: 14181 - RNA, 19 nt, Artificial Sequence
  source: /note="Description of Artificial Sequence: Synthetic oligonucleotide"
  source: /note="RNA"
  source: /note="5' tri-ethylene glycol (TEG)"
  modified_base (1)..(1): 5-methyl bicyclic nucleic acid
  modified_base (2)..(2): 5-methyl modified nucleotide
  modified_base (5)..(5): 5-methyl modified nucleotide
  modified_base (8)..(8): 5-methyl modified nucleotide
  source: /note="3' tri-ethylene glycol (TEG)"
ccaacaucaaggaagaugg

SEQ ID NO: 14182 - RNA, 18 nt, Artificial Sequence
  source: /note="Description of Artificial Sequence: Synthetic oligonucleotide"
  source: /note="RNA"
  source: /note="5' tri-ethylene glycol (TEG)"
  modified_base (1)..(1): 5-methyl bicyclic nucleic acid
  modified_base (2)..(2): 5-methyl modified nucleotide
  modified_base (5)..(5): 5-methyl modified nucleotide
  modified_base (8)..(8): 5-methyl modified nucleotide
  source: /note="3' tri-ethylene glycol (TEG)"
ccaacaucaaggaagaug

SEQ ID NO: 14183 - RNA, 17 nt, Artificial Sequence
  source: /note="Description of Artificial Sequence: Synthetic oligonucleotide"
  source: /note="RNA"
  source: /note="5' tri-ethylene glycol (TEG)"
  modified_base (1)..(1): 5-methyl bicyclic nucleic acid
  modified_base (2)..(2): 5-methyl modified nucleotide
  modified_base (5)..(5): 5-methyl modified nucleotide
  modified_base (8)..(8): 5-methyl modified nucleotide
  source: /note="3' tri-ethylene glycol (TEG)"
ccaacaucaaggaagau

SEQ ID NO: 14184 - RNA, 16 nt, Artificial Sequence
  source: /note="Description of Artificial Sequence: Synthetic oligonucleotide"
  source: /note="RNA"
  source: /note="5' tri-ethylene glycol (TEG)"
  modified_base (1)..(1): 5-methyl bicyclic nucleic acid
  modified_base (2)..(2): 5-methyl modified nucleotide
  modified_base (5)..(5): 5-methyl modified nucleotide
  modified_base (8)..(8): 5-methyl modified nucleotide
  source: /note="3' tri-ethylene glycol (TEG)"
ccaacaucaaggaaga

SEQ ID NO: 14185 - RNA, 15 nt, Artificial Sequence
  source: /note="Description of Artificial Sequence: Synthetic oligonucleotide"
  source: /note="RNA"
  source: /note="5' tri-ethylene glycol (TEG)"
  modified_base (1)..(1): 5-methyl bicyclic nucleic acid
  modified_base (2)..(2): 5-methyl modified nucleotide
  modified_base (5)..(5): 5-methyl modified nucleotide
  modified_base (8)..(8): 5-methyl modified nucleotide
  source: /note="3' tri-ethylene glycol (TEG)"
ccaacaucaaggaag

SEQ ID NO: 14186 - RNA, 27 nt, Artificial Sequence
  source: /note="Description of Artificial Sequence: Synthetic oligonucleotide"
  source: /note="RNA"
  source: /note="5' tri-ethylene glycol (TEG)"
  modified_base (1)..(1): 5-methyl bicyclic nucleic acid
  modified_base (4)..(4): 5-methyl modified nucleotide
  modified_base (7)..(7): 5-methyl modified nucleotide
  modified_base (19)..(19): 5-methyl modified nucleotide
  modified_base (24)..(24): 5-methyl modified nucleotide
  source: /note="3' tri-ethylene glycol (TEG)"
caacaucaaggaagauggcauuucuag

SEQ ID NO: 14187 - RNA, 26 nt, Artificial Sequence
  source: /note="Description of Artificial Sequence: Synthetic oligonucleotide"
  source: /note="RNA"
  source: /note="5' tri-ethylene glycol (TEG)"
  modified_base (1)..(1): 5-methyl bicyclic nucleic acid
  modified_base (4)..(4): 5-methyl modified nucleotide
  modified_base (7)..(7): 5-methyl modified nucleotide
  modified_base (19)..(19): 5-methyl modified nucleotide
  modified_base (24)..(24): 5-methyl modified nucleotide
  source: /note="3' tri-ethylene glycol (TEG)"
caacaucaaggaagauggcauuucua

SEQ ID NO: 14188 - RNA, 25 nt, Artificial Sequence
  source: /note="Description of Artificial Sequence: Synthetic oligonucleotide"
  source: /note="RNA"
  source: /note="5' tri-ethylene glycol (TEG)"
  modified_base (1)..(1): 5-methyl bicyclic nucleic acid
  modified_base (4)..(4): 5-methyl modified nucleotide
  modified_base (7)..(7): 5-methyl modified nucleotide
  modified_base (19)..(19): 5-methyl modified nucleotide
  modified_base (24)..(24): 5-methyl modified nucleotide
  source: /note="3' tri-ethylene glycol (TEG)"
caacaucaaggaagauggcauuucu

SEQ ID NO: 14189 - RNA, 24 nt, Artificial Sequence
  source: /note="Description of Artificial Sequence: Synthetic oligonucleotide"
  source: /note="RNA"
  source: /note="5' tri-ethylene glycol (TEG)"
  modified_base (1)..(1): 5-methyl bicyclic nucleic acid
  modified_base (4)..(4): 5-methyl modified nucleotide
  modified_base (7)..(7): 5-methyl modified nucleotide
  modified_base (19)..(19): 5-methyl modified nucleotide
  modified_base (24)..(24): 5-methyl modified nucleotide
  source: /note="3' tri-ethylene glycol (TEG)"
caacaucaaggaagauggcauuuc

SEQ ID NO: 14190 - RNA, 23 nt, Artificial Sequence
  source: /note="Description of Artificial Sequence: Synthetic oligonucleotide"
  source: /note="RNA"
  source: /note="5' tri-ethylene glycol (TEG)"
  modified_base (1)..(1): 5-methyl bicyclic nucleic acid
  modified_base (4)..(4): 5-methyl modified nucleotide
  modified_base (7)..(7): 5-methyl modified nucleotide
  modified_base (19)..(19): 5-methyl modified nucleotide
  source: /note="3' tri-ethylene glycol (TEG)"
caacaucaaggaagauggcauuu

SEQ ID NO: 14191 - RNA, 22 nt, Artificial Sequence
  source: /note="Description of Artificial Sequence: Synthetic oligonucleotide"
  source: /note="RNA"
  source: /note="5' tri-ethylene glycol (TEG)"
  modified_base (1)..(1): 5-methyl bicyclic nucleic acid
  modified_base (4)..(4): 5-methyl modified nucleotide
  modified_base (7)..(7): 5-methyl modified nucleotide
  modified_base (19)..(19): 5-methyl modified nucleotide
  source: /note="3' tri-ethylene glycol (TEG)"
caacaucaaggaagauggcauu

SEQ ID NO: 14192 - RNA, 21 nt, Artificial Sequence
  source: /note="Description of Artificial Sequence: Synthetic oligonucleotide"
  source: /note="RNA"
  source: /note="5' tri-ethylene glycol (TEG)"
  modified_base (1)..(1): 5-methyl bicyclic nucleic acid
  modified_base (4)..(4): 5-methyl modified nucleotide
  modified_base (7)..(7): 5-methyl modified nucleotide
  modified_base (19)..(19): 5-methyl modified nucleotide
  source: /note="3' tri-ethylene glycol (TEG)"
caacaucaaggaagauggcau

SEQ ID NO: 14193 - RNA, 20 nt, Artificial Sequence
  source: /note="Description of Artificial Sequence: Synthetic oligonucleotide"
  source: /note="RNA"
  source: /note="5' tri-ethylene glycol (TEG)"
  modified_base (1)..(1): 5-methyl bicyclic nucleic acid
  modified_base (4)..(4): 5-methyl modified nucleotide
  modified_base (7)..(7): 5-methyl modified nucleotide
  modified_base (19)..(19): 5-methyl modified nucleotide
  source: /note="3' tri-ethylene glycol (TEG)"
caacaucaaggaagauggca

SEQ ID NO: 14194 - RNA, 19 nt, Artificial Sequence
  source: /note="Description of Artificial Sequence: Synthetic oligonucleotide"
  source: /note="RNA"
  source: /note="5' tri-ethylene glycol (TEG)"
  modified_base (1)..(1): 5-methyl bicyclic nucleic acid
  modified_base (4)..(4): 5-methyl modified nucleotide
  modified_base (7)..(7): 5-methyl modified nucleotide
  modified_base (19)..(19): 5-methyl modified nucleotide
  source: /note="3' tri-ethylene glycol (TEG)"
caacaucaaggaagauggc

SEQ ID NO: 14195 - RNA, 18 nt, Artificial Sequence
  source: /note="Description of Artificial Sequence: Synthetic oligonucleotide"
  source: /note="RNA"
  source: /note="5' tri-ethylene glycol (TEG)"
  modified_base (1)..(1): 5-methyl bicyclic nucleic acid
  modified_base (4)..(4): 5-methyl modified nucleotide
  modified_base (7)..(7): 5-methyl modified nucleotide
  source: /note="3' tri-ethylene glycol (TEG)"
caacaucaaggaagaugg

SEQ ID NO: 14196 - RNA, 17 nt, Artificial Sequence
  source: /note="Description of Artificial Sequence: Synthetic oligonucleotide"
  source: /note="RNA"
  source: /note="5' tri-ethylene glycol (TEG)"
  modified_base (1)..(1): 5-methyl bicyclic nucleic acid
  modified_base (4)..(4): 5-methyl modified nucleotide
  modified_base (7)..(7): 5-methyl modified nucleotide
  source: /note="3' tri-ethylene glycol (TEG)"
caacaucaaggaagaug

SEQ ID NO: 14197 - RNA, 16 nt, Artificial Sequence
  source: /note="Description of Artificial Sequence: Synthetic oligonucleotide"
  source: /note="RNA"
  source: /note="5' tri-ethylene glycol (TEG)"
  modified_base (1)..(1): 5-methyl bicyclic nucleic acid
  modified_base (4)..(4): 5-methyl modified nucleotide
  modified_base (7)..(7): 5-methyl modified nucleotide
  source: /note="3' tri-ethylene glycol (TEG)"
caacaucaaggaagau

SEQ ID NO: 14198 - RNA, 15 nt, Artificial Sequence
  source: /note="Description of Artificial Sequence: Synthetic oligonucleotide"
  source: /note="RNA"
  source: /note="5' tri-ethylene glycol (TEG)"
  modified_base (1)..(1): 5-methyl bicyclic nucleic acid
  modified_base (4)..(4): 5-methyl modified nucleotide
  modified_base (7)..(7): 5-methyl modified nucleotide
  source: /note="3' tri-ethylene glycol (TEG)"
caacaucaaggaaga

SEQ ID NO: 14199 - RNA, 14 nt, Artificial Sequence
  source: /note="Description of Artificial Sequence: Synthetic oligonucleotide"
  source: /note="RNA"
  source: /note="5' tri-ethylene glycol (TEG)"
  modified_base (1)..(1): 5-methyl bicyclic nucleic acid
  modified_base (4)..(4): 5-methyl modified nucleotide
  modified_base (7)..(7): 5-methyl modified nucleotide
  source: /note="3' tri-ethylene glycol (TEG)"
caacaucaaggaag

SEQ ID NO: 14200 - RNA, 26 nt, Artificial Sequence
  source: /note="Description of Artificial Sequence: Synthetic oligonucleotide"
  source: /note="RNA"
  source: /note="5' tri-ethylene glycol (TEG)"
  modified_base (1)..(1): bicyclic nucleic acid (BNA)
  modified_base (3)..(3): 5-methyl modified nucleotide
  modified_base (6)..(6): 5-methyl modified nucleotide
  modified_base (18)..(18): 5-methyl modified nucleotide
  modified_base (23)..(23): 5-methyl modified nucleotide
  source: /note="3' tri-ethylene glycol (TEG)"
aacaucaaggaagauggcauuucuag

SEQ ID NO: 14201 - RNA, 25 nt, Artificial Sequence
  source: /note="Description of Artificial Sequence: Synthetic oligonucleotide"
  source: /note="RNA"
  source: /note="5' tri-ethylene glycol (TEG)"
  modified_base (1)..(1): bicyclic nucleic acid (BNA)
  modified_base (3)..(3): 5-methyl modified nucleotide
  modified_base (6)..(6): 5-methyl modified nucleotide
  modified_base (18)..(18): 5-methyl modified nucleotide
  modified_base (23)..(23): 5-methyl modified nucleotide
  source: /note="3' tri-ethylene glycol (TEG)"
aacaucaaggaagauggcauuucua

SEQ ID NO: 14202 - RNA, 24 nt, Artificial Sequence
  source: /note="Description of Artificial Sequence: Synthetic oligonucleotide"
  source: /note="RNA"
  source: /note="5' tri-ethylene glycol (TEG)"
  modified_base (1)..(1): bicyclic nucleic acid (BNA)
  modified_base (3)..(3): 5-methyl modified nucleotide
  modified_base (6)..(6): 5-methyl modified nucleotide
  modified_base (18)..(18): 5-methyl modified nucleotide
  modified_base (23)..(23): 5-methyl modified nucleotide
  source: /note="3' tri-ethylene glycol (TEG)"
aacaucaaggaagauggcauuucu

SEQ ID NO: 14203 - RNA, 23 nt, Artificial Sequence
  source: /note="Description of Artificial Sequence: Synthetic oligonucleotide"
  source: /note="RNA"
  source: /note="5' tri-ethylene glycol (TEG)"
  modified_base (1)..(1): bicyclic nucleic acid (BNA)
  modified_base (3)..(3): 5-methyl modified nucleotide
  modified_base (6)..(6): 5-methyl modified nucleotide
  modified_base (18)..(18): 5-methyl modified nucleotide
  modified_base (23)..(23): 5-methyl modified nucleotide
  source: /note="3' tri-ethylene glycol (TEG)"
aacaucaaggaagauggcauuuc

SEQ ID NO: 14204 - RNA, 22 nt, Artificial Sequence
  source: /note="Description of Artificial Sequence: Synthetic oligonucleotide"
  source: /note="RNA"
  source: /note="5' tri-ethylene glycol (TEG)"
  modified_base (1)..(1): bicyclic nucleic acid (BNA)
  modified_base (3)..(3): 5-methyl modified nucleotide
  modified_base (6)..(6): 5-methyl modified nucleotide
  modified_base (18)..(18): 5-methyl modified nucleotide
  source: /note="3' tri-ethylene glycol (TEG)"
aacaucaaggaagauggcauuu

SEQ ID NO: 14205 - RNA, 21 nt, Artificial Sequence
  source: /note="Description of Artificial Sequence: Synthetic oligonucleotide"
  source: /note="RNA"
  source: /note="5' tri-ethylene glycol (TEG)"
  modified_base (1)..(1): bicyclic nucleic acid (BNA)
  modified_base (3)..(3): 5-methyl modified nucleotide
  modified_base (6)..(6): 5-methyl modified nucleotide
  modified_base (18)..(18): 5-methyl modified nucleotide
  source: /note="3' tri-ethylene glycol (TEG)"
aacaucaaggaagauggcauu

SEQ ID NO: 14206 - RNA, 20 nt, Artificial Sequence
  source: /note="Description of Artificial Sequence: Synthetic oligonucleotide"
  source: /note="RNA"
  source: /note="5' tri-ethylene glycol (TEG)"
  modified_base (1)..(1): bicyclic nucleic acid (BNA)
  modified_base (3)..(3): 5-methyl modified nucleotide
  modified_base (6)..(6): 5-methyl modified nucleotide
  modified_base (18)..(18): 5-methyl modified nucleotide
  source: /note="3' tri-ethylene glycol (TEG)"
aacaucaaggaagauggcau

SEQ ID NO: 14207 - RNA, 19 nt, Artificial Sequence
  source: /note="Description of Artificial Sequence: Synthetic oligonucleotide"
  source: /note="RNA"
  source: /note="5' tri-ethylene glycol (TEG)"
  modified_base (1)..(1): bicyclic nucleic acid (BNA)
  modified_base (3)..(3): 5-methyl modified nucleotide
  modified_base (6)..(6): 5-methyl modified nucleotide
  modified_base (18)..(18): 5-methyl modified nucleotide
  source: /note="3' tri-ethylene glycol (TEG)"
aacaucaaggaagauggca

SEQ ID NO: 14208 - RNA, 18 nt, Artificial Sequence
  source: /note="Description of Artificial Sequence: Synthetic oligonucleotide"
  source: /note="RNA"
  source: /note="5' tri-ethylene glycol (TEG)"
  modified_base (1)..(1): bicyclic nucleic acid (BNA)
  modified_base (3)..(3): 5-methyl modified nucleotide
  modified_base (6)..(6): 5-methyl modified nucleotide
  modified_base (18)..(18): 5-methyl modified nucleotide
  source: /note="3' tri-ethylene glycol (TEG)"
aacaucaaggaagauggc

SEQ ID NO: 14209 - RNA, 17 nt, Artificial Sequence
  source: /note="Description of Artificial Sequence: Synthetic oligonucleotide"
  source: /note="RNA"
  source: /note="5' tri-ethylene glycol (TEG)"
  modified_base (1)..(1): bicyclic nucleic acid (BNA)
  modified_base (3)..(3): 5-methyl modified nucleotide
  modified_base (6)..(6): 5-methyl modified nucleotide
  source: /note="3' tri-ethylene glycol (TEG)"
aacaucaaggaagaugg

SEQ ID NO: 14210 - RNA, 16 nt, Artificial Sequence
  source: /note="Description of Artificial Sequence: Synthetic oligonucleotide"
  source: /note="RNA"
  source: /note="5' tri-ethylene glycol (TEG)"
  modified_base (1)..(1): bicyclic nucleic acid (BNA)
  modified_base (3)..(3): 5-methyl modified nucleotide
  modified_base (6)..(6): 5-methyl modified nucleotide
  source: /note="3' tri-ethylene glycol (TEG)"
aacaucaaggaagaug

SEQ ID NO: 14211 - RNA, 15 nt, Artificial Sequence
  source: /note="Description of Artificial Sequence: Synthetic oligonucleotide"
  source: /note="RNA"
  source: /note="5' tri-ethylene glycol (TEG)"
  modified_base (1)..(1): bicyclic nucleic acid (BNA)
  modified_base (3)..(3): 5-methyl modified nucleotide
  modified_base (6)..(6): 5-methyl modified nucleotide
  source: /note="3' tri-ethylene glycol (TEG)"
aacaucaaggaagau

SEQ ID NO: 14212 - RNA, 14 nt, Artificial Sequence
  source: /note="Description of Artificial Sequence: Synthetic oligonucleotide"
  source: /note="RNA"
  source: /note="5' tri-ethylene glycol (TEG)"
  modified_base (1)..(1): bicyclic nucleic acid (BNA)
  modified_base (3)..(3): 5-methyl modified nucleotide
  modified_base (6)..(6): 5-methyl modified nucleotide
  source: /note="3' tri-ethylene glycol (TEG)"
aacaucaaggaaga

SEQ ID NO: 14213 - RNA, 13 nt, Artificial Sequence
  source: /note="Description of Artificial Sequence: Synthetic oligonucleotide"
  source: /note="RNA"
  source: /note="5' tri-ethylene glycol (TEG)"
  modified_base (1)..(1): bicyclic nucleic acid (BNA)
  modified_base (3)..(3): 5-methyl modified nucleotide
  modified_base (6)..(6): 5-methyl modified nucleotide
  source: /note="3' tri-ethylene glycol (TEG)"
aacaucaaggaag

SEQ ID NO: 14214 - RNA, 25 nt, Artificial Sequence
  source: /note="Description of Artificial Sequence: Synthetic oligonucleotide"
  source: /note="RNA"
  source: /note="5' tri-ethylene glycol (TEG)"
  modified_base (1)..(1): bicyclic nucleic acid (BNA)
  modified_base (2)..(2): 5-methyl modified nucleotide
  modified_base (5)..(5): 5-methyl modified nucleotide
  modified_base (17)..(17): 5-methyl modified nucleotide
  modified_base (22)..(22): 5-methyl modified nucleotide
  source: /note="3' tri-ethylene glycol (TEG)"
acaucaaggaagauggcauuucuag

SEQ ID NO: 14215 - RNA, 24 nt, Artificial Sequence
  source: /note="Description of Artificial Sequence: Synthetic oligonucleotide"
  source: /note="RNA"
  source: /note="5' tri-ethylene glycol (TEG)"
  modified_base (1)..(1): bicyclic nucleic acid (BNA)
  modified_base (2)..(2): 5-methyl modified nucleotide
  modified_base (5)..(5): 5-methyl modified nucleotide
  modified_base (17)..(17): 5-methyl modified nucleotide
  modified_base (22)..(22): 5-methyl modified nucleotide
  source: /note="3' tri-ethylene glycol (TEG)"
acaucaaggaagauggcauuucua

SEQ ID NO: 14216 - RNA, 23 nt, Artificial Sequence
  source: /note="Description of Artificial Sequence: Synthetic oligonucleotide"
  source: /note="RNA"
  source: /note="5' tri-ethylene glycol (TEG)"
  modified_base (1)..(1): bicyclic nucleic acid (BNA)
  modified_base (2)..(2): 5-methyl modified nucleotide
  modified_base (5)..(5): 5-methyl modified nucleotide
  modified_base (17)..(17): 5-methyl modified nucleotide
  modified_base (22)..(22): 5-methyl modified nucleotide
  source: /note="3' tri-ethylene glycol (TEG)"
acaucaaggaagauggcauuucu

SEQ ID NO: 14217 - RNA, 22 nt, Artificial Sequence
  source: /note="Description of Artificial Sequence: Synthetic oligonucleotide"
  source: /note="RNA"
  source: /note="5' tri-ethylene glycol (TEG)"
  modified_base (1)..(1): bicyclic nucleic acid (BNA)
  modified_base (2)..(2): 5-methyl modified nucleotide
  modified_base (5)..(5): 5-methyl modified nucleotide
  modified_base (17)..(17): 5-methyl modified nucleotide
  modified_base (22)..(22): 5-methyl modified nucleotide
  source: /note="3' tri-ethylene glycol (TEG)"
acaucaaggaagauggcauuuc

SEQ ID NO: 14218 - RNA, 21 nt, Artificial Sequence
  source: /note="Description of Artificial Sequence: Synthetic oligonucleotide"
  source: /note="RNA"
  source: /note="5' tri-ethylene glycol (TEG)"
  modified_base (1)..(1): bicyclic nucleic acid (BNA)
  modified_base (2)..(2): 5-methyl modified nucleotide
  modified_base (5)..(5): 5-methyl modified nucleotide
  modified_base (17)..(17): 5-methyl modified nucleotide
  source: /note="3' tri-ethylene glycol (TEG)"
acaucaaggaagauggcauuu

SEQ ID NO: 14219 - RNA, 20 nt, Artificial Sequence
  source: /note="Description of Artificial Sequence: Synthetic oligonucleotide"
  source: /note="RNA"
  source: /note="5' tri-ethylene glycol (TEG)"
  modified_base (1)..(1): bicyclic nucleic acid (BNA)
  modified_base (2)..(2): 5-methyl modified nucleotide
  modified_base (5)..(5): 5-methyl modified nucleotide
  modified_base (17)..(17): 5-methyl modified nucleotide
  source: /note="3' tri-ethylene glycol (TEG)"
acaucaaggaagauggcauu

SEQ ID NO: 14220 - RNA, 19 nt, Artificial Sequence
  source: /note="Description of Artificial Sequence: Synthetic oligonucleotide"
  source: /note="RNA"
  source: /note="5' tri-ethylene glycol (TEG)"
  modified_base (1)..(1): bicyclic nucleic acid (BNA)
  modified_base (2)..(2): 5-methyl modified nucleotide
  modified_base (5)..(5): 5-methyl modified nucleotide
  modified_base (17)..(17): 5-methyl modified nucleotide
  source: /note="3' tri-ethylene glycol (TEG)"
acaucaaggaagauggcau

SEQ ID NO: 14221 - RNA, 18 nt, Artificial Sequence
  source: /note="Description of Artificial Sequence: Synthetic oligonucleotide"
  source: /note="RNA"
  source: /note="5' tri-ethylene glycol (TEG)"
  modified_base (1)..(1): bicyclic nucleic acid (BNA)
  modified_base (2)..(2): 5-methyl modified nucleotide
  modified_base (5)..(5): 5-methyl modified nucleotide
  modified_base (17)..(17): 5-methyl modified nucleotide
  source: /note="3' tri-ethylene glycol (TEG)"
acaucaaggaagauggca

SEQ ID NO: 14222 - RNA, 17 nt, Artificial Sequence
  source: /note="Description of Artificial Sequence: Synthetic oligonucleotide"
  source: /note="RNA"
  source: /note="5' tri-ethylene glycol (TEG)"
  modified_base (1)..(1): bicyclic nucleic acid (BNA)
  modified_base (2)..(2): 5-methyl modified nucleotide
  modified_base (5)..(5): 5-methyl modified nucleotide
  modified_base (17)..(17): 5-methyl modified nucleotide
  source: /note="3' tri-ethylene glycol (TEG)"
acaucaaggaagauggc

SEQ ID NO: 14223 - RNA, 16 nt, Artificial Sequence
  source: /note="Description of Artificial Sequence: Synthetic oligonucleotide"
  source: /note="RNA"
  source: /note="5' tri-ethylene glycol (TEG)"
  modified_base (1)..(1): bicyclic nucleic acid (BNA)
  modified_base (2)..(2): 5-methyl modified nucleotide
  modified_base (5)..(5): 5-methyl modified nucleotide
  source: /note="3' tri-ethylene glycol (TEG)"
acaucaaggaagaugg

SEQ ID NO: 14224 - RNA, 15 nt, Artificial Sequence
  source: /note="Description of Artificial Sequence: Synthetic oligonucleotide"
  source: /note="RNA"
  source: /note="5' tri-ethylene glycol (TEG)"
  modified_base (1)..(1): bicyclic nucleic acid (BNA)
  modified_base (2)..(2): 5-methyl modified nucleotide
  modified_base (5)..(5): 5-methyl modified nucleotide
  source: /note="3' tri-ethylene glycol (TEG)"
acaucaaggaagaug

SEQ ID NO: 14225 - RNA, 14 nt, Artificial Sequence
  source: /note="Description of Artificial Sequence: Synthetic oligonucleotide"
  source: /note="RNA"
  source: /note="5' tri-ethylene glycol (TEG)"
  modified_base (1)..(1): bicyclic nucleic acid (BNA)
  modified_base (2)..(2): 5-methyl modified nucleotide
  modified_base (5)..(5): 5-methyl modified nucleotide
  source: /note="3' tri-ethylene glycol (TEG)"
acaucaaggaagau

SEQ ID NO: 14226 - RNA, 13 nt, Artificial Sequence
  source: /note="Description of Artificial Sequence: Synthetic oligonucleotide"
  source: /note="RNA"
  source: /note="5' tri-ethylene glycol (TEG)"
  modified_base (1)..(1): bicyclic nucleic acid (BNA)
  modified_base (2)..(2): 5-methyl modified nucleotide
  modified_base (5)..(5): 5-methyl modified nucleotide
  source: /note="3' tri-ethylene glycol (TEG)"
acaucaaggaaga

SEQ ID NO: 14227 - RNA, 12 nt, Artificial Sequence
  source: /note="Description of Artificial Sequence: Synthetic oligonucleotide"
  source: /note="RNA"
  source: /note="5' tri-ethylene glycol (TEG)"
  modified_base (1)..(1): bicyclic nucleic acid (BNA)
  modified_base (2)..(2): 5-methyl modified nucleotide
  modified_base (5)..(5): 5-methyl modified nucleotide
  source: /note="3' tri-ethylene glycol (TEG)"
acaucaaggaag

SEQ ID NO: 14228 - RNA, 24 nt, Artificial Sequence
  source: /note="Description of Artificial Sequence: Synthetic oligonucleotide"
  source: /note="RNA"
  source: /note="5' tri-ethylene glycol (TEG)"
  modified_base (1)..(1): 5-methyl bicyclic nucleic acid
  modified_base (4)..(4): 5-methyl modified nucleotide
  modified_base (16)..(16): 5-methyl modified nucleotide
  modified_base (21)..(21): 5-methyl modified nucleotide
  source: /note="3' tri-ethylene glycol (TEG)"
caucaaggaagauggcauuucuag

SEQ ID NO: 14229 - RNA, 23 nt, Artificial Sequence
  source: /note="Description of Artificial Sequence: Synthetic oligonucleotide"
  source: /note="RNA"
  source: /note="5' tri-ethylene glycol (TEG)"
  modified_base (1)..(1): 5-methyl bicyclic nucleic acid
  modified_base (4)..(4): 5-methyl modified nucleotide
  modified_base (16)..(16): 5-methyl modified nucleotide
  modified_base (21)..(21): 5-methyl modified nucleotide
  source: /note="3' tri-ethylene glycol (TEG)"
caucaaggaagauggcauuucua

SEQ ID NO: 14230 - RNA, 22 nt, Artificial Sequence
  source: /note="Description of Artificial Sequence: Synthetic oligonucleotide"
  source: /note="RNA"
  source: /note="5' tri-ethylene glycol (TEG)"
  modified_base (1)..(1): 5-methyl bicyclic nucleic acid
  modified_base (4)..(4): 5-methyl modified nucleotide
  modified_base (16)..(16): 5-methyl modified nucleotide
  modified_base (21)..(21): 5-methyl modified nucleotide
  source: /note="3' tri-ethylene glycol (TEG)"
caucaaggaagauggcauuucu

SEQ ID NO: 14231 - RNA, 21 nt, Artificial Sequence
  source: /note="Description of Artificial Sequence: Synthetic oligonucleotide"
  source: /note="RNA"
  source: /note="5' tri-ethylene glycol (TEG)"
  modified_base (1)..(1): 5-methyl bicyclic nucleic acid
  modified_base (4)..(4): 5-methyl modified nucleotide
  modified_base (16)..(16): 5-methyl modified nucleotide
  modified_base (21)..(21): 5-methyl modified nucleotide
  source: /note="3' tri-ethylene glycol (TEG)"
caucaaggaagauggcauuuc

SEQ ID NO: 14232 - RNA, 20 nt, Artificial Sequence
  source: /note="Description of Artificial Sequence: Synthetic oligonucleotide"
  source: /note="RNA"
  source: /note="5' tri-ethylene glycol (TEG)"
  modified_base (1)..(1): 5-methyl bicyclic nucleic acid
  modified_base (4)..(4): 5-methyl modified nucleotide
  modified_base (16)..(16): 5-methyl modified nucleotide
  source: /note="3' tri-ethylene glycol (TEG)"
caucaaggaagauggcauuu

SEQ ID NO: 14233 - RNA, 19 nt, Artificial Sequence
  source: /note="Description of Artificial Sequence: Synthetic oligonucleotide"
  source: /note="RNA"
  source: /note="5' tri-ethylene glycol (TEG)"
  modified_base (1)..(1): 5-methyl bicyclic nucleic acid
  modified_base (4)..(4): 5-methyl modified nucleotide
  modified_base (16)..(16): 5-methyl modified nucleotide
  source: /note="3' tri-ethylene glycol (TEG)"
caucaaggaagauggcauu

SEQ ID NO: 14234 - RNA, 18 nt, Artificial Sequence
  source: /note="Description of Artificial Sequence: Synthetic oligonucleotide"
  source: /note="RNA"
  source: /note="5' tri-ethylene glycol (TEG)"
  modified_base (1)..(1): 5-methyl bicyclic nucleic acid
  modified_base (4)..(4): 5-methyl modified nucleotide
  modified_base (16)..(16): 5-methyl modified nucleotide
  source: /note="3' tri-ethylene glycol (TEG)"
caucaaggaagauggcau

SEQ ID NO: 14235 - RNA, 17 nt, Artificial Sequence
  source: /note="Description of Artificial Sequence: Synthetic oligonucleotide"
  source: /note="RNA"
  source: /note="5' tri-ethylene glycol (TEG)"
  modified_base (1)..(1): 5-methyl bicyclic nucleic acid
  modified_base (4)..(4): 5-methyl modified nucleotide
  modified_base (16)..(16): 5-methyl modified nucleotide
  source: /note="3' tri-ethylene glycol (TEG)"
caucaaggaagauggca

SEQ ID NO: 14236 - RNA, 16 nt, Artificial Sequence
  source: /note="Description of Artificial Sequence: Synthetic oligonucleotide"
  source: /note="RNA"
  source: /note="5' tri-ethylene glycol (TEG)"
  modified_base (1)..(1): 5-methyl bicyclic nucleic acid
  modified_base (4)..(4): 5-methyl modified nucleotide
  modified_base (16)..(16): 5-methyl modified nucleotide
  source: /note="3' tri-ethylene glycol (TEG)"
caucaaggaagauggc

SEQ ID NO: 14237 - RNA, 15 nt, Artificial Sequence
  source: /note="Description of Artificial Sequence: Synthetic oligonucleotide"
  source: /note="RNA"
  source: /note="5' tri-ethylene glycol (TEG)"
  modified_base (1)..(1): 5-methyl bicyclic nucleic acid
  modified_base (4)..(4): 5-methyl modified nucleotide
  source: /note="3' tri-ethylene glycol (TEG)"
caucaaggaagaugg

SEQ ID NO: 14238 - RNA, 14 nt, Artificial Sequence
  source: /note="Description of Artificial Sequence: Synthetic oligonucleotide"
  source: /note="RNA"
  source: /note="5' tri-ethylene glycol (TEG)"
  modified_base (1)..(1): 5-methyl bicyclic nucleic acid
  modified_base (4)..(4): 5-methyl modified nucleotide
  source: /note="3' tri-ethylene glycol (TEG)"
caucaaggaagaug

SEQ ID NO: 14239 - RNA, 13 nt, Artificial Sequence
  source: /note="Description of Artificial Sequence: Synthetic oligonucleotide"
  source: /note="RNA"
  source: /note="5' tri-ethylene glycol (TEG)"
  modified_base (1)..(1): 5-methyl bicyclic nucleic acid
  modified_base (4)..(4): 5-methyl modified nucleotide
  source: /note="3' tri-ethylene glycol (TEG)"
caucaaggaagau

SEQ ID NO: 14240 - RNA, 12 nt, Artificial Sequence
  source: /note="Description of Artificial Sequence: Synthetic oligonucleotide"
  source: /note="RNA"
  source: /note="5' tri-ethylene glycol (TEG)"
  modified_base (1)..(1): 5-methyl bicyclic nucleic acid
  modified_base (4)..(4): 5-methyl modified nucleotide
  source: /note="3' tri-ethylene glycol (TEG)"
caucaaggaaga

SEQ ID NO: 14241 - RNA, 11 nt, Artificial Sequence
  source: /note="Description of Artificial Sequence: Synthetic oligonucleotide"
  source: /note="RNA"
  source: /note="5' tri-ethylene glycol (TEG)"
  modified_base (1)..(1): 5-methyl bicyclic nucleic acid
  modified_base (4)..(4): 5-methyl modified nucleotide
  source: /note="3' tri-ethylene glycol (TEG)"
caucaaggaag

SEQ ID NO: 14242 - RNA, 23 nt, Artificial Sequence
  source: /note="Description of Artificial Sequence: Synthetic oligonucleotide"
  source: /note="RNA"
  source: /note="5' tri-ethylene glycol (TEG)"
  modified_base (1)..(1): bicyclic nucleic acid (BNA)
  modified_base (3)..(3): 5-methyl modified nucleotide
  modified_base (15)..(15): 5-methyl modified nucleotide
  modified_base (20)..(20): 5-methyl modified nucleotide
  source: /note="3' tri-ethylene glycol (TEG)"
aucaaggaagauggcauuucuag

SEQ ID NO: 14243 - RNA, 22 nt, Artificial Sequence
  source: /note="Description of Artificial Sequence: Synthetic oligonucleotide"
  source: /note="RNA"
  source: /note="5' tri-ethylene glycol (TEG)"
  modified_base (1)..(1): bicyclic nucleic acid (BNA)
  modified_base (3)..(3): 5-methyl modified nucleotide
  modified_base (15)..(15): 5-methyl modified nucleotide
  modified_base (20)..(20): 5-methyl modified nucleotide
  source: /note="3' tri-ethylene glycol (TEG)"
aucaaggaagauggcauuucua

SEQ ID NO: 14244 - RNA, 21 nt, Artificial Sequence
  source: /note="Description of Artificial Sequence: Synthetic oligonucleotide"
  source: /note="RNA"
  source: /note="5' tri-ethylene glycol (TEG)"
  modified_base (1)..(1): bicyclic nucleic acid (BNA)
  modified_base (3)..(3): 5-methyl modified nucleotide
  modified_base (15)..(15): 5-methyl modified nucleotide
  modified_base (20)..(20): 5-methyl modified nucleotide
  source: /note="3' tri-ethylene glycol (TEG)"
aucaaggaagauggcauuucu

SEQ ID NO: 14245 - RNA, 20 nt, Artificial Sequence
  source: /note="Description of Artificial Sequence: Synthetic oligonucleotide"
  source: /note="RNA"
  source: /note="5' tri-ethylene glycol (TEG)"
  modified_base (1)..(1): bicyclic nucleic acid (BNA)
  modified_base (3)..(3): 5-methyl modified nucleotide
  modified_base (15)..(15): 5-methyl modified nucleotide
  modified_base (20)..(20): 5-methyl modified nucleotide
  source: /note="3' tri-ethylene glycol (TEG)"
aucaaggaagauggcauuuc

SEQ ID NO: 14246 - RNA, 19 nt, Artificial Sequence
  source: /note="Description of Artificial Sequence: Synthetic oligonucleotide"
  source: /note="RNA"
  source: /note="5' tri-ethylene glycol (TEG)"
  modified_base (1)..(1): bicyclic nucleic acid (BNA)
  modified_base (3)..(3): 5-methyl modified nucleotide
  modified_base (15)..(15): 5-methyl modified nucleotide
  source: /note="3' tri-ethylene glycol (TEG)"
aucaaggaagauggcauuu

SEQ ID NO: 14247 - RNA, 18 nt, Artificial Sequence
  source: /note="Description of Artificial Sequence: Synthetic oligonucleotide"
  source: /note="RNA"
  source: /note="5' tri-ethylene glycol (TEG)"
  modified_base (1)..(1): bicyclic nucleic acid (BNA)
  modified_base (3)..(3): 5-methyl modified nucleotide
  modified_base (15)..(15): 5-methyl modified nucleotide
  source: /note="3' tri-ethylene glycol (TEG)"
aucaaggaagauggcauu

SEQ ID NO: 14248 - RNA, 17 nt, Artificial Sequence
  source: /note="Description of Artificial Sequence: Synthetic oligonucleotide"
  source: /note="RNA"
  source: /note="5' tri-ethylene glycol (TEG)"
  modified_base (1)..(1): bicyclic nucleic acid (BNA)
  modified_base (3)..(3): 5-methyl modified nucleotide
  modified_base (15)..(15): 5-methyl modified nucleotide
  source: /note="3' tri-ethylene glycol (TEG)"
aucaaggaagauggcau

SEQ ID NO: 14249 - RNA, 16 nt, Artificial Sequence
  source: /note="Description of Artificial Sequence: Synthetic oligonucleotide"
  source: /note="RNA"
  source: /note="5' tri-ethylene glycol (TEG)"
  modified_base (1)..(1): bicyclic nucleic acid (BNA)
  modified_base (3)..(3): 5-methyl modified nucleotide
  modified_base (15)..(15): 5-methyl modified nucleotide
  source: /note="3' tri-ethylene glycol (TEG)"
aucaaggaagauggca

SEQ ID NO: 14250 - RNA, 15 nt, Artificial Sequence
  source: /note="Description of Artificial Sequence: Synthetic oligonucleotide"
  source: /note="RNA"
  source: /note="5' tri-ethylene glycol (TEG)"
  modified_base (1)..(1): bicyclic nucleic acid (BNA)
  modified_base (3)..(3): 5-methyl modified nucleotide
  modified_base (15)..(15): 5-methyl modified nucleotide
  source: /note="3' tri-ethylene glycol (TEG)"
aucaaggaagauggc

SEQ ID NO: 14251 - RNA, 14 nt, Artificial Sequence
  source: /note="Description of Artificial Sequence: Synthetic oligonucleotide"
  source: /note="RNA"
  source: /note="5' tri-ethylene glycol (TEG)"
  modified_base (1)..(1): bicyclic nucleic acid (BNA)
  modified_base (3)..(3): 5-methyl modified nucleotide
  source: /note="3' tri-ethylene glycol (TEG)"
aucaaggaagaugg

SEQ ID NO: 14252 - RNA, 13 nt, Artificial Sequence
  source: /note="Description of Artificial Sequence: Synthetic oligonucleotide"
  source: /note="RNA"
  source: /note="5' tri-ethylene glycol (TEG)"
  modified_base (1)..(1): bicyclic nucleic acid (BNA)
  modified_base (3)..(3): 5-methyl modified nucleotide
  source: /note="3' tri-ethylene glycol (TEG)"
aucaaggaagaug

SEQ ID NO: 14253 - RNA, 12 nt, Artificial Sequence
  source: /note="Description of Artificial Sequence: Synthetic oligonucleotide"
  source: /note="RNA"
  source: /note="5' tri-ethylene glycol (TEG)"
  modified_base (1)..(1): bicyclic nucleic acid (BNA)
  modified_base (3)..(3): 5-methyl modified nucleotide
  source: /note="3' tri-ethylene glycol (TEG)"
aucaaggaagau

SEQ ID NO: 14254 - RNA, 11 nt, Artificial Sequence
  source: /note="Description of Artificial Sequence: Synthetic oligonucleotide"
  source: /note="RNA"
  source: /note="5' tri-ethylene glycol (TEG)"
  modified_base (1)..(1): bicyclic nucleic acid (BNA)
  modified_base (3)..(3): 5-methyl modified nucleotide
  source: /note="3' tri-ethylene glycol (TEG)"
aucaaggaaga

SEQ ID NO: 14255 - RNA, 10 nt, Artificial Sequence
  source: /note="Description of Artificial Sequence: Synthetic oligonucleotide"
  source: /note="RNA"
  source: /note="5' tri-ethylene glycol (TEG)"
  modified_base (1)..(1): bicyclic nucleic acid (BNA)
  modified_base (3)..(3): 5-methyl modified nucleotide
  source: /note="3' tri-ethylene glycol (TEG)"
aucaaggaag

SEQ ID NO: 14256 - RNA, 23 nt, Artificial Sequence
  source: /note="Description of Artificial Sequence: Synthetic oligonucleotide"
  source: /note="RNA"
  source: /note="5' tri-ethylene glycol (TEG)"
  modified_base (1)..(1): 5-methyl bicyclic nucleic acid
  modified_base (2)..(2): 5-methyl modified nucleotide
  modified_base (7)..(7): 5-methyl modified nucleotide
  modified_base (13)..(13): 5-methyl modified nucleotide
  modified_base (14)..(14): 5-methyl modified nucleotide
  modified_base (16)..(16): 5-methyl modified nucleotide
  modified_base (17)..(17): 5-methyl modified nucleotide
  modified_base (20)..(20): 5-methyl modified nucleotide
  modified_base (23)..(23): 5-methyl modified nucleotide
  source: /note="3' tri-ethylene glycol (TEG)"
ccagagcagguaccuccaacauc

SEQ ID NO: 14257 - RNA, 18 nt, Artificial Sequence
  source: /note="Description of Artificial Sequence: Synthetic oligonucleotide"
  source: /note="RNA"
  source: /note="5' tri-ethylene glycol (TEG)"
  modified_base (1)..(1): 5-methyl bicyclic nucleic acid
  modified_base (2)..(2): 5-methyl modified nucleotide
  modified_base (7)..(7): 5-methyl modified nucleotide
  modified_base (13)..(13): 5-methyl modified nucleotide
  modified_base (14)..(14): 5-methyl modified nucleotide
  modified_base (16)..(16): 5-methyl modified nucleotide
  modified_base (17)..(17): 5-methyl modified nucleotide
  source: /note="3' tri-ethylene glycol (TEG)"
ccagagcagguaccucca

SEQ ID NO: 14258 - RNA, 23 nt, Artificial Sequence
  source: /note="Description of Artificial Sequence: Synthetic oligonucleotide"
  source: /note="RNA"
  source: /note="5' tri-ethylene glycol (TEG)"
  modified_base (1)..(1): 5-methyl bicyclic nucleic acid
  modified_base (2)..(2): 5-methyl modified nucleotide
  modified_base (4)..(4): 5-methyl modified nucleotide
  modified_base (18)..(18): 5-methyl modified nucleotide
  source: /note="3' tri-ethylene glycol (TEG)"
ccucugugauuuuauaacuugau

SEQ ID NO: 14259 - DNA, 17 bp, Artificial Sequence
  source: /note="Description of Artificial Sequence: Synthetic oligonucleotide"
  source: /note="Description of Combined DNA/RNA Molecule: Synthetic oligonucleotide"
  source: /note="DNA/RNA"
  source: /note="5' tri-ethylene glycol (TEG)"
  modified_base (1)..(1): bicyclic nucleic acid (BNA)
  modified_base (2)..(2): 5-methyl modified nucleotide
  modified_base (4)..(4): 5-methyl modified nucleotide
  modified_base (5)..(5): 5-methyl modified nucleotide
  modified_base (6)..(6): 5-methyl modified nucleotide
  modified_base (8)..(8): 5-methyl modified nucleotide
  modified_base (9)..(9): 5-methyl modified nucleotide
  modified_base (12)..(12): 5-methyl modified nucleotide
  modified_base (14)..(14): 5-methyl modified nucleotide
  modified_base (15)..(15): 5-methyl modified nucleotide
  modified_base (16)..(16): 5-methyl modified nucleotide
  source: /note="3' tri-ethylene glycol (TEG)"
tcacccaccaucacccu

SEQ ID NO: 14260 - DNA, 20 bp, Artificial Sequence
  source: /note="Description of Artificial Sequence: Synthetic oligonucleotide"
  source: /note="Description of Combined DNA/RNA Molecule: Synthetic oligonucleotide"
  source: /note="DNA/RNA"
  source: /note="5' tri-ethylene glycol (TEG)"
  modified_base (1)..(1): bicyclic nucleic acid (BNA)
  modified_base (7)..(7): 5-methyl modified nucleotide
  modified_base (8)..(8): 5-methyl modified nucleotide
  modified_base (10)..(10): 5-methyl modified nucleotide
  modified_base (16)..(16): 5-methyl modified nucleotide
  modified_base (18)..(18): 5-methyl modified nucleotide
  modified_base (19)..(19): 5-methyl modified nucleotide
  modified_base (20)..(20): 5-methyl modified nucleotide
  source: /note="3' tri-ethylene glycol (TEG)"
tgauauccucaaggucaccc

SEQ ID NO: 14261 - RNA, 22 nt, Artificial Sequence
  source: /note="Description of Artificial Sequence: Synthetic oligonucleotide"
  source: /note="RNA"
  source: /note="5' tri-ethylene glycol (TEG)"
  modified_base (1)..(1): 5-methyl bicyclic nucleic acid
  modified_base (4)..(4): 5-methyl modified nucleotide
  modified_base (13)..(13): 5-methyl modified nucleotide
  modified_base (16)..(16): 5-methyl modified nucleotide
  modified_base (18)..(18): 5-methyl modified nucleotide
  source: /note="3' tri-ethylene glycol (TEG)"
cugcuugaugaucaucucguug

SEQ ID NO: 14262 - RNA, 18 nt, Artificial Sequence
  source: /note="Description of Artificial Sequence: Synthetic oligonucleotide"
  source: /note="RNA"
  source: /note="5' tri-ethylene glycol (TEG)"
  modified_base (1)..(1): 5-methyl bicyclic nucleic acid
  modified_base (4)..(4): 5-methyl modified nucleotide
  modified_base (13)..(13): 5-methyl modified nucleotide
  modified_base (16)..(16): 5-methyl modified nucleotide
  modified_base (18)..(18): 5-methyl modified nucleotide
  source: /note="3' tri-ethylene glycol (TEG)"
cugcuugaugaucaucuc

SEQ ID NO: 14263 - RNA, 19 nt, Artificial Sequence
  source: /note="Description of Artificial Sequence: Synthetic oligonucleotide"
  source: /note="RNA"
  source: /note="5' tri-ethylene glycol (TEG)"
  modified_base (1)..(1): bicyclic nucleic acid (BNA)
  modified_base (5)..(5): 5-methyl modified nucleotide
  modified_base (6)..(6): 5-methyl modified nucleotide
  modified_base (14)..(14): 5-methyl modified nucleotide
  modified_base (15)..(15): 5-methyl modified nucleotide
  modified_base (17)..(17): 5-methyl modified nucleotide
  source: /note="3' tri-ethylene glycol (TEG)"
guuuccuuaguaaccacag

SEQ ID NO: 14264 - RNA, 17 nt, Artificial Sequence
  source: /note="Description of Artificial Sequence: Synthetic oligonucleotide"
  source: /note="RNA"
  source: /note="5' tri-ethylene glycol (TEG)"
  modified_base (1)..(1): bicyclic nucleic acid (BNA)
  modified_base (5)..(5): 5-methyl modified nucleotide
  modified_base (6)..(6): 5-methyl modified nucleotide
  modified_base (14)..(14): 5-methyl modified nucleotide
  modified_base (15)..(15): 5-methyl modified nucleotide
  modified_base (17)..(17): 5-methyl modified nucleotide
  source: /note="3' tri-ethylene glycol (TEG)"
guuuccuuaguaaccac

SEQ ID NO: 14265 - DNA, 20 bp, Artificial Sequence
  source: /note="Description of Artificial Sequence: Synthetic oligonucleotide"
  source: /note="Description of Combined DNA/RNA Molecule: Synthetic oligonucleotide"
  source: /note="DNA/RNA"
  modified_base (2)..(2): 5-methyl modified nucleotide
  modified_base (14)..(14): 5-methyl modified nucleotide
  modified_base (19)..(19): 5-methyl modified nucleotide
  modified_base (20)..(20): bicyclic nucleic acid (BNA)
ucaaggaagauggcauuuct

SEQ ID NO: 14266 - RNA, 22 nt, Artificial Sequence
  source: /note="Description of Artificial Sequence: Synthetic oligonucleotide"
  source: /note="RNA"
  modified_base (2)..(2): 5-methyl modified nucleotide
  modified_base (14)..(14): 5-methyl modified nucleotide
  modified_base (19)..(19): 5-methyl modified nucleotide
  modified_base (22)..(22): bicyclic nucleic acid (BNA)
ucaaggaagauggcauuucuag

SEQ ID NO: 14267 - RNA, 18 nt, Artificial Sequence
  source: /note="Description of Artificial Sequence: Synthetic oligonucleotide"
  source: /note="RNA"
  modified_base (9)..(9): 5-methyl modified nucleotide
  modified_base (13)..(13): 5-methyl modified nucleotide
  modified_base (14)..(14): 5-methyl modified nucleotide
  modified_base (18)..(18): 5-methyl bicyclic nucleic acid
gguaaguucuguccaagc

SEQ ID NO: 14268 - RNA, 18 nt, Artificial Sequence
  source: /note="Description of Artificial Sequence: Synthetic oligonucleotide"
  source: /note="RNA"
  modified_base (8)..(8): 5-methyl modified nucleotide
  modified_base (12)..(12): 5-methyl modified nucleotide
  modified_base (13)..(13): 5-methyl modified nucleotide
  modified_base (17)..(17): 5-methyl modified nucleotide
  modified_base (18)..(18): 5-methyl bicyclic nucleic acid
guaaguucuguccaagcc

SEQ ID NO: 14269 - RNA, 18 nt, Artificial Sequence
  source: /note="Description of Artificial Sequence: Synthetic oligonucleotide"
  source: /note="RNA"
  modified_base (4)..(4): 5-methyl modified nucleotide
  modified_base (13)..(13): 5-methyl modified nucleotide
  modified_base (17)..(17): 5-methyl modified nucleotide
  modified_base (18)..(18): 5-methyl bicyclic nucleic acid
agucgguaaguucugucc

SEQ ID NO: 14270 - RNA, 18 nt, Artificial Sequence
  source: /note="Description of Artificial Sequence: Synthetic oligonucleotide"
  source: /note="RNA"
  modified_base (1)..(1): 5-methyl modified nucleotide
  modified_base (5)..(5): 5-methyl modified nucleotide
  modified_base (6)..(6): 5-methyl modified nucleotide
  modified_base (10)..(10): 5-methyl modified nucleotide
  modified_base (11)..(11): 5-methyl modified nucleotide
  modified_base (12)..(12): 5-methyl modified nucleotide
  modified_base (18)..(18): bicyclic nucleic acid (BNA)
cuguccaagcccgguuga

SEQ ID NO: 14271 - RNA, 15 nt, Artificial Sequence
  source: /note="Description of Artificial Sequence: Synthetic oligonucleotide"
  source: /note="RNA"
  modified_base (7)..(7): 5-methyl modified nucleotide
  modified_base (11)..(11): 5-methyl modified nucleotide
  modified_base (12)..(12): 5-methyl modified nucleotide
  modified_base (15)..(15): bicyclic nucleic acid (BNA)
uaaguucuguccaag

SEQ ID NO: 14272 - RNA, 20 nt, Artificial Sequence
  source: /note="Description of Artificial Sequence: Synthetic oligonucleotide"
  source: /note="RNA"
  modified_base (3)..(3): 5-methyl modified nucleotide
  modified_base (7)..(7): 5-methyl modified nucleotide
  modified_base (8)..(8): 5-methyl modified nucleotide
  modified_base (12)..(12): 5-methyl modified nucleotide
  modified_base (13)..(13): 5-methyl modified nucleotide
  modified_base (14)..(14): 5-methyl modified nucleotide
  modified_base (20)..(20): bicyclic nucleic acid (BNA)
uucuguccaagcccgguuga

SEQ ID NO: 14273 - RNA, 19 nt, Artificial Sequence
  source: /note="Description of Artificial Sequence: Synthetic oligonucleotide"
  source: /note="RNA"
  modified_base (3)..(3): 5-methyl modified nucleotide
  modified_base (7)..(7): 5-methyl modified nucleotide
  modified_base (8)..(8): 5-methyl modified nucleotide
  modified_base (12)..(12): 5-methyl modified nucleotide
  modified_base (13)..(13): 5-methyl modified nucleotide
  modified_base (14)..(14): 5-methyl modified nucleotide
  modified_base (19)..(19): bicyclic nucleic acid (BNA)
uucuguccaagcccgguug

SEQ ID NO: 14274 - DNA, 18 bp, Artificial Sequence
  source: /note="Description of Artificial Sequence: Synthetic oligonucleotide"
  source: /note="Description of Combined DNA/RNA Molecule: Synthetic oligonucleotide"
  source: /note="DNA/RNA"
  modified_base (3)..(3): 5-methyl modified nucleotide
  modified_base (7)..(7): 5-methyl modified nucleotide
  modified_base (8)..(8): 5-methyl modified nucleotide
  modified_base (12)..(12): 5-methyl modified nucleotide
  modified_base (13)..(13): 5-methyl modified nucleotide
  modified_base (14)..(14): 5-methyl modified nucleotide
  modified_base (18)..(18): bicyclic nucleic acid (BNA)
uucuguccaagcccggut

SEQ ID NO: 14275 - DNA, 17 bp, Artificial Sequence
  source: /note="Description of Artificial Sequence: Synthetic oligonucleotide"
  source: /note="Description of Combined DNA/RNA Molecule: Synthetic oligonucleotide"
  source: /note="DNA/RNA"
  modified_base (3)..(3): 5-methyl modified nucleotide
  modified_base (7)..(7): 5-methyl modified nucleotide
  modified_base (8)..(8): 5-methyl modified nucleotide
  modified_base (12)..(12): 5-methyl modified nucleotide
  modified_base (13)..(13): 5-methyl modified nucleotide
  modified_base (14)..(14): 5-methyl modified nucleotide
  modified_base (17)..(17): bicyclic nucleic acid (BNA)
uucuguccaagcccggt

SEQ ID NO: 14276 - RNA, 16 nt, Artificial Sequence
  source: /note="Description of Artificial Sequence: Synthetic oligonucleotide"
  source: /note="RNA"
  modified_base (3)..(3): 5-methyl modified nucleotide
  modified_base (7)..(7): 5-methyl modified nucleotide
  modified_base (8)..(8): 5-methyl modified nucleotide
  modified_base (12)..(12): 5-methyl modified nucleotide
  modified_base (13)..(13): 5-methyl modified nucleotide
  modified_base (14)..(14): 5-methyl modified nucleotide
  modified_base (16)..(16): bicyclic nucleic acid (BNA)
uucuguccaagcccgg

SEQ ID NO: 14277 - RNA, 15 nt, Artificial Sequence
  source: /note="Description of Artificial Sequence: Synthetic oligonucleotide"
  source: /note="RNA"
  modified_base (3)..(3): 5-methyl modified nucleotide
  modified_base (7)..(7): 5-methyl modified nucleotide
  modified_base (8)..(8): 5-methyl modified nucleotide
  modified_base (12)..(12): 5-methyl modified nucleotide
  modified_base (13)..(13): 5-methyl modified nucleotide
  modified_base (14)..(14): 5-methyl modified nucleotide
  modified_base (15)..(15): bicyclic nucleic acid (BNA)
uucuguccaagcccg

SEQ ID NO: 14278 - RNA, 14 nt, Artificial Sequence
  source: /note="Description of Artificial Sequence: Synthetic oligonucleotide"
  source: /note="RNA"
  modified_base (3)..(3): 5-methyl modified nucleotide
  modified_base (7)..(7): 5-methyl modified nucleotide
  modified_base (8)..(8): 5-methyl modified nucleotide
  modified_base (12)..(12): 5-methyl modified nucleotide
  modified_base (13)..(13): 5-methyl modified nucleotide
  modified_base (14)..(14): 5-methyl bicyclic nucleic acid
uucuguccaagccc

SEQ ID NO: 14279 - RNA, 13 nt, Artificial Sequence
  source: /note="Description of Artificial Sequence: Synthetic oligonucleotide"
  source: /note="RNA"
  modified_base (3)..(3): 5-methyl modified nucleotide
  modified_base (7)..(7): 5-methyl modified nucleotide
  modified_base (8)..(8): 5-methyl modified nucleotide
  modified_base (12)..(12): 5-methyl modified nucleotide
  modified_base (13)..(13): 5-methyl bicyclic nucleic acid
uucuguccaagcc

SEQ ID NO: 14280 - RNA, 12 nt, Artificial Sequence
  source: /note="Description of Artificial Sequence: Synthetic oligonucleotide"
  source: /note="RNA"
  modified_base (3)..(3): 5-methyl modified nucleotide
  modified_base (7)..(7): 5-methyl modified nucleotide
  modified_base (8)..(8): 5-methyl modified nucleotide
  modified_base (12)..(12): 5-methyl bicyclic nucleic acid
uucuguccaagc

SEQ ID NO: 14281 - RNA, 11 nt, Artificial Sequence
  source: /note="Description of Artificial Sequence: Synthetic oligonucleotide"
  source: /note="RNA"
  modified_base (3)..(3): 5-methyl modified nucleotide
  modified_base (7)..(7): 5-methyl modified nucleotide
  modified_base (8)..(8): 5-methyl modified nucleotide
  modified_base (11)..(11): bicyclic nucleic acid (BNA)
uucuguccaag

SEQ ID NO: 14282 - RNA, 10 nt, Artificial Sequence
  source: /note="Description of Artificial Sequence: Synthetic oligonucleotide"
  source: /note="RNA"
  modified_base (3)..(3): 5-methyl modified nucleotide
  modified_base (7)..(7): 5-methyl modified nucleotide
  modified_base (8)..(8): 5-methyl modified nucleotide
  modified_base (10)..(10): bicyclic nucleic acid (BNA)
uucuguccaa

SEQ ID NO: 14283 - RNA, 9 nt, Artificial Sequence
  source: /note="Description of Artificial Sequence: Synthetic oligonucleotide"
  source: /note="RNA"
  modified_base (3)..(3): 5-methyl modified nucleotide
  modified_base (7)..(7): 5-methyl modified nucleotide
  modified_base (8)..(8): 5-methyl modified nucleotide
  modified_base (9)..(9): bicyclic nucleic acid (BNA)
uucugucca

SEQ ID NO: 14284 - RNA, 8 nt, Artificial Sequence
  source: /note="Description of Artificial Sequence: Synthetic oligonucleotide"
  source: /note="RNA"
  modified_base (3)..(3): 5-methyl modified nucleotide
  modified_base (7)..(7): 5-methyl modified nucleotide
  modified_base (8)..(8): 5-methyl bicyclic nucleic acid
uucugucc

SEQ ID NO: 14285 - RNA, 19 nt, Artificial Sequence
  source: /note="Description of Artificial Sequence: Synthetic oligonucleotide"
  source: /note="RNA"
  modified_base (2)..(2): 5-methyl modified nucleotide
  modified_base (6)..(6): 5-methyl modified nucleotide
  modified_base (7)..(7): 5-methyl modified nucleotide
  modified_base (11)..(11): 5-methyl modified nucleotide
  modified_base (12)..(12): 5-methyl modified nucleotide
  modified_base (13)..(13): 5-methyl modified nucleotide
  modified_base (19)..(19): bicyclic nucleic acid (BNA)
ucuguccaagcccgguuga

SEQ ID NO: 14286 - RNA, 18 nt, Artificial Sequence
  source: /note="Description of Artificial Sequence: Synthetic oligonucleotide"
  source: /note="RNA"
  modified_base (2)..(2): 5-methyl modified nucleotide
  modified_base (6)..(6): 5-methyl modified nucleotide
  modified_base (7)..(7): 5-methyl modified nucleotide
  modified_base (11)..(11): 5-methyl modified nucleotide
  modified_base (12)..(12): 5-methyl modified nucleotide
  modified_base (13)..(13): 5-methyl modified nucleotide
  modified_base (18)..(18): bicyclic nucleic acid (BNA)
ucuguccaagcccgguug

SEQ ID NO: 14287 - DNA, 17 bp, Artificial Sequence
  source: /note="Description of Artificial Sequence: Synthetic oligonucleotide"
  source: /note="Description of Combined DNA/RNA Molecule: Synthetic oligonucleotide"
  source: /note="DNA/RNA"
  modified_base (2)..(2): 5-methyl modified nucleotide
  modified_base (6)..(6): 5-methyl modified nucleotide
  modified_base (7)..(7): 5-methyl modified nucleotide
  modified_base (11)..(11): 5-methyl modified nucleotide
  modified_base (12)..(12): 5-methyl modified nucleotide
  modified_base (13)..(13): 5-methyl modified nucleotide
  modified_base (17)..(17): bicyclic nucleic acid (BNA)
ucuguccaagcccggut

SEQ ID NO: 14288 - DNA, 16 bp, Artificial Sequence
  source: /note="Description of Artificial Sequence: Synthetic oligonucleotide"
  source: /note="Description of Combined DNA/RNA Molecule: Synthetic oligonucleotide"
  source: /note="DNA/RNA"
  modified_base (2)..(2): 5-methyl modified nucleotide
  modified_base (6)..(6): 5-methyl modified nucleotide
  modified_base (7)..(7): 5-methyl modified nucleotide
  modified_base (11)..(11): 5-methyl modified nucleotide
  modified_base (12)..(12): 5-methyl modified nucleotide
  modified_base (13)..(13): 5-methyl modified nucleotide
  modified_base (16)..(16): bicyclic nucleic acid (BNA)
ucuguccaagcccggt

SEQ ID NO: 14289 - RNA, 15 nt, Artificial Sequence
  source: /note="Description of Artificial Sequence: Synthetic oligonucleotide"
  source: /note="RNA"
  modified_base (2)..(2): 5-methyl modified nucleotide
  modified_base (6)..(6): 5-methyl modified nucleotide
  modified_base (7)..(7): 5-methyl modified nucleotide
  modified_base (11)..(11): 5-methyl modified nucleotide
  modified_base (12)..(12): 5-methyl modified nucleotide
  modified_base (13)..(13): 5-methyl modified nucleotide
  modified_base (15)..(15): bicyclic nucleic acid (BNA)
ucuguccaagcccgg

SEQ ID NO: 14290 - RNA, 14 nt, Artificial Sequence
  source: /note="Description of Artificial Sequence: Synthetic oligonucleotide"
  source: /note="RNA"
  modified_base (2)..(2): 5-methyl modified nucleotide
  modified_base (6)..(6): 5-methyl modified nucleotide
  modified_base (7)..(7): 5-methyl modified nucleotide
  modified_base (11)..(11): 5-methyl modified nucleotide
  modified_base (12)..(12): 5-methyl modified nucleotide
  modified_base (13)..(13): 5-methyl modified nucleotide
  modified_base (14)..(14): bicyclic nucleic acid (BNA)
ucuguccaagcccg

SEQ ID NO: 14291 - RNA, 13 nt, Artificial Sequence
  source: /note="Description of Artificial Sequence: Synthetic oligonucleotide"
  source: /note="RNA"
  modified_base (2)..(2): 5-methyl modified nucleotide
  modified_base (6)..(6): 5-methyl modified nucleotide
  modified_base (7)..(7): 5-methyl modified nucleotide
  modified_base (11)..(11): 5-methyl modified nucleotide
  modified_base (12)..(12): 5-methyl modified nucleotide
  modified_base (13)..(13): 5-methyl bicyclic nucleic acid
ucuguccaagccc

SEQ ID NO: 14292 - RNA, 12 nt, Artificial Sequence
  source: /note="Description of Artificial Sequence: Synthetic oligonucleotide"
  source: /note="RNA"
  modified_base (2)..(2): 5-methyl modified nucleotide
  modified_base (6)..(6): 5-methyl modified nucleotide
  modified_base (7)..(7): 5-methyl modified nucleotide
  modified_base (11)..(11): 5-methyl modified nucleotide
  modified_base (12)..(12): 5-methyl bicyclic nucleic acid
ucuguccaagcc

SEQ ID NO: 14293 - RNA, 11 nt, Artificial Sequence
  source: /note="Description of Artificial Sequence: Synthetic oligonucleotide"
  source: /note="RNA"
  modified_base (2)..(2): 5-methyl modified nucleotide
  modified_base (6)..(6): 5-methyl modified nucleotide
  modified_base (7)..(7): 5-methyl modified nucleotide
  modified_base (11)..(11): 5-methyl bicyclic nucleic acid
ucuguccaagc

SEQ ID NO: 14294 - RNA, 10 nt, Artificial Sequence
  source: /note="Description of Artificial Sequence: Synthetic oligonucleotide"
  source: /note="RNA"
  modified_base (2)..(2): 5-methyl modified nucleotide
  modified_base (6)..(6): 5-methyl modified nucleotide
  modified_base (7)..(7): 5-methyl modified nucleotide
  modified_base (10)..(10): bicyclic nucleic acid (BNA)
ucuguccaag

SEQ ID NO: 14295 - RNA, 9 nt, Artificial Sequence
  source: /note="Description of Artificial Sequence: Synthetic oligonucleotide"
  source: /note="RNA"
  modified_base (2)..(2): 5-methyl modified nucleotide
  modified_base (6)..(6): 5-methyl modified nucleotide
  modified_base (7)..(7): 5-methyl modified nucleotide
  modified_base (9)..(9): bicyclic nucleic acid (BNA)
ucuguccaa

SEQ ID NO: 14296 - RNA, 8 nt, Artificial Sequence
  source: /note="Description of Artificial Sequence: Synthetic oligonucleotide"
  source: /note="RNA"
  modified_base (2)..(2): 5-methyl modified nucleotide
  modified_base (6)..(6): 5-methyl modified nucleotide
  modified_base (7)..(7): 5-methyl modified nucleotide
  modified_base (8)..(8): bicyclic nucleic acid (BNA)
ucugucca

SEQ ID NO: 14297 - RNA, 17 nt, Artificial Sequence
  source: /note="Description of Artificial Sequence: Synthetic oligonucleotide"
  source: /note="RNA"
  modified_base (1)..(1): 5-methyl modified nucleotide
  modified_base (5)..(5): 5-methyl modified nucleotide
  modified_base (6)..(6): 5-methyl modified nucleotide
  modified_base (10)..(10): 5-methyl modified nucleotide
  modified_base (11)..(11): 5-methyl modified nucleotide
  modified_base (12)..(12): 5-methyl modified nucleotide
  modified_base (17)..(17): bicyclic nucleic acid (BNA)
cuguccaagcccgguug

SEQ ID NO: 14298 - DNA, 16 bp, Artificial Sequence
  source: /note="Description of Artificial Sequence: Synthetic oligonucleotide"
  source: /note="Description of Combined DNA/RNA Molecule: Synthetic oligonucleotide"
  source: /note="DNA/RNA"
  modified_base (1)..(1): 5-methyl modified nucleotide
  modified_base (5)..(5): 5-methyl modified nucleotide
  modified_base (6)..(6): 5-methyl modified nucleotide
  modified_base (10)..(10): 5-methyl modified nucleotide
  modified_base (11)..(11): 5-methyl modified nucleotide
  modified_base (12)..(12): 5-methyl modified nucleotide
  modified_base (16)..(16): bicyclic nucleic acid (BNA)
cuguccaagcccggut

SEQ ID NO: 14299 - DNA, 15 bp, Artificial Sequence
  source: /note="Description of Artificial Sequence: Synthetic oligonucleotide"
  source: /note="Description of Combined DNA/RNA Molecule: Synthetic oligonucleotide"
  source: /note="DNA/RNA"
  modified_base (1)..(1): 5-methyl modified nucleotide
  modified_base (5)..(5): 5-methyl modified nucleotide
  modified_base (6)..(6): 5-methyl modified nucleotide
  modified_base (10)..(10): 5-methyl modified nucleotide
  modified_base (11)..(11): 5-methyl modified nucleotide
  modified_base (12)..(12): 5-methyl modified nucleotide
  modified_base (15)..(15): bicyclic nucleic acid (BNA)
cuguccaagcccggt

SEQ ID NO: 14300 - RNA, 14 nt, Artificial Sequence
  source: /note="Description of Artificial Sequence: Synthetic oligonucleotide"
  source: /note="RNA"
  modified_base (1)..(1): 5-methyl modified nucleotide
  modified_base (5)..(5): 5-methyl modified nucleotide
  modified_base (6)..(6): 5-methyl modified nucleotide
  modified_base (10)..(10): 5-methyl modified nucleotide
  modified_base (11)..(11): 5-methyl modified nucleotide
  modified_base (12)..(12): 5-methyl modified nucleotide
  modified_base (14)..(14): bicyclic nucleic acid (BNA)
cuguccaagcccgg

SEQ ID NO: 14301 - RNA, 13 nt, Artificial Sequence
  source: /note="Description of Artificial Sequence: Synthetic oligonucleotide"
  source: /note="RNA"
  modified_base (1)..(1): 5-methyl modified nucleotide
  modified_base (5)..(5): 5-methyl modified nucleotide
  modified_base (6)..(6): 5-methyl modified nucleotide
  modified_base (10)..(10): 5-methyl modified nucleotide
  modified_base (11)..(11): 5-methyl modified nucleotide
  modified_base (12)..(12): 5-methyl modified nucleotide
  modified_base (13)..(13): bicyclic nucleic acid (BNA)
cuguccaagcccg

SEQ ID NO: 14302 - RNA, 12 nt, Artificial Sequence
  source: /note="Description of Artificial Sequence: Synthetic oligonucleotide"
  source: /note="RNA"
  modified_base (1)..(1): 5-methyl modified nucleotide
  modified_base (5)..(5): 5-methyl modified nucleotide
  modified_base (6)..(6): 5-methyl modified nucleotide
  modified_base (10)..(10): 5-methyl modified nucleotide
  modified_base (11)..(11): 5-methyl modified nucleotide
  modified_base (12)..(12): 5-methyl bicyclic nucleic acid
cuguccaagccc

SEQ ID NO: 14303 - RNA, 11 nt, Artificial Sequence
  source: /note="Description of Artificial Sequence: Synthetic oligonucleotide"
  source: /note="RNA"
  modified_base (1)..(1): 5-methyl modified nucleotide
  modified_base (5)..(5): 5-methyl modified nucleotide
  modified_base (6)..(6): 5-methyl modified nucleotide
  modified_base (10)..(10): 5-methyl modified nucleotide
  modified_base (11)..(11): 5-methyl bicyclic nucleic acid
cuguccaagcc

SEQ ID NO: 14304 - RNA, 10 nt, Artificial Sequence
  source: /note="Description of Artificial Sequence: Synthetic oligonucleotide"
  source: /note="RNA"
  modified_base (1)..(1): 5-methyl modified nucleotide
  modified_base (5)..(5): 5-methyl modified nucleotide
  modified_base (6)..(6): 5-methyl modified nucleotide
  modified_base (10)..(10): 5-methyl bicyclic nucleic acid
cuguccaagc

SEQ ID NO: 14305 - RNA, 9 nt, Artificial Sequence
  source: /note="Description of Artificial Sequence: Synthetic oligonucleotide"
  source: /note="RNA"
  modified_base (1)..(1): 5-methyl modified nucleotide
  modified_base (5)..(5): 5-methyl modified nucleotide
  modified_base (6)..(6): 5-methyl modified nucleotide
  modified_base (9)..(9): bicyclic nucleic acid (BNA)
cuguccaag

SEQ ID NO: 14306 - RNA, 8 nt, Artificial Sequence
  source: /note="Description of Artificial Sequence: Synthetic oligonucleotide"
  source: /note="RNA"
  modified_base (1)..(1): 5-methyl modified nucleotide
  modified_base (5)..(5): 5-methyl modified nucleotide
  modified_base (6)..(6): 5-methyl modified nucleotide
  modified_base (8)..(8): bicyclic nucleic acid (BNA)
cuguccaa

SEQ ID NO: 14307 - RNA, 20 nt, Artificial Sequence
  source: /note="Description of Artificial Sequence: Synthetic oligonucleotide"
  source: /note="RNA"
  modified_base (4)..(4): 5-methyl modified nucleotide
  modified_base (8)..(8): 5-methyl modified nucleotide
  modified_base (9)..(9): 5-methyl modified nucleotide
  modified_base (13)..(13): 5-methyl modified nucleotide
  modified_base (14)..(14): 5-methyl modified nucleotide
  modified_base (15)..(15): 5-methyl modified nucleotide
  modified_base (20)..(20): bicyclic nucleic acid (BNA)
guucuguccaagcccgguug

SEQ ID NO: 14308 - DNA, 19 bp, Artificial Sequence
  source: /note="Description of Artificial Sequence: Synthetic oligonucleotide"
  source: /note="Description of Combined DNA/RNA Molecule: Synthetic oligonucleotide"
  source: /note="DNA/RNA"
  modified_base (4)..(4): 5-methyl modified nucleotide
  modified_base (8)..(8): 5-methyl modified nucleotide
  modified_base (9)..(9): 5-methyl modified nucleotide
  modified_base (13)..(13): 5-methyl modified nucleotide
  modified_base (14)..(14): 5-methyl modified nucleotide
  modified_base (15)..(15): 5-methyl modified nucleotide
  modified_base (19)..(19): bicyclic nucleic acid (BNA)
guucuguccaagcccggut

SEQ ID NO: 14309 - DNA, 18 bp, Artificial Sequence
  source: /note="Description of Artificial Sequence: Synthetic oligonucleotide"
  source: /note="Description of Combined DNA/RNA Molecule: Synthetic oligonucleotide"
  source: /note="DNA/RNA"
  modified_base (4)..(4): 5-methyl modified nucleotide
  modified_base (8)..(8): 5-methyl modified nucleotide
  modified_base (9)..(9): 5-methyl modified nucleotide
  modified_base (13)..(13): 5-methyl modified nucleotide
  modified_base (14)..(14): 5-methyl modified nucleotide
  modified_base (15)..(15): 5-methyl modified nucleotide
  modified_base (18)..(18): bicyclic nucleic acid (BNA)
guucuguccaagcccggt

SEQ ID NO: 14310 - RNA, 17 nt, Artificial Sequence
  source: /note="Description of Artificial Sequence: Synthetic oligonucleotide"
  source: /note="RNA"
  modified_base (4)..(4): 5-methyl modified nucleotide
  modified_base (8)..(8): 5-methyl modified nucleotide
  modified_base (9)..(9): 5-methyl modified nucleotide
  modified_base (13)..(13): 5-methyl modified nucleotide
  modified_base (14)..(14): 5-methyl modified nucleotide
  modified_base (15)..(15): 5-methyl modified nucleotide
  modified_base (17)..(17): bicyclic nucleic acid (BNA)
guucuguccaagcccgg

SEQ ID NO: 14311 - RNA, 16 nt, Artificial Sequence
  source: /note="Description of Artificial Sequence: Synthetic oligonucleotide"
  source: /note="RNA"
  modified_base (4)..(4): 5-methyl modified nucleotide
  modified_base (8)..(8): 5-methyl modified nucleotide
  modified_base (9)..(9): 5-methyl modified nucleotide
  modified_base (13)..(13): 5-methyl modified nucleotide
  modified_base (14)..(14): 5-methyl modified nucleotide
  modified_base (15)..(15): 5-methyl modified nucleotide
  modified_base (16)..(16): bicyclic nucleic acid (BNA)
guucuguccaagcccg

SEQ ID NO: 14312 - RNA, 15 nt, Artificial Sequence
  source: /note="Description of Artificial Sequence: Synthetic oligonucleotide"
  source: /note="RNA"
  modified_base (4)..(4): 5-methyl modified nucleotide
  modified_base (8)..(8): 5-methyl modified nucleotide
  modified_base (9)..(9): 5-methyl modified nucleotide
  modified_base (13)..(13): 5-methyl modified nucleotide
  modified_base (14)..(14): 5-methyl modified nucleotide
  modified_base (15)..(15): 5-methyl bicyclic nucleic acid
guucuguccaagccc

SEQ ID NO: 14313 - RNA, 14 nt, Artificial Sequence
  source: /note="Description of Artificial Sequence: Synthetic oligonucleotide"
  source: /note="RNA"
  modified_base (4)..(4): 5-methyl modified nucleotide
  modified_base (8)..(8): 5-methyl modified nucleotide
  modified_base (9)..(9): 5-methyl modified nucleotide
  modified_base (13)..(13): 5-methyl modified nucleotide
  modified_base (14)..(14): 5-methyl bicyclic nucleic acid
guucuguccaagcc

SEQ ID NO: 14314 - RNA, 13 nt, Artificial Sequence
  source: /note="Description of Artificial Sequence: Synthetic oligonucleotide"
  source: /note="RNA"
  modified_base (4)..(4): 5-methyl modified nucleotide
  modified_base (8)..(8): 5-methyl modified nucleotide
  modified_base (9)..(9): 5-methyl modified nucleotide
  modified_base (13)..(13): 5-methyl bicyclic nucleic acid
guucuguccaagc

SEQ ID NO: 14315 - RNA, 12 nt, Artificial Sequence
  source: /note="Description of Artificial Sequence: Synthetic oligonucleotide"
  source: /note="RNA"
  modified_base (4)..(4): 5-methyl modified nucleotide
  modified_base (8)..(8): 5-methyl modified nucleotide
  modified_base (9)..(9): 5-methyl modified nucleotide
  modified_base (12)..(12): bicyclic nucleic acid (BNA)
guucuguccaag

SEQ ID NO: 14316 - RNA, 11 nt, Artificial Sequence
  source: /note="Description of Artificial Sequence: Synthetic oligonucleotide"
  source: /note="RNA"
  modified_base (4)..(4): 5-methyl modified nucleotide
  modified_base (8)..(8): 5-methyl modified nucleotide
  modified_base (9)..(9): 5-methyl modified nucleotide
  modified_base (11)..(11): bicyclic nucleic acid (BNA)
guucuguccaa

SEQ ID NO: 14317 - RNA, 10 nt, Artificial Sequence
  source: /note="Description of Artificial Sequence: Synthetic oligonucleotide"
  source: /note="RNA"
  modified_base (4)..(4): 5-methyl modified nucleotide
  modified_base (8)..(8): 5-methyl modified nucleotide
  modified_base (9)..(9): 5-methyl modified nucleotide
  modified_base (10)..(10): bicyclic nucleic acid (BNA)
guucugucca

SEQ ID NO: 14318 - RNA, 9 nt, Artificial Sequence
  source: /note="Description of Artificial Sequence: Synthetic oligonucleotide"
  source: /note="RNA"
  modified_base (4)..(4): 5-methyl modified nucleotide
  modified_base (8)..(8): 5-methyl modified nucleotide
  modified_base (9)..(9): 5-methyl bicyclic nucleic acid
guucugucc

SEQ ID NO: 14319 - RNA, 8 nt, Artificial Sequence
  source: /note="Description of Artificial Sequence: Synthetic oligonucleotide"
  source: /note="RNA"
  modified_base (4)..(4): 5-methyl modified nucleotide
  modified_base (8)..(8): 5-methyl bicyclic nucleic acid
guucuguc

SEQ ID NO: 14320 - DNA, 20 bp, Artificial Sequence
  source: /note="Description of Artificial Sequence: Synthetic oligonucleotide"
  source: /note="Description of Combined DNA/RNA Molecule: Synthetic oligonucleotide"
  source: /note="DNA/RNA"
  modified_base (5)..(5): 5-methyl modified nucleotide
  modified_base (9)..(9): 5-methyl modified nucleotide
  modified_base (10)..(10): 5-methyl modified nucleotide
  modified_base (14)..(14): 5-methyl modified nucleotide
  modified_base (15)..(15): 5-methyl modified nucleotide
  modified_base (16)..(16): 5-methyl modified nucleotide
  modified_base (20)..(20): bicyclic nucleic acid (BNA)
aguucuguccaagcccggut

SEQ ID NO: 14321 - DNA, 19 bp, Artificial Sequence
  source: /note="Description of Artificial Sequence: Synthetic oligonucleotide"
  source: /note="Description of Combined DNA/RNA Molecule: Synthetic oligonucleotide"
  source: /note="DNA/RNA"
  modified_base (5)..(5): 5-methyl modified nucleotide
  modified_base (9)..(9): 5-methyl modified nucleotide
  modified_base (10)..(10): 5-methyl modified nucleotide
  modified_base (14)..(14): 5-methyl modified nucleotide
  modified_base (15)..(15): 5-methyl modified nucleotide
  modified_base (16)..(16): 5-methyl modified nucleotide
  modified_base (19)..(19): bicyclic nucleic acid (BNA)
aguucuguccaagcccggt

SEQ ID NO: 14322 - RNA, 18 nt, Artificial Sequence
  source: /note="Description of Artificial Sequence: Synthetic oligonucleotide"
  source: /note="RNA"
  modified_base (5)..(5): 5-methyl modified nucleotide
  modified_base (9)..(9): 5-methyl modified nucleotide
  modified_base (10)..(10): 5-methyl modified nucleotide
  modified_base (14)..(14): 5-methyl modified nucleotide
  modified_base (15)..(15): 5-methyl modified nucleotide
  modified_base (16)..(16): 5-methyl modified nucleotide
  modified_base (18)..(18): bicyclic nucleic acid (BNA)
aguucuguccaagcccgg

SEQ ID NO: 14323 - RNA, 17 nt, Artificial Sequence
  source: /note="Description of Artificial Sequence: Synthetic oligonucleotide"
  source: /note="RNA"
  modified_base (5)..(5): 5-methyl modified nucleotide
  modified_base (9)..(9): 5-methyl modified nucleotide
  modified_base (10)..(10): 5-methyl modified nucleotide
  modified_base (14)..(14): 5-methyl modified nucleotide
  modified_base (15)..(15): 5-methyl modified nucleotide
  modified_base (16)..(16): 5-methyl modified nucleotide
  modified_base (17)..(17): bicyclic nucleic acid (BNA)
aguucuguccaagcccg

SEQ ID NO: 14324 - RNA, 16 nt, Artificial Sequence
  source: /note="Description of Artificial Sequence: Synthetic oligonucleotide"
  source: /note="RNA"
  modified_base (5)..(5): 5-methyl modified nucleotide
  modified_base (9)..(9): 5-methyl modified nucleotide
  modified_base (10)..(10): 5-methyl modified nucleotide
  modified_base (14)..(14): 5-methyl modified nucleotide
  modified_base (15)..(15): 5-methyl modified nucleotide
  modified_base (16)..(16): 5-methyl bicyclic nucleic acid
aguucuguccaagccc

SEQ ID NO: 14325 - RNA, 15 nt, Artificial Sequence
  source: /note="Description of Artificial Sequence: Synthetic oligonucleotide"
  source: /note="RNA"
  modified_base (5)..(5): 5-methyl modified nucleotide
  modified_base (9)..(9): 5-methyl modified nucleotide
  modified_base (10)..(10): 5-methyl modified nucleotide
  modified_base (14)..(14): 5-methyl modified nucleotide
  modified_base (15)..(15): 5-methyl bicyclic nucleic acid
aguucuguccaagcc

SEQ ID NO: 14326 - RNA, 14 nt, Artificial Sequence
  source: /note="Description of Artificial Sequence: Synthetic oligonucleotide"
  source: /note="RNA"
  modified_base (5)..(5): 5-methyl modified nucleotide
  modified_base (9)..(9): 5-methyl modified nucleotide
  modified_base (10)..(10): 5-methyl modified nucleotide
  modified_base (14)..(14): 5-methyl bicyclic nucleic acid
aguucuguccaagc

SEQ ID NO: 14327 - RNA, 13 nt, Artificial Sequence
  source: /note="Description of Artificial Sequence: Synthetic oligonucleotide"
  source: /note="RNA"
  modified_base (5)..(5): 5-methyl modified nucleotide
  modified_base (9)..(9): 5-methyl modified nucleotide
  modified_base (10)..(10): 5-methyl modified nucleotide
  modified_base (13)..(13): bicyclic nucleic acid (BNA)
aguucuguccaag

SEQ ID NO: 14328 - RNA, 12 nt, Artificial Sequence
  source: /note="Description of Artificial Sequence: Synthetic oligonucleotide"
  source: /note="RNA"
  modified_base (5)..(5): 5-methyl modified nucleotide
  modified_base (9)..(9): 5-methyl modified nucleotide
  modified_base (10)..(10): 5-methyl modified nucleotide
  modified_base (12)..(12): bicyclic nucleic acid (BNA)
aguucuguccaa

SEQ ID NO: 14329 - RNA, 11 nt, Artificial Sequence
  source: /note="Description of Artificial Sequence: Synthetic oligonucleotide"
  source: /note="RNA"
  modified_base (5)..(5): 5-methyl modified nucleotide
  modified_base (9)..(9): 5-methyl modified nucleotide
  modified_base (10)..(10): 5-methyl modified nucleotide
  modified_base (11)..(11): bicyclic nucleic acid (BNA)
aguucugucca

SEQ ID NO: 14330 - RNA, 10 nt, Artificial Sequence
  source: /note="Description of Artificial Sequence: Synthetic oligonucleotide"
  source: /note="RNA"
  modified_base (5)..(5): 5-methyl modified nucleotide
  modified_base (9)..(9): 5-methyl modified nucleotide
  modified_base (10)..(10): 5-methyl bicyclic nucleic acid
aguucugucc

SEQ ID NO: 14331 - RNA, 9 nt, Artificial Sequence
  source: /note="Description of Artificial Sequence: Synthetic oligonucleotide"
  source: /note="RNA"
  modified_base (5)..(5): 5-methyl modified nucleotide
  modified_base (9)..(9): 5-methyl bicyclic nucleic acid
aguucuguc

SEQ ID NO: 14332 - DNA, 8 bp, Artificial Sequence
  source: /note="Description of Artificial Sequence: Synthetic oligonucleotide"
  source: /note="Description of Combined DNA/RNA Molecule: Synthetic oligonucleotide"
  source: /note="DNA/RNA"
  modified_base (5)..(5): 5-methyl modified nucleotide
  modified_base (8)..(8): bicyclic nucleic acid (BNA)
aguucugt

SEQ ID NO: 14333 - DNA, 20 bp, Artificial Sequence
  source: /note="Description of Artificial Sequence: Synthetic oligonucleotide"
  source: /note="Description of Combined DNA/RNA Molecule: Synthetic oligonucleotide"
  source: /note="DNA/RNA"
  modified_base (6)..(6): 5-methyl modified nucleotide
  modified_base (10)..(10): 5-methyl modified nucleotide
  modified_base (11)..(11): 5-methyl modified nucleotide
  modified_base (15)..(15): 5-methyl modified nucleotide
  modified_base (16)..(16): 5-methyl modified nucleotide
  modified_base (17)..(17): 5-methyl modified nucleotide
  modified_base (20)..(20): bicyclic nucleic acid (BNA)
aaguucuguccaagcccggt

SEQ ID NO: 14334 - RNA, 19 nt, Artificial Sequence
  source: /note="Description of Artificial Sequence: Synthetic oligonucleotide"
  source: /note="RNA"
  modified_base (6)..(6): 5-methyl modified nucleotide
  modified_base (10)..(10): 5-methyl modified nucleotide
  modified_base (11)..(11): 5-methyl modified nucleotide
  modified_base (15)..(15): 5-methyl modified nucleotide
  modified_base (16)..(16): 5-methyl modified nucleotide
  modified_base (17)..(17): 5-methyl modified nucleotide
  modified_base (19)..(19): bicyclic nucleic acid (BNA)
aaguucuguccaagcccgg

SEQ ID NO: 14335 - RNA, 18 nt, Artificial Sequence
  source: /note="Description of Artificial Sequence: Synthetic oligonucleotide"
  source: /note="RNA"
  modified_base (6)..(6): 5-methyl modified nucleotide
  modified_base (10)..(10): 5-methyl modified nucleotide
  modified_base (11)..(11): 5-methyl modified nucleotide
  modified_base (15)..(15): 5-methyl modified nucleotide
  modified_base (16)..(16): 5-methyl modified nucleotide
  modified_base (17)..(17): 5-methyl modified nucleotide
  modified_base (18)..(18): bicyclic nucleic acid (BNA)
aaguucuguccaagcccg

SEQ ID NO: 14336 - RNA, 17 nt, Artificial Sequence
  source: /note="Description of Artificial Sequence: Synthetic oligonucleotide"
  source: /note="RNA"
  modified_base (6)..(6): 5-methyl modified nucleotide
  modified_base (10)..(10): 5-methyl modified nucleotide
  modified_base (11)..(11): 5-methyl modified nucleotide
  modified_base (15)..(15): 5-methyl modified nucleotide
  modified_base (16)..(16): 5-methyl modified nucleotide
  modified_base (17)..(17): 5-methyl bicyclic nucleic acid
aaguucuguccaagccc

SEQ ID NO: 14337 - RNA, 16 nt, Artificial Sequence
  source: /note="Description of Artificial Sequence: Synthetic oligonucleotide"
  source: /note="RNA"
  modified_base (6)..(6): 5-methyl modified nucleotide
  modified_base (10)..(10): 5-methyl modified nucleotide
  modified_base (11)..(11): 5-methyl modified nucleotide
  modified_base (15)..(15): 5-methyl modified nucleotide
  modified_base (16)..(16): 5-methyl bicyclic nucleic acid
aaguucuguccaagcc

SEQ ID NO: 14338 - RNA, 15 nt, Artificial Sequence
  source: /note="Description of Artificial Sequence: Synthetic oligonucleotide"
  source: /note="RNA"
  modified_base (6)..(6): 5-methyl modified nucleotide
  modified_base (10)..(10): 5-methyl modified nucleotide
  modified_base (11)..(11): 5-methyl modified nucleotide
  modified_base (15)..(15): 5-methyl bicyclic nucleic acid
aaguucuguccaagc

SEQ ID NO: 14339 - RNA, 14 nt, Artificial Sequence
  source: /note="Description of Artificial Sequence: Synthetic oligonucleotide"
  source: /note="RNA"
  modified_base (6)..(6): 5-methyl modified nucleotide
  modified_base (10)..(10): 5-methyl modified nucleotide
  modified_base (11)..(11): 5-methyl modified nucleotide
  modified_base (14)..(14): bicyclic nucleic acid (BNA)
aaguucuguccaag

SEQ ID NO: 14340 - RNA, 13 nt, Artificial Sequence
  source: /note="Description of Artificial Sequence: Synthetic oligonucleotide"
  source: /note="RNA"
  modified_base (6)..(6): 5-methyl modified nucleotide
  modified_base (10)..(10): 5-methyl modified nucleotide
  modified_base (11)..(11): 5-methyl modified nucleotide
  modified_base (13)..(13): bicyclic nucleic acid (BNA)
aaguucuguccaa

SEQ ID NO: 14341 - RNA, 12 nt, Artificial Sequence
  source: /note="Description of Artificial Sequence: Synthetic oligonucleotide"
  source: /note="RNA"
  modified_base (6)..(6): 5-methyl modified nucleotide
  modified_base (10)..(10): 5-methyl modified nucleotide
  modified_base (11)..(11): 5-methyl modified nucleotide
  modified_base (12)..(12): bicyclic nucleic acid (BNA)
aaguucugucca

SEQ ID NO: 14342 - RNA, 11 nt, Artificial Sequence
  source: /note="Description of Artificial Sequence: Synthetic oligonucleotide"
  source: /note="RNA"
  modified_base (6)..(6): 5-methyl modified nucleotide
  modified_base (10)..(10): 5-methyl modified nucleotide
  modified_base (11)..(11): 5-methyl bicyclic nucleic acid
aaguucugucc

SEQ ID NO: 14343 - RNA, 10 nt, Artificial Sequence
  source: /note="Description of Artificial Sequence: Synthetic oligonucleotide"
  source: /note="RNA"
  modified_base (6)..(6): 5-methyl modified nucleotide
  modified_base (10)..(10): 5-methyl bicyclic nucleic acid
aaguucuguc

SEQ ID NO: 14344 - DNA, 9 bp, Artificial Sequence
  source: /note="Description of Artificial Sequence: Synthetic oligonucleotide"
  source: /note="Description of Combined DNA/RNA Molecule: Synthetic oligonucleotide"
  source: /note="DNA/RNA"
  modified_base (6)..(6): 5-methyl modified nucleotide
  modified_base (9)..(9): bicyclic nucleic acid (BNA)
aaguucugt

SEQ ID NO: 14345 - RNA, 8 nt, Artificial Sequence
  source: /note="Description of Artificial Sequence: Synthetic oligonucleotide"
  source: /note="RNA"
  modified_base (6)..(6): 5-methyl modified nucleotide
  modified_base (8)..(8): bicyclic nucleic acid (BNA)
aaguucug

SEQ ID NO: 14346 - RNA, 20 nt, Artificial Sequence
  source: /note="Description of Artificial Sequence: Synthetic oligonucleotide"
  source: /note="RNA"
  modified_base (7)..(7): 5-methyl modified nucleotide
  modified_base (11)..(11): 5-methyl modified nucleotide
  modified_base (12)..(12): 5-methyl modified nucleotide
  modified_base (16)..(16): 5-methyl modified nucleotide
  modified_base (17)..(17): 5-methyl modified nucleotide
  modified_base (18)..(18): 5-methyl modified nucleotide
  modified_base (20)..(20): bicyclic nucleic acid (BNA)
uaaguucuguccaagcccgg

SEQ ID NO: 14347 - RNA, 19 nt, Artificial Sequence
  source: /note="Description of Artificial Sequence: Synthetic oligonucleotide"
  source: /note="RNA"
  modified_base (7)..(7): 5-methyl modified nucleotide
  modified_base (11)..(11): 5-methyl modified nucleotide
  modified_base (12)..(12): 5-methyl modified nucleotide
  modified_base (16)..(16): 5-methyl modified nucleotide
  modified_base (17)..(17): 5-methyl modified nucleotide
  modified_base (18)..(18): 5-methyl modified nucleotide
  modified_base (19)..(19): bicyclic nucleic acid (BNA)
uaaguucuguccaagcccg

SEQ ID NO: 14348 - RNA, 18 nt, Artificial Sequence
  source: /note="Description of Artificial Sequence: Synthetic oligonucleotide"
  source: /note="RNA"
  modified_base (7)..(7): 5-methyl modified nucleotide
  modified_base (11)..(11): 5-methyl modified nucleotide
  modified_base (12)..(12): 5-methyl modified nucleotide
  modified_base (16)..(16): 5-methyl modified nucleotide
  modified_base (17)..(17): 5-methyl modified nucleotide
  modified_base (18)..(18): 5-methyl bicyclic nucleic acid
uaaguucuguccaagccc

SEQ ID NO: 14349 - RNA, 17 nt, Artificial Sequence
  source: /note="Description of Artificial Sequence: Synthetic oligonucleotide"
  source: /note="RNA"
  modified_base (7)..(7): 5-methyl modified nucleotide
  modified_base (11)..(11): 5-methyl modified nucleotide
  modified_base (12)..(12): 5-methyl modified nucleotide
  modified_base (16)..(16): 5-methyl modified nucleotide
  modified_base (17)..(17): 5-methyl bicyclic nucleic acid
uaaguucuguccaagcc

SEQ ID NO: 14350 - RNA, 16 nt, Artificial Sequence
  source: /note="Description of Artificial Sequence: Synthetic oligonucleotide"
  source: /note="RNA"
  modified_base (7)..(7): 5-methyl modified nucleotide
  modified_base (11)..(11): 5-methyl modified nucleotide
  modified_base (12)..(12): 5-methyl modified nucleotide
  modified_base (16)..(16): 5-methyl bicyclic nucleic acid
uaaguucuguccaagc

SEQ ID NO: 14351 - RNA, 14 nt, Artificial Sequence
  source: /note="Description of Artificial Sequence: Synthetic oligonucleotide"
  source: /note="RNA"
  modified_base (7)..(7): 5-methyl modified nucleotide
  modified_base (11)..(11): 5-methyl modified nucleotide
  modified_base (12)..(12): 5-methyl modified nucleotide
  modified_base (14)..(14): bicyclic nucleic acid (BNA)
uaaguucuguccaa

SEQ ID NO: 14352 - RNA, 13 nt, Artificial Sequence
  source: /note="Description of Artificial Sequence: Synthetic oligonucleotide"
  source: /note="RNA"
  modified_base (7)..(7): 5-methyl modified nucleotide
  modified_base (11)..(11): 5-methyl modified nucleotide
  modified_base (12)..(12): 5-methyl modified nucleotide
  modified_base (13)..(13): bicyclic nucleic acid (BNA)
uaaguucugucca

SEQ ID NO: 14353 - RNA, 12 nt, Artificial Sequence
  source: /note="Description of Artificial Sequence: Synthetic oligonucleotide"
  source: /note="RNA"
  modified_base (7)..(7): 5-methyl modified nucleotide
  modified_base (11)..(11): 5-methyl modified nucleotide
  modified_base (12)..(12): 5-methyl bicyclic nucleic acid
uaaguucugucc

SEQ ID NO: 14354 - RNA, 11 nt, Artificial Sequence
  source: /note="Description of Artificial Sequence: Synthetic oligonucleotide"
  source: /note="RNA"
  modified_base (7)..(7): 5-methyl modified nucleotide
  modified_base (11)..(11): 5-methyl bicyclic nucleic acid
uaaguucuguc

SEQ ID NO: 14355 - DNA, 10 bp, Artificial Sequence
  source: /note="Description of Artificial Sequence: Synthetic oligonucleotide"
  source: /note="Description of Combined DNA/RNA Molecule: Synthetic oligonucleotide"
  source: /note="DNA/RNA"
  modified_base (7)..(7): 5-methyl modified nucleotide
  modified_base (10)..(10): bicyclic nucleic acid (BNA)
uaaguucugt

SEQ ID NO: 14356 - RNA, 9 nt, Artificial Sequence
  source: /note="Description of Artificial Sequence: Synthetic oligonucleotide"
  source: /note="RNA"
  modified_base (7)..(7): 5-methyl modified nucleotide
  modified_base (9)..(9): bicyclic nucleic acid (BNA)
uaaguucug

SEQ ID NO: 14357 - DNA, 8 bp, Artificial Sequence
  source: /note="Description of Artificial Sequence: Synthetic oligonucleotide"
  source: /note="Description of Combined DNA/RNA Molecule: Synthetic oligonucleotide"
  source: /note="DNA/RNA"
  modified_base (7)..(7): 5-methyl modified nucleotide
  modified_base (8)..(8): bicyclic nucleic acid (BNA)
uaaguuct

SEQ ID NO: 14358 - RNA, 20 nt, Artificial Sequence
  source: /note="Description of Artificial Sequence: Synthetic oligonucleotide"
  source: /note="RNA"
  modified_base (8)..(8): 5-methyl modified nucleotide
  modified_base (12)..(12): 5-methyl modified nucleotide
  modified_base (13)..(13): 5-methyl modified nucleotide
  modified_base (17)..(17): 5-methyl modified nucleotide
  modified_base (18)..(18): 5-methyl modified nucleotide
  modified_base (19)..(19): 5-methyl modified nucleotide
  modified_base (20)..(20): bicyclic nucleic acid (BNA)
guaaguucuguccaagcccg

SEQ ID NO: 14359 - RNA, 19 nt, Artificial Sequence
  source: /note="Description of Artificial Sequence: Synthetic oligonucleotide"
  source: /note="RNA"
  modified_base (8)..(8): 5-methyl modified nucleotide
  modified_base (12)..(12): 5-methyl modified nucleotide
  modified_base (13)..(13): 5-methyl modified nucleotide
  modified_base (17)..(17): 5-methyl modified nucleotide
  modified_base (18)..(18): 5-methyl modified nucleotide
  modified_base (19)..(19): 5-methyl bicyclic nucleic acid
guaaguucuguccaagccc

SEQ ID NO: 14360 - RNA, 17 nt, Artificial Sequence
  source: /note="Description of Artificial Sequence: Synthetic oligonucleotide"
  source: /note="RNA"
  modified_base (8)..(8): 5-methyl modified nucleotide
  modified_base (12)..(12): 5-methyl modified nucleotide
  modified_base (13)..(13): 5-methyl modified nucleotide
  modified_base (17)..(17): 5-methyl bicyclic nucleic acid
guaaguucuguccaagc

SEQ ID NO: 14361 - RNA, 16 nt, Artificial Sequence
  source: /note="Description of Artificial Sequence: Synthetic oligonucleotide"
  source: /note="RNA"
  modified_base (8)..(8): 5-methyl modified nucleotide
  modified_base (12)..(12): 5-methyl modified nucleotide
  modified_base (13)..(13): 5-methyl modified nucleotide
  modified_base (16)..(16): bicyclic nucleic acid (BNA)
guaaguucuguccaag

SEQ ID NO: 14362 - RNA, 15 nt, Artificial Sequence
  source: /note="Description of Artificial Sequence: Synthetic oligonucleotide"
  source: /note="RNA"
  modified_base (8)..(8): 5-methyl modified nucleotide
  modified_base (12)..(12): 5-methyl modified nucleotide
  modified_base (13)..(13): 5-methyl modified nucleotide
  modified_base (15)..(15): bicyclic nucleic acid (BNA)
guaaguucuguccaa

SEQ ID NO: 14363 - RNA, 14 nt, Artificial Sequence
  source: /note="Description of Artificial Sequence: Synthetic oligonucleotide"
  source: /note="RNA"
  modified_base (8)..(8): 5-methyl modified nucleotide
  modified_base (12)..(12): 5-methyl modified nucleotide
  modified_base (13)..(13): 5-methyl modified nucleotide
  modified_base (14)..(14): bicyclic nucleic acid (BNA)
guaaguucugucca

SEQ ID NO: 14364 - RNA, 13 nt, Artificial Sequence
  source: /note="Description of Artificial Sequence: Synthetic oligonucleotide"
  source: /note="RNA"
  modified_base (8)..(8): 5-methyl modified nucleotide
  modified_base (12)..(12): 5-methyl modified nucleotide
  modified_base (13)..(13): 5-methyl bicyclic nucleic acid
guaaguucugucc

SEQ ID NO: 14365 - RNA, 12 nt, Artificial Sequence
  source: /note="Description of Artificial Sequence: Synthetic oligonucleotide"
  source: /note="RNA"
  modified_base (8)..(8): 5-methyl modified nucleotide
  modified_base (12)..(12): 5-methyl bicyclic nucleic acid
guaaguucuguc

SEQ ID NO: 14366 - DNA, 11 bp, Artificial Sequence
  source: /note="Description of Artificial Sequence: Synthetic oligonucleotide"
  source: /note="Description of Combined DNA/RNA Molecule: Synthetic oligonucleotide"
  source: /note="DNA/RNA"
  modified_base (8)..(8): 5-methyl modified nucleotide
  modified_base (11)..(11): bicyclic nucleic acid (BNA)
guaaguucugt

SEQ ID NO: 14367 - RNA, 10 nt, Artificial Sequence
  source: /note="Description of Artificial Sequence: Synthetic oligonucleotide"
  source: /note="RNA"
  modified_base (8)..(8): 5-methyl modified nucleotide
  modified_base (10)..(10): bicyclic nucleic acid (BNA)
guaaguucug

SEQ ID NO: 14368 - DNA, 9 bp, Artificial Sequence
  source: /note="Description of Artificial Sequence: Synthetic oligonucleotide"
  source: /note="Description of Combined DNA/RNA Molecule: Synthetic oligonucleotide"
  source: /note="DNA/RNA"
  modified_base (8)..(8): 5-methyl modified nucleotide
  modified_base (9)..(9): bicyclic nucleic acid (BNA)
guaaguuct

SEQ ID NO: 14369 - RNA, 8 nt, Artificial Sequence
  source: /note="Description of Artificial Sequence: Synthetic oligonucleotide"
  source: /note="RNA"
  modified_base (8)..(8): 5-methyl bicyclic nucleic acid
guaaguuc

SEQ ID NO: 14370 - RNA, 20 nt, Artificial Sequence
  source: /note="Description of Artificial Sequence: Synthetic oligonucleotide"
  source: /note="RNA"
  modified_base (9)..(9): 5-methyl modified nucleotide
  modified_base (13)..(13): 5-methyl modified nucleotide
  modified_base (14)..(14): 5-methyl modified nucleotide
  modified_base (18)..(18): 5-methyl modified nucleotide
  modified_base (19)..(19): 5-methyl modified nucleotide
  modified_base (20)..(20): 5-methyl bicyclic nucleic acid
gguaaguucuguccaagccc

SEQ ID NO: 14371 - RNA, 19 nt, Artificial Sequence
  source: /note="Description of Artificial Sequence: Synthetic oligonucleotide"
  source: /note="RNA"
  modified_base (9)..(9): 5-methyl modified nucleotide
  modified_base (13)..(13): 5-methyl modified nucleotide
  modified_base (14)..(14): 5-methyl modified nucleotide
  modified_base (18)..(18): 5-methyl modified nucleotide
  modified_base (19)..(19): 5-methyl bicyclic nucleic acid
gguaaguucuguccaagcc

SEQ ID NO: 14372 - RNA, 17 nt, Artificial Sequence
  source: /note="Description of Artificial Sequence: Synthetic oligonucleotide"
  source: /note="RNA"
  modified_base (9)..(9): 5-methyl modified nucleotide
  modified_base (13)..(13): 5-methyl modified nucleotide
  modified_base (14)..(14): 5-methyl modified nucleotide
  modified_base (17)..(17): bicyclic nucleic acid (BNA)
gguaaguucuguccaag

SEQ ID NO: 14373 - RNA, 16 nt, Artificial Sequence
  source: /note="Description of Artificial Sequence: Synthetic oligonucleotide"
  source: /note="RNA"
  modified_base (9)..(9): 5-methyl modified nucleotide
  modified_base (13)..(13): 5-methyl modified nucleotide
  modified_base (14)..(14): 5-methyl modified nucleotide
  modified_base (16)..(16): bicyclic nucleic acid (BNA)
gguaaguucuguccaa

SEQ ID NO: 14374 - RNA, 15 nt, Artificial Sequence
  source: /note="Description of Artificial Sequence: Synthetic oligonucleotide"
  source: /note="RNA"
  modified_base (9)..(9): 5-methyl modified nucleotide
  modified_base (13)..(13): 5-methyl modified nucleotide
  modified_base (14)..(14): 5-methyl modified nucleotide
  modified_base (15)..(15): bicyclic nucleic acid (BNA)
gguaaguucugucca

SEQ ID NO: 14375 - RNA, 14 nt, Artificial Sequence
  source: /note="Description of Artificial Sequence: Synthetic oligonucleotide"
  source: /note="RNA"
  modified_base (9)..(9): 5-methyl modified nucleotide
  modified_base (13)..(13): 5-methyl modified nucleotide
  modified_base (14)..(14): 5-methyl bicyclic nucleic acid
gguaaguucugucc

SEQ ID NO: 14376 - RNA, 13 nt, Artificial Sequence
  source: /note="Description of Artificial Sequence: Synthetic oligonucleotide"
  source: /note="RNA"
  modified_base (9)..(9): 5-methyl modified nucleotide
  modified_base (13)..(13): 5-methyl bicyclic nucleic acid
gguaaguucuguc

SEQ ID NO: 14377 - DNA, 12 bp, Artificial Sequence
  source: /note="Description of Artificial Sequence: Synthetic oligonucleotide"
  source: /note="Description of Combined DNA/RNA Molecule: Synthetic oligonucleotide"
  source: /note="DNA/RNA"
  modified_base (9)..(9): 5-methyl modified nucleotide
  modified_base (12)..(12): bicyclic nucleic acid (BNA)
gguaaguucugt

SEQ ID NO: 14378 - RNA, 11 nt, Artificial Sequence
  source: /note="Description of Artificial Sequence: Synthetic oligonucleotide"
  source: /note="RNA"
  modified_base (9)..(9): 5-methyl modified nucleotide
  modified_base (11)..(11): bicyclic nucleic acid (BNA)
gguaaguucug

SEQ ID NO: 14379 - DNA, 10 bp, Artificial Sequence
  source: /note="Description of Artificial Sequence: Synthetic oligonucleotide"
  source: /note="Description of Combined DNA/RNA Molecule: Synthetic oligonucleotide"
  source: /note="DNA/RNA"
  modified_base (9)..(9): 5-methyl modified nucleotide
  modified_base (10)..(10): bicyclic nucleic acid (BNA)
gguaaguuct

SEQ ID NO: 14380 - RNA, 9 nt, Artificial Sequence
  source: /note="Description of Artificial Sequence: Synthetic oligonucleotide"
  source: /note="RNA"
  modified_base (9)..(9): 5-methyl bicyclic nucleic acid
gguaaguuc

SEQ ID NO: 14381 - DNA, 8 bp, Artificial Sequence
  source: /note="Description of Artificial Sequence: Synthetic oligonucleotide"
  source: /note="Description of Combined DNA/RNA Molecule: Synthetic oligonucleotide"
  source: /note="DNA/RNA"
  modified_base (8)..(8): bicyclic nucleic acid (BNA)
gguaagut

SEQ ID NO: 14382 - RNA, 20 nt, Artificial Sequence
  source: /note="Description of Artificial Sequence: Synthetic oligonucleotide"
  source: /note="RNA"
  modified_base (1)..(1): 5-methyl modified nucleotide
  modified_base (10)..(10): 5-methyl modified nucleotide
  modified_base (14)..(14): 5-methyl modified nucleotide
  modified_base (15)..(15): 5-methyl modified nucleotide
  modified_base (19)..(19): 5-methyl modified nucleotide
  modified_base (20)..(20): 5-methyl bicyclic nucleic acid
cgguaaguucuguccaagcc

SEQ ID NO: 14383 - RNA, 19 nt, Artificial Sequence
  source: /note="Description of Artificial Sequence: Synthetic oligonucleotide"
  source: /note="RNA"
  modified_base (1)..(1): 5-methyl modified nucleotide
  modified_base (10)..(10): 5-methyl modified nucleotide
  modified_base (14)..(14): 5-methyl modified nucleotide
  modified_base (15)..(15): 5-methyl modified nucleotide
  modified_base (19)..(19): 5-methyl bicyclic nucleic acid
cgguaaguucuguccaagc

SEQ ID NO: 14384 - RNA, 18 nt, Artificial Sequence
  source: /note="Description of Artificial Sequence: Synthetic oligonucleotide"
  source: /note="RNA"
  modified_base (1)..(1): 5-methyl modified nucleotide
  modified_base (10)..(10): 5-methyl modified nucleotide
  modified_base (14)..(14): 5-methyl modified nucleotide
  modified_base (15)..(15): 5-methyl modified nucleotide
  modified_base (18)..(18): bicyclic nucleic acid (BNA)
cgguaaguucuguccaag

SEQ ID NO: 14385 - RNA, 17 nt, Artificial Sequence
  source: /note="Description of Artificial Sequence: Synthetic oligonucleotide"
  source: /note="RNA"
  modified_base (1)..(1): 5-methyl modified nucleotide
  modified_base (10)..(10): 5-methyl modified nucleotide
  modified_base (14)..(14): 5-methyl modified nucleotide
  modified_base (15)..(15): 5-methyl modified nucleotide
  modified_base (17)..(17): bicyclic nucleic acid (BNA)
cgguaaguucuguccaa

SEQ ID NO: 14386 - RNA, 16 nt, Artificial Sequence
  source: /note="Description of Artificial Sequence: Synthetic oligonucleotide"
  source: /note="RNA"
  modified_base (1)..(1): 5-methyl modified nucleotide
  modified_base (10)..(10): 5-methyl modified nucleotide
  modified_base (14)..(14): 5-methyl modified nucleotide
  modified_base (15)..(15): 5-methyl modified nucleotide
  modified_base (16)..(16): bicyclic nucleic acid (BNA)
cgguaaguucugucca

SEQ ID NO: 14387 - RNA, 15 nt, Artificial Sequence
  source: /note="Description of Artificial Sequence: Synthetic oligonucleotide"
  source: /note="RNA"
  modified_base (1)..(1): 5-methyl modified nucleotide
  modified_base (10)..(10): 5-methyl modified nucleotide
  modified_base (14)..(14): 5-methyl modified nucleotide
  modified_base (15)..(15): 5-methyl bicyclic nucleic acid
cgguaaguucugucc

SEQ ID NO: 14388 - RNA, 14 nt, Artificial Sequence
  source: /note="Description of Artificial Sequence: Synthetic oligonucleotide"
  source: /note="RNA"
  modified_base (1)..(1): 5-methyl modified nucleotide
  modified_base (10)..(10): 5-methyl modified nucleotide
  modified_base (14)..(14): 5-methyl bicyclic nucleic acid
cgguaaguucuguc

SEQ ID NO: 14389 - DNA, 13 bp, Artificial Sequence
  source: /note="Description of Artificial Sequence: Synthetic oligonucleotide"
  source: /note="Description of Combined DNA/RNA Molecule: Synthetic oligonucleotide"
  source: /note="DNA/RNA"
  modified_base (1)..(1): 5-methyl modified nucleotide
  modified_base (10)..(10): 5-methyl modified nucleotide
  modified_base (13)..(13): bicyclic nucleic acid (BNA)
cgguaaguucugt

SEQ ID NO: 14390 - RNA, 12 nt, Artificial Sequence
  source: /note="Description of Artificial Sequence: Synthetic oligonucleotide"
  source: /note="RNA"
  modified_base (1)..(1): 5-methyl modified nucleotide
  modified_base (10)..(10): 5-methyl modified nucleotide
  modified_base (12)..(12): bicyclic nucleic acid (BNA)
cgguaaguucug

SEQ ID NO: 14391 - DNA, 11 bp, Artificial Sequence
  source: /note="Description of Artificial Sequence: Synthetic oligonucleotide"
  source: /note="Description of Combined DNA/RNA Molecule: Synthetic oligonucleotide"
  source: /note="DNA/RNA"
  modified_base (1)..(1): 5-methyl modified nucleotide
  modified_base (10)..(10): 5-methyl modified nucleotide
  modified_base (11)..(11): bicyclic nucleic acid (BNA)
cgguaaguuct

SEQ ID NO: 14392 - RNA, 10 nt, Artificial Sequence
  source: /note="Description of Artificial Sequence: Synthetic oligonucleotide"
  source: /note="RNA"
  modified_base (1)..(1): 5-methyl modified nucleotide
  modified_base (10)..(10): 5-methyl bicyclic nucleic acid
cgguaaguuc

SEQ ID NO: 14393 - DNA, 9 bp, Artificial Sequence
  source: /note="Description of Artificial Sequence: Synthetic oligonucleotide"
  source: /note="Description of Combined DNA/RNA Molecule: Synthetic oligonucleotide"
  source: /note="DNA/RNA"
  modified_base (1)..(1): 5-methyl modified nucleotide
  modified_base (9)..(9): bicyclic nucleic acid (BNA)
cgguaagut

SEQ ID NO: 14394 - DNA, 8 bp, Artificial Sequence
  source: /note="Description of Artificial Sequence: Synthetic oligonucleotide"
  source: /note="Description of Combined DNA/RNA Molecule: Synthetic oligonucleotide"
  source: /note="DNA/RNA"
  modified_base (1)..(1): 5-methyl modified nucleotide
  modified_base (8)..(8): bicyclic nucleic acid (BNA)
cgguaagt

SEQ ID NO: 14395 - RNA, 20 nt, Artificial Sequence
  source: /note="Description of Artificial Sequence: Synthetic oligonucleotide"
  source: /note="RNA"
  modified_base (2)..(2): 5-methyl modified nucleotide
  modified_base (11)..(11): 5-methyl modified nucleotide
  modified_base (15)..(15): 5-methyl modified nucleotide
  modified_base (16)..(16): 5-methyl modified nucleotide
  modified_base (20)..(20): 5-methyl bicyclic nucleic acid
ucgguaaguucuguccaagc

SEQ ID NO: 14396 - RNA, 19 nt, Artificial Sequence
  source: /note="Description of Artificial Sequence: Synthetic oligonucleotide"
  source: /note="RNA"
  modified_base (2)..(2): 5-methyl modified nucleotide
  modified_base (11)..(11): 5-methyl modified nucleotide
  modified_base (15)..(15): 5-methyl modified nucleotide
  modified_base (16)..(16): 5-methyl modified nucleotide
  modified_base (19)..(19): bicyclic nucleic acid (BNA)
ucgguaaguucuguccaag

SEQ ID NO: 14397 - RNA, 18 nt, Artificial Sequence
  source: /note="Description of Artificial Sequence: Synthetic oligonucleotide"
  source: /note="RNA"
  modified_base (2)..(2): 5-methyl modified nucleotide
  modified_base (11)..(11): 5-methyl modified nucleotide
  modified_base (15)..(15): 5-methyl modified nucleotide
  modified_base (16)..(16): 5-methyl modified nucleotide
  modified_base (18)..(18): bicyclic nucleic acid (BNA)
ucgguaaguucuguccaa

SEQ ID NO: 14398 - RNA, 17 nt, Artificial Sequence
  source: /note="Description of Artificial Sequence: Synthetic oligonucleotide"
  source: /note="RNA"
  modified_base (2)..(2): 5-methyl modified nucleotide
  modified_base (11)..(11): 5-methyl modified nucleotide
  modified_base (15)..(15): 5-methyl modified nucleotide
  modified_base (16)..(16): 5-methyl modified nucleotide
  modified_base (17)..(17): bicyclic nucleic acid (BNA)
ucgguaaguucugucca

SEQ ID NO: 14399 - RNA, 16 nt, Artificial Sequence
  source: /note="Description of Artificial Sequence: Synthetic oligonucleotide"
  source: /note="RNA"
  modified_base (2)..(2): 5-methyl modified nucleotide
  modified_base (11)..(11): 5-methyl modified nucleotide
  modified_base (15)..(15): 5-methyl modified nucleotide
  modified_base (16)..(16): 5-methyl bicyclic nucleic acid
ucgguaaguucugucc

SEQ ID NO: 14400 - RNA, 15 nt, Artificial Sequence
  source: /note="Description of Artificial Sequence: Synthetic oligonucleotide"
  source: /note="RNA"
  modified_base (2)..(2): 5-methyl modified nucleotide
  modified_base (11)..(11): 5-methyl modified nucleotide
  modified_base (15)..(15): 5-methyl bicyclic nucleic acid
ucgguaaguucuguc

SEQ ID NO: 14401 - DNA, 14 bp, Artificial Sequence
  source: /note="Description of Artificial Sequence: Synthetic oligonucleotide"
  source: /note="Description of Combined DNA/RNA Molecule: Synthetic oligonucleotide"
  source: /note="DNA/RNA"
  modified_base (2)..(2): 5-methyl modified nucleotide
  modified_base (11)..(11): 5-methyl modified nucleotide
  modified_base (14)..(14): bicyclic nucleic acid (BNA)
ucgguaaguucugt

SEQ ID NO: 14402 - RNA, 13 nt, Artificial Sequence
  source: /note="Description of Artificial Sequence: Synthetic oligonucleotide"
  source: /note="RNA"
  modified_base (2)..(2): 5-methyl modified nucleotide
  modified_base (11)..(11): 5-methyl modified nucleotide
  modified_base (13)..(13): bicyclic nucleic acid (BNA)
ucgguaaguucug

SEQ ID NO: 14403 - DNA, 12 bp, Artificial Sequence
  source: /note="Description of Artificial Sequence: Synthetic oligonucleotide"
  source: /note="Description of Combined DNA/RNA Molecule: Synthetic oligonucleotide"
  source: /note="DNA/RNA"
  modified_base (2)..(2): 5-methyl modified nucleotide
  modified_base (11)..(11): 5-methyl modified nucleotide
  modified_base (12)..(12): bicyclic nucleic acid (BNA)
ucgguaaguuct

SEQ ID NO: 14404 - RNA, 11 nt, Artificial Sequence
  source: /note="Description of Artificial Sequence: Synthetic oligonucleotide"
  source: /note="RNA"
  modified_base (2)..(2): 5-methyl modified nucleotide
  modified_base (11)..(11): 5-methyl bicyclic nucleic acid
ucgguaaguuc

SEQ ID NO: 14405 - DNA, 10 bp, Artificial Sequence
  source: /note="Description of Artificial Sequence: Synthetic oligonucleotide"
  source: /note="Description of Combined DNA/RNA Molecule: Synthetic oligonucleotide"
  source: /note="DNA/RNA"
  modified_base (2)..(2): 5-methyl modified nucleotide
  modified_base (10)..(10): bicyclic nucleic acid (BNA)
ucgguaagut

SEQ ID NO: 14406 - DNA, 9 bp, Artificial Sequence
  source: /note="Description of Artificial Sequence: Synthetic oligonucleotide"
  source: /note="Description of Combined DNA/RNA Molecule: Synthetic oligonucleotide"
  source: /note="DNA/RNA"
  modified_base (2)..(2): 5-methyl modified nucleotide
  modified_base (9)..(9): bicyclic nucleic acid (BNA)
ucgguaagt

SEQ ID NO: 14407 - RNA, 20 nt, Artificial Sequence
  source: /note="Description of Artificial Sequence: Synthetic oligonucleotide"
  source: /note="RNA"
  modified_base (3)..(3): 5-methyl modified nucleotide
  modified_base (12)..(12): 5-methyl modified nucleotide
  modified_base (16)..(16): 5-methyl modified nucleotide
  modified_base (17)..(17): 5-methyl modified nucleotide
  modified_base (20)..(20): bicyclic nucleic acid (BNA)
gucgguaaguucuguccaag

SEQ ID NO: 14408 - RNA, 19 nt, Artificial Sequence
  source: /note="Description of Artificial Sequence: Synthetic oligonucleotide"
  source: /note="RNA"
  modified_base (3)..(3): 5-methyl modified nucleotide
  modified_base (12)..(12): 5-methyl modified nucleotide
  modified_base (16)..(16): 5-methyl modified nucleotide
  modified_base (17)..(17): 5-methyl modified nucleotide
  modified_base (19)..(19): bicyclic nucleic acid (BNA)
gucgguaaguucuguccaa

SEQ ID NO: 14409 - RNA, 18 nt, Artificial Sequence
  source: /note="Description of Artificial Sequence: Synthetic oligonucleotide"
  source: /note="RNA"
  modified_base (3)..(3): 5-methyl modified nucleotide
  modified_base (12)..(12): 5-methyl modified nucleotide
  modified_base (16)..(16): 5-methyl modified nucleotide
  modified_base (17)..(17): 5-methyl modified nucleotide
  modified_base (18)..(18): bicyclic nucleic acid (BNA)
gucgguaaguucugucca

SEQ ID NO: 14410 - RNA, 17 nt, Artificial Sequence
  source: /note="Description of Artificial Sequence: Synthetic oligonucleotide"
  source: /note="RNA"
  modified_base (3)..(3): 5-methyl modified nucleotide
  modified_base (12)..(12): 5-methyl modified nucleotide
  modified_base (16)..(16): 5-methyl modified nucleotide
  modified_base (17)..(17): 5-methyl bicyclic nucleic acid
gucgguaaguucugucc

SEQ ID NO: 14411 - RNA, 16 nt, Artificial Sequence
  source: /note="Description of Artificial Sequence: Synthetic oligonucleotide"
  source: /note="RNA"
  modified_base (3)..(3): 5-methyl modified nucleotide
  modified_base (12)..(12): 5-methyl modified nucleotide
  modified_base (16)..(16): 5-methyl bicyclic nucleic acid
gucgguaaguucuguc

SEQ ID NO: 14412 - DNA, 15 bp, Artificial Sequence
  source: /note="Description of Artificial Sequence: Synthetic oligonucleotide"
  source: /note="Description of Combined DNA/RNA Molecule: Synthetic oligonucleotide"
  source: /note="DNA/RNA"
  modified_base (3)..(3): 5-methyl modified nucleotide
  modified_base (12)..(12): 5-methyl modified nucleotide
  modified_base (15)..(15): bicyclic nucleic acid (BNA)
gucgguaaguucugt

SEQ ID NO: 14413 - RNA, 14 nt, Artificial Sequence
  source: /note="Description of Artificial Sequence: Synthetic oligonucleotide"
  source: /note="RNA"
  modified_base (3)..(3): 5-methyl modified nucleotide
  modified_base (12)..(12): 5-methyl modified nucleotide
  modified_base (14)..(14): bicyclic nucleic acid (BNA)
gucgguaaguucug

SEQ ID NO: 14414 - DNA, 13 bp, Artificial Sequence
  source: /note="Description of Artificial Sequence: Synthetic oligonucleotide"
  source: /note="Description of Combined DNA/RNA Molecule: Synthetic oligonucleotide"
  source: /note="DNA/RNA"
  modified_base (3)..(3): 5-methyl modified nucleotide
  modified_base (12)..(12): 5-methyl modified nucleotide
  modified_base (13)..(13): bicyclic nucleic acid (BNA)
gucgguaaguuct

SEQ ID NO: 14415 - RNA, 12 nt, Artificial Sequence
  source: /note="Description of Artificial Sequence: Synthetic oligonucleotide"
  source: /note="RNA"
  modified_base (3)..(3): 5-methyl modified nucleotide
  modified_base (12)..(12): 5-methyl bicyclic nucleic acid
gucgguaaguuc

SEQ ID NO: 14416 - DNA, 11 bp, Artificial Sequence
  source: /note="Description of Artificial Sequence: Synthetic oligonucleotide"
  source: /note="Description of Combined DNA/RNA Molecule: Synthetic oligonucleotide"
  source: /note="DNA/RNA"
  modified_base (3)..(3): 5-methyl modified nucleotide
  modified_base (11)..(11): bicyclic nucleic acid (BNA)
gucgguaagut

SEQ ID NO: 14417 - DNA, 10 bp, Artificial Sequence
  source: /note="Description of Artificial Sequence: Synthetic oligonucleotide"
  source: /note="Description of Combined DNA/RNA Molecule: Synthetic oligonucleotide"
  source: /note="DNA/RNA"
  modified_base (3)..(3): 5-methyl modified nucleotide
  modified_base (10)..(10): bicyclic nucleic acid (BNA)
gucgguaagt

SEQ ID NO: 14418 - RNA, 20 nt, Artificial Sequence
  source: /note="Description of Artificial Sequence: Synthetic oligonucleotide"
  source: /note="RNA"
  modified_base (4)..(4): 5-methyl modified nucleotide
  modified_base (13)..(13): 5-methyl modified nucleotide
  modified_base (17)..(17): 5-methyl modified nucleotide
  modified_base (18)..(18): 5-methyl modified nucleotide
  modified_base (20)..(20): bicyclic nucleic acid (BNA)
agucgguaaguucuguccaa

SEQ ID NO: 14419 - RNA, 19 nt, Artificial Sequence
  source: /note="Description of Artificial Sequence: Synthetic oligonucleotide"
  source: /note="RNA"
  modified_base (4)..(4): 5-methyl modified nucleotide
  modified_base (13)..(13): 5-methyl modified nucleotide
  modified_base (17)..(17): 5-methyl modified nucleotide
  modified_base (18)..(18): 5-methyl modified nucleotide
  modified_base (19)..(19): bicyclic nucleic acid (BNA)
agucgguaaguucugucca

SEQ ID NO: 14420 - RNA, 17 nt, Artificial Sequence
  source: /note="Description of Artificial Sequence: Synthetic oligonucleotide"
  source: /note="RNA"
  modified_base (4)..(4): 5-methyl modified nucleotide
  modified_base (13)..(13): 5-methyl modified nucleotide
  modified_base (17)..(17): 5-methyl bicyclic nucleic acid
agucgguaaguucuguc

SEQ ID NO: 14421 - DNA, 16 bp, Artificial Sequence
  source: /note="Description of Artificial Sequence: Synthetic oligonucleotide"
  source: /note="Description of Combined DNA/RNA Molecule: Synthetic oligonucleotide"
  source: /note="DNA/RNA"
  modified_base (4)..(4): 5-methyl modified nucleotide
  modified_base (13)..(13): 5-methyl modified nucleotide
  modified_base (16)..(16): bicyclic nucleic acid (BNA)
agucgguaaguucugt

SEQ ID NO: 14422 - RNA, 15 nt, Artificial Sequence
  source: /note="Description of Artificial Sequence: Synthetic oligonucleotide"
  source: /note="RNA"
  modified_base (4)..(4): 5-methyl modified nucleotide
  modified_base (13)..(13): 5-methyl modified nucleotide
  modified_base (15)..(15): bicyclic nucleic acid (BNA)
agucgguaaguucug

SEQ ID NO: 14423 - DNA, 14 bp, Artificial Sequence
  source: /note="Description of Artificial Sequence: Synthetic oligonucleotide"
  source: /note="Description of Combined DNA/RNA Molecule: Synthetic oligonucleotide"
  source: /note="DNA/RNA"
  modified_base (4)..(4): 5-methyl modified nucleotide
  modified_base (13)..(13): 5-methyl modified nucleotide
  modified_base (14)..(14): bicyclic nucleic acid (BNA)
agucgguaaguuct

SEQ ID NO: 14424 - RNA, 13 nt, Artificial Sequence
  source: /note="Description of Artificial Sequence: Synthetic oligonucleotide"
  source: /note="RNA"
  modified_base (4)..(4): 5-methyl modified nucleotide
  modified_base (13)..(13): 5-methyl bicyclic nucleic acid
agucgguaaguuc

SEQ ID NO: 14425 - DNA, 12 bp, Artificial Sequence
  source: /note="Description of Artificial Sequence: Synthetic oligonucleotide"
  source: /note="Description of Combined DNA/RNA Molecule: Synthetic oligonucleotide"
  source: /note="DNA/RNA"
  modified_base (4)..(4): 5-methyl modified nucleotide
  modified_base (12)..(12): bicyclic nucleic acid (BNA)
agucgguaagut

SEQ ID NO: 14426 - DNA, 11 bp, Artificial Sequence
  source: /note="Description of Artificial Sequence: Synthetic oligonucleotide"
  source: /note="Description of Combined DNA/RNA Molecule: Synthetic oligonucleotide"
  source: /note="DNA/RNA"
  modified_base (4)..(4): 5-methyl modified nucleotide
  modified_base (11)..(11): bicyclic nucleic acid (BNA)
agucgguaagt

SEQ ID NO: 14427 - RNA, 20 nt, Artificial Sequence
  source: /note="Description of Artificial Sequence: Synthetic oligonucleotide"
  source: /note="RNA"
  modified_base (1)..(1): 5-methyl modified nucleotide
  modified_base (5)..(5): 5-methyl modified nucleotide
  modified_base (14)..(14): 5-methyl modified nucleotide
  modified_base (18)..(18): 5-methyl modified nucleotide
  modified_base (19)..(19): 5-methyl modified nucleotide
  modified_base (20)..(20): bicyclic nucleic acid (BNA)
cagucgguaaguucugucca

SEQ ID NO: 14428 - RNA, 19 nt, Artificial Sequence
  source: /note="Description of Artificial Sequence: Synthetic oligonucleotide"
  source: /note="RNA"
  modified_base (1)..(1): 5-methyl modified nucleotide
  modified_base (5)..(5): 5-methyl modified nucleotide
  modified_base (14)..(14): 5-methyl modified nucleotide
  modified_base (18)..(18): 5-methyl modified nucleotide
  modified_base (19)..(19): 5-methyl bicyclic nucleic acid
cagucgguaaguucugucc

SEQ ID NO: 14429 - RNA, 18 nt, Artificial Sequence
  source: /note="Description of Artificial Sequence: Synthetic oligonucleotide"
  source: /note="RNA"
  modified_base (1)..(1): 5-methyl modified nucleotide
  modified_base (5)..(5): 5-methyl modified nucleotide
  modified_base (14)..(14): 5-methyl modified nucleotide
  modified_base (18)..(18): 5-methyl bicyclic nucleic acid
cagucgguaaguucuguc

SEQ ID NO: 14430 - DNA, 17 bp, Artificial Sequence
  source: /note="Description of Artificial Sequence: Synthetic oligonucleotide"
  source: /note="Description of Combined DNA/RNA Molecule: Synthetic oligonucleotide"
  source: /note="DNA/RNA"
  modified_base (1)..(1): 5-methyl modified nucleotide
  modified_base (5)..(5): 5-methyl modified nucleotide
  modified_base (14)..(14): 5-methyl modified nucleotide
  modified_base (17)..(17): bicyclic nucleic acid (BNA)
cagucgguaaguucugt

SEQ ID NO: 14431 - RNA, 16 nt, Artificial Sequence
  source: /note="Description of Artificial Sequence: Synthetic oligonucleotide"
  source: /note="RNA"
  modified_base (1)..(1): 5-methyl modified nucleotide
  modified_base (5)..(5): 5-methyl modified nucleotide
  modified_base (14)..(14): 5-methyl modified nucleotide
  modified_base (16)..(16): bicyclic nucleic acid (BNA)
cagucgguaaguucug

SEQ ID NO: 14432 - DNA, 15 bp, Artificial Sequence
  source: /note="Description of Artificial Sequence: Synthetic oligonucleotide"
  source: /note="Description of Combined DNA/RNA Molecule: Synthetic oligonucleotide"
  source: /note="DNA/RNA"
  modified_base (1)..(1): 5-methyl modified nucleotide
  modified_base (5)..(5): 5-methyl modified nucleotide
  modified_base (14)..(14): 5-methyl modified nucleotide
  modified_base (15)..(15): bicyclic nucleic acid (BNA)
cagucgguaaguuct

SEQ ID NO: 14433 - RNA, 14 nt, Artificial Sequence
  source: /note="Description of Artificial Sequence: Synthetic oligonucleotide"
  source: /note="RNA"
  modified_base (1)..(1): 5-methyl modified nucleotide
  modified_base (5)..(5): 5-methyl modified nucleotide
  modified_base (14)..(14): 5-methyl bicyclic nucleic acid
cagucgguaaguuc

SEQ ID NO: 14434 - DNA, 13 bp, Artificial Sequence
  source: /note="Description of Artificial Sequence: Synthetic oligonucleotide"
  source: /note="Description of Combined DNA/RNA Molecule: Synthetic oligonucleotide"
  source: /note="DNA/RNA"
  modified_base (1)..(1): 5-methyl modified nucleotide
  modified_base (5)..(5): 5-methyl modified nucleotide
  modified_base (13)..(13): bicyclic nucleic acid (BNA)
cagucgguaagut

SEQ ID NO: 14435 - DNA, 12 bp, Artificial Sequence
  source: /note="Description of Artificial Sequence: Synthetic oligonucleotide"
  source: /note="Description of Combined DNA/RNA Molecule: Synthetic oligonucleotide"
  source: /note="DNA/RNA"
  modified_base (1)..(1): 5-methyl modified nucleotide
  modified_base (5)..(5): 5-methyl modified nucleotide
  modified_base (12)..(12): bicyclic nucleic acid (BNA)
cagucgguaagt

SEQ ID NO: 14436 - RNA, 20 nt, Artificial Sequence
  source: /note="Description of Artificial Sequence: Synthetic oligonucleotide"
  source: /note="RNA"
  modified_base (1)..(1): 5-methyl modified nucleotide
  modified_base (2)..(2): 5-methyl modified nucleotide
  modified_base (6)..(6): 5-methyl modified nucleotide
  modified_base (15)..(15): 5-methyl modified nucleotide
  modified_base (19)..(19): 5-methyl modified nucleotide
  modified_base (20)..(20): 5-methyl bicyclic nucleic acid
ccagucgguaaguucugucc

SEQ ID NO: 14437 - RNA, 19 nt, Artificial Sequence
  source: /note="Description of Artificial Sequence: Synthetic oligonucleotide"
  source: /note="RNA"
  modified_base (1)..(1): 5-methyl modified nucleotide
  modified_base (2)..(2): 5-methyl modified nucleotide
  modified_base (6)..(6): 5-methyl modified nucleotide
  modified_base (15)..(15): 5-methyl modified nucleotide
  modified_base (19)..(19): 5-methyl bicyclic nucleic acid
ccagucgguaaguucuguc

SEQ ID NO: 14438 - DNA, 18 bp, Artificial Sequence
  source: /note="Description of Artificial Sequence: Synthetic oligonucleotide"
  source: /note="Description of Combined DNA/RNA Molecule: Synthetic oligonucleotide"
  source: /note="DNA/RNA"
  modified_base (1)..(1): 5-methyl modified nucleotide
  modified_base (2)..(2): 5-methyl modified nucleotide
  modified_base (6)..(6): 5-methyl modified nucleotide
  modified_base (15)..(15): 5-methyl modified nucleotide
  modified_base (18)..(18): bicyclic nucleic acid (BNA)
ccagucgguaaguucugt

SEQ ID NO: 14439 - RNA, 17 nt, Artificial Sequence
  source: /note="Description of Artificial Sequence: Synthetic oligonucleotide"
  source: /note="RNA"
  modified_base (1)..(1): 5-methyl modified nucleotide
  modified_base (2)..(2): 5-methyl modified nucleotide
  modified_base (6)..(6): 5-methyl modified nucleotide
  modified_base (15)..(15): 5-methyl modified nucleotide
  modified_base (17)..(17): bicyclic nucleic acid (BNA)
ccagucgguaaguucug

SEQ ID NO: 14440 - DNA, 16 bp, Artificial Sequence
  source: /note="Description of Artificial Sequence: Synthetic oligonucleotide"
  source: /note="Description of Combined DNA/RNA Molecule: Synthetic oligonucleotide"
  source: /note="DNA/RNA"
  modified_base (1)..(1): 5-methyl modified nucleotide
  modified_base (2)..(2): 5-methyl modified nucleotide
  modified_base (6)..(6): 5-methyl modified nucleotide
  modified_base (15)..(15): 5-methyl modified nucleotide
  modified_base (16)..(16): bicyclic nucleic acid (BNA)
ccagucgguaaguuct

SEQ ID NO: 14441 - RNA, 15 nt, Artificial Sequence
  source: /note="Description of Artificial Sequence: Synthetic oligonucleotide"
  source: /note="RNA"
  modified_base (1)..(1): 5-methyl modified nucleotide
  modified_base (2)..(2): 5-methyl modified nucleotide
  modified_base (6)..(6): 5-methyl modified nucleotide
  modified_base (15)..(15): 5-methyl bicyclic nucleic acid
ccagucgguaaguuc

SEQ ID NO: 14442 - DNA, 14 bp, Artificial Sequence
  source: /note="Description of Artificial Sequence: Synthetic oligonucleotide"
  source: /note="Description of Combined DNA/RNA Molecule: Synthetic oligonucleotide"
  source: /note="DNA/RNA"
  modified_base (1)..(1): 5-methyl modified nucleotide
  modified_base (2)..(2): 5-methyl modified nucleotide
  modified_base (6)..(6): 5-methyl modified nucleotide
  modified_base (14)..(14): bicyclic nucleic acid (BNA)
ccagucgguaagut

SEQ ID NO: 14443 - DNA, 13 bp, Artificial Sequence
  source: /note="Description of Artificial Sequence: Synthetic oligonucleotide"
  source: /note="Description of Combined DNA/RNA Molecule: Synthetic oligonucleotide"
  source: /note="DNA/RNA"
  modified_base (1)..(1): 5-methyl modified nucleotide
  modified_base (2)..(2): 5-methyl modified nucleotide
  modified_base (6)..(6): 5-methyl modified nucleotide
  modified_base (13)..(13): bicyclic nucleic acid (BNA)
ccagucgguaagt

SEQ ID NO: 14444 - RNA, 20 nt, Artificial Sequence
  source: /note="Description of Artificial Sequence: Synthetic oligonucleotide"
  source: /note="RNA"
  modified_base (2)..(2): 5-methyl modified nucleotide
  modified_base (3)..(3): 5-methyl modified nucleotide
  modified_base (7)..(7): 5-methyl modified nucleotide
  modified_base (16)..(16): 5-methyl modified nucleotide
  modified_base (20)..(20): 5-methyl bicyclic nucleic acid
gccagucgguaaguucuguc

SEQ ID NO: 14445 - DNA, 19 bp, Artificial Sequence
  source: /note="Description of Artificial Sequence: Synthetic oligonucleotide"
  source: /note="Description of Combined DNA/RNA Molecule: Synthetic oligonucleotide"
  source: /note="DNA/RNA"
  modified_base (2)..(2): 5-methyl modified nucleotide
  modified_base (3)..(3): 5-methyl modified nucleotide
  modified_base (7)..(7): 5-methyl modified nucleotide
  modified_base (16)..(16): 5-methyl modified nucleotide
  modified_base (19)..(19): bicyclic nucleic acid (BNA)
gccagucgguaaguucugt

SEQ ID NO: 14446 - RNA, 18 nt, Artificial Sequence
  source: /note="Description of Artificial Sequence: Synthetic oligonucleotide"
  source: /note="RNA"
  modified_base (2)..(2): 5-methyl modified nucleotide
  modified_base (3)..(3): 5-methyl modified nucleotide
  modified_base (7)..(7): 5-methyl modified nucleotide
  modified_base (16)..(16): 5-methyl modified nucleotide
  modified_base (18)..(18): bicyclic nucleic acid (BNA)
gccagucgguaaguucug

SEQ ID NO: 14447 - DNA, 17 bp, Artificial Sequence
  source: /note="Description of Artificial Sequence: Synthetic oligonucleotide"
  source: /note="Description of Combined DNA/RNA Molecule: Synthetic oligonucleotide"
  source: /note="DNA/RNA"
  modified_base (2)..(2): 5-methyl modified nucleotide
  modified_base (3)..(3): 5-methyl modified nucleotide
  modified_base (7)..(7): 5-methyl modified nucleotide
  modified_base (16)..(16): 5-methyl modified nucleotide
  modified_base (17)..(17): bicyclic nucleic acid (BNA)
gccagucgguaaguuct

SEQ ID NO: 14448 - RNA, 16 nt, Artificial Sequence
  source: /note="Description of Artificial Sequence: Synthetic oligonucleotide"
  source: /note="RNA"
  modified_base (2)..(2): 5-methyl modified nucleotide
  modified_base (3)..(3): 5-methyl modified nucleotide
  modified_base (7)..(7): 5-methyl modified nucleotide
  modified_base (16)..(16): 5-methyl bicyclic nucleic acid
gccagucgguaaguuc

SEQ ID NO: 14449 - DNA, 15 bp, Artificial Sequence
  source: /note="Description of Artificial Sequence: Synthetic oligonucleotide"
  source: /note="Description of Combined DNA/RNA Molecule: Synthetic oligonucleotide"
  source: /note="DNA/RNA"
  modified_base (2)..(2): 5-methyl modified nucleotide
  modified_base (3)..(3): 5-methyl modified nucleotide
  modified_base (7)..(7): 5-methyl modified nucleotide
  modified_base (15)..(15): bicyclic nucleic acid (BNA)
gccagucgguaagut

SEQ ID NO: 14450 - DNA, 14 bp, Artificial Sequence
  source: /note="Description of Artificial Sequence: Synthetic oligonucleotide"
  source: /note="Description of Combined DNA/RNA Molecule: Synthetic oligonucleotide"
  source: /note="DNA/RNA"
  modified_base (2)..(2): 5-methyl modified nucleotide
  modified_base (3)..(3): 5-methyl modified nucleotide
  modified_base (7)..(7): 5-methyl modified nucleotide
  modified_base (14)..(14): bicyclic nucleic acid (BNA)
gccagucgguaagt

SEQ ID NO: 14451 - DNA, 20 bp, Artificial Sequence
  source: /note="Description of Artificial Sequence: Synthetic oligonucleotide"
  source: /note="Description of Combined DNA/RNA Molecule: Synthetic oligonucleotide"
  source: /note="DNA/RNA"
  modified_base (2)..(2): 5-methyl modified nucleotide
  modified_base (14)..(14): 5-methyl modified nucleotide
  modified_base (19)..(19): 5-methyl modified nucleotide
  modified_base (20)..(20): bicyclic nucleic acid (BNA)
ucaaggaagauggcauuuct

SEQ ID NO: 14452 - RNA, 22 nt, Artificial Sequence
  source: /note="Description of Artificial Sequence: Synthetic oligonucleotide"
  source: /note="RNA"
  modified_base (2)..(2): 5-methyl modified nucleotide
  modified_base (14)..(14): 5-methyl modified nucleotide
  modified_base (19)..(19): 5-methyl modified nucleotide
  modified_base (22)..(22): bicyclic nucleic acid (BNA)
ucaaggaagauggcauuucuag

SEQ ID NO: 14453 - DNA, 16 bp, Artificial Sequence
  source: /note="Description of Artificial Sequence: Synthetic oligonucleotide"
  source: /note="Description of Combined DNA/RNA Molecule: Synthetic oligonucleotide"
  source: /note="DNA/RNA"
  modified_base (2)..(2): 5-methyl modified nucleotide
  modified_base (14)..(14): 5-methyl modified nucleotide
  modified_base (16)..(16): bicyclic nucleic acid (BNA)
ucaaggaagauggcat

SEQ ID NO: 14454 - DNA, 15 bp, Artificial Sequence
  source: /note="Description of Artificial Sequence: Synthetic oligonucleotide"
  source: /note="Description of Combined DNA/RNA Molecule: Synthetic oligonucleotide"
  source: /note="DNA/RNA"
  modified_base (9)..(9): 5-methyl modified nucleotide
  modified_base (14)..(14): 5-methyl modified nucleotide
  modified_base (15)..(15): bicyclic nucleic acid (BNA)
gaagauggcauuuct

SEQ ID NO: 14455 - RNA, 21 nt, Artificial Sequence
  source: /note="Description of Artificial Sequence: Synthetic oligonucleotide"
  source: /note="RNA"
  modified_base (2)..(2): 5-methyl modified nucleotide
  modified_base (14)..(14): 5-methyl modified nucleotide
  modified_base (19)..(19): 5-methyl modified nucleotide
  modified_base (21)..(21): bicyclic nucleic acid (BNA)
ucaaggaagauggcauuucua

SEQ ID NO: 14456 - RNA, 19 nt, Artificial Sequence
  source: /note="Description of Artificial Sequence: Synthetic oligonucleotide"
  source: /note="RNA"
  modified_base (2)..(2): 5-methyl modified nucleotide
  modified_base (14)..(14): 5-methyl modified nucleotide
  modified_base (19)..(19): 5-methyl bicyclic nucleic acid
ucaaggaagauggcauuuc

SEQ ID NO: 14457 - DNA, 18 bp, Artificial Sequence
  source: /note="Description of Artificial Sequence: Synthetic oligonucleotide"
  source: /note="Description of Combined DNA/RNA Molecule: Synthetic oligonucleotide"
  source: /note="DNA/RNA"
  modified_base (2)..(2): 5-methyl modified nucleotide
  modified_base (14)..(14): 5-methyl modified nucleotide
  modified_base (18)..(18): bicyclic nucleic acid (BNA)
ucaaggaagauggcauut

SEQ ID NO: 14458 - DNA, 17 bp, Artificial Sequence
  source: /note="Description of Artificial Sequence: Synthetic oligonucleotide"
  source: /note="Description of Combined DNA/RNA Molecule: Synthetic oligonucleotide"
  source: /note="DNA/RNA"
  modified_base (2)..(2): 5-methyl modified nucleotide
  modified_base (14)..(14): 5-methyl modified nucleotide
  modified_base (17)..(17): bicyclic nucleic acid (BNA)
ucaaggaagauggcaut

SEQ ID NO: 14459 - RNA, 15 nt, Artificial Sequence
  source: /note="Description of Artificial Sequence: Synthetic oligonucleotide"
  source: /note="RNA"
  modified_base (2)..(2): 5-methyl modified nucleotide
  modified_base (14)..(14): 5-methyl modified nucleotide
  modified_base (15)..(15): bicyclic nucleic acid (BNA)
ucaaggaagauggca

SEQ ID NO: 14460 - RNA, 14 nt, Artificial Sequence
  source: /note="Description of Artificial Sequence: Synthetic oligonucleotide"
  source: /note="RNA"
  modified_base (2)..(2): 5-methyl modified nucleotide
  modified_base (14)..(14): 5-methyl bicyclic nucleic acid
ucaaggaagauggc

SEQ ID NO: 14461 - RNA, 13 nt, Artificial Sequence
  source: /note="Description of Artificial Sequence: Synthetic oligonucleotide"
  source: /note="RNA"
  modified_base (2)..(2): 5-methyl modified nucleotide
  modified_base (13)..(13): bicyclic nucleic acid (BNA)
ucaaggaagaugg

SEQ ID NO: 14462 - RNA, 12 nt, Artificial Sequence
  source: /note="Description of Artificial Sequence: Synthetic oligonucleotide"
  source: /note="RNA"
  modified_base (2)..(2): 5-methyl modified nucleotide
  modified_base (12)..(12): bicyclic nucleic acid (BNA)
ucaaggaagaug

SEQ ID NO: 14463 - DNA, 11 bp, Artificial Sequence
  source: /note="Description of Artificial Sequence: Synthetic oligonucleotide"
  source: /note="Description of Combined DNA/RNA Molecule: Synthetic oligonucleotide"
  source: /note="DNA/RNA"
  modified_base (2)..(2): 5-methyl modified nucleotide
  modified_base (11)..(11): bicyclic nucleic acid (BNA)
ucaaggaagat

SEQ ID NO: 14464 - RNA, 10 nt, Artificial Sequence
  source: /note="Description of Artificial Sequence: Synthetic oligonucleotide"
  source: /note="RNA"
  modified_base (2)..(2): 5-methyl modified nucleotide
  modified_base (10)..(10): bicyclic nucleic acid (BNA)
ucaaggaaga

SEQ ID NO: 14465 - RNA, 9 nt, Artificial Sequence
  source: /note="Description of Artificial Sequence: Synthetic oligonucleotide"
  source: /note="RNA"
  modified_base (2)..(2): 5-methyl modified nucleotide
  modified_base (9)..(9): bicyclic nucleic acid (BNA)
ucaaggaag

SEQ ID NO: 14466 - RNA, 21 nt, Artificial Sequence
  source: /note="Description of Artificial Sequence: Synthetic oligonucleotide"
  source: /note="RNA"
  modified_base (1)..(1): 5-methyl modified nucleotide
  modified_base (13)..(13): 5-methyl modified nucleotide
  modified_base (18)..(18): 5-methyl modified nucleotide
  modified_base (21)..(21): bicyclic nucleic acid (BNA)
caaggaagauggcauuucuag

SEQ ID NO: 14467 - RNA, 20 nt, Artificial Sequence
  source: /note="Description of Artificial Sequence: Synthetic oligonucleotide"
  source: /note="RNA"
  modified_base (1)..(1): 5-methyl modified nucleotide
  modified_base (13)..(13): 5-methyl modified nucleotide
  modified_base (18)..(18): 5-methyl modified nucleotide
  modified_base (20)..(20): bicyclic nucleic acid (BNA)
caaggaagauggcauuucua

SEQ ID NO: 14468 - DNA, 19 bp, Artificial Sequence
  source: /note="Description of Artificial Sequence: Synthetic oligonucleotide"
  source: /note="Description of Combined DNA/RNA Molecule: Synthetic oligonucleotide"
  source: /note="DNA/RNA"
  modified_base (1)..(1): 5-methyl modified nucleotide
  modified_base (13)..(13): 5-methyl modified nucleotide
  modified_base (18)..(18): 5-methyl modified nucleotide
  modified_base (19)..(19): bicyclic nucleic acid (BNA)
caaggaagauggcauuuct

SEQ ID NO: 14469 - RNA, 18 nt, Artificial Sequence
  source: /note="Description of Artificial Sequence: Synthetic oligonucleotide"
  source: /note="RNA"
  modified_base (1)..(1): 5-methyl modified nucleotide
  modified_base (13)..(13): 5-methyl modified nucleotide
  modified_base (18)..(18): 5-methyl bicyclic nucleic acid
caaggaagauggcauuuc

SEQ ID NO: 14470 - DNA, 17 bp, Artificial Sequence
  source: /note="Description of Artificial Sequence: Synthetic oligonucleotide"
  source: /note="Description of Combined DNA/RNA Molecule: Synthetic oligonucleotide"
  source: /note="DNA/RNA"
  modified_base (1)..(1): 5-methyl modified nucleotide
  modified_base (13)..(13): 5-methyl modified nucleotide
  modified_base (17)..(17): bicyclic nucleic acid (BNA)
caaggaagauggcauut

SEQ ID NO: 14471 - DNA, 16 bp, Artificial Sequence
  source: /note="Description of Artificial Sequence: Synthetic oligonucleotide"
  source: /note="Description of Combined DNA/RNA Molecule: Synthetic oligonucleotide"
  source: /note="DNA/RNA"
  modified_base (1)..(1): 5-methyl modified nucleotide
  modified_base (13)..(13): 5-methyl modified nucleotide
  modified_base (16)..(16): bicyclic nucleic acid (BNA)
caaggaagauggcaut

SEQ ID NO: 14472 - DNA, 15 bp, Artificial Sequence
  source: /note="Description of Artificial Sequence: Synthetic oligonucleotide"
  source: /note="Description of Combined DNA/RNA Molecule: Synthetic oligonucleotide"
  source: /note="DNA/RNA"
  modified_base (1)..(1): 5-methyl modified nucleotide
  modified_base (13)..(13): 5-methyl modified nucleotide
  modified_base (15)..(15): bicyclic nucleic acid (BNA)
caaggaagauggcat

SEQ ID NO: 14473 - RNA, 14 nt, Artificial Sequence
  source: /note="Description of Artificial Sequence: Synthetic oligonucleotide"
  source: /note="RNA"
  modified_base (1)..(1): 5-methyl modified nucleotide
  modified_base (13)..(13): 5-methyl modified nucleotide
  modified_base (14)..(14): bicyclic nucleic acid (BNA)
caaggaagauggca

SEQ ID NO: 14474 - RNA, 13 nt, Artificial Sequence
  source: /note="Description of Artificial Sequence: Synthetic oligonucleotide"
  source: /note="RNA"
  modified_base (1)..(1): 5-methyl modified nucleotide
  modified_base (13)..(13): 5-methyl bicyclic nucleic acid
caaggaagauggc

SEQ ID NO: 14475 - RNA, 12 nt, Artificial Sequence
  source: /note="Description of Artificial Sequence: Synthetic oligonucleotide"
  source: /note="RNA"
  modified_base (1)..(1): 5-methyl modified nucleotide
  modified_base (12)..(12): bicyclic nucleic acid (BNA)
caaggaagaugg

SEQ ID NO: 14476 - RNA, 11 nt, Artificial Sequence
  source: /note="Description of Artificial Sequence: Synthetic oligonucleotide"
  source: /note="RNA"
  modified_base (1)..(1): 5-methyl modified nucleotide
  modified_base (11)..(11): bicyclic nucleic acid (BNA)
caaggaagaug

SEQ ID NO: 14477 - DNA, 10 bp, Artificial Sequence
  source: /note="Description of Artificial Sequence: Synthetic oligonucleotide"
  source: /note="DNA/RNA"
  modified_base (1)..(1): 5-methyl modified nucleotide
  modified_base (10)..(10): bicyclic nucleic acid (BNA)
caaggaagat

SEQ ID NO: 14478 - RNA, 9 nt, Artificial Sequence
  source: /note="Description of Artificial Sequence: Synthetic oligonucleotide"
  source: /note="RNA/Antisense Oligonucleotide"
  modified_base (1)..(1): 5-methyl modified nucleotide
  modified_base (9)..(9): bicyclic nucleic acid (BNA)
caaggaaga

SEQ ID NO: 14479 - RNA, 8 nt, Artificial Sequence
  source: /note="Description of Artificial Sequence: Synthetic oligonucleotide"
  source: /note="RNA/Antisense Oligonucleotide"
  modified_base (1)..(1): 5-methyl modified nucleotide
  modified_base (8)..(8): bicyclic nucleic acid (BNA)
caaggaag

SEQ ID NO: 14480 - RNA, 20 nt, Artificial Sequence
  source: /note="Description of Artificial Sequence: Synthetic oligonucleotide"
  source: /note="RNA"
  modified_base (12)..(12): 5-methyl modified nucleotide
  modified_base (17)..(17): 5-methyl modified nucleotide
  modified_base (20)..(20): bicyclic nucleic acid (BNA)
aaggaagauggcauuucuag

SEQ ID NO: 14481 - RNA, 19 nt, Artificial Sequence
  source: /note="Description of Artificial Sequence: Synthetic oligonucleotide"
  source: /note="RNA"
  modified_base (12)..(12): 5-methyl modified nucleotide
  modified_base (17)..(17): 5-methyl modified nucleotide
  modified_base (19)..(19): bicyclic nucleic acid (BNA)
aaggaagauggcauuucua

SEQ ID NO: 14482 - DNA, 18 bp, Artificial Sequence
  source: /note="Description of Artificial Sequence: Synthetic oligonucleotide"
  source: /note="Description of Combined DNA/RNA Molecule: Synthetic oligonucleotide"
  source: /note="DNA/RNA"
  modified_base (12)..(12): 5-methyl modified nucleotide
  modified_base (17)..(17): 5-methyl modified nucleotide
  modified_base (18)..(18): bicyclic nucleic acid (BNA)
aaggaagauggcauuuct

SEQ ID NO: 14483 - RNA, 17 nt, Artificial Sequence
  source: /note="Description of Artificial Sequence: Synthetic oligonucleotide"
  source: /note="RNA"
  modified_base (12)..(12): 5-methyl modified nucleotide
  modified_base (17)..(17): 5-methyl bicyclic nucleic acid
aaggaagauggcauuuc

SEQ ID NO: 14484 - DNA, 16 bp, Artificial Sequence
  source: /note="Description of Artificial Sequence: Synthetic oligonucleotide"
  source: /note="Description of Combined DNA/RNA Molecule: Synthetic oligonucleotide"
  source: /note="DNA/RNA"
  modified_base (12)..(12): 5-methyl modified nucleotide
  modified_base (16)..(16): bicyclic nucleic acid (BNA)
aaggaagauggcauut

SEQ ID NO: 14485 - DNA, 15 bp, Artificial Sequence
  source: /note="Description of Artificial Sequence: Synthetic oligonucleotide"
  source: /note="Description of Combined DNA/RNA Molecule: Synthetic oligonucleotide"
  source: /note="DNA/RNA"
  modified_base (12)..(12): 5-methyl modified nucleotide
  modified_base (15)..(15): bicyclic nucleic acid (BNA)
aaggaagauggcaut

SEQ ID NO: 14486 - DNA, 14 bp, Artificial Sequence
  source: /note="Description of Artificial Sequence: Synthetic oligonucleotide"
  source: /note="Description of Combined DNA/RNA Molecule: Synthetic oligonucleotide"
  source: /note="DNA/RNA"
  modified_base (12)..(12): 5-methyl modified nucleotide
  modified_base (14)..(14): bicyclic nucleic acid (BNA)
aaggaagauggcat

SEQ ID NO: 14487 - RNA, 13 nt, Artificial Sequence
  source: /note="Description of Artificial Sequence: Synthetic oligonucleotide"
  source: /note="RNA"
  modified_base (12)..(12): 5-methyl modified nucleotide
  modified_base (13)..(13): bicyclic nucleic acid (BNA)
aaggaagauggca

SEQ ID NO: 14488 - RNA, 12 nt, Artificial Sequence
  source: /note="Description of Artificial Sequence: Synthetic oligonucleotide"
  source: /note="RNA"
  modified_base (12)..(12): 5-methyl bicyclic nucleic acid
aaggaagauggc

SEQ ID NO: 14489 - RNA, 11 nt, Artificial Sequence
  source: /note="Description of Artificial Sequence: Synthetic oligonucleotide"
  source: /note="RNA"
  modified_base (11)..(11): bicyclic nucleic acid (BNA)
aaggaagaugg

SEQ ID NO: 14490 - RNA, 10 nt, Artificial Sequence
  source: /note="Description of Artificial Sequence: Synthetic oligonucleotide"
  source: /note="RNA"
  modified_base (10)..(10): bicyclic nucleic acid (BNA)
aaggaagaug

SEQ ID NO: 14491 - DNA, 9 bp, Artificial Sequence
  source: /note="Description of Artificial Sequence: Synthetic oligonucleotide"
  source: /note="DNA/RNA"
  modified_base (9)..(9): bicyclic nucleic acid (BNA)
aaggaagat

SEQ ID NO: 14492 - RNA, 8 nt, Artificial Sequence
  source: /note="Description of Artificial Sequence: Synthetic oligonucleotide"
  source: /note="RNA/Antisense Oligonucleotide"
  modified_base (8)..(8): bicyclic nucleic acid (BNA)
aaggaaga

SEQ ID NO: 14493 - RNA, 19 nt, Artificial Sequence
  source: /note="Description of Artificial Sequence: Synthetic oligonucleotide"
  source: /note="RNA"
  modified_base (11)..(11): 5-methyl modified nucleotide
  modified_base (16)..(16): 5-methyl modified nucleotide
  modified_base (19)..(19): bicyclic nucleic acid (BNA)
aggaagauggcauuucuag

SEQ ID NO: 14494 - RNA, 18 nt, Artificial Sequence
  source: /note="Description of Artificial Sequence: Synthetic oligonucleotide"
  source: /note="RNA"
  modified_base (11)..(11): 5-methyl modified nucleotide
  modified_base (16)..(16): 5-methyl modified nucleotide
  modified_base (18)..(18): bicyclic nucleic acid (BNA)
aggaagauggcauuucua

SEQ ID NO: 14495 - DNA, 17 bp, Artificial Sequence
  source: /note="Description of Artificial Sequence: Synthetic oligonucleotide"
  source: /note="Description of Combined DNA/RNA Molecule: Synthetic oligonucleotide"
  source: /note="DNA/RNA"
  modified_base (11)..(11): 5-methyl modified nucleotide
  modified_base (16)..(16): 5-methyl modified nucleotide
  modified_base (17)..(17): bicyclic nucleic acid (BNA)
aggaagauggcauuuct

SEQ ID NO: 14496 - RNA, 16 nt, Artificial Sequence
  source: /note="Description of Artificial Sequence: Synthetic oligonucleotide"
  source: /note="RNA"
  modified_base (11)..(11): 5-methyl modified nucleotide
  modified_base (16)..(16): 5-methyl bicyclic nucleic acid
aggaagauggcauuuc

SEQ ID NO: 14497 - DNA, 15 bp, Artificial Sequence
  source: /note="Description of Artificial Sequence: Synthetic oligonucleotide"
  source: /note="Description of Combined DNA/RNA Molecule: Synthetic oligonucleotide"
  source: /note="DNA/RNA"
  modified_base (11)..(11): 5-methyl modified nucleotide
  modified_base (15)..(15): bicyclic nucleic acid (BNA)
aggaagauggcauut

SEQ ID NO: 14498 - DNA, 14 bp, Artificial Sequence
  source: /note="Description of Artificial Sequence: Synthetic oligonucleotide"
  source: /note="Description of Combined DNA/RNA Molecule: Synthetic oligonucleotide"
  source: /note="DNA/RNA"
  modified_base (11)..(11): 5-methyl modified nucleotide
  modified_base (14)..(14): bicyclic nucleic acid (BNA)
aggaagauggcaut

SEQ ID NO: 14499 - DNA, 13 bp, Artificial Sequence
  source: /note="Description of Artificial Sequence: Synthetic oligonucleotide"
  source: /note="Description of Combined DNA/RNA Molecule: Synthetic oligonucleotide"
  source: /note="DNA/RNA"
  modified_base (11)..(11): 5-methyl modified nucleotide
  modified_base (13)..(13): bicyclic nucleic acid (BNA)
aggaagauggcat

SEQ ID NO: 14500 - RNA, 12 nt, Artificial Sequence
  source: /note="Description of Artificial Sequence: Synthetic oligonucleotide"
  source: /note="RNA"
  modified_base (11)..(11): 5-methyl modified nucleotide
  modified_base (12)..(12): bicyclic nucleic acid (BNA)
aggaagauggca

SEQ ID NO: 14501 - RNA, 10 nt, Artificial Sequence
  source: /note="Description of Artificial Sequence: Synthetic oligonucleotide"
  source: /note="RNA"
  modified_base (10)..(10): bicyclic nucleic acid (BNA)
aggaagaugg

SEQ ID NO: 14502 - RNA, 9 nt, Artificial Sequence
  source: /note="Description of Artificial Sequence: Synthetic oligonucleotide"
  source: /note="RNA"
  modified_base (9)..(9): bicyclic nucleic acid (BNA)
aggaagaug

SEQ ID NO: 14503 - DNA, 8 bp, Artificial Sequence
  source: /note="Description of Artificial Sequence: Synthetic oligonucleotide"
  source: /note="DNA/RNA"
  modified_base (8)..(8): bicyclic nucleic acid (BNA)
aggaagat

SEQ ID NO: 14504 - RNA, 18 nt, Artificial Sequence
  source: /note="Description of Artificial Sequence: Synthetic oligonucleotide"
  source: /note="RNA"
  modified_base (10)..(10): 5-methyl modified nucleotide
  modified_base (15)..(15): 5-methyl modified nucleotide
  modified_base (18)..(18): bicyclic nucleic acid (BNA)
ggaagauggcauuucuag

SEQ ID NO: 14505 - RNA, 17 nt, Artificial Sequence
  source: /note="Description of Artificial Sequence: Synthetic oligonucleotide"
  source: /note="RNA"
  modified_base (10)..(10): 5-methyl modified nucleotide
  modified_base (15)..(15): 5-methyl modified nucleotide
  modified_base (17)..(17): bicyclic nucleic acid (BNA)
ggaagauggcauuucua

SEQ ID NO: 14506 - DNA, 16 bp, Artificial Sequence
  source: /note="Description of Artificial Sequence: Synthetic oligonucleotide"
  source: /note="Description of Combined DNA/RNA Molecule: Synthetic oligonucleotide"
  source: /note="DNA/RNA"
  modified_base (10)..(10): 5-methyl modified nucleotide
  modified_base (15)..(15): 5-methyl modified nucleotide
  modified_base (16)..(16): bicyclic nucleic acid (BNA)
ggaagauggcauuuct

SEQ ID NO: 14507 - RNA, 15 nt, Artificial Sequence
  source: /note="Description of Artificial Sequence: Synthetic oligonucleotide"
  source: /note="RNA"
  modified_base (10)..(10): 5-methyl modified nucleotide
  modified_base (15)..(15): 5-methyl bicyclic nucleic acid
ggaagauggcauuuc

SEQ ID NO: 14508 - DNA, 14 bp, Artificial Sequence
  source: /note="Description of Artificial Sequence: Synthetic oligonucleotide"
  source: /note="Description of Combined DNA/RNA Molecule: Synthetic oligonucleotide"
  source: /note="DNA/RNA"
  modified_base (10)..(10): 5-methyl modified nucleotide
  modified_base (14)..(14): bicyclic nucleic acid (BNA)
ggaagauggcauut

SEQ ID NO: 14509 - DNA, 13 bp, Artificial Sequence
  source: /note="Description of Artificial Sequence: Synthetic oligonucleotide"
  source: /note="Description of Combined DNA/RNA Molecule: Synthetic oligonucleotide"
  source: /note="DNA/RNA"
  modified_base (10)..(10): 5-methyl modified nucleotide
  modified_base (13)..(13): bicyclic nucleic acid (BNA)
ggaagauggcaut

SEQ ID NO: 14510 - DNA, 12 bp, Artificial Sequence
  source: /note="Description of Artificial Sequence: Synthetic oligonucleotide"
  source: /note="Description of Combined DNA/RNA Molecule: Synthetic oligonucleotide"
  source: /note="DNA/RNA"
  modified_base (10)..(10): 5-methyl modified nucleotide
  modified_base (12)..(12): bicyclic nucleic acid (BNA)
ggaagauggcat

SEQ ID NO: 14511 - RNA, 11 nt, Artificial Sequence
  source: /note="Description of Artificial Sequence: Synthetic oligonucleotide"
  source: /note="RNA"
  modified_base (10)..(10): 5-methyl modified nucleotide
  modified_base (11)..(11): bicyclic nucleic acid (BNA)
ggaagauggca

SEQ ID NO: 14512 - RNA, 10 nt, Artificial Sequence
  source: /note="Description of Artificial Sequence: Synthetic oligonucleotide"
  source: /note="RNA"
  modified_base (10)..(10): 5-methyl bicyclic nucleic acid
ggaagauggc

SEQ ID NO: 14513 - RNA, 8 nt, Artificial Sequence
  source: /note="Description of Artificial Sequence: Synthetic oligonucleotide"
  source: /note="RNA"
  modified_base (8)..(8): bicyclic nucleic acid (BNA)
ggaagaug

SEQ ID NO: 14514 - RNA, 17 nt, Artificial Sequence
  source: /note="Description of Artificial Sequence: Synthetic oligonucleotide"
  source: /note="RNA"
  modified_base (9)..(9): 5-methyl modified nucleotide
  modified_base (14)..(14): 5-methyl modified nucleotide
  modified_base (17)..(17): bicyclic nucleic acid (BNA)
gaagauggcauuucuag

SEQ ID NO: 14515 - RNA, 16 nt, Artificial Sequence
  source: /note="Description of Artificial Sequence: Synthetic oligonucleotide"
  source: /note="RNA"
  modified_base (9)..(9): 5-methyl modified nucleotide
  modified_base (14)..(14): 5-methyl modified nucleotide
  modified_base (16)..(16): bicyclic nucleic acid (BNA)
gaagauggcauuucua

SEQ ID NO: 14516 - RNA, 14 nt, Artificial Sequence
  source: /note="Description of Artificial Sequence: Synthetic oligonucleotide"
  source: /note="RNA"
  modified_base (9)..(9): 5-methyl modified nucleotide
  modified_base (14)..(14): 5-methyl bicyclic nucleic acid
gaagauggcauuuc

SEQ ID NO: 14517 - DNA, 13 bp, Artificial Sequence
  source: /note="Description of Artificial Sequence: Synthetic oligonucleotide"
  source: /note="Description of Combined DNA/RNA Molecule: Synthetic oligonucleotide"
  source: /note="DNA/RNA"
  modified_base (9)..(9): 5-methyl modified nucleotide
  modified_base (13)..(13): bicyclic nucleic acid (BNA)
gaagauggcauut

SEQ ID NO: 14518 - DNA, 12 bp, Artificial Sequence
  source: /note="Description of Artificial Sequence: Synthetic oligonucleotide"
  source: /note="Description of Combined DNA/RNA Molecule: Synthetic oligonucleotide"
  source: /note="DNA/RNA"
  modified_base (9)..(9): 5-methyl modified nucleotide
  modified_base (12)..(12): bicyclic nucleic acid (BNA)
gaagauggcaut

SEQ ID NO: 14519 - DNA, 11 bp, Artificial Sequence
  source: /note="Description of Artificial Sequence: Synthetic oligonucleotide"
  source: /note="Description of Combined DNA/RNA Molecule: Synthetic oligonucleotide"
  source: /note="DNA/RNA"
  modified_base (9)..(9): 5-methyl modified nucleotide
  modified_base (11)..(11): bicyclic nucleic acid (BNA)
gaagauggcat

SEQ ID NO: 14520 - RNA, 10 nt, Artificial Sequence
  source: /note="Description of Artificial Sequence: Synthetic oligonucleotide"
  source: /note="RNA"
  modified_base (9)..(9): 5-methyl modified nucleotide
  modified_base (10)..(10): bicyclic nucleic acid (BNA)
gaagauggca

SEQ ID NO: 14521 - RNA, 9 nt, Artificial Sequence
  source: /note="Description of Artificial Sequence: Synthetic oligonucleotide"
  source: /note="RNA"
  modified_base (9)..(9): 5-methyl bicyclic nucleic acid
gaagauggc

SEQ ID NO: 14522 - RNA, 8 nt, Artificial Sequence
  source: /note="Description of Artificial Sequence: Synthetic oligonucleotide"
  source: /note="RNA"
  modified_base (8)..(8): bicyclic nucleic acid (BNA)
gaagaugg

SEQ ID NO: 14523 - RNA, 16 nt, Artificial Sequence
  source: /note="Description of Artificial Sequence: Synthetic oligonucleotide"
  source: /note="RNA"
  modified_base (8)..(8): 5-methyl modified nucleotide
  modified_base (13)..(13): 5-methyl modified nucleotide
  modified_base (16)..(16): bicyclic nucleic acid (BNA)
aagauggcauuucuag

SEQ ID NO: 14524 - RNA, 15 nt, Artificial Sequence
  source: /note="Description of Artificial Sequence: Synthetic oligonucleotide"
  source: /note="RNA"
  modified_base (8)..(8): 5-methyl modified nucleotide
  modified_base (13)..(13): 5-methyl modified nucleotide
  modified_base (15)..(15): bicyclic nucleic acid (BNA)
aagauggcauuucua

SEQ ID NO: 14525 - DNA, 14 bp, Artificial Sequence
  source: /note="Description of Artificial Sequence: Synthetic oligonucleotide"
  source: /note="Description of Combined DNA/RNA Molecule: Synthetic oligonucleotide"
  source: /note="DNA/RNA"
  modified_base (8)..(8): 5-methyl modified nucleotide
  modified_base (13)..(13): 5-methyl modified nucleotide
  modified_base (14)..(14): bicyclic nucleic acid (BNA)
aagauggcauuuct

SEQ ID NO: 14526 - RNA, 13 nt, Artificial Sequence
  source: /note="Description of Artificial Sequence: Synthetic oligonucleotide"
  source: /note="RNA"
  modified_base (8)..(8): 5-methyl modified nucleotide
  modified_base (13)..(13): 5-methyl bicyclic nucleic acid
aagauggcauuuc

SEQ ID NO: 14527 - DNA, 12 bp, Artificial Sequence
  source: /note="Description of Artificial Sequence: Synthetic oligonucleotide"
  source: /note="Description of Combined DNA/RNA Molecule: Synthetic oligonucleotide"
  source: /note="DNA/RNA"
  modified_base (8)..(8): 5-methyl modified nucleotide
  modified_base (12)..(12): bicyclic nucleic acid (BNA)
aagauggcauut

SEQ ID NO: 14528 - DNA, 11 bp, Artificial Sequence
  source: /note="Description of Artificial Sequence: Synthetic oligonucleotide"
  source: /note="Description of Combined DNA/RNA Molecule: Synthetic oligonucleotide"
  source: /note="DNA/RNA"
  modified_base (8)..(8): 5-methyl modified nucleotide
  modified_base (11)..(11): bicyclic nucleic acid (BNA)
aagauggcaut

SEQ ID NO: 14529 - DNA, 10 bp, Artificial Sequence
  source: /note="Description of Artificial Sequence: Synthetic oligonucleotide"
  source: /note="Description of Combined DNA/RNA Molecule: Synthetic oligonucleotide"
  source: /note="DNA/RNA"
  modified_base (8)..(8): 5-methyl modified nucleotide
  modified_base (10)..(10): bicyclic nucleic acid (BNA)
aagauggcat

SEQ ID NO: 14530 - RNA, 9 nt, Artificial Sequence
  source: /note="Description of Artificial Sequence: Synthetic oligonucleotide"
  source: /note="RNA"
  modified_base (8)..(8): 5-methyl modified nucleotide
  modified_base (9)..(9): bicyclic nucleic acid (BNA)
aagauggca

SEQ ID NO: 14531 - RNA, 8 nt, Artificial Sequence
  source: /note="Description of Artificial Sequence: Synthetic oligonucleotide"
  source: /note="RNA"
  modified_base (8)..(8): 5-methyl bicyclic nucleic acid
aagauggc

SEQ ID NO: 14532 - RNA, 15 nt, Artificial Sequence
  source: /note="Description of Artificial Sequence: Synthetic oligonucleotide"
  source: /note="RNA"
  modified_base (7)..(7): 5-methyl modified nucleotide
  modified_base (12)..(12): 5-methyl modified nucleotide
  modified_base (15)..(15): bicyclic nucleic acid (BNA)
agauggcauuucuag

SEQ ID NO: 14533 - RNA, 14 nt, Artificial Sequence
  source: /note="Description of Artificial Sequence: Synthetic oligonucleotide"
  source: /note="RNA"
  modified_base (7)..(7): 5-methyl modified nucleotide
  modified_base (12)..(12): 5-methyl modified nucleotide
  modified_base (14)..(14): bicyclic nucleic acid (BNA)
agauggcauuucua

SEQ ID NO: 14534 - DNA, 13 bp, Artificial Sequence
  source: /note="Description of Artificial Sequence: Synthetic oligonucleotide"
  source: /note="Description of Combined DNA/RNA Molecule: Synthetic oligonucleotide"
  source: /note="DNA/RNA"
  modified_base (7)..(7): 5-methyl modified nucleotide
  modified_base (12)..(12): 5-methyl modified nucleotide
  modified_base (13)..(13): bicyclic nucleic acid (BNA)
agauggcauuuct

SEQ ID NO: 14535 - RNA, 12 nt, Artificial Sequence
  source: /note="Description of Artificial Sequence: Synthetic oligonucleotide"
  source: /note="RNA"
  modified_base (7)..(7): 5-methyl modified nucleotide
  modified_base (12)..(12): 5-methyl bicyclic nucleic acid
agauggcauuuc

SEQ ID NO: 14536 - DNA, 11 bp, Artificial Sequence
  source: /note="Description of Artificial Sequence: Synthetic oligonucleotide"
  source: /note="Description of Combined DNA/RNA Molecule: Synthetic oligonucleotide"
  source: /note="DNA/RNA"
  modified_base (7)..(7): 5-methyl modified nucleotide
  modified_base (11)..(11): bicyclic nucleic acid (BNA)
agauggcauut

SEQ ID NO: 14537 - DNA, 10 bp, Artificial Sequence
  source: /note="Description of Artificial Sequence: Synthetic oligonucleotide"
  source: /note="Description of Combined DNA/RNA Molecule: Synthetic oligonucleotide"
  source: /note="DNA/RNA"
  modified_base (7)..(7): 5-methyl modified nucleotide
  modified_base (10)..(10): bicyclic nucleic acid (BNA)
agauggcaut

SEQ ID NO: 14538 - DNA, 9 bp, Artificial Sequence
  source: /note="Description of Artificial Sequence: Synthetic oligonucleotide"
  source: /note="Description of Combined DNA/RNA Molecule: Synthetic oligonucleotide"
  source: /note="DNA/RNA"
  modified_base (7)..(7): 5-methyl modified nucleotide
  modified_base (9)..(9): bicyclic nucleic acid (BNA)
agauggcat

SEQ ID NO: 14539 - RNA, 8 nt, Artificial Sequence
  source: /note="Description of Artificial Sequence: Synthetic oligonucleotide"
  source: /note="RNA"
  modified_base (7)..(7): 5-methyl modified nucleotide
  modified_base (8)..(8): bicyclic nucleic acid (BNA)
agauggca

SEQ ID NO: 14540 - RNA, 30 nt, Artificial Sequence; identical to SEQ ID NO: 284
  source: /note="Description of Artificial Sequence: Synthetic oligonucleotide"
  source: /note="RNA"
  modified_base (1)..(1): 5-methyl modified nucleotide
  modified_base (3)..(3): 5-methyl modified nucleotide
  modified_base (4)..(4): 5-methyl modified nucleotide
  modified_base (7)..(7): 5-methyl modified nucleotide
  modified_base (10)..(10): 5-methyl modified nucleotide
  modified_base (22)..(22): 5-methyl modified nucleotide
  modified_base (27)..(27): 5-methyl modified nucleotide
  modified_base (30)..(30): bicyclic nucleic acid (BNA)

SEQ ID NO: 14541 - RNA, 29 nt, Artificial Sequence
  source: /note="Description of Artificial Sequence: Synthetic oligonucleotide"
  source: /note="RNA"
  modified_base (1)..(1): 5-methyl modified nucleotide
  modified_base (3)..(3): 5-methyl modified nucleotide
  modified_base (4)..(4): 5-methyl modified nucleotide
  modified_base (7)..(7): 5-methyl modified nucleotide
  modified_base (10)..(10): 5-methyl modified nucleotide
  modified_base (22)..(22): 5-methyl modified nucleotide
  modified_base (27)..(27): 5-methyl modified nucleotide
  modified_base (29)..(29): bicyclic nucleic acid (BNA)
cuccaacaucaaggaagauggcauuucua

SEQ ID NO: 14542 - DNA, 28 bp, Artificial Sequence
  source: /note="Description of Artificial Sequence: Synthetic oligonucleotide"
  source: /note="Description of Combined DNA/RNA Molecule: Synthetic oligonucleotide"
  source: /note="DNA/RNA"
  modified_base (1)..(1): 5-methyl modified nucleotide
  modified_base (3)..(3): 5-methyl modified nucleotide
  modified_base (4)..(4): 5-methyl modified nucleotide
  modified_base (7)..(7): 5-methyl modified nucleotide
  modified_base (10)..(10): 5-methyl modified nucleotide
  modified_base (22)..(22): 5-methyl modified nucleotide
  modified_base (27)..(27): 5-methyl modified nucleotide
  modified_base (28)..(28): bicyclic nucleic acid (BNA)
cuccaacaucaaggaagauggcauuuct

SEQ ID NO: 14543 - RNA, 27 nt, Artificial Sequence
  source: /note="Description of Artificial Sequence: Synthetic oligonucleotide"
  source: /note="RNA"
  modified_base (1)..(1): 5-methyl modified nucleotide
  modified_base (3)..(3): 5-methyl modified nucleotide
  modified_base (4)..(4): 5-methyl modified nucleotide
  modified_base (7)..(7): 5-methyl modified nucleotide
  modified_base (10)..(10): 5-methyl modified nucleotide
  modified_base (22)..(22): 5-methyl modified nucleotide
  modified_base (27)..(27): 5-methyl bicyclic nucleic acid
cuccaacaucaaggaagauggcauuuc

SEQ ID NO: 14544 - DNA, 26 bp, Artificial Sequence
  source: /note="Description of Artificial Sequence: Synthetic oligonucleotide"
  source: /note="Description of Combined DNA/RNA Molecule: Synthetic oligonucleotide"
  source: /note="DNA/RNA"
  modified_base (1)..(1): 5-methyl modified nucleotide
  modified_base (3)..(3): 5-methyl modified nucleotide
  modified_base (4)..(4): 5-methyl modified nucleotide
  modified_base (7)..(7): 5-methyl modified nucleotide
  modified_base (10)..(10): 5-methyl modified nucleotide
  modified_base (22)..(22): 5-methyl modified nucleotide
  modified_base (26)..(26): bicyclic nucleic acid (BNA)
cuccaacaucaaggaagauggcauut

SEQ ID NO: 14545 - DNA, 25 bp, Artificial Sequence
  source: /note="Description of Artificial Sequence: Synthetic oligonucleotide"
  source: /note="Description of Combined DNA/RNA Molecule: Synthetic oligonucleotide"
  source: /note="DNA/RNA"
  modified_base (1)..(1): 5-methyl modified nucleotide
  modified_base (3)..(3): 5-methyl modified nucleotide
  modified_base (4)..(4): 5-methyl modified nucleotide
  modified_base (7)..(7): 5-methyl modified nucleotide
  modified_base (10)..(10): 5-methyl modified nucleotide
  modified_base (22)..(22): 5-methyl modified nucleotide
  modified_base (25)..(25): bicyclic nucleic acid (BNA)
cuccaacaucaaggaagauggcaut

SEQ ID NO: 14546 - DNA, 24 bp, Artificial Sequence
  source: /note="Description of Artificial Sequence: Synthetic oligonucleotide"
  source: /note="Description of Combined DNA/RNA Molecule: Synthetic oligonucleotide"
  source: /note="DNA/RNA"
  modified_base (1)..(1): 5-methyl modified nucleotide
  modified_base (3)..(3): 5-methyl modified nucleotide
  modified_base (4)..(4): 5-methyl modified nucleotide
  modified_base (7)..(7): 5-methyl modified nucleotide
  modified_base (10)..(10): 5-methyl modified nucleotide
  modified_base (22)..(22): 5-methyl modified nucleotide
  modified_base (24)..(24): bicyclic nucleic acid (BNA)
cuccaacaucaaggaagauggcat

SEQ ID NO: 14547 - RNA, 23 nt, Artificial Sequence
  source: /note="Description of Artificial Sequence: Synthetic oligonucleotide"
  source: /note="RNA"
  modified_base (1)..(1): 5-methyl modified nucleotide
  modified_base (3)..(3): 5-methyl modified nucleotide
  modified_base (4)..(4): 5-methyl modified nucleotide
  modified_base (7)..(7): 5-methyl modified nucleotide
  modified_base (10)..(10): 5-methyl modified nucleotide
  modified_base (22)..(22): 5-methyl modified nucleotide
  modified_base (23)..(23): bicyclic nucleic acid (BNA)
cuccaacaucaaggaagauggca

SEQ ID NO: 14548 - RNA, 22 nt, Artificial Sequence
  source: /note="Description of Artificial Sequence: Synthetic oligonucleotide"
  source: /note="RNA"
  modified_base (1)..(1): 5-methyl modified nucleotide
  modified_base (3)..(3): 5-methyl modified nucleotide
  modified_base (4)..(4): 5-methyl modified nucleotide
  modified_base (7)..(7): 5-methyl modified nucleotide
  modified_base (10)..(10): 5-methyl modified nucleotide
  modified_base (22)..(22): 5-methyl bicyclic nucleic acid
cuccaacaucaaggaagauggc

SEQ ID NO: 14549 - RNA, 21 nt, Artificial Sequence
  source: /note="Description of Artificial Sequence: Synthetic oligonucleotide"
  source: /note="RNA"
  modified_base (1)..(1): 5-methyl modified nucleotide
  modified_base (3)..(3): 5-methyl modified nucleotide
  modified_base (4)..(4): 5-methyl modified nucleotide
  modified_base (7)..(7): 5-methyl modified nucleotide
  modified_base (10)..(10): 5-methyl modified nucleotide
  modified_base (21)..(21): bicyclic nucleic acid (BNA)
cuccaacaucaaggaagaugg

SEQ ID NO: 14550 - RNA, 20 nt, Artificial Sequence
  source: /note="Description of Artificial Sequence: Synthetic oligonucleotide"
  source: /note="RNA"
  modified_base (1)..(1): 5-methyl modified nucleotide
  modified_base (3)..(3): 5-methyl modified nucleotide
  modified_base (4)..(4): 5-methyl modified nucleotide
  modified_base (7)..(7): 5-methyl modified nucleotide
  modified_base (10)..(10): 5-methyl modified nucleotide
  modified_base (20)..(20): bicyclic nucleic acid (BNA)
cuccaacaucaaggaagaug

SEQ ID NO: 14551 - DNA, 19 bp, Artificial Sequence
  source: /note="Description of Artificial Sequence: Synthetic oligonucleotide"
  source: /note="Description of Combined DNA/RNA Molecule: Synthetic oligonucleotide"
  source: /note="DNA/RNA"
  modified_base (1)..(1): 5-methyl modified nucleotide
  modified_base (3)..(3): 5-methyl modified nucleotide
  modified_base (4)..(4): 5-methyl modified nucleotide
  modified_base (7)..(7): 5-methyl modified nucleotide
  modified_base (10)..(10): 5-methyl modified nucleotide
  modified_base (19)..(19): bicyclic nucleic acid (BNA)
cuccaacaucaaggaagat

SEQ ID NO: 14552 - RNA, 18 nt, Artificial Sequence
  source: /note="Description of Artificial Sequence: Synthetic oligonucleotide"
  source: /note="RNA"
  modified_base (1)..(1): 5-methyl modified nucleotide
  modified_base (3)..(3): 5-methyl modified nucleotide
  modified_base (4)..(4): 5-methyl modified nucleotide
  modified_base (7)..(7): 5-methyl modified nucleotide
  modified_base (10)..(10): 5-methyl modified nucleotide
  modified_base (18)..(18): bicyclic nucleic acid (BNA)
cuccaacaucaaggaaga

SEQ ID NO: 14553 - RNA, 17 nt, Artificial Sequence
  source: /note="Description of Artificial Sequence: Synthetic oligonucleotide"
  source: /note="RNA"
  modified_base (1)..(1): 5-methyl modified nucleotide
  modified_base (3)..(3): 5-methyl modified nucleotide
  modified_base (4)..(4): 5-methyl modified nucleotide
  modified_base (7)..(7): 5-methyl modified nucleotide
  modified_base (10)..(10): 5-methyl modified nucleotide
  modified_base (17)..(17): bicyclic nucleic acid (BNA)
cuccaacaucaaggaag

SEQ ID NO: 14554 - RNA, 29 nt, Artificial Sequence
  source: /note="Description of Artificial Sequence: Synthetic oligonucleotide"
  source: /note="RNA"
  modified_base (2)..(2): 5-methyl modified nucleotide
  modified_base (3)..(3): 5-methyl modified nucleotide
  modified_base (6)..(6): 5-methyl modified nucleotide
  modified_base (9)..(9): 5-methyl modified nucleotide
  modified_base (21)..(21): 5-methyl modified nucleotide
  modified_base (26)..(26): 5-methyl modified nucleotide
  modified_base (29)..(29): bicyclic nucleic acid (BNA)
uccaacaucaaggaagauggcauuucuag

SEQ ID NO: 14555 - RNA, 28 nt, Artificial Sequence
  source: /note="Description of Artificial Sequence: Synthetic oligonucleotide"
  source: /note="RNA"
  modified_base (2)..(2): 5-methyl modified nucleotide
  modified_base (3)..(3): 5-methyl modified nucleotide
  modified_base (6)..(6): 5-methyl modified nucleotide
  modified_base (9)..(9): 5-methyl modified nucleotide
  modified_base (21)..(21): 5-methyl modified nucleotide
  modified_base (26)..(26): 5-methyl modified nucleotide
  modified_base (28)..(28): bicyclic nucleic acid (BNA)
uccaacaucaaggaagauggcauuucua

SEQ ID NO: 14556 - DNA, 27 bp, Artificial Sequence
  source: /note="Description of Artificial Sequence: Synthetic oligonucleotide"
  source: /note="Description of Combined DNA/RNA Molecule: Synthetic oligonucleotide"
  source: /note="DNA/RNA"
  modified_base (2)..(2): 5-methyl modified nucleotide
  modified_base (3)..(3): 5-methyl modified nucleotide
  modified_base (6)..(6): 5-methyl modified nucleotide
  modified_base (9)..(9): 5-methyl modified nucleotide
  modified_base (21)..(21): 5-methyl modified nucleotide
  modified_base (26)..(26): 5-methyl modified nucleotide
  modified_base (27)..(27): bicyclic nucleic acid (BNA)
uccaacaucaaggaagauggcauuuct

SEQ ID NO: 14557 - RNA, 26 nt, Artificial Sequence
  source: /note="Description of Artificial Sequence: Synthetic oligonucleotide"
  source: /note="RNA"
  modified_base (2)..(2): 5-methyl modified nucleotide
  modified_base (3)..(3): 5-methyl modified nucleotide
  modified_base (6)..(6): 5-methyl modified nucleotide
  modified_base (9)..(9): 5-methyl modified nucleotide
  modified_base (21)..(21): 5-methyl modified nucleotide
  modified_base (26)..(26): 5-methyl bicyclic nucleic acid
uccaacaucaaggaagauggcauuuc

SEQ ID NO: 14558 - DNA, 25 bp, Artificial Sequence
  source: /note="Description of Artificial Sequence: Synthetic oligonucleotide"
  source: /note="Description of Combined DNA/RNA Molecule: Synthetic oligonucleotide"
  source: /note="DNA/RNA"
  modified_base (2)..(2): 5-methyl modified nucleotide
  modified_base (3)..(3): 5-methyl modified nucleotide
  modified_base (6)..(6): 5-methyl modified nucleotide
  modified_base (9)..(9): 5-methyl modified nucleotide
  modified_base (21)..(21): 5-methyl modified nucleotide
  modified_base (25)..(25): bicyclic nucleic acid (BNA)
uccaacaucaaggaagauggcauut

SEQ ID NO: 14559 - DNA, 24 bp, Artificial Sequence
  source: /note="Description of Artificial Sequence: Synthetic oligonucleotide"
  source: /note="Description of Combined DNA/RNA Molecule: Synthetic oligonucleotide"
  source: /note="DNA/RNA"
  modified_base (2)..(2): 5-methyl modified nucleotide
  modified_base (3)..(3): 5-methyl modified nucleotide
  modified_base (6)..(6): 5-methyl modified nucleotide
  modified_base (9)..(9): 5-methyl modified nucleotide
  modified_base (21)..(21): 5-methyl modified nucleotide
  modified_base (24)..(24): bicyclic nucleic acid (BNA)
uccaacaucaaggaagauggcaut

SEQ ID NO: 14560 - DNA, 23 bp, Artificial Sequence
  source: /note="Description of Artificial Sequence: Synthetic oligonucleotide"
  source: /note="Description of Combined DNA/RNA Molecule: Synthetic oligonucleotide"
  source: /note="DNA/RNA"
  modified_base (2)..(2): 5-methyl modified nucleotide
  modified_base (3)..(3): 5-methyl modified nucleotide
  modified_base (6)..(6): 5-methyl modified nucleotide
  modified_base (9)..(9): 5-methyl modified nucleotide
  modified_base (21)..(21): 5-methyl modified nucleotide
  modified_base (23)..(23): bicyclic nucleic acid (BNA)
uccaacaucaaggaagauggcat

SEQ ID NO: 14561 - RNA, 22 nt, Artificial Sequence
  source: /note="Description of Artificial Sequence: Synthetic oligonucleotide"
  source: /note="RNA"
  modified_base (2)..(2): 5-methyl modified nucleotide
  modified_base (3)..(3): 5-methyl modified nucleotide
  modified_base (6)..(6): 5-methyl modified nucleotide
  modified_base (9)..(9): 5-methyl modified nucleotide
  modified_base (21)..(21): 5-methyl modified nucleotide
  modified_base (22)..(22): bicyclic nucleic acid (BNA)
uccaacaucaaggaagauggca

SEQ ID NO: 14562 - RNA, 21 nt, Artificial Sequence
  source: /note="Description of Artificial Sequence: Synthetic oligonucleotide"
  source: /note="RNA"
  modified_base (2)..(2): 5-methyl modified nucleotide
  modified_base (3)..(3): 5-methyl modified nucleotide
  modified_base (6)..(6): 5-methyl modified nucleotide
  modified_base (9)..(9): 5-methyl modified nucleotide
  modified_base (21)..(21): 5-methyl bicyclic nucleic acid
uccaacaucaaggaagauggc

SEQ ID NO: 14563 - RNA, 20 nt, Artificial Sequence
  source: /note="Description of Artificial Sequence: Synthetic oligonucleotide"
  source: /note="RNA"
  modified_base (2)..(2): 5-methyl modified nucleotide
  modified_base (3)..(3): 5-methyl modified nucleotide
  modified_base (6)..(6): 5-methyl modified nucleotide
  modified_base (9)..(9): 5-methyl modified nucleotide
  modified_base (20)..(20): bicyclic nucleic acid (BNA)
uccaacaucaaggaagaugg

SEQ ID NO: 14564 - RNA, 19 nt, Artificial Sequence
  source: /note="Description of Artificial Sequence: Synthetic oligonucleotide"
  source: /note="RNA"
  modified_base (2)..(2): 5-methyl modified nucleotide
  modified_base (3)..(3): 5-methyl modified nucleotide
  modified_base (6)..(6): 5-methyl modified nucleotide
  modified_base (9)..(9): 5-methyl modified nucleotide
  modified_base (19)..(19): bicyclic nucleic acid (BNA)
uccaacaucaaggaagaug

SEQ ID NO: 14565 - DNA, 18 bp, Artificial Sequence
  source: /note="Description of Artificial Sequence: Synthetic oligonucleotide"
  source: /note="Description of Combined DNA/RNA Molecule: Synthetic oligonucleotide"
  source: /note="DNA/RNA"
  modified_base (2)..(2): 5-methyl modified nucleotide
  modified_base (3)..(3): 5-methyl modified nucleotide
  modified_base (6)..(6): 5-methyl modified nucleotide
  modified_base (9)..(9): 5-methyl modified nucleotide
  modified_base (18)..(18): bicyclic nucleic acid (BNA)
uccaacaucaaggaagat

SEQ ID NO: 14566 - RNA, 17 nt, Artificial Sequence
  source: /note="Description of Artificial Sequence: Synthetic oligonucleotide"
  source: /note="RNA"
  modified_base (2)..(2): 5-methyl modified nucleotide
  modified_base (3)..(3): 5-methyl modified nucleotide
  modified_base (6)..(6): 5-methyl modified nucleotide
  modified_base (9)..(9): 5-methyl modified nucleotide
  modified_base (17)..(17): bicyclic nucleic acid (BNA)
uccaacaucaaggaaga

SEQ ID NO: 14567 - RNA, 16 nt, Artificial Sequence
  source: /note="Description of Artificial Sequence: Synthetic oligonucleotide"
  source: /note="RNA"
  modified_base (2)..(2): 5-methyl modified nucleotide
  modified_base (3)..(3): 5-methyl modified nucleotide
  modified_base (6)..(6): 5-methyl modified nucleotide
  modified_base (9)..(9): 5-methyl modified nucleotide
  modified_base (16)..(16): bicyclic nucleic acid (BNA)
uccaacaucaaggaag

SEQ ID NO: 14568 - RNA, 28 nt, Artificial Sequence
  source: /note="Description of Artificial Sequence: Synthetic oligonucleotide"
  source: /note="RNA"
  modified_base (1)..(1): 5-methyl modified nucleotide
  modified_base (2)..(2): 5-methyl modified nucleotide
  modified_base (5)..(5): 5-methyl modified nucleotide
  modified_base (8)..(8): 5-methyl modified nucleotide
  modified_base (20)..(20): 5-methyl modified nucleotide
  modified_base (25)..(25): 5-methyl modified nucleotide
  modified_base (28)..(28): bicyclic nucleic acid (BNA)
ccaacaucaaggaagauggcauuucuag

SEQ ID NO: 14569 - RNA, 27 nt, Artificial Sequence
  source: /note="Description of Artificial Sequence: Synthetic oligonucleotide"
  source: /note="RNA"
  modified_base (1)..(1): 5-methyl modified nucleotide
  modified_base (2)..(2): 5-methyl modified nucleotide
  modified_base (5)..(5): 5-methyl modified nucleotide
  modified_base (8)..(8): 5-methyl modified nucleotide
  modified_base (20)..(20): 5-methyl modified nucleotide
  modified_base (25)..(25): 5-methyl modified nucleotide
  modified_base (27)..(27): bicyclic nucleic acid (BNA)
ccaacaucaaggaagauggcauuucua

SEQ ID NO: 14570 - DNA, 26 bp, Artificial Sequence
  source: /note="Description of Artificial Sequence: Synthetic oligonucleotide"
  source: /note="Description of Combined DNA/RNA Molecule: Synthetic oligonucleotide"
  source: /note="DNA/RNA"
  modified_base (1)..(1): 5-methyl modified nucleotide
  modified_base (2)..(2): 5-methyl modified nucleotide
  modified_base (5)..(5): 5-methyl modified nucleotide
  modified_base (8)..(8): 5-methyl modified nucleotide
  modified_base (20)..(20): 5-methyl modified nucleotide
  modified_base (25)..(25): 5-methyl modified nucleotide
  modified_base (26)..(26): bicyclic nucleic acid (BNA)
ccaacaucaaggaagauggcauuuct

SEQ ID NO: 14571 - RNA, 25 nt, Artificial Sequence
  source: /note="Description of Artificial Sequence: Synthetic oligonucleotide"
  source: /note="RNA"
  modified_base (1)..(1): 5-methyl modified nucleotide
  modified_base (2)..(2): 5-methyl modified nucleotide
  modified_base (5)..(5): 5-methyl modified nucleotide
  modified_base (8)..(8): 5-methyl modified nucleotide
  modified_base (20)..(20): 5-methyl modified nucleotide
  modified_base (25)..(25): 5-methyl bicyclic nucleic acid
ccaacaucaaggaagauggcauuuc

SEQ ID NO: 14572 - DNA, 24 bp, Artificial Sequence
  source: /note="Description of Artificial Sequence: Synthetic oligonucleotide"
  source: /note="Description of Combined DNA/RNA Molecule: Synthetic oligonucleotide"
  source: /note="DNA/RNA"
  modified_base (1)..(1): 5-methyl modified nucleotide
  modified_base (2)..(2): 5-methyl modified nucleotide
  modified_base (5)..(5): 5-methyl modified nucleotide
  modified_base (8)..(8): 5-methyl modified nucleotide
  modified_base (20)..(20): 5-methyl modified nucleotide
  modified_base (24)..(24): bicyclic nucleic acid (BNA)
ccaacaucaaggaagauggcauut

SEQ ID NO: 14573 - DNA, 23 bp, Artificial Sequence
  source: /note="Description of Artificial Sequence: Synthetic oligonucleotide"
  source: /note="Description of Combined DNA/RNA Molecule: Synthetic oligonucleotide"
  source: /note="DNA/RNA"
  modified_base (1)..(1): 5-methyl modified nucleotide
  modified_base (2)..(2): 5-methyl modified nucleotide
  modified_base (5)..(5): 5-methyl modified nucleotide
  modified_base (8)..(8): 5-methyl modified nucleotide
  modified_base (20)..(20): 5-methyl modified nucleotide
  modified_base (23)..(23): bicyclic nucleic acid (BNA)
ccaacaucaaggaagauggcaut

SEQ ID NO: 14574 - DNA, 22 bp, Artificial Sequence
  source: /note="Description of Artificial Sequence: Synthetic oligonucleotide"
  source: /note="Description of Combined DNA/RNA Molecule: Synthetic oligonucleotide"
  source: /note="DNA/RNA"
  modified_base (1)..(1): 5-methyl modified nucleotide
  modified_base (2)..(2): 5-methyl modified nucleotide
  modified_base (5)..(5): 5-methyl modified nucleotide
  modified_base (8)..(8): 5-methyl modified nucleotide
  modified_base (20)..(20): 5-methyl modified nucleotide
  modified_base (22)..(22): bicyclic nucleic acid (BNA)
ccaacaucaaggaagauggcat

SEQ ID NO: 14575 - RNA, 21 nt, Artificial Sequence
  source: /note="Description of Artificial Sequence: Synthetic oligonucleotide"
  source: /note="RNA"
  modified_base (1)..(1): 5-methyl modified nucleotide
  modified_base (2)..(2): 5-methyl modified nucleotide
  modified_base (5)..(5): 5-methyl modified nucleotide
  modified_base (8)..(8): 5-methyl modified nucleotide
  modified_base (20)..(20): 5-methyl modified nucleotide
  modified_base (21)..(21): bicyclic nucleic acid (BNA)
ccaacaucaaggaagauggca

SEQ ID NO: 14576 - RNA, 20 nt, Artificial Sequence
  source: /note="Description of Artificial Sequence: Synthetic oligonucleotide"
  source: /note="RNA"
  modified_base (1)..(1): 5-methyl modified nucleotide
  modified_base (2)..(2): 5-methyl modified nucleotide
  modified_base (5)..(5): 5-methyl modified nucleotide
  modified_base (8)..(8): 5-methyl modified nucleotide
  modified_base (20)..(20): 5-methyl bicyclic nucleic acid
ccaacaucaaggaagauggc

SEQ ID NO: 14577 - RNA, 19 nt, Artificial Sequence
  source: /note="Description of Artificial Sequence: Synthetic oligonucleotide"
  source: /note="RNA"
  modified_base (1)..(1): 5-methyl modified nucleotide
  modified_base (2)..(2): 5-methyl modified nucleotide
  modified_base (5)..(5): 5-methyl modified nucleotide
  modified_base (8)..(8): 5-methyl modified nucleotide
  modified_base (19)..(19): bicyclic nucleic acid (BNA)
ccaacaucaaggaagaugg

SEQ ID NO: 14578 - RNA, 18 nt, Artificial Sequence
  source: /note="Description of Artificial Sequence: Synthetic oligonucleotide"
  source: /note="RNA"
  modified_base (1)..(1): 5-methyl modified nucleotide
  modified_base (2)..(2): 5-methyl modified nucleotide
  modified_base (5)..(5): 5-methyl modified nucleotide
  modified_base (8)..(8): 5-methyl modified nucleotide
  modified_base (18)..(18): bicyclic nucleic acid (BNA)
ccaacaucaaggaagaug

SEQ ID NO: 14579 - DNA, 17 bp, Artificial Sequence
  source: /note="Description of Artificial Sequence: Synthetic oligonucleotide"
  source: /note="Description of Combined DNA/RNA Molecule: Synthetic oligonucleotide"
  source: /note="DNA/RNA"
  modified_base (1)..(1): 5-methyl modified nucleotide
  modified_base (2)..(2): 5-methyl modified nucleotide
  modified_base (5)..(5): 5-methyl modified nucleotide
  modified_base (8)..(8): 5-methyl modified nucleotide
  modified_base (17)..(17): bicyclic nucleic acid (BNA)
ccaacaucaaggaagat

SEQ ID NO: 14580 - RNA, 16 nt, Artificial Sequence
  source: /note="Description of Artificial Sequence: Synthetic oligonucleotide"
  source: /note="RNA"
  modified_base (1)..(1): 5-methyl modified nucleotide
  modified_base (2)..(2): 5-methyl modified nucleotide
  modified_base (5)..(5): 5-methyl modified nucleotide
  modified_base (8)..(8): 5-methyl modified nucleotide
  modified_base (16)..(16): bicyclic nucleic acid (BNA)
ccaacaucaaggaaga

SEQ ID NO: 14581 - RNA, 15 nt, Artificial Sequence
  source: /note="Description of Artificial Sequence: Synthetic oligonucleotide"
  source: /note="RNA"
  modified_base (1)..(1): 5-methyl modified nucleotide
  modified_base (2)..(2): 5-methyl modified nucleotide
  modified_base (5)..(5): 5-methyl modified nucleotide
  modified_base (8)..(8): 5-methyl modified nucleotide
  modified_base (15)..(15): bicyclic nucleic acid (BNA)
ccaacaucaaggaag

SEQ ID NO: 14582 - RNA, 27 nt, Artificial Sequence
  source: /note="Description of Artificial Sequence: Synthetic oligonucleotide"
  source: /note="RNA"
  modified_base (1)..(1): 5-methyl modified nucleotide
  modified_base (4)..(4): 5-methyl modified nucleotide
  modified_base (7)..(7): 5-methyl modified nucleotide
  modified_base (19)..(19): 5-methyl modified nucleotide
  modified_base (24)..(24): 5-methyl modified nucleotide
  modified_base (27)..(27): bicyclic nucleic acid (BNA)
caacaucaaggaagauggcauuucuag

SEQ ID NO: 14583 - RNA, 26 nt, Artificial Sequence
  source: /note="Description of Artificial Sequence: Synthetic oligonucleotide"
  source: /note="RNA"
  modified_base (1)..(1): 5-methyl modified nucleotide
  modified_base (4)..(4): 5-methyl modified nucleotide
  modified_base (7)..(7): 5-methyl modified nucleotide
  modified_base (19)..(19): 5-methyl modified nucleotide
  modified_base (24)..(24): 5-methyl modified nucleotide
  modified_base (26)..(26): bicyclic nucleic acid (BNA)
caacaucaaggaagauggcauuucua

SEQ ID NO: 14584 - DNA, 25 bp, Artificial Sequence
  source: /note="Description of Artificial Sequence: Synthetic oligonucleotide"
  source: /note="Description of Combined DNA/RNA Molecule: Synthetic oligonucleotide"
  source: /note="DNA/RNA"
  modified_base (1)..(1): 5-methyl modified nucleotide
  modified_base (4)..(4): 5-methyl modified nucleotide
  modified_base (7)..(7): 5-methyl modified nucleotide
  modified_base (19)..(19): 5-methyl modified nucleotide
  modified_base (24)..(24): 5-methyl modified nucleotide
  modified_base (25)..(25): bicyclic nucleic acid (BNA)
caacaucaaggaagauggcauuuct

SEQ ID NO: 14585 - RNA, 24 nt, Artificial Sequence
  source: /note="Description of Artificial Sequence: Synthetic oligonucleotide"
  source: /note="RNA"
  modified_base (1)..(1): 5-methyl modified nucleotide
  modified_base (4)..(4): 5-methyl modified nucleotide
  modified_base (7)..(7): 5-methyl modified nucleotide
  modified_base (19)..(19): 5-methyl modified nucleotide
  modified_base (24)..(24): 5-methyl bicyclic nucleic acid
caacaucaaggaagauggcauuuc

SEQ ID NO: 14586 - DNA, 23 bp, Artificial Sequence
  source: /note="Description of Artificial Sequence: Synthetic oligonucleotide"
  source: /note="Description of Combined DNA/RNA Molecule: Synthetic oligonucleotide"
  source: /note="DNA/RNA"
  modified_base (1)..(1): 5-methyl modified nucleotide
  modified_base (4)..(4): 5-methyl modified nucleotide
  modified_base (7)..(7): 5-methyl modified nucleotide
  modified_base (19)..(19): 5-methyl modified nucleotide
  modified_base (23)..(23): bicyclic nucleic acid (BNA)
caacaucaaggaagauggcauut

SEQ ID NO: 14587 - DNA, 22 bp, Artificial Sequence
  source: /note="Description of Artificial Sequence: Synthetic oligonucleotide"
  source: /note="Description of Combined DNA/RNA Molecule: Synthetic oligonucleotide"
  source: /note="DNA/RNA"
  modified_base (1)..(1): 5-methyl modified nucleotide
  modified_base (4)..(4): 5-methyl modified nucleotide
  modified_base (7)..(7): 5-methyl modified nucleotide
  modified_base (19)..(19): 5-methyl modified nucleotide
  modified_base (22)..(22): bicyclic nucleic acid (BNA)
caacaucaaggaagauggcaut

SEQ ID NO: 14588 - DNA, 21 bp, Artificial Sequence
  source: /note="Description of Artificial Sequence: Synthetic oligonucleotide"
  source: /note="Description of Combined DNA/RNA Molecule: Synthetic oligonucleotide"
  source: /note="DNA/RNA"
  modified_base (1)..(1): 5-methyl modified nucleotide
  modified_base (4)..(4): 5-methyl modified nucleotide
  modified_base (7)..(7): 5-methyl modified nucleotide
  modified_base (19)..(19): 5-methyl modified nucleotide
  modified_base (21)..(21): bicyclic nucleic acid (BNA)
caacaucaaggaagauggcat

SEQ ID NO: 14589 - RNA, 20 nt, Artificial Sequence
  source: /note="Description of Artificial Sequence: Synthetic oligonucleotide"
  source: /note="RNA"
  modified_base (1)..(1): 5-methyl modified nucleotide
  modified_base (4)..(4): 5-methyl modified nucleotide
  modified_base (7)..(7): 5-methyl modified nucleotide
  modified_base (19)..(19): 5-methyl modified nucleotide
  modified_base (20)..(20): bicyclic nucleic acid (BNA)
caacaucaaggaagauggca

SEQ ID NO: 14590 - RNA, 19 nt, Artificial Sequence
  source: /note="Description of Artificial Sequence: Synthetic oligonucleotide"
  source: /note="RNA"
  modified_base (1)..(1): 5-methyl modified nucleotide
  modified_base (4)..(4): 5-methyl modified nucleotide
  modified_base (7)..(7): 5-methyl modified nucleotide
  modified_base (19)..(19): 5-methyl bicyclic nucleic acid
caacaucaaggaagauggc

SEQ ID NO: 14591 - RNA, 18 nt, Artificial Sequence
  source: /note="Description of Artificial Sequence: Synthetic oligonucleotide"
  source: /note="RNA"
  modified_base (1)..(1): 5-methyl modified nucleotide
  modified_base (4)..(4): 5-methyl modified nucleotide
  modified_base (7)..(7): 5-methyl modified nucleotide
  modified_base (18)..(18): bicyclic nucleic acid (BNA)
caacaucaaggaagaugg

SEQ ID NO: 14592 - RNA, 17 nt, Artificial Sequence
  source: /note="Description of Artificial Sequence: Synthetic oligonucleotide"
  source: /note="RNA"
  modified_base (1)..(1): 5-methyl modified nucleotide
  modified_base (4)..(4): 5-methyl modified nucleotide
  modified_base (7)..(7): 5-methyl modified nucleotide
  modified_base (17)..(17): bicyclic nucleic acid (BNA)
caacaucaaggaagaug

SEQ ID NO: 14593 - DNA, 16 bp, Artificial Sequence
  source: /note="Description of Artificial Sequence: Synthetic oligonucleotide"
  source: /note="Description of Combined DNA/RNA Molecule: Synthetic oligonucleotide"
  source: /note="DNA/RNA"
  modified_base (1)..(1): 5-methyl modified nucleotide
  modified_base (4)..(4): 5-methyl modified nucleotide
  modified_base (7)..(7): 5-methyl modified nucleotide
  modified_base (16)..(16): bicyclic nucleic acid (BNA)
caacaucaaggaagat

SEQ ID NO: 14594 - RNA, 15 nt, Artificial Sequence
  source: /note="Description of Artificial Sequence: Synthetic oligonucleotide"
  source: /note="RNA"
  modified_base (1)..(1): 5-methyl modified nucleotide
  modified_base (4)..(4): 5-methyl modified nucleotide
  modified_base (7)..(7): 5-methyl modified nucleotide
  modified_base (15)..(15): bicyclic nucleic acid (BNA)
caacaucaaggaaga

SEQ ID NO: 14595 - RNA, 14 nt, Artificial Sequence
  source: /note="Description of Artificial Sequence: Synthetic oligonucleotide"
  source: /note="RNA"
  modified_base (1)..(1): 5-methyl modified nucleotide
  modified_base (4)..(4): 5-methyl modified nucleotide
  modified_base (7)..(7): 5-methyl modified nucleotide
  modified_base (14)..(14): bicyclic nucleic acid (BNA)
caacaucaaggaag

SEQ ID NO: 14596 - RNA, 26 nt, Artificial Sequence
  source: /note="Description of Artificial Sequence: Synthetic oligonucleotide"
  source: /note="RNA"
  modified_base (3)..(3): 5-methyl modified nucleotide
  modified_base (6)..(6): 5-methyl modified nucleotide
  modified_base (18)..(18): 5-methyl modified nucleotide
  modified_base (23)..(23): 5-methyl modified nucleotide
  modified_base (26)..(26): bicyclic nucleic acid (BNA)
aacaucaaggaagauggcauuucuag

SEQ ID NO: 14597 - RNA, 25 nt, Artificial Sequence
  source: /note="Description of Artificial Sequence: Synthetic oligonucleotide"
  source: /note="RNA"
  modified_base (3)..(3): 5-methyl modified nucleotide
  modified_base (6)..(6): 5-methyl modified nucleotide
  modified_base (18)..(18): 5-methyl modified nucleotide
  modified_base (23)..(23): 5-methyl modified nucleotide
  modified_base (25)..(25): bicyclic nucleic acid (BNA)
aacaucaaggaagauggcauuucua

SEQ ID NO: 14598 - DNA, 24 bp, Artificial Sequence
  source: /note="Description of Artificial Sequence: Synthetic oligonucleotide"
  source: /note="Description of Combined DNA/RNA Molecule: Synthetic oligonucleotide"
  source: /note="DNA/RNA"
  modified_base (3)..(3): 5-methyl modified nucleotide
  modified_base (6)..(6): 5-methyl modified nucleotide
  modified_base (18)..(18): 5-methyl modified nucleotide
  modified_base (23)..(23): 5-methyl modified nucleotide
  modified_base (24)..(24): bicyclic nucleic acid (BNA)
aacaucaaggaagauggcauuuct

SEQ ID NO: 14599 - RNA, 23 nt, Artificial Sequence
  source: /note="Description of Artificial Sequence: Synthetic oligonucleotide"
  source: /note="RNA"
  modified_base (3)..(3): 5-methyl modified nucleotide
  modified_base (6)..(6): 5-methyl modified nucleotide
  modified_base (18)..(18): 5-methyl modified nucleotide
  modified_base (23)..(23): 5-methyl bicyclic nucleic acid
aacaucaaggaagauggcauuuc

SEQ ID NO: 14600 - DNA, 22 bp, Artificial Sequence
  source: /note="Description of Artificial Sequence: Synthetic oligonucleotide"
  source: /note="Description of Combined DNA/RNA Molecule: Synthetic oligonucleotide"
  source: /note="DNA/RNA"
  modified_base (3)..(3): 5-methyl modified nucleotide
  modified_base (6)..(6): 5-methyl modified nucleotide
  modified_base (18)..(18): 5-methyl modified nucleotide
  modified_base (22)..(22): bicyclic nucleic acid (BNA)
aacaucaaggaagauggcauut

SEQ ID NO: 14601 - DNA, 21 bp, Artificial Sequence
  source: /note="Description of Artificial Sequence: Synthetic oligonucleotide"
  source: /note="Description of Combined DNA/RNA Molecule: Synthetic oligonucleotide"
  source: /note="DNA/RNA"
  modified_base (3)..(3): 5-methyl modified nucleotide
  modified_base (6)..(6): 5-methyl modified nucleotide
  modified_base (18)..(18): 5-methyl modified nucleotide
  modified_base (21)..(21): bicyclic nucleic acid (BNA)
aacaucaaggaagauggcaut

SEQ ID NO: 14602 - DNA, 20 bp, Artificial Sequence
  source: /note="Description of Artificial Sequence: Synthetic oligonucleotide"
  source: /note="Description of Combined DNA/RNA Molecule: Synthetic oligonucleotide"
  source: /note="DNA/RNA"
  modified_base (3)..(3): 5-methyl modified nucleotide
  modified_base (6)..(6): 5-methyl modified nucleotide
  modified_base (18)..(18): 5-methyl modified nucleotide
  modified_base (20)..(20): bicyclic nucleic acid (BNA)
aacaucaaggaagauggcat

SEQ ID NO: 14603 - RNA, 19 nt, Artificial Sequence
  source: /note="Description of Artificial Sequence: Synthetic oligonucleotide"
  source: /note="RNA"
  modified_base (3)..(3): 5-methyl modified nucleotide
  modified_base (6)..(6): 5-methyl modified nucleotide
  modified_base (18)..(18): 5-methyl modified nucleotide
  modified_base (19)..(19): bicyclic nucleic acid (BNA)
aacaucaaggaagauggca

SEQ ID NO: 14604 - RNA, 18 nt, Artificial Sequence
  source: /note="Description of Artificial Sequence: Synthetic oligonucleotide"
  source: /note="RNA"
  modified_base (3)..(3): 5-methyl modified nucleotide
  modified_base (6)..(6): 5-methyl modified nucleotide
  modified_base (18)..(18): 5-methyl bicyclic nucleic acid
aacaucaaggaagauggc

SEQ ID NO: 14605 - RNA, 17 nt, Artificial Sequence
  source: /note="Description of Artificial Sequence: Synthetic oligonucleotide"
  source: /note="RNA"
  modified_base (3)..(3): 5-methyl modified nucleotide
  modified_base (6)..(6): 5-methyl modified nucleotide
  modified_base (17)..(17): bicyclic nucleic acid (BNA)
aacaucaaggaagaugg

SEQ ID NO: 14606 - RNA, 16 nt, Artificial Sequence
  source: /note="Description of Artificial Sequence: Synthetic oligonucleotide"
  source: /note="RNA"
  modified_base (3)..(3): 5-methyl modified nucleotide
  modified_base (6)..(6): 5-methyl modified nucleotide
  modified_base (16)..(16): bicyclic nucleic acid (BNA)
aacaucaaggaagaug

SEQ ID NO: 14607 - DNA, 15 bp, Artificial Sequence
  source: /note="Description of Artificial Sequence: Synthetic oligonucleotide"
  source: /note="Description of Combined DNA/RNA Molecule: Synthetic oligonucleotide"
  source: /note="DNA/RNA"
  modified_base (3)..(3): 5-methyl modified nucleotide
  modified_base (6)..(6): 5-methyl modified nucleotide
  modified_base (15)..(15): bicyclic nucleic acid (BNA)
aacaucaaggaagat

SEQ ID NO: 14608 - RNA, 14 nt, Artificial Sequence
  source: /note="Description of Artificial Sequence: Synthetic oligonucleotide"
  source: /note="RNA"
  modified_base (3)..(3): 5-methyl modified nucleotide
  modified_base (6)..(6): 5-methyl modified nucleotide
  modified_base (14)..(14): bicyclic nucleic acid (BNA)
aacaucaaggaaga

SEQ ID NO: 14609 - RNA, 13 nt, Artificial Sequence
  source: /note="Description of Artificial Sequence: Synthetic oligonucleotide"
  source: /note="RNA"
  modified_base (3)..(3): 5-methyl modified nucleotide
  modified_base (6)..(6): 5-methyl modified nucleotide
  modified_base (13)..(13): bicyclic nucleic acid (BNA)
aacaucaaggaag

SEQ ID NO: 14610 - RNA, 25 nt, Artificial Sequence
  source: /note="Description of Artificial Sequence: Synthetic oligonucleotide"
  source: /note="RNA"
  modified_base (2)..(2): 5-methyl modified nucleotide
  modified_base (5)..(5): 5-methyl modified nucleotide
  modified_base (17)..(17): 5-methyl modified nucleotide
  modified_base (22)..(22): 5-methyl modified nucleotide
  modified_base (25)..(25): bicyclic nucleic acid (BNA)
acaucaaggaagauggcauuucuag

SEQ ID NO: 14611 - RNA, 24 nt, Artificial Sequence
  source: /note="Description of Artificial Sequence: Synthetic oligonucleotide"
  source: /note="RNA"
  modified_base (2)..(2): 5-methyl modified nucleotide
  modified_base (5)..(5): 5-methyl modified nucleotide
  modified_base (17)..(17): 5-methyl modified nucleotide
  modified_base (22)..(22): 5-methyl modified nucleotide
  modified_base (24)..(24): bicyclic nucleic acid (BNA)
acaucaaggaagauggcauuucua

SEQ ID NO: 14612 - DNA, 23 bp, Artificial Sequence
  source: /note="Description of Artificial Sequence: Synthetic oligonucleotide"
  source: /note="Description of Combined DNA/RNA Molecule: Synthetic oligonucleotide"
  source: /note="DNA/RNA"
  modified_base (2)..(2): 5-methyl modified nucleotide
  modified_base (5)..(5): 5-methyl modified nucleotide
  modified_base (17)..(17): 5-methyl modified nucleotide
  modified_base (22)..(22): 5-methyl modified nucleotide
  modified_base (23)..(23): bicyclic nucleic acid (BNA)
acaucaaggaagauggcauuuct

SEQ ID NO: 14613 - RNA, 22 nt, Artificial Sequence
  source: /note="Description of Artificial Sequence: Synthetic oligonucleotide"
  source: /note="RNA"
  modified_base (2)..(2): 5-methyl modified nucleotide
  modified_base (5)..(5): 5-methyl modified nucleotide
  modified_base (17)..(17): 5-methyl modified nucleotide
  modified_base (22)..(22): 5-methyl bicyclic nucleic acid
acaucaaggaagauggcauuuc

SEQ ID NO: 14614 - DNA, 21 bp, Artificial Sequence
  source: /note="Description of Artificial Sequence: Synthetic oligonucleotide"
  source: /note="Description of Combined DNA/RNA Molecule: Synthetic oligonucleotide"
  source: /note="DNA/RNA"
  modified_base (2)..(2): 5-methyl modified nucleotide
  modified_base (5)..(5): 5-methyl modified nucleotide
  modified_base (17)..(17): 5-methyl modified nucleotide
  modified_base (21)..(21): bicyclic nucleic acid (BNA)
acaucaaggaagauggcauut

SEQ ID NO: 14615 - DNA, 20 bp, Artificial Sequence
  source: /note="Description of Artificial Sequence: Synthetic oligonucleotide"
  source: /note="Description of Combined DNA/RNA Molecule: Synthetic oligonucleotide"
  source: /note="DNA/RNA"
  modified_base (2)..(2): 5-methyl modified nucleotide
  modified_base (5)..(5): 5-methyl modified nucleotide
  modified_base (17)..(17): 5-methyl modified nucleotide
  modified_base (20)..(20): bicyclic nucleic acid (BNA)
acaucaaggaagauggcaut

SEQ ID NO: 14616 - DNA, 19 bp, Artificial Sequence
  source: /note="Description of Artificial Sequence: Synthetic oligonucleotide"
  source: /note="Description of Combined DNA/RNA Molecule: Synthetic oligonucleotide"
  source: /note="DNA/RNA"
  modified_base (2)..(2): 5-methyl modified nucleotide
  modified_base (5)..(5): 5-methyl modified nucleotide
  modified_base (17)..(17): 5-methyl modified nucleotide
  modified_base (19)..(19): bicyclic nucleic acid (BNA)
acaucaaggaagauggcat

SEQ ID NO: 14617 - RNA, 18 nt, Artificial Sequence
  source: /note="Description of Artificial Sequence: Synthetic oligonucleotide"
  source: /note="RNA"
  modified_base (2)..(2): 5-methyl modified nucleotide
  modified_base (5)..(5): 5-methyl modified nucleotide
  modified_base (17)..(17): 5-methyl modified nucleotide
  modified_base (18)..(18): bicyclic nucleic acid (BNA)
acaucaaggaagauggca

SEQ ID NO: 14618 - RNA, 17 nt, Artificial Sequence
  source: /note="Description of Artificial Sequence: Synthetic oligonucleotide"
  source: /note="RNA"
  modified_base (2)..(2): 5-methyl modified nucleotide
  modified_base (5)..(5): 5-methyl modified nucleotide
  modified_base (17)..(17): 5-methyl bicyclic nucleic acid
acaucaaggaagauggc

SEQ ID NO: 14619 - RNA, 16 nt, Artificial Sequence
  source: /note="Description of Artificial Sequence: Synthetic oligonucleotide"
  source: /note="RNA"
  modified_base (2)..(2): 5-methyl modified nucleotide
  modified_base (5)..(5): 5-methyl modified nucleotide
  modified_base (16)..(16): bicyclic nucleic acid (BNA)
acaucaaggaagaugg

SEQ ID NO: 14620 - RNA, 15 nt, Artificial Sequence
  source: /note="Description of Artificial Sequence: Synthetic oligonucleotide"
  source: /note="RNA"
  modified_base (2)..(2): 5-methyl modified nucleotide
  modified_base (5)..(5): 5-methyl modified nucleotide
  modified_base (15)..(15): bicyclic nucleic acid (BNA)
acaucaaggaagaug

SEQ ID NO: 14621 - DNA, 14 bp, Artificial Sequence
  source: /note="Description of Artificial Sequence: Synthetic oligonucleotide"
  source: /note="Description of Combined DNA/RNA Molecule: Synthetic oligonucleotide"
  source: /note="DNA/RNA"
  modified_base (2)..(2): 5-methyl modified nucleotide
  modified_base (5)..(5): 5-methyl modified nucleotide
  modified_base (14)..(14): bicyclic nucleic acid (BNA)
acaucaaggaagat

SEQ ID NO: 14622 - RNA, 13 nt, Artificial Sequence
  source: /note="Description of Artificial Sequence: Synthetic oligonucleotide"
  source: /note="RNA"
  modified_base (2)..(2): 5-methyl modified nucleotide
  modified_base (5)..(5): 5-methyl modified nucleotide
  modified_base (13)..(13): bicyclic nucleic acid (BNA)
acaucaaggaaga

SEQ ID NO: 14623 - RNA, 12 nt, Artificial Sequence
  source: /note="Description of Artificial Sequence: Synthetic oligonucleotide"
  source: /note="RNA"
  modified_base (2)..(2): 5-methyl modified nucleotide
  modified_base (5)..(5): 5-methyl modified nucleotide
  modified_base (12)..(12): bicyclic nucleic acid (BNA)
acaucaaggaag

SEQ ID NO: 14624 - RNA, 24 nt, Artificial Sequence
  source: /note="Description of Artificial Sequence: Synthetic oligonucleotide"
  source: /note="RNA"
  modified_base (1)..(1): 5-methyl modified nucleotide
  modified_base (4)..(4): 5-methyl modified nucleotide
  modified_base (16)..(16): 5-methyl modified nucleotide
  modified_base (21)..(21): 5-methyl modified nucleotide
  modified_base (24)..(24): bicyclic nucleic acid (BNA)
caucaaggaagauggcauuucuag

SEQ ID NO: 14625 - RNA, 23 nt, Artificial Sequence
  source: /note="Description of Artificial Sequence: Synthetic oligonucleotide"
  source: /note="RNA"
  modified_base (1)..(1): 5-methyl modified nucleotide
  modified_base (4)..(4): 5-methyl modified nucleotide
  modified_base (16)..(16): 5-methyl modified nucleotide
  modified_base (21)..(21): 5-methyl modified nucleotide
  modified_base (23)..(23): bicyclic nucleic acid (BNA)
caucaaggaagauggcauuucua

SEQ ID NO: 14626 - DNA, 22 bp, Artificial Sequence
  source: /note="Description of Artificial Sequence: Synthetic oligonucleotide"
  source: /note="Description of Combined DNA/RNA Molecule: Synthetic oligonucleotide"
  source: /note="DNA/RNA"
  modified_base (1)..(1): 5-methyl modified nucleotide
  modified_base (4)..(4): 5-methyl modified nucleotide
  modified_base (16)..(16): 5-methyl modified nucleotide
  modified_base (21)..(21): 5-methyl modified nucleotide
  modified_base (22)..(22): bicyclic nucleic acid (BNA)
caucaaggaagauggcauuuct

SEQ ID NO: 14627 - RNA, 21 nt, Artificial Sequence
  source: /note="Description of Artificial Sequence: Synthetic oligonucleotide"
  source: /note="RNA"
  modified_base (1)..(1): 5-methyl modified nucleotide
  modified_base (4)..(4): 5-methyl modified nucleotide
  modified_base (16)..(16): 5-methyl modified nucleotide
  modified_base (21)..(21): 5-methyl bicyclic nucleic acid
caucaaggaagauggcauuuc

SEQ ID NO: 14628 - DNA, 20 bp, Artificial Sequence
  source: /note="Description of Artificial Sequence: Synthetic oligonucleotide"
  source: /note="Description of Combined DNA/RNA Molecule: Synthetic oligonucleotide"
  source: /note="DNA/RNA"
  modified_base (1)..(1): 5-methyl modified nucleotide
  modified_base (4)..(4): 5-methyl modified nucleotide
  modified_base (16)..(16): 5-methyl modified nucleotide
  modified_base (20)..(20): bicyclic nucleic acid (BNA)
caucaaggaagauggcauut

SEQ ID NO: 14629 - DNA, 19 bp, Artificial Sequence
  source: /note="Description of Artificial Sequence: Synthetic oligonucleotide"
  source: /note="Description of Combined DNA/RNA Molecule: Synthetic oligonucleotide"
  source: /note="DNA/RNA"
  modified_base (1)..(1): 5-methyl modified nucleotide
  modified_base (4)..(4): 5-methyl modified nucleotide
  modified_base (16)..(16): 5-methyl modified nucleotide
  modified_base (19)..(19): bicyclic nucleic acid (BNA)
caucaaggaagauggcaut

SEQ ID NO: 14630 - DNA, 18 bp, Artificial Sequence
  source: /note="Description of Artificial Sequence: Synthetic oligonucleotide"
  source: /note="Description of Combined DNA/RNA Molecule: Synthetic oligonucleotide"
  source: /note="DNA/RNA"
  modified_base (1)..(1): 5-methyl modified nucleotide
  modified_base (4)..(4): 5-methyl modified nucleotide
  modified_base (16)..(16): 5-methyl modified nucleotide
  modified_base (18)..(18): bicyclic nucleic acid (BNA)
caucaaggaagauggcat

SEQ ID NO: 14631 - RNA, 17 nt, Artificial Sequence
  source: /note="Description of Artificial Sequence: Synthetic oligonucleotide"
  source: /note="RNA"
  modified_base (1)..(1): 5-methyl modified nucleotide
  modified_base (4)..(4): 5-methyl modified nucleotide
  modified_base (16)..(16): 5-methyl modified nucleotide
  modified_base (17)..(17): bicyclic nucleic acid (BNA)
caucaaggaagauggca

SEQ ID NO: 14632 - RNA, 16 nt, Artificial Sequence
  source: /note="Description of Artificial Sequence: Synthetic oligonucleotide"
  source: /note="RNA"
  modified_base (1)..(1): 5-methyl modified nucleotide
  modified_base (4)..(4): 5-methyl modified nucleotide
  modified_base (16)..(16): 5-methyl bicyclic nucleic acid
caucaaggaagauggc

SEQ ID NO: 14633 - RNA, 15 nt, Artificial Sequence
  source: /note="Description of Artificial Sequence: Synthetic oligonucleotide"
  source: /note="RNA"
  modified_base (1)..(1): 5-methyl modified nucleotide
  modified_base (4)..(4): 5-methyl modified nucleotide
  modified_base (15)..(15): bicyclic nucleic acid (BNA)
caucaaggaagaugg

SEQ ID NO: 14634 - RNA, 14 nt, Artificial Sequence
  source: /note="Description of Artificial Sequence: Synthetic oligonucleotide"
  source: /note="RNA"
  modified_base (1)..(1): 5-methyl modified nucleotide
  modified_base (4)..(4): 5-methyl modified nucleotide
  modified_base (14)..(14): bicyclic nucleic acid (BNA)
caucaaggaagaug

SEQ ID NO: 14635 - DNA, 13 bp, Artificial Sequence
  source: /note="Description of Artificial Sequence: Synthetic oligonucleotide"
  source: /note="Description of Combined DNA/RNA Molecule: Synthetic oligonucleotide"
  source: /note="DNA/RNA"
  modified_base (1)..(1): 5-methyl modified nucleotide
  modified_base (4)..(4): 5-methyl modified nucleotide
  modified_base (13)..(13): bicyclic nucleic acid (BNA)
caucaaggaagat

SEQ ID NO: 14636 - RNA, 12 nt, Artificial Sequence
  source: /note="Description of Artificial Sequence: Synthetic oligonucleotide"
  source: /note="RNA"
  modified_base (1)..(1): 5-methyl modified nucleotide
  modified_base (4)..(4): 5-methyl modified nucleotide
  modified_base (12)..(12): bicyclic nucleic acid (BNA)
caucaaggaaga

SEQ ID NO: 14637 - RNA, 11 nt, Artificial Sequence
  source: /note="Description of Artificial Sequence: Synthetic oligonucleotide"
  source: /note="RNA"
  modified_base (1)..(1): 5-methyl modified nucleotide
  modified_base (4)..(4): 5-methyl modified nucleotide
  modified_base (11)..(11): bicyclic nucleic acid (BNA)
caucaaggaag

SEQ ID NO: 14638 - RNA, 23 nt, Artificial Sequence
  source: /note="Description of Artificial Sequence: Synthetic oligonucleotide"
  source: /note="RNA"
  modified_base (3)..(3): 5-methyl modified nucleotide
  modified_base (15)..(15): 5-methyl modified nucleotide
  modified_base (20)..(20): 5-methyl modified nucleotide
  modified_base (23)..(23): bicyclic nucleic acid (BNA)
aucaaggaagauggcauuucuag

SEQ ID NO: 14639 - RNA, 22 nt, Artificial Sequence
  source: /note="Description of Artificial Sequence: Synthetic oligonucleotide"
  source: /note="RNA"
  modified_base (3)..(3): 5-methyl modified nucleotide
  modified_base (15)..(15): 5-methyl modified nucleotide
  modified_base (20)..(20): 5-methyl modified nucleotide
  modified_base (22)..(22): bicyclic nucleic acid (BNA)
aucaaggaagauggcauuucua

SEQ ID NO: 14640 - DNA, 21 bp, Artificial Sequence
  source: /note="Description of Artificial Sequence: Synthetic oligonucleotide"
  source: /note="Description of Combined DNA/RNA Molecule: Synthetic oligonucleotide"
  source: /note="DNA/RNA"
  modified_base (3)..(3): 5-methyl modified nucleotide
  modified_base (15)..(15): 5-methyl modified nucleotide
  modified_base (20)..(20): 5-methyl modified nucleotide
  modified_base (21)..(21): bicyclic nucleic acid (BNA)
aucaaggaagauggcauuuct

SEQ ID NO: 14641 - RNA, 20 nt, Artificial Sequence
  source: /note="Description of Artificial Sequence: Synthetic oligonucleotide"
  source: /note="RNA"
  modified_base (3)..(3): 5-methyl modified nucleotide
  modified_base (15)..(15): 5-methyl modified nucleotide
  modified_base (20)..(20): 5-methyl bicyclic nucleic acid
aucaaggaagauggcauuuc

SEQ ID NO: 14642 - DNA, 19 bp, Artificial Sequence
  source: /note="Description of Artificial Sequence: Synthetic oligonucleotide"
  source: /note="Description of Combined DNA/RNA Molecule: Synthetic oligonucleotide"
  source: /note="DNA/RNA"
  modified_base (3)..(3): 5-methyl modified nucleotide
  modified_base (15)..(15): 5-methyl modified nucleotide
  modified_base (19)..(19): bicyclic nucleic acid (BNA)
aucaaggaagauggcauut

SEQ ID NO: 14643 - DNA, 18 bp, Artificial Sequence
  source: /note="Description of Artificial Sequence: Synthetic oligonucleotide"
  source: /note="Description of Combined DNA/RNA Molecule: Synthetic oligonucleotide"
  source: /note="DNA/RNA"
  modified_base (3)..(3): 5-methyl modified nucleotide
  modified_base (15)..(15): 5-methyl modified nucleotide
  modified_base (18)..(18): bicyclic nucleic acid (BNA)
aucaaggaagauggcaut

SEQ ID NO: 14644 - DNA, 17 bp, Artificial Sequence
  source: /note="Description of Artificial Sequence: Synthetic oligonucleotide"
  source: /note="Description of Combined DNA/RNA Molecule: Synthetic oligonucleotide"
  source: /note="DNA/RNA"
  modified_base (3)..(3): 5-methyl modified nucleotide
  modified_base (15)..(15): 5-methyl modified nucleotide
  modified_base (17)..(17): bicyclic nucleic acid (BNA)
aucaaggaagauggcat

SEQ ID NO: 14645 - RNA, 16 nt, Artificial Sequence
  source: /note="Description of Artificial Sequence: Synthetic oligonucleotide"
  source: /note="RNA"
  modified_base (3)..(3): 5-methyl modified nucleotide
  modified_base (15)..(15): 5-methyl modified nucleotide
  modified_base (16)..(16): bicyclic nucleic acid (BNA)
aucaaggaagauggca

SEQ ID NO: 14646 - RNA, 15 nt, Artificial Sequence
  source: /note="Description of Artificial Sequence: Synthetic oligonucleotide"
  source: /note="RNA"
  modified_base (3)..(3): 5-methyl modified nucleotide
  modified_base (15)..(15): 5-methyl bicyclic nucleic acid
aucaaggaagauggc

SEQ ID NO: 14647 - RNA, 14 nt, Artificial Sequence
  source: /note="Description of Artificial Sequence: Synthetic oligonucleotide"
  source: /note="RNA"
  modified_base (3)..(3): 5-methyl modified nucleotide
  modified_base (14)..(14): bicyclic nucleic acid (BNA)
aucaaggaagaugg

SEQ ID NO: 14648 - RNA, 13 nt, Artificial Sequence
  source: /note="Description of Artificial Sequence: Synthetic oligonucleotide"
  source: /note="RNA"
  modified_base (3)..(3): 5-methyl modified nucleotide
  modified_base (13)..(13): bicyclic nucleic acid (BNA)
aucaaggaagaug

SEQ ID NO: 14649 - DNA, 12 bp, Artificial Sequence
  source: /note="Description of Artificial Sequence: Synthetic oligonucleotide"
  source: /note="Description of Combined DNA/RNA Molecule: Synthetic oligonucleotide"
  source: /note="DNA/RNA"
  modified_base (3)..(3): 5-methyl modified nucleotide
  modified_base (12)..(12): bicyclic nucleic acid (BNA)
aucaaggaagat

SEQ ID NO: 14650 - RNA, 11 nt, Artificial Sequence
  source: /note="Description of Artificial Sequence: Synthetic oligonucleotide"
  source: /note="RNA"
  modified_base (3)..(3): 5-methyl modified nucleotide
  modified_base (11)..(11): bicyclic nucleic acid (BNA)
aucaaggaaga

SEQ ID NO: 14651 - RNA, 10 nt, Artificial Sequence
  source: /note="Description of Artificial Sequence: Synthetic oligonucleotide"
  source: /note="RNA"
  modified_base (3)..(3): 5-methyl modified nucleotide
  modified_base (10)..(10): bicyclic nucleic acid (BNA)
aucaaggaag

SEQ ID NO: 14652 - RNA, 23 nt, Artificial Sequence
  source: /note="Description of Artificial Sequence: Synthetic oligonucleotide"
  source: /note="RNA"
  modified_base (1)..(1): 5-methyl modified nucleotide
  modified_base (2)..(2): 5-methyl modified nucleotide
  modified_base (7)..(7): 5-methyl modified nucleotide
  modified_base (13)..(13): 5-methyl modified nucleotide
  modified_base (14)..(14): 5-methyl modified nucleotide
  modified_base (16)..(16): 5-methyl modified nucleotide
  modified_base (17)..(17): 5-methyl modified nucleotide
  modified_base (20)..(20): 5-methyl modified nucleotide
  modified_base (23)..(23): 5-methyl bicyclic nucleic acid
ccagagcagguaccuccaacauc

SEQ ID NO: 14653 - RNA, 18 nt, Artificial Sequence
  source: /note="Description of Artificial Sequence: Synthetic oligonucleotide"
  source: /note="RNA"
  modified_base (1)..(1): 5-methyl modified nucleotide
  modified_base (2)..(2): 5-methyl modified nucleotide
  modified_base (7)..(7): 5-methyl modified nucleotide
  modified_base (13)..(13): 5-methyl modified nucleotide
  modified_base (14)..(14): 5-methyl modified nucleotide
  modified_base (16)..(16): 5-methyl modified nucleotide
  modified_base (17)..(17): 5-methyl modified nucleotide
  modified_base (18)..(18): bicyclic nucleic acid (BNA)
ccagagcagguaccucca

SEQ ID NO: 14654 - DNA, 23 bp, Artificial Sequence
  source: /note="Description of Artificial Sequence: Synthetic oligonucleotide"
  source: /note="Description of Combined DNA/RNA Molecule: Synthetic oligonucleotide"
  source: /note="DNA/RNA"
  modified_base (1)..(1): 5-methyl modified nucleotide
  modified_base (2)..(2): 5-methyl modified nucleotide
  modified_base (4)..(4): 5-methyl modified nucleotide
  modified_base (18)..(18): 5-methyl modified nucleotide
  modified_base (23)..(23): bicyclic nucleic acid (BNA)
ccucugugauuuuauaacuugat

SEQ ID NO: 14655 - DNA, 17 bp, Artificial Sequence
  source: /note="Description of Artificial Sequence: Synthetic oligonucleotide"
  source: /note="Description of Combined DNA/RNA Molecule: Synthetic oligonucleotide"
  source: /note="DNA/RNA"
  modified_base (2)..(2): 5-methyl modified nucleotide
  modified_base (4)..(4): 5-methyl modified nucleotide
  modified_base (5)..(5): 5-methyl modified nucleotide
  modified_base (6)..(6): 5-methyl modified nucleotide
  modified_base (8)..(8): 5-methyl modified nucleotide
  modified_base (9)..(9): 5-methyl modified nucleotide
  modified_base (12)..(12): 5-methyl modified nucleotide
  modified_base (14)..(14): 5-methyl modified nucleotide
  modified_base (15)..(15): 5-methyl modified nucleotide
  modified_base (16)..(16): 5-methyl modified nucleotide
  modified_base (17)..(17): bicyclic nucleic acid (BNA)
ucacccaccaucaccct

SEQ ID NO: 14656 - RNA, 20 nt, Artificial Sequence
  source: /note="Description of Artificial Sequence: Synthetic oligonucleotide"
  source: /note="RNA"
  modified_base (7)..(7): 5-methyl modified nucleotide
  modified_base (8)..(8): 5-methyl modified nucleotide
  modified_base (10)..(10): 5-methyl modified nucleotide
  modified_base (16)..(16): 5-methyl modified nucleotide
  modified_base (18)..(18): 5-methyl modified nucleotide
  modified_base (19)..(19): 5-methyl modified nucleotide
  modified_base (20)..(20): 5-methyl bicyclic nucleic acid
ugauauccucaaggucaccc

SEQ ID NO: 14657 - RNA, 22 nt, Artificial Sequence
  source: /note="Description of Artificial Sequence: Synthetic oligonucleotide"
  source: /note="RNA"
  modified_base (1)..(1): 5-methyl modified nucleotide
  modified_base (4)..(4): 5-methyl modified nucleotide
  modified_base (13)..(13): 5-methyl modified nucleotide
  modified_base (16)..(16): 5-methyl modified nucleotide
  modified_base (18)..(18): 5-methyl modified nucleotide
  modified_base (22)..(22): bicyclic nucleic acid (BNA)
cugcuugaugaucaucucguug

SEQ ID NO: 14658 - RNA, 18 nt, Artificial Sequence
  source: /note="Description of Artificial Sequence: Synthetic oligonucleotide"
  source: /note="RNA"
  modified_base (1)..(1): 5-methyl modified nucleotide
  modified_base (4)..(4): 5-methyl modified nucleotide
  modified_base (13)..(13): 5-methyl modified nucleotide
  modified_base (16)..(16): 5-methyl modified nucleotide
  modified_base (18)..(18): 5-methyl bicyclic nucleic acid
cugcuugaugaucaucuc

SEQ ID NO: 14659 - RNA, 19 nt, Artificial Sequence
  source: /note="Description of Artificial Sequence: Synthetic oligonucleotide"
  source: /note="RNA"
  modified_base (5)..(5): 5-methyl modified nucleotide
  modified_base (6)..(6): 5-methyl modified nucleotide
  modified_base (14)..(14): 5-methyl modified nucleotide
  modified_base (15)..(15): 5-methyl modified nucleotide
  modified_base (17)..(17): 5-methyl modified nucleotide
  modified_base (19)..(19): bicyclic nucleic acid (BNA)
guuuccuuaguaaccacag

SEQ ID NO: 14660 - RNA, 17 nt, Artificial Sequence
  source: /note="Description of Artificial Sequence: Synthetic oligonucleotide"
  source: /note="RNA"
  modified_base (5)..(5): 5-methyl modified nucleotide
  modified_base (6)..(6): 5-methyl modified nucleotide
  modified_base (14)..(14): 5-methyl modified nucleotide
  modified_base (15)..(15): 5-methyl modified nucleotide
  modified_base (17)..(17): 5-methyl bicyclic nucleic acid
guuuccuuaguaaccac

SEQ ID NO: 14661 - DNA, 20 bp, Artificial Sequence
  source: /note="Description of Artificial Sequence: Synthetic oligonucleotide"
  source: /note="Description of Combined DNA/RNA Molecule: Synthetic oligonucleotide"
  source: /note="DNA/RNA"
  source: /note="5' tri-ethylene glycol (TEG)"
  modified_base (2)..(2): 5-methyl modified nucleotide
  modified_base (14)..(14): 5-methyl modified nucleotide
  modified_base (19)..(19): 5-methyl modified nucleotide
  modified_base (20)..(20): bicyclic nucleic acid (BNA)
ucaaggaagauggcauuuct

SEQ ID NO: 14662 - RNA, 22 nt, Artificial Sequence
  source: /note="Description of Artificial Sequence: Synthetic oligonucleotide"
  source: /note="RNA"
  source: /note="5' tri-ethylene glycol (TEG)"
  modified_base (2)..(2): 5-methyl modified nucleotide
  modified_base (14)..(14): 5-methyl modified nucleotide
  modified_base (19)..(19): 5-methyl modified nucleotide
  modified_base (22)..(22): bicyclic nucleic acid (BNA)
ucaaggaagauggcauuucuag

SEQ ID NO: 14663 - RNA, 18 nt, Artificial Sequence
  source: /note="Description of Artificial Sequence: Synthetic oligonucleotide"
  source: /note="RNA"
  source: /note="5' tri-ethylene glycol (TEG)"
  modified_base (9)..(9): 5-methyl modified nucleotide
  modified_base (13)..(13): 5-methyl modified nucleotide
  modified_base (14)..(14): 5-methyl modified nucleotide
  modified_base (18)..(18): 5-methyl bicyclic nucleic acid
gguaaguucuguccaagc

SEQ ID NO: 14664 - RNA, 18 nt, Artificial Sequence
  source: /note="Description of Artificial Sequence: Synthetic oligonucleotide"
  source: /note="RNA"
  source: /note="5' tri-ethylene glycol (TEG)"
  modified_base (8)..(8): 5-methyl modified nucleotide
  modified_base (12)..(12): 5-methyl modified nucleotide
  modified_base (13)..(13): 5-methyl modified nucleotide
  modified_base (17)..(17): 5-methyl modified nucleotide
  modified_base (18)..(18): 5-methyl bicyclic nucleic acid
guaaguucuguccaagcc

SEQ ID NO: 14665 - RNA, 18 nt, Artificial Sequence
  source: /note="Description of Artificial Sequence: Synthetic oligonucleotide"
  source: /note="RNA"
  source: /note="5' tri-ethylene glycol (TEG)"
  modified_base (4)..(4): 5-methyl modified nucleotide
  modified_base (13)..(13): 5-methyl modified nucleotide
  modified_base (17)..(17): 5-methyl modified nucleotide
  modified_base (18)..(18): 5-methyl bicyclic nucleic acid
agucgguaaguucugucc

SEQ ID NO: 14666 - RNA, 18 nt, Artificial Sequence
  source: /note="Description of Artificial Sequence: Synthetic oligonucleotide"
  source: /note="RNA"
  source: /note="5' tri-ethylene glycol (TEG)"
  modified_base (1)..(1): 5-methyl modified nucleotide
  modified_base (5)..(5): 5-methyl modified nucleotide
  modified_base (6)..(6): 5-methyl modified nucleotide
  modified_base (10)..(10): 5-methyl modified nucleotide
  modified_base (11)..(11): 5-methyl modified nucleotide
  modified_base (12)..(12): 5-methyl modified nucleotide
  modified_base (18)..(18): bicyclic nucleic acid (BNA)
cuguccaagcccgguuga

SEQ ID NO: 14667 - RNA, 15 nt, Artificial Sequence
  source: /note="Description of Artificial Sequence: Synthetic oligonucleotide"
  source: /note="RNA"
  source: /note="5' tri-ethylene glycol (TEG)"
  modified_base (7)..(7): 5-methyl modified nucleotide
  modified_base (11)..(11): 5-methyl modified nucleotide
  modified_base (12)..(12): 5-methyl modified nucleotide
  modified_base (15)..(15): bicyclic nucleic acid (BNA)
uaaguucuguccaag

SEQ ID NO: 14668 - RNA, 20 nt, Artificial Sequence
  source: /note="Description of Artificial Sequence: Synthetic oligonucleotide"
  source: /note="RNA"
  source: /note="5' tri-ethylene glycol (TEG)"
  modified_base (3)..(3): 5-methyl modified nucleotide
  modified_base (7)..(7): 5-methyl modified nucleotide
  modified_base (8)..(8): 5-methyl modified nucleotide
  modified_base (12)..(12): 5-methyl modified nucleotide
  modified_base (13)..(13): 5-methyl modified nucleotide
  modified_base (14)..(14): 5-methyl modified nucleotide
  modified_base (20)..(20): bicyclic nucleic acid (BNA)
uucuguccaagcccgguuga

SEQ ID NO: 14669 - RNA, 19 nt, Artificial Sequence
  source: /note="Description of Artificial Sequence: Synthetic oligonucleotide"
  source: /note="RNA"
  source: /note="5' tri-ethylene glycol (TEG)"
  modified_base (3)..(3): 5-methyl modified nucleotide
  modified_base (7)..(7): 5-methyl modified nucleotide
  modified_base (8)..(8): 5-methyl modified nucleotide
  modified_base (12)..(12): 5-methyl modified nucleotide
  modified_base (13)..(13): 5-methyl modified nucleotide
  modified_base (14)..(14): 5-methyl modified nucleotide
  modified_base (19)..(19): bicyclic nucleic acid (BNA)
uucuguccaagcccgguug

SEQ ID NO: 14670 - DNA, 18 bp, Artificial Sequence
  source: /note="Description of Artificial Sequence: Synthetic oligonucleotide"
  source: /note="Description of Combined DNA/RNA Molecule: Synthetic oligonucleotide"
  source: /note="DNA/RNA"
  source: /note="5' tri-ethylene glycol (TEG)"
  modified_base (3)..(3): 5-methyl modified nucleotide
  modified_base (7)..(7): 5-methyl modified nucleotide
  modified_base (8)..(8): 5-methyl modified nucleotide
  modified_base (12)..(12): 5-methyl modified nucleotide
  modified_base (13)..(13): 5-methyl modified nucleotide
  modified_base (14)..(14): 5-methyl modified nucleotide
  modified_base (18)..(18): bicyclic nucleic acid (BNA)
uucuguccaagcccggut

SEQ ID NO: 14671 - DNA, 17 bp, Artificial Sequence
  source: /note="Description of Artificial Sequence: Synthetic oligonucleotide"
  source: /note="Description of Combined DNA/RNA Molecule: Synthetic oligonucleotide"
  source: /note="DNA/RNA"
  source: /note="5' tri-ethylene glycol (TEG)"
  modified_base (3)..(3): 5-methyl modified nucleotide
  modified_base (7)..(7): 5-methyl modified nucleotide
  modified_base (8)..(8): 5-methyl modified nucleotide
  modified_base (12)..(12): 5-methyl modified nucleotide
  modified_base (13)..(13): 5-methyl modified nucleotide
  modified_base (14)..(14): 5-methyl modified nucleotide
  modified_base (17)..(17): bicyclic nucleic acid (BNA)
uucuguccaagcccggt

SEQ ID NO: 14672 - RNA, 16 nt, Artificial Sequence
  source: /note="Description of Artificial Sequence: Synthetic oligonucleotide"
  source: /note="RNA"
  source: /note="5' tri-ethylene glycol (TEG)"
  modified_base (3)..(3): 5-methyl modified nucleotide
  modified_base (7)..(7): 5-methyl modified nucleotide
  modified_base (8)..(8): 5-methyl modified nucleotide
  modified_base (12)..(12): 5-methyl modified nucleotide
  modified_base (13)..(13): 5-methyl modified nucleotide
  modified_base (14)..(14): 5-methyl modified nucleotide
  modified_base (16)..(16): bicyclic nucleic acid (BNA)
uucuguccaagcccgg

SEQ ID NO: 14673 - RNA, 15 nt, Artificial Sequence
  source: /note="Description of Artificial Sequence: Synthetic oligonucleotide"
  source: /note="RNA"
  source: /note="5' tri-ethylene glycol (TEG)"
  modified_base (3)..(3): 5-methyl modified nucleotide
  modified_base (7)..(7): 5-methyl modified nucleotide
  modified_base (8)..(8): 5-methyl modified nucleotide
  modified_base (12)..(12): 5-methyl modified nucleotide
  modified_base (13)..(13): 5-methyl modified nucleotide
  modified_base (14)..(14): 5-methyl modified nucleotide
  modified_base (15)..(15): bicyclic nucleic acid (BNA)
uucuguccaagcccg

SEQ ID NO: 14674 - RNA, 14 nt, Artificial Sequence
  source: /note="Description of Artificial Sequence: Synthetic oligonucleotide"
  source: /note="RNA"
  source: /note="5' tri-ethylene glycol (TEG)"
  modified_base (3)..(3): 5-methyl modified nucleotide
  modified_base (7)..(7): 5-methyl modified nucleotide
  modified_base (8)..(8): 5-methyl modified nucleotide
  modified_base (12)..(12): 5-methyl modified nucleotide
  modified_base (13)..(13): 5-methyl modified nucleotide
  modified_base (14)..(14): 5-methyl bicyclic nucleic acid
uucuguccaagccc

SEQ ID NO: 14675 - RNA, 13 nt, Artificial Sequence
  source: /note="Description of Artificial Sequence: Synthetic oligonucleotide"
  source: /note="RNA"
  source: /note="5' tri-ethylene glycol (TEG)"
  modified_base (3)..(3): 5-methyl modified nucleotide
  modified_base (7)..(7): 5-methyl modified nucleotide
  modified_base (8)..(8): 5-methyl modified nucleotide
  modified_base (12)..(12): 5-methyl modified nucleotide
  modified_base (13)..(13): 5-methyl bicyclic nucleic acid
uucuguccaagcc

SEQ ID NO: 14676 - RNA, 12 nt, Artificial Sequence
  source: /note="Description of Artificial Sequence: Synthetic oligonucleotide"
  source: /note="RNA"
  source: /note="5' tri-ethylene glycol (TEG)"
  modified_base (3)..(3): 5-methyl modified nucleotide
  modified_base (7)..(7): 5-methyl modified nucleotide
  modified_base (8)..(8): 5-methyl modified nucleotide
  modified_base (12)..(12): 5-methyl bicyclic nucleic acid
uucuguccaagc

SEQ ID NO: 14677 - RNA, 11 nt, Artificial Sequence
  source: /note="Description of Artificial Sequence: Synthetic oligonucleotide"
  source: /note="RNA"
  source: /note="5' tri-ethylene glycol (TEG)"
  modified_base (3)..(3): 5-methyl modified nucleotide
  modified_base (7)..(7): 5-methyl modified nucleotide
  modified_base (8)..(8): 5-methyl modified nucleotide
  modified_base (11)..(11): bicyclic nucleic acid (BNA)
uucuguccaag

SEQ ID NO: 14678 - RNA, 10 nt, Artificial Sequence
  source: /note="Description of Artificial Sequence: Synthetic oligonucleotide"
  source: /note="RNA"
  source: /note="5' tri-ethylene glycol (TEG)"
  modified_base (3)..(3): 5-methyl modified nucleotide
  modified_base (7)..(7): 5-methyl modified nucleotide
  modified_base (8)..(8): 5-methyl modified nucleotide
  modified_base (10)..(10): bicyclic nucleic acid (BNA)
uucuguccaa

SEQ ID NO: 14679 - RNA, 9 nt, Artificial Sequence
  source: /note="Description of Artificial Sequence: Synthetic oligonucleotide"
  source: /note="RNA"
  source: /note="5' tri-ethylene glycol (TEG)"
  modified_base (3)..(3): 5-methyl modified nucleotide
  modified_base (7)..(7): 5-methyl modified nucleotide
  modified_base (8)..(8): 5-methyl modified nucleotide
  modified_base (9)..(9): bicyclic nucleic acid (BNA)
uucugucca

SEQ ID NO: 14680 - RNA, 8 nt, Artificial Sequence
  source: /note="Description of Artificial Sequence: Synthetic oligonucleotide"
  source: /note="RNA"
  source: /note="5' tri-ethylene glycol (TEG)"
  modified_base (3)..(3): 5-methyl modified nucleotide
  modified_base (7)..(7): 5-methyl modified nucleotide
  modified_base (8)..(8): 5-methyl bicyclic nucleic acid
uucugucc

SEQ ID NO: 14681 - RNA, 19 nt, Artificial Sequence
  source: /note="Description of Artificial Sequence: Synthetic oligonucleotide"
  source: /note="RNA"
  source: /note="5' tri-ethylene glycol (TEG)"
  modified_base (2)..(2): 5-methyl modified nucleotide
  modified_base (6)..(6): 5-methyl modified nucleotide
  modified_base (7)..(7): 5-methyl modified nucleotide
  modified_base (11)..(11): 5-methyl modified nucleotide
  modified_base (12)..(12): 5-methyl modified nucleotide
  modified_base (13)..(13): 5-methyl modified nucleotide
  modified_base (19)..(19): bicyclic nucleic acid (BNA)
ucuguccaagcccgguuga

SEQ ID NO: 14682 - RNA, 18 nt, Artificial Sequence
  source: /note="Description of Artificial Sequence: Synthetic oligonucleotide"
  source: /note="RNA"
  source: /note="5' tri-ethylene glycol (TEG)"
  modified_base (2)..(2): 5-methyl modified nucleotide
  modified_base (6)..(6): 5-methyl modified nucleotide
  modified_base (7)..(7): 5-methyl modified nucleotide
  modified_base (11)..(11): 5-methyl modified nucleotide
  modified_base (12)..(12): 5-methyl modified nucleotide
  modified_base (13)..(13): 5-methyl modified nucleotide
  modified_base (18)..(18): bicyclic nucleic acid (BNA)
ucuguccaagcccgguug

SEQ ID NO: 14683 - DNA, 17 bp, Artificial Sequence
  source: /note="Description of Artificial Sequence: Synthetic oligonucleotide"
  source: /note="Description of Combined DNA/RNA Molecule: Synthetic oligonucleotide"
  source: /note="DNA/RNA"
  source: /note="5' tri-ethylene glycol (TEG)"
  modified_base (2)..(2): 5-methyl modified nucleotide
  modified_base (6)..(6): 5-methyl modified nucleotide
  modified_base (7)..(7): 5-methyl modified nucleotide
  modified_base (11)..(11): 5-methyl modified nucleotide
  modified_base (12)..(12): 5-methyl modified nucleotide
  modified_base (13)..(13): 5-methyl modified nucleotide
  modified_base (17)..(17): bicyclic nucleic acid (BNA)
ucuguccaagcccggut

SEQ ID NO: 14684 - DNA, 16 bp, Artificial Sequence
  source: /note="Description of Artificial Sequence: Synthetic oligonucleotide"
  source: /note="Description of Combined DNA/RNA Molecule: Synthetic oligonucleotide"
  source: /note="DNA/RNA"
  source: /note="5' tri-ethylene glycol (TEG)"
  modified_base (2)..(2): 5-methyl modified nucleotide
  modified_base (6)..(6): 5-methyl modified nucleotide
  modified_base (7)..(7): 5-methyl modified nucleotide
  modified_base (11)..(11): 5-methyl modified nucleotide
  modified_base (12)..(12): 5-methyl modified nucleotide
  modified_base (13)..(13): 5-methyl modified nucleotide
  modified_base (16)..(16): bicyclic nucleic acid (BNA)
ucuguccaagcccggt

SEQ ID NO: 14685 - RNA, 15 nt, Artificial Sequence
  source: /note="Description of Artificial Sequence: Synthetic oligonucleotide"
  source: /note="RNA"
  source: /note="5' tri-ethylene glycol (TEG)"
  modified_base (2)..(2): 5-methyl modified nucleotide
  modified_base (6)..(6): 5-methyl modified nucleotide
  modified_base (7)..(7): 5-methyl modified nucleotide
  modified_base (11)..(11): 5-methyl modified nucleotide
  modified_base (12)..(12): 5-methyl modified nucleotide
  modified_base (13)..(13): 5-methyl modified nucleotide
  modified_base (15)..(15): bicyclic nucleic acid (BNA)
ucuguccaagcccgg

SEQ ID NO: 14686 - RNA, 14 nt, Artificial Sequence
  source: /note="Description of Artificial Sequence: Synthetic oligonucleotide"
  source: /note="RNA"
  source: /note="5' tri-ethylene glycol (TEG)"
  modified_base (2)..(2): 5-methyl modified nucleotide
  modified_base (6)..(6): 5-methyl modified nucleotide
  modified_base (7)..(7): 5-methyl modified nucleotide
  modified_base (11)..(11): 5-methyl modified nucleotide
  modified_base (12)..(12): 5-methyl modified nucleotide
  modified_base (13)..(13): 5-methyl modified nucleotide
  modified_base (14)..(14): bicyclic nucleic acid (BNA)
ucuguccaagcccg

SEQ ID NO: 14687 - RNA, 13 nt, Artificial Sequence
  source: /note="Description of Artificial Sequence: Synthetic oligonucleotide"
  source: /note="RNA"
  source: /note="5' tri-ethylene glycol (TEG)"
  modified_base (2)..(2): 5-methyl modified nucleotide
  modified_base (6)..(6): 5-methyl modified nucleotide
  modified_base (7)..(7): 5-methyl modified nucleotide
  modified_base (11)..(11): 5-methyl modified nucleotide
  modified_base (12)..(12): 5-methyl modified nucleotide
  modified_base (13)..(13): 5-methyl bicyclic nucleic acid
ucuguccaagccc

SEQ ID NO: 14688 - RNA, 12 nt, Artificial Sequence
  source: /note="Description of Artificial Sequence: Synthetic oligonucleotide"
  source: /note="RNA"
  source: /note="5' tri-ethylene glycol (TEG)"
  modified_base (2)..(2): 5-methyl modified nucleotide
  modified_base (6)..(6): 5-methyl modified nucleotide
  modified_base (7)..(7): 5-methyl modified nucleotide
  modified_base (11)..(11): 5-methyl modified nucleotide
  modified_base (12)..(12): 5-methyl bicyclic nucleic acid
ucuguccaagcc

SEQ ID NO: 14689 - RNA, 11 nt, Artificial Sequence
  source: /note="Description of Artificial Sequence: Synthetic oligonucleotide"
  source: /note="RNA"
  source: /note="5' tri-ethylene glycol (TEG)"
  modified_base (2)..(2): 5-methyl modified nucleotide
  modified_base (6)..(6): 5-methyl modified nucleotide
  modified_base (7)..(7): 5-methyl modified nucleotide
  modified_base (11)..(11): 5-methyl bicyclic nucleic acid
ucuguccaagc

SEQ ID NO: 14690 - RNA, 10 nt, Artificial Sequence
  source: /note="Description of Artificial Sequence: Synthetic oligonucleotide"
  source: /note="RNA"
  source: /note="5' tri-ethylene glycol (TEG)"
  modified_base (2)..(2): 5-methyl modified nucleotide
  modified_base (6)..(6): 5-methyl modified nucleotide
  modified_base (7)..(7): 5-methyl modified nucleotide
  modified_base (10)..(10): bicyclic nucleic acid (BNA)
ucuguccaag

SEQ ID NO: 14691 - RNA, 9 nt, Artificial Sequence
  source: /note="Description of Artificial Sequence: Synthetic oligonucleotide"
  source: /note="RNA"
  source: /note="5' tri-ethylene glycol (TEG)"
  modified_base (2)..(2): 5-methyl modified nucleotide
  modified_base (6)..(6): 5-methyl modified nucleotide
  modified_base (7)..(7): 5-methyl modified nucleotide
  modified_base (9)..(9): bicyclic nucleic acid (BNA)
ucuguccaa

SEQ ID NO: 14692 - RNA, 8 nt, Artificial Sequence
  source: /note="Description of Artificial Sequence: Synthetic oligonucleotide"
  source: /note="RNA"
  source: /note="5' tri-ethylene glycol (TEG)"
  modified_base (2)..(2): 5-methyl modified nucleotide
  modified_base (6)..(6): 5-methyl modified nucleotide
  modified_base (7)..(7): 5-methyl modified nucleotide
  modified_base (8)..(8): bicyclic nucleic acid (BNA)
ucugucca

SEQ ID NO: 14693 - RNA, 17 nt, Artificial Sequence
  source: /note="Description of Artificial Sequence: Synthetic oligonucleotide"
  source: /note="RNA"
  source: /note="5' tri-ethylene glycol (TEG)"
  modified_base (1)..(1): 5-methyl modified nucleotide
  modified_base (5)..(5): 5-methyl modified nucleotide
  modified_base (6)..(6): 5-methyl modified nucleotide
  modified_base (10)..(10): 5-methyl modified nucleotide
  modified_base (11)..(11): 5-methyl modified nucleotide
  modified_base (12)..(12): 5-methyl modified nucleotide
  modified_base (17)..(17): bicyclic nucleic acid (BNA)
cuguccaagcccgguug

SEQ ID NO: 14694 - DNA, 16 bp, Artificial Sequence
  source: /note="Description of Artificial Sequence: Synthetic oligonucleotide"
  source: /note="Description of Combined DNA/RNA Molecule: Synthetic oligonucleotide"
  source: /note="DNA/RNA"
  source: /note="5' tri-ethylene glycol (TEG)"
  modified_base (1)..(1): 5-methyl modified nucleotide
  modified_base (5)..(5): 5-methyl modified nucleotide
  modified_base (6)..(6): 5-methyl modified nucleotide
  modified_base (10)..(10): 5-methyl modified nucleotide
  modified_base (11)..(11): 5-methyl modified nucleotide
  modified_base (12)..(12): 5-methyl modified nucleotide
  modified_base (16)..(16): bicyclic nucleic acid (BNA)
cuguccaagcccggut

SEQ ID NO: 14695 - DNA, 15 bp, Artificial Sequence
  source: /note="Description of Artificial Sequence: Synthetic oligonucleotide"
  source: /note="Description of Combined DNA/RNA Molecule: Synthetic oligonucleotide"
  source: /note="DNA/RNA"
  source: /note="5' tri-ethylene glycol (TEG)"
  modified_base (1)..(1): 5-methyl modified nucleotide
  modified_base (5)..(5): 5-methyl modified nucleotide
  modified_base (6)..(6): 5-methyl modified nucleotide
  modified_base (10)..(10): 5-methyl modified nucleotide
  modified_base (11)..(11): 5-methyl modified nucleotide
  modified_base (12)..(12): 5-methyl modified nucleotide
  modified_base (15)..(15): bicyclic nucleic acid (BNA)
cuguccaagcccggt

SEQ ID NO: 14696 - RNA, 14 nt, Artificial Sequence
  source: /note="Description of Artificial Sequence: Synthetic oligonucleotide"
  source: /note="RNA"
  source: /note="5' tri-ethylene glycol (TEG)"
  modified_base (1)..(1): 5-methyl modified nucleotide
  modified_base (5)..(5): 5-methyl modified nucleotide
  modified_base (6)..(6): 5-methyl modified nucleotide
  modified_base (10)..(10): 5-methyl modified nucleotide
  modified_base (11)..(11): 5-methyl modified nucleotide
  modified_base (12)..(12): 5-methyl modified nucleotide
  modified_base (14)..(14): bicyclic nucleic acid (BNA)
cuguccaagcccgg

SEQ ID NO: 14697 - RNA, 13 nt, Artificial Sequence
  source: /note="Description of Artificial Sequence: Synthetic oligonucleotide"
  source: /note="RNA"
  source: /note="5' tri-ethylene glycol (TEG)"
  modified_base (1)..(1): 5-methyl modified nucleotide
  modified_base (5)..(5): 5-methyl modified nucleotide
  modified_base (6)..(6): 5-methyl modified nucleotide
  modified_base (10)..(10): 5-methyl modified nucleotide
  modified_base (11)..(11): 5-methyl modified nucleotide
  modified_base (12)..(12): 5-methyl modified nucleotide
  modified_base (13)..(13): bicyclic nucleic acid (BNA)
cuguccaagcccg

SEQ ID NO: 14698 - RNA, 12 nt, Artificial Sequence
  source: /note="Description of Artificial Sequence: Synthetic oligonucleotide"
  source: /note="RNA"
  source: /note="5' tri-ethylene glycol (TEG)"
  modified_base (1)..(1): 5-methyl modified nucleotide
  modified_base (5)..(5): 5-methyl modified nucleotide
  modified_base (6)..(6): 5-methyl modified nucleotide
  modified_base (10)..(10): 5-methyl modified nucleotide
  modified_base (11)..(11): 5-methyl modified nucleotide
  modified_base (12)..(12): 5-methyl bicyclic nucleic acid
cuguccaagccc

SEQ ID NO: 14699 - RNA, 11 nt, Artificial Sequence
  source: /note="Description of Artificial Sequence: Synthetic oligonucleotide"
  source: /note="RNA"
  source: /note="5' tri-ethylene glycol (TEG)"
  modified_base (1)..(1): 5-methyl modified nucleotide
  modified_base (5)..(5): 5-methyl modified nucleotide
  modified_base (6)..(6): 5-methyl modified nucleotide
  modified_base (10)..(10): 5-methyl modified nucleotide
  modified_base (11)..(11): 5-methyl bicyclic nucleic acid
cuguccaagcc

SEQ ID NO: 14700 - RNA, 10 nt, Artificial Sequence
  source: /note="Description of Artificial Sequence: Synthetic oligonucleotide"
  source: /note="RNA"
  source: /note="5' tri-ethylene glycol (TEG)"
  modified_base (1)..(1): 5-methyl modified nucleotide
  modified_base (5)..(5): 5-methyl modified nucleotide
  modified_base (6)..(6): 5-methyl modified nucleotide
  modified_base (10)..(10): 5-methyl bicyclic nucleic acid
cuguccaagc

SEQ ID NO: 14701 - RNA, 9 nt, Artificial Sequence
  source: /note="Description of Artificial Sequence: Synthetic oligonucleotide"
  source: /note="RNA"
  source: /note="5' tri-ethylene glycol (TEG)"
  modified_base (1)..(1): 5-methyl modified nucleotide
  modified_base (5)..(5): 5-methyl modified nucleotide
  modified_base (6)..(6): 5-methyl modified nucleotide
  modified_base (9)..(9): bicyclic nucleic acid (BNA)
cuguccaag

SEQ ID NO: 14702 - RNA, 8 nt, Artificial Sequence
  source: /note="Description of Artificial Sequence: Synthetic oligonucleotide"
  source: /note="RNA"
  source: /note="5' tri-ethylene glycol (TEG)"
  modified_base (1)..(1): 5-methyl modified nucleotide
  modified_base (5)..(5): 5-methyl modified nucleotide
  modified_base (6)..(6): 5-methyl modified nucleotide
  modified_base (8)..(8): bicyclic nucleic acid (BNA)
cuguccaa

SEQ ID NO: 14703 - RNA, 20 nt, Artificial Sequence
  source: /note="Description of Artificial Sequence: Synthetic oligonucleotide"
  source: /note="RNA"
  source: /note="5' tri-ethylene glycol (TEG)"
  modified_base (4)..(4): 5-methyl modified nucleotide
  modified_base (8)..(8): 5-methyl modified nucleotide
  modified_base (9)..(9): 5-methyl modified nucleotide
  modified_base (13)..(13): 5-methyl modified nucleotide
  modified_base (14)..(14): 5-methyl modified nucleotide
  modified_base (15)..(15): 5-methyl modified nucleotide
  modified_base (20)..(20): bicyclic nucleic acid (BNA)
guucuguccaagcccgguug

SEQ ID NO: 14704 - DNA, 19 bp, Artificial Sequence
  source: /note="Description of Artificial Sequence: Synthetic oligonucleotide"
  source: /note="Description of Combined DNA/RNA Molecule: Synthetic oligonucleotide"
  source: /note="DNA/RNA"
  source: /note="5' tri-ethylene glycol (TEG)"
  modified_base (4)..(4): 5-methyl modified nucleotide
  modified_base (8)..(8): 5-methyl modified nucleotide
  modified_base (9)..(9): 5-methyl modified nucleotide
  modified_base (13)..(13): 5-methyl modified nucleotide
  modified_base (14)..(14): 5-methyl modified nucleotide
  modified_base (15)..(15): 5-methyl modified nucleotide
  modified_base (19)..(19): bicyclic nucleic acid (BNA)
guucuguccaagcccggut

SEQ ID NO: 14705 - DNA, 18 bp, Artificial Sequence
  source: /note="Description of Artificial Sequence: Synthetic oligonucleotide"
  source: /note="Description of Combined DNA/RNA Molecule: Synthetic oligonucleotide"
  source: /note="DNA/RNA"
  source: /note="5' tri-ethylene glycol (TEG)"
  modified_base (4)..(4): 5-methyl modified nucleotide
  modified_base (8)..(8): 5-methyl modified nucleotide
  modified_base (9)..(9): 5-methyl modified nucleotide
  modified_base (13)..(13): 5-methyl modified nucleotide
  modified_base (14)..(14): 5-methyl modified nucleotide
  modified_base (15)..(15): 5-methyl modified nucleotide
  modified_base (18)..(18): bicyclic nucleic acid (BNA)
guucuguccaagcccggt

SEQ ID NO: 14706 - RNA, 17 nt, Artificial Sequence
  source: /note="Description of Artificial Sequence: Synthetic oligonucleotide"
  source: /note="RNA"
  source: /note="5' tri-ethylene glycol (TEG)"
  modified_base (4)..(4): 5-methyl modified nucleotide
  modified_base (8)..(8): 5-methyl modified nucleotide
  modified_base (9)..(9): 5-methyl modified nucleotide
  modified_base (13)..(13): 5-methyl modified nucleotide
  modified_base (14)..(14): 5-methyl modified nucleotide
  modified_base (15)..(15): 5-methyl modified nucleotide
  modified_base (17)..(17): bicyclic nucleic acid (BNA)
guucuguccaagcccgg

SEQ ID NO: 14707 - RNA, 16 nt, Artificial Sequence
  source: /note="Description of Artificial Sequence: Synthetic oligonucleotide"
  source: /note="RNA"
  source: /note="5' tri-ethylene glycol (TEG)"
  modified_base (4)..(4): 5-methyl modified nucleotide
  modified_base (8)..(8): 5-methyl modified nucleotide
  modified_base (9)..(9): 5-methyl modified nucleotide
  modified_base (13)..(13): 5-methyl modified nucleotide
  modified_base (14)..(14): 5-methyl modified nucleotide
  modified_base (15)..(15): 5-methyl modified nucleotide
  modified_base (16)..(16): bicyclic nucleic acid (BNA)
guucuguccaagcccg

SEQ ID NO: 14708 - RNA, 15 nt, Artificial Sequence
  source: /note="Description of Artificial Sequence: Synthetic oligonucleotide"
  source: /note="RNA"
  source: /note="5' tri-ethylene glycol (TEG)"
  modified_base (4)..(4): 5-methyl modified nucleotide
  modified_base (8)..(8): 5-methyl modified nucleotide
  modified_base (9)..(9): 5-methyl modified nucleotide
  modified_base (13)..(13): 5-methyl modified nucleotide
  modified_base (14)..(14): 5-methyl modified nucleotide
  modified_base (15)..(15): 5-methyl bicyclic nucleic acid
guucuguccaagccc

SEQ ID NO: 14709 - RNA, 14 nt, Artificial Sequence
  source: /note="Description of Artificial Sequence: Synthetic oligonucleotide"
  source: /note="RNA"
  source: /note="5' tri-ethylene glycol (TEG)"
  modified_base (4)..(4): 5-methyl modified nucleotide
  modified_base (8)..(8): 5-methyl modified nucleotide
  modified_base (9)..(9): 5-methyl modified nucleotide
  modified_base (13)..(13): 5-methyl modified nucleotide
  modified_base (14)..(14): 5-methyl bicyclic nucleic acid
guucuguccaagcc

SEQ ID NO: 14710 - RNA, 13 nt, Artificial Sequence
  source: /note="Description of Artificial Sequence: Synthetic oligonucleotide"
  source: /note="RNA"
  source: /note="5' tri-ethylene glycol (TEG)"
  modified_base (4)..(4): 5-methyl modified nucleotide
  modified_base (8)..(8): 5-methyl modified nucleotide
  modified_base (9)..(9): 5-methyl modified nucleotide
  modified_base (13)..(13): 5-methyl bicyclic nucleic acid
guucuguccaagc

SEQ ID NO: 14711 - RNA, 12 nt, Artificial Sequence
  source: /note="Description of Artificial Sequence: Synthetic oligonucleotide"
  source: /note="RNA"
  source: /note="5' tri-ethylene glycol (TEG)"
  modified_base (4)..(4): 5-methyl modified nucleotide
  modified_base (8)..(8): 5-methyl modified nucleotide
  modified_base (9)..(9): 5-methyl modified nucleotide
  modified_base (12)..(12): bicyclic nucleic acid (BNA)
guucuguccaag

SEQ ID NO: 14712 - RNA, 11 nt, Artificial Sequence
  source: /note="Description of Artificial Sequence: Synthetic oligonucleotide"
  source: /note="RNA"
  source: /note="5' tri-ethylene glycol (TEG)"
  modified_base (4)..(4): 5-methyl modified nucleotide
  modified_base (8)..(8): 5-methyl modified nucleotide
  modified_base (9)..(9): 5-methyl modified nucleotide
  modified_base (11)..(11): bicyclic nucleic acid (BNA)
guucuguccaa

SEQ ID NO: 14713 - RNA, 10 nt, Artificial Sequence
  source: /note="Description of Artificial Sequence: Synthetic oligonucleotide"
  source: /note="RNA"
  source: /note="5' tri-ethylene glycol (TEG)"
  modified_base (4)..(4): 5-methyl modified nucleotide
  modified_base (8)..(8): 5-methyl modified nucleotide
  modified_base (9)..(9): 5-methyl modified nucleotide
  modified_base (10)..(10): bicyclic nucleic acid (BNA)
guucugucca

SEQ ID NO: 14714 - RNA, 9 nt, Artificial Sequence
  source: /note="Description of Artificial Sequence: Synthetic oligonucleotide"
  source: /note="RNA"
  source: /note="5' tri-ethylene glycol (TEG)"
  modified_base (4)..(4): 5-methyl modified nucleotide
  modified_base (8)..(8): 5-methyl modified nucleotide
  modified_base (9)..(9): 5-methyl bicyclic nucleic acid
guucugucc

SEQ ID NO: 14715 - RNA, 8 nt, Artificial Sequence
  source: /note="Description of Artificial Sequence: Synthetic oligonucleotide"
  source: /note="RNA"
  source: /note="5' tri-ethylene glycol (TEG)"
  modified_base (4)..(4): 5-methyl modified nucleotide
  modified_base (8)..(8): 5-methyl bicyclic nucleic acid
guucuguc

SEQ ID NO: 14716 - DNA, 20 bp, Artificial Sequence
  source: /note="Description of Artificial Sequence: Synthetic oligonucleotide"
  source: /note="Description of Combined DNA/RNA Molecule: Synthetic oligonucleotide"
  source: /note="DNA/RNA"
  source: /note="5' tri-ethylene glycol (TEG)"
  modified_base (5)..(5): 5-methyl modified nucleotide
  modified_base (9)..(9): 5-methyl modified nucleotide
  modified_base (10)..(10): 5-methyl modified nucleotide
  modified_base (14)..(14): 5-methyl modified nucleotide
  modified_base (15)..(15): 5-methyl modified nucleotide
  modified_base (16)..(16): 5-methyl modified nucleotide
  modified_base (20)..(20): bicyclic nucleic acid (BNA)
aguucuguccaagcccggut

SEQ ID NO: 14717 - DNA, 19 bp, Artificial Sequence
  source: /note="Description of Artificial Sequence: Synthetic oligonucleotide"
  source: /note="Description of Combined DNA/RNA Molecule: Synthetic oligonucleotide"
  source: /note="DNA/RNA"
  source: /note="5' tri-ethylene glycol (TEG)"
  modified_base (5)..(5): 5-methyl modified nucleotide
  modified_base (9)..(9): 5-methyl modified nucleotide
  modified_base (10)..(10): 5-methyl modified nucleotide
  modified_base (14)..(14): 5-methyl modified nucleotide
  modified_base (15)..(15): 5-methyl modified nucleotide
  modified_base (16)..(16): 5-methyl modified nucleotide
  modified_base (19)..(19): bicyclic nucleic acid (BNA)
aguucuguccaagcccggt

SEQ ID NO: 14718 - RNA, 18 nt, Artificial Sequence
  source: /note="Description of Artificial Sequence: Synthetic oligonucleotide"
  source: /note="RNA"
  source: /note="5' tri-ethylene glycol (TEG)"
  modified_base (5)..(5): 5-methyl modified nucleotide
  modified_base (9)..(9): 5-methyl modified nucleotide
  modified_base (10)..(10): 5-methyl modified nucleotide
  modified_base (14)..(14): 5-methyl modified nucleotide
  modified_base (15)..(15): 5-methyl modified nucleotide
  modified_base (16)..(16): 5-methyl modified nucleotide
  modified_base (18)..(18): bicyclic nucleic acid (BNA)
aguucuguccaagcccgg

SEQ ID NO: 14719 - RNA, 17 nt, Artificial Sequence
  source: /note="Description of Artificial Sequence: Synthetic oligonucleotide"
  source: /note="RNA"
  source: /note="5' tri-ethylene glycol (TEG)"
  modified_base (5)..(5): 5-methyl modified nucleotide
  modified_base (9)..(9): 5-methyl modified nucleotide
  modified_base (10)..(10): 5-methyl modified nucleotide
  modified_base (14)..(14): 5-methyl modified nucleotide
  modified_base (15)..(15): 5-methyl modified nucleotide
  modified_base (16)..(16): 5-methyl modified nucleotide
  modified_base (17)..(17): bicyclic nucleic acid (BNA)
aguucuguccaagcccg

SEQ ID NO: 14720 - RNA, 16 nt, Artificial Sequence
  source: /note="Description of Artificial Sequence: Synthetic oligonucleotide"
  source: /note="RNA"
  source: /note="5' tri-ethylene glycol (TEG)"
  modified_base (5)..(5): 5-methyl modified nucleotide
  modified_base (9)..(9): 5-methyl modified nucleotide
  modified_base (10)..(10): 5-methyl modified nucleotide
  modified_base (14)..(14): 5-methyl modified nucleotide
  modified_base (15)..(15): 5-methyl modified nucleotide
  modified_base (16)..(16): 5-methyl bicyclic nucleic acid
aguucuguccaagccc

SEQ ID NO: 14721 - RNA, 15 nt, Artificial Sequence
  source: /note="Description of Artificial Sequence: Synthetic oligonucleotide"
  source: /note="RNA"
  source: /note="5' tri-ethylene glycol (TEG)"
  modified_base (5)..(5): 5-methyl modified nucleotide
  modified_base (9)..(9): 5-methyl modified nucleotide
  modified_base (10)..(10): 5-methyl modified nucleotide
  modified_base (14)..(14): 5-methyl modified nucleotide
  modified_base (15)..(15): 5-methyl bicyclic nucleic acid
aguucuguccaagcc

SEQ ID NO: 14722 - RNA, 14 nt, Artificial Sequence
  source: /note="Description of Artificial Sequence: Synthetic oligonucleotide"
  source: /note="RNA"
  source: /note="5' tri-ethylene glycol (TEG)"
  modified_base (5)..(5): 5-methyl modified nucleotide
  modified_base (9)..(9): 5-methyl modified nucleotide
  modified_base (10)..(10): 5-methyl modified nucleotide
  modified_base (14)..(14): 5-methyl bicyclic nucleic acid
aguucuguccaagc

SEQ ID NO: 14723 - RNA, 13 nt, Artificial Sequence
  source: /note="Description of Artificial Sequence: Synthetic oligonucleotide"
  source: /note="RNA"
  source: /note="5' tri-ethylene glycol (TEG)"
  modified_base (5)..(5): 5-methyl modified nucleotide
  modified_base (9)..(9): 5-methyl modified nucleotide
  modified_base (10)..(10): 5-methyl modified nucleotide
  modified_base (13)..(13): bicyclic nucleic acid (BNA)
aguucuguccaag

SEQ ID NO: 14724 - RNA, 12 nt, Artificial Sequence
  source: /note="Description of Artificial Sequence: Synthetic oligonucleotide"
  source: /note="RNA"
  source: /note="5' tri-ethylene glycol (TEG)"
  modified_base (5)..(5): 5-methyl modified nucleotide
  modified_base (9)..(9): 5-methyl modified nucleotide
  modified_base (10)..(10): 5-methyl modified nucleotide
  modified_base (12)..(12): bicyclic nucleic acid (BNA)
aguucuguccaa

SEQ ID NO: 14725 - RNA, 11 nt, Artificial Sequence
  source: /note="Description of Artificial Sequence: Synthetic oligonucleotide"
  source: /note="RNA"
  source: /note="5' tri-ethylene glycol (TEG)"
  modified_base (5)..(5): 5-methyl modified nucleotide
  modified_base (9)..(9): 5-methyl modified nucleotide
  modified_base (10)..(10): 5-methyl modified nucleotide
  modified_base (11)..(11): bicyclic nucleic acid (BNA)
aguucugucca

SEQ ID NO: 14726 - RNA, 10 nt, Artificial Sequence
  source: /note="Description of Artificial Sequence: Synthetic oligonucleotide"
  source: /note="RNA"
  source: /note="5' tri-ethylene glycol (TEG)"
  modified_base (5)..(5): 5-methyl modified nucleotide
  modified_base (9)..(9): 5-methyl modified nucleotide
  modified_base (10)..(10): 5-methyl bicyclic nucleic acid
aguucugucc

SEQ ID NO: 14727 - RNA, 9 nt, Artificial Sequence
  source: /note="Description of Artificial Sequence: Synthetic oligonucleotide"
  source: /note="RNA"
  source: /note="5' tri-ethylene glycol (TEG)"
  modified_base (5)..(5): 5-methyl modified nucleotide
  modified_base (9)..(9): 5-methyl bicyclic nucleic acid
aguucuguc

SEQ ID NO: 14728 - DNA, 8 bp, Artificial Sequence
  source: /note="Description of Artificial Sequence: Synthetic oligonucleotide"
  source: /note="Description of Combined DNA/RNA Molecule: Synthetic oligonucleotide"
  source: /note="DNA/RNA"
  source: /note="5' tri-ethylene glycol (TEG)"
  modified_base (5)..(5): 5-methyl modified nucleotide
  modified_base (8)..(8): bicyclic nucleic acid (BNA)
aguucugt

SEQ ID NO: 14729 - DNA, 20 bp, Artificial Sequence
  source: /note="Description of Artificial Sequence: Synthetic oligonucleotide"
  source: /note="Description of Combined DNA/RNA Molecule: Synthetic oligonucleotide"
  source: /note="DNA/RNA"
  source: /note="5' tri-ethylene glycol (TEG)"
  modified_base (6)..(6): 5-methyl modified nucleotide
  modified_base (10)..(10): 5-methyl modified nucleotide
  modified_base (11)..(11): 5-methyl modified nucleotide
  modified_base (15)..(15): 5-methyl modified nucleotide
  modified_base (16)..(16): 5-methyl modified nucleotide
  modified_base (17)..(17): 5-methyl modified nucleotide
  modified_base (20)..(20): bicyclic nucleic acid (BNA)
aaguucuguccaagcccggt

SEQ ID NO: 14730 - RNA, 19 nt, Artificial Sequence
  source: /note="Description of Artificial Sequence: Synthetic oligonucleotide"
  source: /note="RNA"
  source: /note="5' tri-ethylene glycol (TEG)"
  modified_base (6)..(6): 5-methyl modified nucleotide
  modified_base (10)..(10): 5-methyl modified nucleotide
  modified_base (11)..(11): 5-methyl modified nucleotide
  modified_base (15)..(15): 5-methyl modified nucleotide
  modified_base (16)..(16): 5-methyl modified nucleotide
  modified_base (17)..(17): 5-methyl modified nucleotide
  modified_base (19)..(19): bicyclic nucleic acid (BNA)
aaguucuguccaagcccgg

SEQ ID NO: 14731 - RNA, 18 nt, Artificial Sequence
  source: /note="Description of Artificial Sequence: Synthetic oligonucleotide"
  source: /note="RNA"
  source: /note="5' tri-ethylene glycol (TEG)"
  modified_base (6)..(6): 5-methyl modified nucleotide
  modified_base (10)..(10): 5-methyl modified nucleotide
  modified_base (11)..(11): 5-methyl modified nucleotide
  modified_base (15)..(15): 5-methyl modified nucleotide
  modified_base (16)..(16): 5-methyl modified nucleotide
  modified_base (17)..(17): 5-methyl modified nucleotide
  modified_base (18)..(18): bicyclic nucleic acid (BNA)
aaguucuguccaagcccg

SEQ ID NO: 14732 - RNA, 17 nt, Artificial Sequence
  source: /note="Description of Artificial Sequence: Synthetic oligonucleotide"
  source: /note="RNA"
  source: /note="5' tri-ethylene glycol (TEG)"
  modified_base (6)..(6): 5-methyl modified nucleotide
  modified_base (10)..(10): 5-methyl modified nucleotide
  modified_base (11)..(11): 5-methyl modified nucleotide
  modified_base (15)..(15): 5-methyl modified nucleotide
  modified_base (16)..(16): 5-methyl modified nucleotide
  modified_base (17)..(17): 5-methyl bicyclic nucleic acid
aaguucuguccaagccc

SEQ ID NO: 14733 - RNA, 16 nt, Artificial Sequence
  source: /note="Description of Artificial Sequence: Synthetic oligonucleotide"
  source: /note="RNA"
  source: /note="5' tri-ethylene glycol (TEG)"
  modified_base (6)..(6): 5-methyl modified nucleotide
  modified_base (10)..(10): 5-methyl modified nucleotide
  modified_base (11)..(11): 5-methyl modified nucleotide
  modified_base (15)..(15): 5-methyl modified nucleotide
  modified_base (16)..(16): 5-methyl bicyclic nucleic acid
aaguucuguccaagcc

SEQ ID NO: 14734 - RNA, 15 nt, Artificial Sequence
  source: /note="Description of Artificial Sequence: Synthetic oligonucleotide"
  source: /note="RNA"
  source: /note="5' tri-ethylene glycol (TEG)"
  modified_base (6)..(6): 5-methyl modified nucleotide
  modified_base (10)..(10): 5-methyl modified nucleotide
  modified_base (11)..(11): 5-methyl modified nucleotide
  modified_base (15)..(15): 5-methyl bicyclic nucleic acid
aaguucuguccaagc

SEQ ID NO: 14735 - RNA, 14 nt, Artificial Sequence
  source: /note="Description of Artificial Sequence: Synthetic oligonucleotide"
  source: /note="RNA"
  source: /note="5' tri-ethylene glycol (TEG)"
  modified_base (6)..(6): 5-methyl modified nucleotide
  modified_base (10)..(10): 5-methyl modified nucleotide
  modified_base (11)..(11): 5-methyl modified nucleotide
  modified_base (14)..(14): bicyclic nucleic acid (BNA)
aaguucuguccaag

SEQ ID NO: 14736 - RNA, 13 nt, Artificial Sequence
  source: /note="Description of Artificial Sequence: Synthetic oligonucleotide"
  source: /note="RNA"
  source: /note="5' tri-ethylene glycol (TEG)"
  modified_base (6)..(6): 5-methyl modified nucleotide
  modified_base (10)..(10): 5-methyl modified nucleotide
  modified_base (11)..(11): 5-methyl modified nucleotide
  modified_base (13)..(13): bicyclic nucleic acid (BNA)
aaguucuguccaa

SEQ ID NO: 14737 - RNA, 12 nt, Artificial Sequence
  source: /note="Description of Artificial Sequence: Synthetic oligonucleotide"
  source: /note="RNA"
  source: /note="5' tri-ethylene glycol (TEG)"
  modified_base (6)..(6): 5-methyl modified nucleotide
  modified_base (10)..(10): 5-methyl modified nucleotide
  modified_base (11)..(11): 5-methyl modified nucleotide
  modified_base (12)..(12): bicyclic nucleic acid (BNA)
aaguucugucca

SEQ ID NO: 14738 - RNA, 11 nt, Artificial Sequence
  source: /note="Description of Artificial Sequence: Synthetic oligonucleotide"
  source: /note="RNA"
  source: /note="5' tri-ethylene glycol (TEG)"
  modified_base (6)..(6): 5-methyl modified nucleotide
  modified_base (10)..(10): 5-methyl modified nucleotide
  modified_base (11)..(11): 5-methyl bicyclic nucleic acid
aaguucugucc

SEQ ID NO: 14739 - RNA, 10 nt, Artificial Sequence
  source: /note="Description of Artificial Sequence: Synthetic oligonucleotide"
  source: /note="RNA"
  source: /note="5' tri-ethylene glycol (TEG)"
  modified_base (6)..(6): 5-methyl modified nucleotide
  modified_base (10)..(10): 5-methyl bicyclic nucleic acid
aaguucuguc

SEQ ID NO: 14740 - DNA, 9 bp, Artificial Sequence
  source: /note="Description of Artificial Sequence: Synthetic oligonucleotide"
  source: /note="Description of Combined DNA/RNA Molecule: Synthetic oligonucleotide"
  source: /note="DNA/RNA"
  source: /note="5' tri-ethylene glycol (TEG)"
  modified_base (6)..(6): 5-methyl modified nucleotide
  modified_base (9)..(9): bicyclic nucleic acid (BNA)
aaguucugt

SEQ ID NO: 14741 - RNA, 8 nt, Artificial Sequence
  source: /note="Description of Artificial Sequence: Synthetic oligonucleotide"
  source: /note="RNA"
  source: /note="5' tri-ethylene glycol (TEG)"
  modified_base (6)..(6): 5-methyl modified nucleotide
  modified_base (8)..(8): bicyclic nucleic acid (BNA)
aaguucug

SEQ ID NO: 14742 - RNA, 20 nt, Artificial Sequence
  source: /note="Description of Artificial Sequence: Synthetic oligonucleotide"
  source: /note="RNA"
  source: /note="5' tri-ethylene glycol (TEG)"
  modified_base (7)..(7): 5-methyl modified nucleotide
  modified_base (11)..(11): 5-methyl modified nucleotide
  modified_base (12)..(12): 5-methyl modified nucleotide
  modified_base (16)..(16): 5-methyl modified nucleotide
  modified_base (17)..(17): 5-methyl modified nucleotide
  modified_base (18)..(18): 5-methyl modified nucleotide
  modified_base (20)..(20): bicyclic nucleic acid (BNA)
uaaguucuguccaagcccgg

SEQ ID NO: 14743 - RNA, 19 nt, Artificial Sequence
  source: /note="Description of Artificial Sequence: Synthetic oligonucleotide"
  source: /note="RNA"
  source: /note="5' tri-ethylene glycol (TEG)"
  modified_base (7)..(7): 5-methyl modified nucleotide
  modified_base (11)..(11): 5-methyl modified nucleotide
  modified_base (12)..(12): 5-methyl modified nucleotide
  modified_base (16)..(16): 5-methyl modified nucleotide
  modified_base (17)..(17): 5-methyl modified nucleotide
  modified_base (18)..(18): 5-methyl modified nucleotide
  modified_base (19)..(19): bicyclic nucleic acid (BNA)
uaaguucuguccaagcccg

SEQ ID NO: 14744 - RNA, 18 nt, Artificial Sequence
  source: /note="Description of Artificial Sequence: Synthetic oligonucleotide"
  source: /note="RNA"
  source: /note="5' tri-ethylene glycol (TEG)"
  modified_base (7)..(7): 5-methyl modified nucleotide
  modified_base (11)..(11): 5-methyl modified nucleotide
  modified_base (12)..(12): 5-methyl modified nucleotide
  modified_base (16)..(16): 5-methyl modified nucleotide
  modified_base (17)..(17): 5-methyl modified nucleotide
  modified_base (18)..(18): 5-methyl bicyclic nucleic acid
uaaguucuguccaagccc

SEQ ID NO: 14745 - RNA, 17 nt, Artificial Sequence
  source: /note="Description of Artificial Sequence: Synthetic oligonucleotide"
  source: /note="RNA"
  source: /note="5' tri-ethylene glycol (TEG)"
  modified_base (7)..(7): 5-methyl modified nucleotide
  modified_base (11)..(11): 5-methyl modified nucleotide
  modified_base (12)..(12): 5-methyl modified nucleotide
  modified_base (16)..(16): 5-methyl modified nucleotide
  modified_base (17)..(17): 5-methyl bicyclic nucleic acid
uaaguucuguccaagcc

SEQ ID NO: 14746 - RNA, 16 nt, Artificial Sequence
  source: /note="Description of Artificial Sequence: Synthetic oligonucleotide"
  source: /note="RNA"
  source: /note="5' tri-ethylene glycol (TEG)"
  modified_base (7)..(7): 5-methyl modified nucleotide
  modified_base (11)..(11): 5-methyl modified nucleotide
  modified_base (12)..(12): 5-methyl modified nucleotide
  modified_base (16)..(16): 5-methyl bicyclic nucleic acid
uaaguucuguccaagc

SEQ ID NO: 14747 - RNA, 14 nt, Artificial Sequence
  source: /note="Description of Artificial Sequence: Synthetic oligonucleotide"
  source: /note="RNA"
  source: /note="5' tri-ethylene glycol (TEG)"
  modified_base (7)..(7): 5-methyl modified nucleotide
  modified_base (11)..(11): 5-methyl modified nucleotide
  modified_base (12)..(12): 5-methyl modified nucleotide
  modified_base (14)..(14): bicyclic nucleic acid (BNA)
uaaguucuguccaa

SEQ ID NO: 14748 - RNA, 13 nt, Artificial Sequence
  source: /note="Description of Artificial Sequence: Synthetic oligonucleotide"
  source: /note="RNA"
  source: /note="5' tri-ethylene glycol (TEG)"
  modified_base (7)..(7): 5-methyl modified nucleotide
  modified_base (11)..(11): 5-methyl modified nucleotide
  modified_base (12)..(12): 5-methyl modified nucleotide
  modified_base (13)..(13): bicyclic nucleic acid (BNA)
uaaguucugucca

SEQ ID NO: 14749 - RNA, 12 nt, Artificial Sequence
  source: /note="Description of Artificial Sequence: Synthetic oligonucleotide"
  source: /note="RNA"
  source: /note="5' tri-ethylene glycol (TEG)"
  modified_base (7)..(7): 5-methyl modified nucleotide
  modified_base (11)..(11): 5-methyl modified nucleotide
  modified_base (12)..(12): 5-methyl bicyclic nucleic acid
uaaguucugucc

SEQ ID NO: 14750 - RNA, 11 nt, Artificial Sequence
  source: /note="Description of Artificial Sequence: Synthetic oligonucleotide"
  source: /note="RNA"
  source: /note="5' tri-ethylene glycol (TEG)"
  modified_base (7)..(7): 5-methyl modified nucleotide
  modified_base (11)..(11): 5-methyl bicyclic nucleic acid
uaaguucuguc

SEQ ID NO: 14751 - DNA, 10 bp, Artificial Sequence
  source: /note="Description of Artificial Sequence: Synthetic oligonucleotide"
  source: /note="Description of Combined DNA/RNA Molecule: Synthetic oligonucleotide"
  source: /note="DNA/RNA"
  source: /note="5' tri-ethylene glycol (TEG)"
  modified_base (7)..(7): 5-methyl modified nucleotide
  modified_base (10)..(10): bicyclic nucleic acid (BNA)
uaaguucugt

SEQ ID NO: 14752 - RNA, 9 nt, Artificial Sequence
  source: /note="Description of Artificial Sequence: Synthetic oligonucleotide"
  source: /note="RNA"
  source: /note="5' tri-ethylene glycol (TEG)"
  modified_base (7)..(7): 5-methyl modified nucleotide
  modified_base (9)..(9): bicyclic nucleic acid (BNA)
uaaguucug

SEQ ID NO: 14753 - DNA, 8 bp, Artificial Sequence
  source: /note="Description of Artificial Sequence: Synthetic oligonucleotide"
  source: /note="Description of Combined DNA/RNA Molecule: Synthetic oligonucleotide"
  source: /note="DNA/RNA"
  source: /note="5' tri-ethylene glycol (TEG)"
  modified_base (7)..(7): 5-methyl modified nucleotide
  modified_base (8)..(8): bicyclic nucleic acid (BNA)
uaaguuct

SEQ ID NO: 14754 - RNA, 20 nt, Artificial Sequence
  source: /note="Description of Artificial Sequence: Synthetic oligonucleotide"
  source: /note="RNA"
  source: /note="5' tri-ethylene glycol (TEG)"
  modified_base (8)..(8): 5-methyl modified nucleotide
  modified_base (12)..(12): 5-methyl modified nucleotide
  modified_base (13)..(13): 5-methyl modified nucleotide
  modified_base (17)..(17): 5-methyl modified nucleotide
  modified_base (18)..(18): 5-methyl modified nucleotide
  modified_base (19)..(19): 5-methyl modified nucleotide
  modified_base (20)..(20): bicyclic nucleic acid (BNA)
guaaguucuguccaagcccg

SEQ ID NO: 14755 - RNA, 19 nt, Artificial Sequence
  source: /note="Description of Artificial Sequence: Synthetic oligonucleotide"
  source: /note="RNA"
  source: /note="5' tri-ethylene glycol (TEG)"
  modified_base (8)..(8): 5-methyl modified nucleotide
  modified_base (12)..(12): 5-methyl modified nucleotide
  modified_base (13)..(13): 5-methyl modified nucleotide
  modified_base (17)..(17): 5-methyl modified nucleotide
  modified_base (18)..(18): 5-methyl modified nucleotide
  modified_base (19)..(19): 5-methyl bicyclic nucleic acid
guaaguucuguccaagccc

SEQ ID NO: 14756 - RNA, 17 nt, Artificial Sequence
  source: /note="Description of Artificial Sequence: Synthetic oligonucleotide"
  source: /note="RNA"
  source: /note="5' tri-ethylene glycol (TEG)"
  modified_base (8)..(8): 5-methyl modified nucleotide
  modified_base (12)..(12): 5-methyl modified nucleotide
  modified_base (13)..(13): 5-methyl modified nucleotide
  modified_base (17)..(17): 5-methyl bicyclic nucleic acid
guaaguucuguccaagc

SEQ ID NO: 14757 - RNA, 16 nt, Artificial Sequence
  source: /note="Description of Artificial Sequence: Synthetic oligonucleotide"
  source: /note="RNA"
  source: /note="5' tri-ethylene glycol (TEG)"
  modified_base (8)..(8): 5-methyl modified nucleotide
  modified_base (12)..(12): 5-methyl modified nucleotide
  modified_base (13)..(13): 5-methyl modified nucleotide
  modified_base (16)..(16): bicyclic nucleic acid (BNA)
guaaguucuguccaag

SEQ ID NO: 14758 - RNA, 15 nt, Artificial Sequence
  source: /note="Description of Artificial Sequence: Synthetic oligonucleotide"
  source: /note="RNA"
  source: /note="5' tri-ethylene glycol (TEG)"
  modified_base (8)..(8): 5-methyl modified nucleotide
  modified_base (12)..(12): 5-methyl modified nucleotide
  modified_base (13)..(13): 5-methyl modified nucleotide
  modified_base (15)..(15): bicyclic nucleic acid (BNA)
guaaguucuguccaa

SEQ ID NO: 14759 - RNA, 14 nt, Artificial Sequence
  source: /note="Description of Artificial Sequence: Synthetic oligonucleotide"
  source: /note="RNA"
  source: /note="5' tri-ethylene glycol (TEG)"
  modified_base (8)..(8): 5-methyl modified nucleotide
  modified_base (12)..(12): 5-methyl modified nucleotide
  modified_base (13)..(13): 5-methyl modified nucleotide
  modified_base (14)..(14): bicyclic nucleic acid (BNA)
guaaguucugucca

SEQ ID NO: 14760 - RNA, 13 nt, Artificial Sequence
  source: /note="Description of Artificial Sequence: Synthetic oligonucleotide"
  source: /note="RNA"
  source: /note="5' tri-ethylene glycol (TEG)"
  modified_base (8)..(8): 5-methyl modified nucleotide
  modified_base (12)..(12): 5-methyl modified nucleotide
  modified_base (13)..(13): 5-methyl bicyclic nucleic acid
guaaguucugucc

SEQ ID NO: 14761 - RNA, 12 nt, Artificial Sequence
  source: /note="Description of Artificial Sequence: Synthetic oligonucleotide"
  source: /note="RNA"
  source: /note="5' tri-ethylene glycol (TEG)"
  modified_base (8)..(8): 5-methyl modified nucleotide
  modified_base (12)..(12): 5-methyl bicyclic nucleic acid
guaaguucuguc

SEQ ID NO: 14762 - DNA, 11 bp, Artificial Sequence
  source: /note="Description of Artificial Sequence: Synthetic oligonucleotide"
  source: /note="Description of Combined DNA/RNA Molecule: Synthetic oligonucleotide"
  source: /note="DNA/RNA"
  source: /note="5' tri-ethylene glycol (TEG)"
  modified_base (8)..(8): 5-methyl modified nucleotide
  modified_base (11)..(11): bicyclic nucleic acid (BNA)
guaaguucugt

SEQ ID NO: 14763 - RNA, 10 nt, Artificial Sequence
  source: /note="Description of Artificial Sequence: Synthetic oligonucleotide"
  source: /note="RNA"
  source: /note="5' tri-ethylene glycol (TEG)"
  modified_base (8)..(8): 5-methyl modified nucleotide
  modified_base (10)..(10): bicyclic nucleic acid (BNA)
guaaguucug

SEQ ID NO: 14764 - DNA, 9 bp, Artificial Sequence
  source: /note="Description of Artificial Sequence: Synthetic oligonucleotide"
  source: /note="Description of Combined DNA/RNA Molecule: Synthetic oligonucleotide"
  source: /note="DNA/RNA"
  source: /note="5' tri-ethylene glycol (TEG)"
  modified_base (8)..(8): 5-methyl modified nucleotide
  modified_base (9)..(9): bicyclic nucleic acid (BNA)
guaaguuct

SEQ ID NO: 14765 - RNA, 8 nt, Artificial Sequence
  source: /note="Description of Artificial Sequence: Synthetic oligonucleotide"
  source: /note="RNA"
  source: /note="5' tri-ethylene glycol (TEG)"
  modified_base (8)..(8): 5-methyl bicyclic nucleic acid
guaaguuc

SEQ ID NO: 14766 - RNA, 20 nt, Artificial Sequence
  source: /note="Description of Artificial Sequence: Synthetic oligonucleotide"
  source: /note="RNA"
  source: /note="5' tri-ethylene glycol (TEG)"
  modified_base (9)..(9): 5-methyl modified nucleotide
  modified_base (13)..(13): 5-methyl modified nucleotide
  modified_base (14)..(14): 5-methyl modified nucleotide
  modified_base (18)..(18): 5-methyl modified nucleotide
  modified_base (19)..(19): 5-methyl modified nucleotide
  modified_base (20)..(20): 5-methyl bicyclic nucleic acid
gguaaguucuguccaagccc

SEQ ID NO: 14767 - RNA, 19 nt, Artificial Sequence
  source: /note="Description of Artificial Sequence: Synthetic oligonucleotide"
  source: /note="RNA"
  source: /note="5' tri-ethylene glycol (TEG)"
  modified_base (9)..(9): 5-methyl modified nucleotide
  modified_base (13)..(13): 5-methyl modified nucleotide
  modified_base (14)..(14): 5-methyl modified nucleotide
  modified_base (18)..(18): 5-methyl modified nucleotide
  modified_base (19)..(19): 5-methyl bicyclic nucleic acid
gguaaguucuguccaagcc

SEQ ID NO: 14768 - RNA, 17 nt, Artificial Sequence
  source: /note="Description of Artificial Sequence: Synthetic oligonucleotide"
  source: /note="RNA"
  source: /note="5' tri-ethylene glycol (TEG)"
  modified_base (9)..(9): 5-methyl modified nucleotide
  modified_base (13)..(13): 5-methyl modified nucleotide
  modified_base (14)..(14): 5-methyl modified nucleotide
  modified_base (17)..(17): bicyclic nucleic acid (BNA)
gguaaguucuguccaag

SEQ ID NO: 14769 - RNA, 16 nt, Artificial Sequence
  source: /note="Description of Artificial Sequence: Synthetic oligonucleotide"
  source: /note="RNA"
  source: /note="5' tri-ethylene glycol (TEG)"
  modified_base (9)..(9): 5-methyl modified nucleotide
  modified_base (13)..(13): 5-methyl modified nucleotide
  modified_base (14)..(14): 5-methyl modified nucleotide
  modified_base (16)..(16): bicyclic nucleic acid (BNA)
gguaaguucuguccaa

SEQ ID NO: 14770 - RNA, 15 nt, Artificial Sequence
  source: /note="Description of Artificial Sequence: Synthetic oligonucleotide"
  source: /note="RNA"
  source: /note="5' tri-ethylene glycol (TEG)"
  modified_base (9)..(9): 5-methyl modified nucleotide
  modified_base (13)..(13): 5-methyl modified nucleotide
  modified_base (14)..(14): 5-methyl modified nucleotide
  modified_base (15)..(15): bicyclic nucleic acid (BNA)
gguaaguucugucca

SEQ ID NO: 14771 - RNA, 14 nt, Artificial Sequence
  source: /note="Description of Artificial Sequence: Synthetic oligonucleotide"
  source: /note="RNA"
  source: /note="5' tri-ethylene glycol (TEG)"
  modified_base (9)..(9): 5-methyl modified nucleotide
  modified_base (13)..(13): 5-methyl modified nucleotide
  modified_base (14)..(14): 5-methyl bicyclic nucleic acid
gguaaguucugucc

SEQ ID NO: 14772 - RNA, 13 nt, Artificial Sequence
  source: /note="Description of Artificial Sequence: Synthetic oligonucleotide"
  source: /note="RNA"
  source: /note="5' tri-ethylene glycol (TEG)"
  modified_base (9)..(9): 5-methyl modified nucleotide
  modified_base (13)..(13): 5-methyl bicyclic nucleic acid
gguaaguucuguc

SEQ ID NO: 14773 - DNA, 12 bp, Artificial Sequence
  source: /note="Description of Artificial Sequence: Synthetic oligonucleotide"
  source: /note="Description of Combined DNA/RNA Molecule: Synthetic oligonucleotide"
  source: /note="DNA/RNA"
  source: /note="5' tri-ethylene glycol (TEG)"
  modified_base (9)..(9): 5-methyl modified nucleotide
  modified_base (12)..(12): bicyclic nucleic acid (BNA)
gguaaguucugt

SEQ ID NO: 14774 - RNA, 11 nt, Artificial Sequence
  source: /note="Description of Artificial Sequence: Synthetic oligonucleotide"
  source: /note="RNA"
  source: /note="5' tri-ethylene glycol (TEG)"
  modified_base (9)..(9): 5-methyl modified nucleotide
  modified_base (11)..(11): bicyclic nucleic acid (BNA)
gguaaguucug

SEQ ID NO: 14775 - DNA, 10 bp, Artificial Sequence
  source: /note="Description of Artificial Sequence: Synthetic oligonucleotide"
  source: /note="Description of Combined DNA/RNA Molecule: Synthetic oligonucleotide"
  source: /note="DNA/RNA"
  source: /note="5' tri-ethylene glycol (TEG)"
  modified_base (9)..(9): 5-methyl modified nucleotide
  modified_base (10)..(10): bicyclic nucleic acid (BNA)
gguaaguuct

SEQ ID NO: 14776 - RNA, 9 nt, Artificial Sequence
  source: /note="Description of Artificial Sequence: Synthetic oligonucleotide"
  source: /note="RNA"
  source: /note="5' tri-ethylene glycol (TEG)"
  modified_base (9)..(9): 5-methyl bicyclic nucleic acid
gguaaguuc

SEQ ID NO: 14777 - DNA, 8 bp, Artificial Sequence
  source: /note="Description of Artificial Sequence: Synthetic oligonucleotide"
  source: /note="Description of Combined DNA/RNA Molecule: Synthetic oligonucleotide"
  source: /note="DNA/RNA"
  source: /note="5' tri-ethylene glycol (TEG)"
  modified_base (8)..(8): bicyclic nucleic acid (BNA)
gguaagut

SEQ ID NO: 14778 - RNA, 20 nt, Artificial Sequence
  source: /note="Description of Artificial Sequence: Synthetic oligonucleotide"
  source: /note="RNA"
  source: /note="5' tri-ethylene glycol (TEG)"
  modified_base (1)..(1): 5-methyl modified nucleotide
  modified_base (10)..(10): 5-methyl modified nucleotide
  modified_base (14)..(14): 5-methyl modified nucleotide
  modified_base (15)..(15): 5-methyl modified nucleotide
  modified_base (19)..(19): 5-methyl modified nucleotide
  modified_base (20)..(20): 5-methyl bicyclic nucleic acid
cgguaaguucuguccaagcc

SEQ ID NO: 14779 - RNA, 19 nt, Artificial Sequence
  source: /note="Description of Artificial Sequence: Synthetic oligonucleotide"
  source: /note="RNA"
  source: /note="5' tri-ethylene glycol (TEG)"
  modified_base (1)..(1): 5-methyl modified nucleotide
  modified_base (10)..(10): 5-methyl modified nucleotide
  modified_base (14)..(14): 5-methyl modified nucleotide
  modified_base (15)..(15): 5-methyl modified nucleotide
  modified_base (19)..(19): 5-methyl bicyclic nucleic acid
cgguaaguucuguccaagc

SEQ ID NO: 14780 - RNA, 18 nt, Artificial Sequence
  source: /note="Description of Artificial Sequence: Synthetic oligonucleotide"
  source: /note="RNA"
  source: /note="5' tri-ethylene glycol (TEG)"
  modified_base (1)..(1): 5-methyl modified nucleotide
  modified_base (10)..(10): 5-methyl modified nucleotide
  modified_base (14)..(14): 5-methyl modified nucleotide
  modified_base (15)..(15): 5-methyl modified nucleotide
  modified_base (18)..(18): bicyclic nucleic acid (BNA)
cgguaaguucuguccaag

SEQ ID NO: 14781 - RNA, 17 nt, Artificial Sequence
  source: /note="Description of Artificial Sequence: Synthetic oligonucleotide"
  source: /note="RNA"
  source: /note="5' tri-ethylene glycol (TEG)"
  modified_base (1)..(1): 5-methyl modified nucleotide
  modified_base (10)..(10): 5-methyl modified nucleotide
  modified_base (14)..(14): 5-methyl modified nucleotide
  modified_base (15)..(15): 5-methyl modified nucleotide
  modified_base (17)..(17): bicyclic nucleic acid (BNA)
cgguaaguucuguccaa

SEQ ID NO: 14782 - RNA, 16 nt, Artificial Sequence
  source: /note="Description of Artificial Sequence: Synthetic oligonucleotide"
  source: /note="RNA"
  source: /note="5' tri-ethylene glycol (TEG)"
  modified_base (1)..(1): 5-methyl modified nucleotide
  modified_base (10)..(10): 5-methyl modified nucleotide
  modified_base (14)..(14): 5-methyl modified nucleotide
  modified_base (15)..(15): 5-methyl modified nucleotide
  modified_base (16)..(16): bicyclic nucleic acid (BNA)
cgguaaguucugucca

SEQ ID NO: 14783 - RNA, 15 nt, Artificial Sequence
  source: /note="Description of Artificial Sequence: Synthetic oligonucleotide"
  source: /note="RNA"
  source: /note="5' tri-ethylene glycol (TEG)"
  modified_base (1)..(1): 5-methyl modified nucleotide
  modified_base (10)..(10): 5-methyl modified nucleotide
  modified_base (14)..(14): 5-methyl modified nucleotide
  modified_base (15)..(15): 5-methyl bicyclic nucleic acid
cgguaaguucugucc

SEQ ID NO: 14784 - RNA, 14 nt, Artificial Sequence
  source: /note="Description of Artificial Sequence: Synthetic oligonucleotide"
  source: /note="RNA"
  source: /note="5' tri-ethylene glycol (TEG)"
  modified_base (1)..(1): 5-methyl modified nucleotide
  modified_base (10)..(10): 5-methyl modified nucleotide
  modified_base (14)..(14): 5-methyl bicyclic nucleic acid
cgguaaguucuguc

SEQ ID NO: 14785 - DNA, 13 bp, Artificial Sequence
  source: /note="Description of Artificial Sequence: Synthetic oligonucleotide"
  source: /note="Description of Combined DNA/RNA Molecule: Synthetic oligonucleotide"
  source: /note="DNA/RNA"
  source: /note="5' tri-ethylene glycol (TEG)"
  modified_base (1)..(1): 5-methyl modified nucleotide
  modified_base (10)..(10): 5-methyl modified nucleotide
  modified_base (13)..(13): bicyclic nucleic acid (BNA)
cgguaaguucugt

SEQ ID NO: 14786 - RNA, 12 nt, Artificial Sequence
  source: /note="Description of Artificial Sequence: Synthetic oligonucleotide"
  source: /note="RNA"
  source: /note="5' tri-ethylene glycol (TEG)"
  modified_base (1)..(1): 5-methyl modified nucleotide
  modified_base (10)..(10): 5-methyl modified nucleotide
  modified_base (12)..(12): bicyclic nucleic acid (BNA)
cgguaaguucug

SEQ ID NO: 14787 - DNA, 11 bp, Artificial Sequence
  source: /note="Description of Artificial Sequence: Synthetic oligonucleotide"
  source: /note="Description of Combined DNA/RNA Molecule: Synthetic oligonucleotide"
  source: /note="DNA/RNA"
  source: /note="5' tri-ethylene glycol (TEG)"
  modified_base (1)..(1): 5-methyl modified nucleotide
  modified_base (10)..(10): 5-methyl modified nucleotide
  modified_base (11)..(11): bicyclic nucleic acid (BNA)
cgguaaguuct

SEQ ID NO: 14788 - RNA, 10 nt, Artificial Sequence
  source: /note="Description of Artificial Sequence: Synthetic oligonucleotide"
  source: /note="RNA"
  source: /note="5' tri-ethylene glycol (TEG)"
  modified_base (1)..(1): 5-methyl modified nucleotide
  modified_base (10)..(10): 5-methyl bicyclic nucleic acid
cgguaaguuc

SEQ ID NO: 14789 - DNA, 9 bp, Artificial Sequence
  source: /note="Description of Artificial Sequence: Synthetic oligonucleotide"
  source: /note="Description of Combined DNA/RNA Molecule: Synthetic oligonucleotide"
  source: /note="DNA/RNA"
  source: /note="5' tri-ethylene glycol (TEG)"
  modified_base (1)..(1): 5-methyl modified nucleotide
  modified_base (9)..(9): bicyclic nucleic acid (BNA)
cgguaagut

SEQ ID NO: 14790 - DNA, 8 bp, Artificial Sequence
  source: /note="Description of Artificial Sequence: Synthetic oligonucleotide"
  source: /note="Description of Combined DNA/RNA Molecule: Synthetic oligonucleotide"
  source: /note="DNA/RNA"
  source: /note="5' tri-ethylene glycol (TEG)"
  modified_base (1)..(1): 5-methyl modified nucleotide
  modified_base (8)..(8): bicyclic nucleic acid (BNA)
cgguaagt

SEQ ID NO: 14791 - RNA, 20 nt, Artificial Sequence
  source: /note="Description of Artificial Sequence: Synthetic oligonucleotide"
  source: /note="RNA"
  source: /note="5' tri-ethylene glycol (TEG)"
  modified_base (2)..(2): 5-methyl modified nucleotide
  modified_base (11)..(11): 5-methyl modified nucleotide
  modified_base (15)..(15): 5-methyl modified nucleotide
  modified_base (16)..(16): 5-methyl modified nucleotide
  modified_base (20)..(20): 5-methyl bicyclic nucleic acid
ucgguaaguucuguccaagc

SEQ ID NO: 14792 - RNA, 19 nt, Artificial Sequence
  source: /note="Description of Artificial Sequence: Synthetic oligonucleotide"
  source: /note="RNA"
  source: /note="5' tri-ethylene glycol (TEG)"
  modified_base (2)..(2): 5-methyl modified nucleotide
  modified_base (11)..(11): 5-methyl modified nucleotide
  modified_base (15)..(15): 5-methyl modified nucleotide
  modified_base (16)..(16): 5-methyl modified nucleotide
  modified_base (19)..(19): bicyclic nucleic acid (BNA)
ucgguaaguucuguccaag

SEQ ID NO: 14793 - RNA, 18 nt, Artificial Sequence
  source: /note="Description of Artificial Sequence: Synthetic oligonucleotide"
  source: /note="RNA"
  source: /note="5' tri-ethylene glycol (TEG)"
  modified_base (2)..(2): 5-methyl modified nucleotide
  modified_base (11)..(11): 5-methyl modified nucleotide
  modified_base (15)..(15): 5-methyl modified nucleotide
  modified_base (16)..(16): 5-methyl modified nucleotide
  modified_base (18)..(18): bicyclic nucleic acid (BNA)
ucgguaaguucuguccaa

SEQ ID NO: 14794 - RNA, 17 nt, Artificial Sequence
  source: /note="Description of Artificial Sequence: Synthetic oligonucleotide"
  source: /note="RNA"
  source: /note="5' tri-ethylene glycol (TEG)"
  modified_base (2)..(2): 5-methyl modified nucleotide
  modified_base (11)..(11): 5-methyl modified nucleotide
  modified_base (15)..(15): 5-methyl modified nucleotide
  modified_base (16)..(16): 5-methyl modified nucleotide
  modified_base (17)..(17): bicyclic nucleic acid (BNA)
ucgguaaguucugucca

SEQ ID NO: 14795 - RNA, 16 nt, Artificial Sequence
  source: /note="Description of Artificial Sequence: Synthetic oligonucleotide"
  source: /note="RNA"
  source: /note="5' tri-ethylene glycol (TEG)"
  modified_base (2)..(2): 5-methyl modified nucleotide
  modified_base (11)..(11): 5-methyl modified nucleotide
  modified_base (15)..(15): 5-methyl modified nucleotide
  modified_base (16)..(16): 5-methyl bicyclic nucleic acid
ucgguaaguucugucc

SEQ ID NO: 14796 - RNA, 15 nt, Artificial Sequence
  source: /note="Description of Artificial Sequence: Synthetic oligonucleotide"
  source: /note="RNA"
  source: /note="5' tri-ethylene glycol (TEG)"
  modified_base (2)..(2): 5-methyl modified nucleotide
  modified_base (11)..(11): 5-methyl modified nucleotide
  modified_base (15)..(15): 5-methyl bicyclic nucleic acid
ucgguaaguucuguc

SEQ ID NO: 14797 - DNA, 14 bp, Artificial Sequence
  source: /note="Description of Artificial Sequence: Synthetic oligonucleotide"
  source: /note="Description of Combined DNA/RNA Molecule: Synthetic oligonucleotide"
  source: /note="DNA/RNA"
  source: /note="5' tri-ethylene glycol (TEG)"
  modified_base (2)..(2): 5-methyl modified nucleotide
  modified_base (11)..(11): 5-methyl modified nucleotide
  modified_base (14)..(14): bicyclic nucleic acid (BNA)
ucgguaaguucugt

SEQ ID NO: 14798 - RNA, 13 nt, Artificial Sequence
  source: /note="Description of Artificial Sequence: Synthetic oligonucleotide"
  source: /note="RNA"
  source: /note="5' tri-ethylene glycol (TEG)"
  modified_base (2)..(2): 5-methyl modified nucleotide
  modified_base (11)..(11): 5-methyl modified nucleotide
  modified_base (13)..(13): bicyclic nucleic acid (BNA)
ucgguaaguucug

SEQ ID NO: 14799 - DNA, 12 bp, Artificial Sequence
  source: /note="Description of Artificial Sequence: Synthetic oligonucleotide"
  source: /note="Description of Combined DNA/RNA Molecule: Synthetic oligonucleotide"
  source: /note="DNA/RNA"
  source: /note="5' tri-ethylene glycol (TEG)"
  modified_base (2)..(2): 5-methyl modified nucleotide
  modified_base (11)..(11): 5-methyl modified nucleotide
  modified_base (12)..(12): bicyclic nucleic acid (BNA)
ucgguaaguuct

SEQ ID NO: 14800 - RNA, 11 nt, Artificial Sequence
  source: /note="Description of Artificial Sequence: Synthetic oligonucleotide"
  source: /note="RNA"
  source: /note="5' tri-ethylene glycol (TEG)"
  modified_base (2)..(2): 5-methyl modified nucleotide
  modified_base (11)..(11): 5-methyl bicyclic nucleic acid
ucgguaaguuc

SEQ ID NO: 14801 - DNA, 10 bp, Artificial Sequence
  source: /note="Description of Artificial Sequence: Synthetic oligonucleotide"
  source: /note="Description of Combined DNA/RNA Molecule: Synthetic oligonucleotide"
  source: /note="DNA/RNA"
  source: /note="5' tri-ethylene glycol (TEG)"
  modified_base (2)..(2): 5-methyl modified nucleotide
  modified_base (10)..(10): bicyclic nucleic acid (BNA)
ucgguaagut

SEQ ID NO: 14802 - DNA, 9 bp, Artificial Sequence
  source: /note="Description of Artificial Sequence: Synthetic oligonucleotide"
  source: /note="Description of Combined DNA/RNA Molecule: Synthetic oligonucleotide"
  source: /note="DNA/RNA"
  source: /note="5' tri-ethylene glycol (TEG)"
  modified_base (2)..(2): 5-methyl modified nucleotide
  modified_base (9)..(9): bicyclic nucleic acid (BNA)
ucgguaagt

SEQ ID NO: 14803 - RNA, 20 nt, Artificial Sequence
  source: /note="Description of Artificial Sequence: Synthetic oligonucleotide"
  source: /note="RNA"
  source: /note="5' tri-ethylene glycol (TEG)"
  modified_base (3)..(3): 5-methyl modified nucleotide
  modified_base (12)..(12): 5-methyl modified nucleotide
  modified_base (16)..(16): 5-methyl modified nucleotide
  modified_base (17)..(17): 5-methyl modified nucleotide
  modified_base (20)..(20): bicyclic nucleic acid (BNA)
gucgguaaguucuguccaag

SEQ ID NO: 14804 - RNA, 19 nt, Artificial Sequence
  source: /note="Description of Artificial Sequence: Synthetic oligonucleotide"
  source: /note="RNA"
  source: /note="5' tri-ethylene glycol (TEG)"
  modified_base (3)..(3): 5-methyl modified nucleotide
  modified_base (12)..(12): 5-methyl modified nucleotide
  modified_base (16)..(16): 5-methyl modified nucleotide
  modified_base (17)..(17): 5-methyl modified nucleotide
  modified_base (19)..(19): bicyclic nucleic acid (BNA)
gucgguaaguucuguccaa

SEQ ID NO: 14805 - RNA, 18 nt, Artificial Sequence
  source: /note="Description of Artificial Sequence: Synthetic oligonucleotide"
  source: /note="RNA"
  source: /note="5' tri-ethylene glycol (TEG)"
  modified_base (3)..(3): 5-methyl modified nucleotide
  modified_base (12)..(12): 5-methyl modified nucleotide
  modified_base (16)..(16): 5-methyl modified nucleotide
  modified_base (17)..(17): 5-methyl modified nucleotide
  modified_base (18)..(18): bicyclic nucleic acid (BNA)
gucgguaaguucugucca

SEQ ID NO: 14806 - RNA, 17 nt, Artificial Sequence
  source: /note="Description of Artificial Sequence: Synthetic oligonucleotide"
  source: /note="RNA"
  source: /note="5' tri-ethylene glycol (TEG)"
  modified_base (3)..(3): 5-methyl modified nucleotide
  modified_base (12)..(12): 5-methyl modified nucleotide
  modified_base (16)..(16): 5-methyl modified nucleotide
  modified_base (17)..(17): 5-methyl bicyclic nucleic acid
gucgguaaguucugucc

SEQ ID NO: 14807 - RNA, 16 nt, Artificial Sequence
  source: /note="Description of Artificial Sequence: Synthetic oligonucleotide"
  source: /note="RNA"
  source: /note="5' tri-ethylene glycol (TEG)"
  modified_base (3)..(3): 5-methyl modified nucleotide
  modified_base (12)..(12): 5-methyl modified nucleotide
  modified_base (16)..(16): 5-methyl bicyclic nucleic acid
gucgguaaguucuguc

SEQ ID NO: 14808 - DNA, 15 bp, Artificial Sequence
  source: /note="Description of Artificial Sequence: Synthetic oligonucleotide"
  source: /note="Description of Combined DNA/RNA Molecule: Synthetic oligonucleotide"
  source: /note="DNA/RNA"
  source: /note="5' tri-ethylene glycol (TEG)"
  modified_base (3)..(3): 5-methyl modified nucleotide
  modified_base (12)..(12): 5-methyl modified nucleotide
  modified_base (15)..(15): bicyclic nucleic acid (BNA)
gucgguaaguucugt

SEQ ID NO: 14809 - RNA, 14 nt, Artificial Sequence
  source: /note="Description of Artificial Sequence: Synthetic oligonucleotide"
  source: /note="RNA"
  source: /note="5' tri-ethylene glycol (TEG)"
  modified_base (3)..(3): 5-methyl modified nucleotide
  modified_base (12)..(12): 5-methyl modified nucleotide
  modified_base (14)..(14): bicyclic nucleic acid (BNA)
gucgguaaguucug

SEQ ID NO: 14810 - DNA, 13 bp, Artificial Sequence
  source: /note="Description of Artificial Sequence: Synthetic oligonucleotide"
  source: /note="Description of Combined DNA/RNA Molecule: Synthetic oligonucleotide"
  source: /note="DNA/RNA"
  source: /note="5' tri-ethylene glycol (TEG)"
  modified_base (3)..(3): 5-methyl modified nucleotide
  modified_base (12)..(12): 5-methyl modified nucleotide
  modified_base (13)..(13): bicyclic nucleic acid (BNA)
gucgguaaguuct

SEQ ID NO: 14811 - RNA, 12 nt, Artificial Sequence
  source: /note="Description of Artificial Sequence: Synthetic oligonucleotide"
  source: /note="RNA"
  source: /note="5' tri-ethylene glycol (TEG)"
  modified_base (3)..(3): 5-methyl modified nucleotide
  modified_base (12)..(12): 5-methyl bicyclic nucleic acid
gucgguaaguuc

SEQ ID NO: 14812 - DNA, 11 bp, Artificial Sequence
  source: /note="Description of Artificial Sequence: Synthetic oligonucleotide"
  source: /note="Description of Combined DNA/RNA Molecule: Synthetic oligonucleotide"
  source: /note="DNA/RNA"
  source: /note="5' tri-ethylene glycol (TEG)"
  modified_base (3)..(3): 5-methyl modified nucleotide
  modified_base (11)..(11): bicyclic nucleic acid (BNA)
gucgguaagut

SEQ ID NO: 14813 - DNA, 10 bp, Artificial Sequence
  source: /note="Description of Artificial Sequence: Synthetic oligonucleotide"
  source: /note="Description of Combined DNA/RNA Molecule: Synthetic oligonucleotide"
  source: /note="DNA/RNA"
  source: /note="5' tri-ethylene glycol (TEG)"
  modified_base (3)..(3): 5-methyl modified nucleotide
  modified_base (10)..(10): bicyclic nucleic acid (BNA)
gucgguaagt

SEQ ID NO: 14814 - RNA, 20 nt, Artificial Sequence
  source: /note="Description of Artificial Sequence: Synthetic oligonucleotide"
  source: /note="RNA"
  source: /note="5' tri-ethylene glycol (TEG)"
  modified_base (4)..(4): 5-methyl modified nucleotide
  modified_base (13)..(13): 5-methyl modified nucleotide
  modified_base (17)..(17): 5-methyl modified nucleotide
  modified_base (18)..(18): 5-methyl modified nucleotide
  modified_base (20)..(20): bicyclic nucleic acid (BNA)
agucgguaaguucuguccaa

SEQ ID NO: 14815 - RNA, 19 nt, Artificial Sequence
  source: /note="Description of Artificial Sequence: Synthetic oligonucleotide"
  source: /note="RNA"
  source: /note="5' tri-ethylene glycol (TEG)"
  modified_base (4)..(4): 5-methyl modified nucleotide
  modified_base (13)..(13): 5-methyl modified nucleotide
  modified_base (17)..(17): 5-methyl modified nucleotide
  modified_base (18)..(18): 5-methyl modified nucleotide
  modified_base (19)..(19): bicyclic nucleic acid (BNA)
agucgguaaguucugucca

SEQ ID NO: 14816 - RNA, 17 nt, Artificial Sequence
  source: /note="Description of Artificial Sequence: Synthetic oligonucleotide"
  source: /note="RNA"
  source: /note="5' tri-ethylene glycol (TEG)"
  modified_base (4)..(4): 5-methyl modified nucleotide
  modified_base (13)..(13): 5-methyl modified nucleotide
  modified_base (17)..(17): 5-methyl bicyclic nucleic acid
agucgguaaguucuguc

SEQ ID NO: 14817 - DNA, 16 bp, Artificial Sequence
  source: /note="Description of Artificial Sequence: Synthetic oligonucleotide"
  source: /note="Description of Combined DNA/RNA Molecule: Synthetic oligonucleotide"
  source: /note="DNA/RNA"
  source: /note="5' tri-ethylene glycol (TEG)"
  modified_base (4)..(4): 5-methyl modified nucleotide
  modified_base (13)..(13): 5-methyl modified nucleotide
  modified_base (16)..(16): bicyclic nucleic acid (BNA)
agucgguaaguucugt

SEQ ID NO: 14818 - RNA, 15 nt, Artificial Sequence
  source: /note="Description of Artificial Sequence: Synthetic oligonucleotide"
  source: /note="RNA"
  source: /note="5' tri-ethylene glycol (TEG)"
  modified_base (4)..(4): 5-methyl modified nucleotide
  modified_base (13)..(13): 5-methyl modified nucleotide
  modified_base (15)..(15): bicyclic nucleic acid (BNA)
agucgguaaguucug

SEQ ID NO: 14819 - DNA, 14 bp, Artificial Sequence
  source: /note="Description of Artificial Sequence: Synthetic oligonucleotide"
  source: /note="Description of Combined DNA/RNA Molecule: Synthetic oligonucleotide"
  source: /note="DNA/RNA"
  source: /note="5' tri-ethylene glycol (TEG)"
  modified_base (4)..(4): 5-methyl modified nucleotide
  modified_base (13)..(13): 5-methyl modified nucleotide
  modified_base (14)..(14): bicyclic nucleic acid (BNA)
agucgguaaguuct

SEQ ID NO: 14820 - RNA, 13 nt, Artificial Sequence
  source: /note="Description of Artificial Sequence: Synthetic oligonucleotide"
  source: /note="RNA"
  source: /note="5' tri-ethylene glycol (TEG)"
  modified_base (4)..(4): 5-methyl modified nucleotide
  modified_base (13)..(13): 5-methyl bicyclic nucleic acid
agucgguaaguuc

SEQ ID NO: 14821 - DNA, 12 bp, Artificial Sequence
  source: /note="Description of Artificial Sequence: Synthetic oligonucleotide"
  source: /note="Description of Combined DNA/RNA Molecule: Synthetic oligonucleotide"
  source: /note="DNA/RNA"
  source: /note="5' tri-ethylene glycol (TEG)"
  modified_base (4)..(4): 5-methyl modified nucleotide
  modified_base (12)..(12): bicyclic nucleic acid (BNA)
agucgguaagut

SEQ ID NO: 14822 - DNA, 11 bp, Artificial Sequence
  source: /note="Description of Artificial Sequence: Synthetic oligonucleotide"
  source: /note="Description of Combined DNA/RNA Molecule: Synthetic oligonucleotide"
  source: /note="DNA/RNA"
  source: /note="5' tri-ethylene glycol (TEG)"
  modified_base (4)..(4): 5-methyl modified nucleotide
  modified_base (11)..(11): bicyclic nucleic acid (BNA)
agucgguaagt

SEQ ID NO: 14823 - RNA, 20 nt, Artificial Sequence
  source: /note="Description of Artificial Sequence: Synthetic oligonucleotide"
  source: /note="RNA"
  source: /note="5' tri-ethylene glycol (TEG)"
  modified_base (1)..(1): 5-methyl modified nucleotide
  modified_base (5)..(5): 5-methyl modified nucleotide
  modified_base (14)..(14): 5-methyl modified nucleotide
  modified_base (18)..(18): 5-methyl modified nucleotide
  modified_base (19)..(19): 5-methyl modified nucleotide
  modified_base (20)..(20): bicyclic nucleic acid (BNA)
cagucgguaaguucugucca

SEQ ID NO: 14824 - RNA, 19 nt, Artificial Sequence
  source: /note="Description of Artificial Sequence: Synthetic oligonucleotide"
  source: /note="RNA"
  source: /note="5' tri-ethylene glycol (TEG)"
  modified_base (1)..(1): 5-methyl modified nucleotide
  modified_base (5)..(5): 5-methyl modified nucleotide
  modified_base (14)..(14): 5-methyl modified nucleotide
  modified_base (18)..(18): 5-methyl modified nucleotide
  modified_base (19)..(19): 5-methyl bicyclic nucleic acid
cagucgguaaguucugucc

SEQ ID NO: 14825 - RNA, 18 nt, Artificial Sequence
  source: /note="Description of Artificial Sequence: Synthetic oligonucleotide"
  source: /note="RNA"
  source: /note="5' tri-ethylene glycol (TEG)"
  modified_base (1)..(1): 5-methyl modified nucleotide
  modified_base (5)..(5): 5-methyl modified nucleotide
  modified_base (14)..(14): 5-methyl modified nucleotide
  modified_base (18)..(18): 5-methyl bicyclic nucleic acid
cagucgguaaguucuguc

SEQ ID NO: 14826 - DNA, 17 bp, Artificial Sequence
  source: /note="Description of Artificial Sequence: Synthetic oligonucleotide"
  source: /note="Description of Combined DNA/RNA Molecule: Synthetic oligonucleotide"
  source: /note="DNA/RNA"
  source: /note="5' tri-ethylene glycol (TEG)"
  modified_base (1)..(1): 5-methyl modified nucleotide
  modified_base (5)..(5): 5-methyl modified nucleotide
  modified_base (14)..(14): 5-methyl modified nucleotide
  modified_base (17)..(17): bicyclic nucleic acid (BNA)
cagucgguaaguucugt

SEQ ID NO: 14827 - RNA, 16 nt, Artificial Sequence
  source: /note="Description of Artificial Sequence: Synthetic oligonucleotide"
  source: /note="RNA"
  source: /note="5' tri-ethylene glycol (TEG)"
  modified_base (1)..(1): 5-methyl modified nucleotide
  modified_base (5)..(5): 5-methyl modified nucleotide
  modified_base (14)..(14): 5-methyl modified nucleotide
  modified_base (16)..(16): bicyclic nucleic acid (BNA)
cagucgguaaguucug

SEQ ID NO: 14828 - DNA, 15 bp, Artificial Sequence
  source: /note="Description of Artificial Sequence: Synthetic oligonucleotide"
  source: /note="Description of Combined DNA/RNA Molecule: Synthetic oligonucleotide"
  source: /note="DNA/RNA"
  source: /note="5' tri-ethylene glycol (TEG)"
  modified_base (1)..(1): 5-methyl modified nucleotide
  modified_base (5)..(5): 5-methyl modified nucleotide
  modified_base (14)..(14): 5-methyl modified nucleotide
  modified_base (15)..(15): bicyclic nucleic acid (BNA)
cagucgguaaguuct

SEQ ID NO: 14829 - RNA, 14 nt, Artificial Sequence
  source: /note="Description of Artificial Sequence: Synthetic oligonucleotide"
  source: /note="RNA"
  source: /note="5' tri-ethylene glycol (TEG)"
  modified_base (1)..(1): 5-methyl modified nucleotide
  modified_base (5)..(5): 5-methyl modified nucleotide
  modified_base (14)..(14): 5-methyl bicyclic nucleic acid
cagucgguaaguuc

SEQ ID NO: 14830 - DNA, 13 bp, Artificial Sequence
  source: /note="Description of Artificial Sequence: Synthetic oligonucleotide"
  source: /note="Description of Combined DNA/RNA Molecule: Synthetic oligonucleotide"
  source: /note="DNA/RNA"
  source: /note="5' tri-ethylene glycol (TEG)"
  modified_base (1)..(1): 5-methyl modified nucleotide
  modified_base (5)..(5): 5-methyl modified nucleotide
  modified_base (13)..(13): bicyclic nucleic acid (BNA)
cagucgguaagut

SEQ ID NO: 14831 - DNA, 12 bp, Artificial Sequence
  source: /note="Description of Artificial Sequence: Synthetic oligonucleotide"
  source: /note="Description of Combined DNA/RNA Molecule: Synthetic oligonucleotide"
  source: /note="DNA/RNA"
  source: /note="5' tri-ethylene glycol (TEG)"
  modified_base (1)..(1): 5-methyl modified nucleotide
  modified_base (5)..(5): 5-methyl modified nucleotide
  modified_base (12)..(12): bicyclic nucleic acid (BNA)
cagucgguaagt

SEQ ID NO: 14832 - RNA, 20 nt, Artificial Sequence
  source: /note="Description of Artificial Sequence: Synthetic oligonucleotide"
  source: /note="RNA"
  source: /note="5' tri-ethylene glycol (TEG)"
  modified_base (1)..(1): 5-methyl modified nucleotide
  modified_base (2)..(2): 5-methyl modified nucleotide
  modified_base (6)..(6): 5-methyl modified nucleotide
  modified_base (15)..(15): 5-methyl modified nucleotide
  modified_base (19)..(19): 5-methyl modified nucleotide
  modified_base (20)..(20): 5-methyl bicyclic nucleic acid
ccagucgguaaguucugucc

SEQ ID NO: 14833 - RNA, 19 nt, Artificial Sequence
  source: /note="Description of Artificial Sequence: Synthetic oligonucleotide"
  source: /note="RNA"
  source: /note="5' tri-ethylene glycol (TEG)"
  modified_base (1)..(1): 5-methyl modified nucleotide
  modified_base (2)..(2): 5-methyl modified nucleotide
  modified_base (6)..(6): 5-methyl modified nucleotide
  modified_base (15)..(15): 5-methyl modified nucleotide
  modified_base (19)..(19): 5-methyl bicyclic nucleic acid
ccagucgguaaguucuguc

SEQ ID NO: 14834 - DNA, 18 bp, Artificial Sequence
  source: /note="Description of Artificial Sequence: Synthetic oligonucleotide"
  source: /note="Description of Combined DNA/RNA Molecule: Synthetic oligonucleotide"
  source: /note="DNA/RNA"
  source: /note="5' tri-ethylene glycol (TEG)"
  modified_base (1)..(1): 5-methyl modified nucleotide
  modified_base (2)..(2): 5-methyl modified nucleotide
  modified_base (6)..(6): 5-methyl modified nucleotide
  modified_base (15)..(15): 5-methyl modified nucleotide
  modified_base (18)..(18): bicyclic nucleic acid (BNA)
ccagucgguaaguucugt

SEQ ID NO: 14835 - RNA, 17 nt, Artificial Sequence
  source: /note="Description of Artificial Sequence: Synthetic oligonucleotide"
  source: /note="RNA"
  source: /note="5' tri-ethylene glycol (TEG)"
  modified_base (1)..(1): 5-methyl modified nucleotide
  modified_base (2)..(2): 5-methyl modified nucleotide
  modified_base (6)..(6): 5-methyl modified nucleotide
  modified_base (15)..(15): 5-methyl modified nucleotide
  modified_base (17)..(17): bicyclic nucleic acid (BNA)
ccagucgguaaguucug

SEQ ID NO: 14836 - DNA, 16 bp, Artificial Sequence
  source: /note="Description of Artificial Sequence: Synthetic oligonucleotide"
  source: /note="Description of Combined DNA/RNA Molecule: Synthetic oligonucleotide"
  source: /note="DNA/RNA"
  source: /note="5' tri-ethylene glycol (TEG)"
  modified_base (1)..(1): 5-methyl modified nucleotide
  modified_base (2)..(2): 5-methyl modified nucleotide
  modified_base (6)..(6): 5-methyl modified nucleotide
  modified_base (15)..(15): 5-methyl modified nucleotide
  modified_base (16)..(16): bicyclic nucleic acid (BNA)
ccagucgguaaguuct

SEQ ID NO: 14837 - RNA, 15 nt, Artificial Sequence
  source: /note="Description of Artificial Sequence: Synthetic oligonucleotide"
  source: /note="RNA"
  source: /note="5' tri-ethylene glycol (TEG)"
  modified_base (1)..(1): 5-methyl modified nucleotide
  modified_base (2)..(2): 5-methyl modified nucleotide
  modified_base (6)..(6): 5-methyl modified nucleotide
  modified_base (15)..(15): 5-methyl bicyclic nucleic acid
ccagucgguaaguuc

SEQ ID NO: 14838 - DNA, 14 bp, Artificial Sequence
  source: /note="Description of Artificial Sequence: Synthetic oligonucleotide"
  source: /note="Description of Combined DNA/RNA Molecule: Synthetic oligonucleotide"
  source: /note="DNA/RNA"
  source: /note="5' tri-ethylene glycol (TEG)"
  modified_base (1)..(1): 5-methyl modified nucleotide
  modified_base (2)..(2): 5-methyl modified nucleotide
  modified_base (6)..(6): 5-methyl modified nucleotide
  modified_base (14)..(14): bicyclic nucleic acid (BNA)
ccagucgguaagut

SEQ ID NO: 14839 - DNA, 13 bp, Artificial Sequence
  source: /note="Description of Artificial Sequence: Synthetic oligonucleotide"
  source: /note="Description of Combined DNA/RNA Molecule: Synthetic oligonucleotide"
  source: /note="DNA/RNA"
  source: /note="5' tri-ethylene glycol (TEG)"
  modified_base (1)..(1): 5-methyl modified nucleotide
  modified_base (2)..(2): 5-methyl modified nucleotide
  modified_base (6)..(6): 5-methyl modified nucleotide
  modified_base (13)..(13): bicyclic nucleic acid (BNA)
ccagucgguaagt

SEQ ID NO: 14840 - RNA, 20 nt, Artificial Sequence
  source: /note="Description of Artificial Sequence: Synthetic oligonucleotide"
  source: /note="RNA"
  source: /note="5' tri-ethylene glycol (TEG)"
  modified_base (2)..(2): 5-methyl modified nucleotide
  modified_base (3)..(3): 5-methyl modified nucleotide
  modified_base (7)..(7): 5-methyl modified nucleotide
  modified_base (16)..(16): 5-methyl modified nucleotide
  modified_base (20)..(20): 5-methyl bicyclic nucleic acid
gccagucgguaaguucuguc

SEQ ID NO: 14841 - DNA, 19 bp, Artificial Sequence
  source: /note="Description of Artificial Sequence: Synthetic oligonucleotide"
  source: /note="Description of Combined DNA/RNA Molecule: Synthetic oligonucleotide"
  source: /note="DNA/RNA"
  source: /note="5' tri-ethylene glycol (TEG)"
  modified_base (2)..(2): 5-methyl modified nucleotide
  modified_base (3)..(3): 5-methyl modified nucleotide
  modified_base (7)..(7): 5-methyl modified nucleotide
  modified_base (16)..(16): 5-methyl modified nucleotide
  modified_base (19)..(19): bicyclic nucleic acid (BNA)
gccagucgguaaguucugt

SEQ ID NO: 14842 - RNA, 18 nt, Artificial Sequence
  source: /note="Description of Artificial Sequence: Synthetic oligonucleotide"
  source: /note="RNA"
  source: /note="5' tri-ethylene glycol (TEG)"
  modified_base (2)..(2): 5-methyl modified nucleotide
  modified_base (3)..(3): 5-methyl modified nucleotide
  modified_base (7)..(7): 5-methyl modified nucleotide
  modified_base (16)..(16): 5-methyl modified nucleotide
  modified_base (18)..(18): bicyclic nucleic acid (BNA)
gccagucgguaaguucug

SEQ ID NO: 14843 - DNA, 17 bp, Artificial Sequence
  source: /note="Description of Artificial Sequence: Synthetic oligonucleotide"
  source: /note="Description of Combined DNA/RNA Molecule: Synthetic oligonucleotide"
  source: /note="DNA/RNA"
  source: /note="5' tri-ethylene glycol (TEG)"
  modified_base (2)..(2): 5-methyl modified nucleotide
  modified_base (3)..(3): 5-methyl modified nucleotide
  modified_base (7)..(7): 5-methyl modified nucleotide
  modified_base (16)..(16): 5-methyl modified nucleotide
  modified_base (17)..(17): bicyclic nucleic acid (BNA)
gccagucgguaaguuct

SEQ ID NO: 14844 - RNA, 16 nt, Artificial Sequence
  source: /note="Description of Artificial Sequence: Synthetic oligonucleotide"
  source: /note="RNA"
  source: /note="5' tri-ethylene glycol (TEG)"
  modified_base (2)..(2): 5-methyl modified nucleotide
  modified_base (3)..(3): 5-methyl modified nucleotide
  modified_base (7)..(7): 5-methyl modified nucleotide
  modified_base (16)..(16): 5-methyl bicyclic nucleic acid
gccagucgguaaguuc

SEQ ID NO: 14845 - DNA, 15 bp, Artificial Sequence
  source: /note="Description of Artificial Sequence: Synthetic oligonucleotide"
  source: /note="Description of Combined DNA/RNA Molecule: Synthetic oligonucleotide"
  source: /note="DNA/RNA"
  source: /note="5' tri-ethylene glycol (TEG)"
  modified_base (2)..(2): 5-methyl modified nucleotide
  modified_base (3)..(3): 5-methyl modified nucleotide
  modified_base (7)..(7): 5-methyl modified nucleotide
  modified_base (15)..(15): bicyclic nucleic acid (BNA)
gccagucgguaagut

SEQ ID NO: 14846 - DNA, 14 bp, Artificial Sequence
  source: /note="Description of Artificial Sequence: Synthetic oligonucleotide"
  source: /note="Description of Combined DNA/RNA Molecule: Synthetic oligonucleotide"
  source: /note="DNA/RNA"
  source: /note="5' tri-ethylene glycol (TEG)"
  modified_base (2)..(2): 5-methyl modified nucleotide
  modified_base (3)..(3): 5-methyl modified nucleotide
  modified_base (7)..(7): 5-methyl modified nucleotide
  modified_base (14)..(14): bicyclic nucleic acid (BNA)
gccagucgguaagt

SEQ ID NO: 14847 - DNA, 20 bp, Artificial Sequence
  source: /note="Description of Artificial Sequence: Synthetic oligonucleotide"
  source: /note="Description of Combined DNA/RNA Molecule: Synthetic oligonucleotide"
  source: /note="DNA/RNA"
  source: /note="5' tri-ethylene glycol (TEG)"
  modified_base (2)..(2): 5-methyl modified nucleotide
  modified_base (14)..(14): 5-methyl modified nucleotide
  modified_base (19)..(19): 5-methyl modified nucleotide
  modified_base (20)..(20): bicyclic nucleic acid (BNA)
ucaaggaagauggcauuuct

SEQ ID NO: 14848 - RNA, 22 nt, Artificial Sequence
  source: /note="Description of Artificial Sequence: Synthetic oligonucleotide"
  source: /note="RNA"
  source: /note="5' tri-ethylene glycol (TEG)"
  modified_base (2)..(2): 5-methyl modified nucleotide
  modified_base (14)..(14): 5-methyl modified nucleotide
  modified_base (19)..(19): 5-methyl modified nucleotide
  modified_base (22)..(22): bicyclic nucleic acid (BNA)
ucaaggaagauggcauuucuag

SEQ ID NO: 14849 - DNA, 16 bp, Artificial Sequence
  source: /note="Description of Artificial Sequence: Synthetic oligonucleotide"
  source: /note="Description of Combined DNA/RNA Molecule: Synthetic oligonucleotide"
  source: /note="DNA/RNA"
  source: /note="5' tri-ethylene glycol (TEG)"
  modified_base (2)..(2): 5-methyl modified nucleotide
  modified_base (14)..(14): 5-methyl modified nucleotide
  modified_base (16)..(16): bicyclic nucleic acid (BNA)
ucaaggaagauggcat

SEQ ID NO: 14850 - DNA, 15 bp, Artificial Sequence
  source: /note="Description of Artificial Sequence: Synthetic oligonucleotide"
  source: /note="Description of Combined DNA/RNA Molecule: Synthetic oligonucleotide"
  source: /note="DNA/RNA"
  source: /note="5' tri-ethylene glycol (TEG)"
  modified_base (9)..(9): 5-methyl modified nucleotide
  modified_base (14)..(14): 5-methyl modified nucleotide
  modified_base (15)..(15): bicyclic nucleic acid (BNA)
gaagauggcauuuct

SEQ ID NO: 14851 - RNA, 21 nt, Artificial Sequence
  source: /note="Description of Artificial Sequence: Synthetic oligonucleotide"
  source: /note="RNA"
  source: /note="5' tri-ethylene glycol (TEG)"
  modified_base (2)..(2): 5-methyl modified nucleotide
  modified_base (14)..(14): 5-methyl modified nucleotide
  modified_base (19)..(19): 5-methyl modified nucleotide
  modified_base (21)..(21): bicyclic nucleic acid (BNA)
ucaaggaagauggcauuucua

SEQ ID NO: 14852 - RNA, 19 nt, Artificial Sequence
  source: /note="Description of Artificial Sequence: Synthetic oligonucleotide"
  source: /note="RNA"
  source: /note="5' tri-ethylene glycol (TEG)"
  modified_base (2)..(2): 5-methyl modified nucleotide
  modified_base (14)..(14): 5-methyl modified nucleotide
  modified_base (19)..(19): 5-methyl bicyclic nucleic acid
ucaaggaagauggcauuuc

SEQ ID NO: 14853 - DNA, 18 bp, Artificial Sequence
  source: /note="Description of Artificial Sequence: Synthetic oligonucleotide"
  source: /note="Description of Combined DNA/RNA Molecule: Synthetic oligonucleotide"
  source: /note="DNA/RNA"
  source: /note="5' tri-ethylene glycol (TEG)"
  modified_base (2)..(2): 5-methyl modified nucleotide
  modified_base (14)..(14): 5-methyl modified nucleotide
  modified_base (18)..(18): bicyclic nucleic acid (BNA)
ucaaggaagauggcauut

SEQ ID NO: 14854 - DNA, 17 bp, Artificial Sequence
  source: /note="Description of Artificial Sequence: Synthetic oligonucleotide"
  source: /note="Description of Combined DNA/RNA Molecule: Synthetic oligonucleotide"
  source: /note="DNA/RNA"
  source: /note="5' tri-ethylene glycol (TEG)"
  modified_base (2)..(2): 5-methyl modified nucleotide
  modified_base (14)..(14): 5-methyl modified nucleotide
  modified_base (17)..(17): bicyclic nucleic acid (BNA)
ucaaggaagauggcaut

SEQ ID NO: 14855 - RNA, 15 nt, Artificial Sequence
  source: /note="Description of Artificial Sequence: Synthetic oligonucleotide"
  source: /note="RNA"
  source: /note="5' tri-ethylene glycol (TEG)"
  modified_base (2)..(2): 5-methyl modified nucleotide
  modified_base (14)..(14): 5-methyl modified nucleotide
  modified_base (15)..(15): bicyclic nucleic acid (BNA)
ucaaggaagauggca

SEQ ID NO: 14856 - RNA, 14 nt, Artificial Sequence
  source: /note="Description of Artificial Sequence: Synthetic oligonucleotide"
  source: /note="RNA"
  source: /note="5' tri-ethylene glycol (TEG)"
  modified_base (2)..(2): 5-methyl modified nucleotide
  modified_base (14)..(14): 5-methyl bicyclic nucleic acid
ucaaggaagauggc

SEQ ID NO: 14857 - RNA, 13 nt, Artificial Sequence
  source: /note="Description of Artificial Sequence: Synthetic oligonucleotide"
  source: /note="RNA"
  source: /note="5' tri-ethylene glycol (TEG)"
  modified_base (2)..(2): 5-methyl modified nucleotide
  modified_base (13)..(13): bicyclic nucleic acid (BNA)
ucaaggaagaugg

SEQ ID NO: 14858 - RNA, 12 nt, Artificial Sequence
  source: /note="Description of Artificial Sequence: Synthetic oligonucleotide"
  source: /note="RNA"
  source: /note="5' tri-ethylene glycol (TEG)"
  modified_base (2)..(2): 5-methyl modified nucleotide
  modified_base (12)..(12): bicyclic nucleic acid (BNA)
ucaaggaagaug

SEQ ID NO: 14859 - DNA, 11 bp, Artificial Sequence
  source: /note="Description of Artificial Sequence: Synthetic oligonucleotide"
  source: /note="Description of Combined DNA/RNA Molecule: Synthetic oligonucleotide"
  source: /note="DNA/RNA"
  source: /note="5' tri-ethylene glycol (TEG)"
  modified_base (2)..(2): 5-methyl modified nucleotide
  modified_base (11)..(11): bicyclic nucleic acid (BNA)
ucaaggaagat

SEQ ID NO: 14860 - RNA, 10 nt, Artificial Sequence
  source: /note="Description of Artificial Sequence: Synthetic oligonucleotide"
  source: /note="RNA"
  source: /note="5' tri-ethylene glycol (TEG)"
  modified_base (2)..(2): 5-methyl modified nucleotide
  modified_base (10)..(10): bicyclic nucleic acid (BNA)
ucaaggaaga

SEQ ID NO: 14861 - RNA, 9 nt, Artificial Sequence
  source: /note="Description of Artificial Sequence: Synthetic oligonucleotide"
  source: /note="RNA"
  source: /note="5' tri-ethylene glycol (TEG)"
  modified_base (2)..(2): 5-methyl modified nucleotide
  modified_base (9)..(9): bicyclic nucleic acid (BNA)
ucaaggaag

SEQ ID NO: 14862 - RNA, 21 nt, Artificial Sequence
  source: /note="Description of Artificial Sequence: Synthetic oligonucleotide"
  source: /note="RNA"
  source: /note="5' tri-ethylene glycol (TEG)"
  modified_base (1)..(1): 5-methyl modified nucleotide
  modified_base (13)..(13): 5-methyl modified nucleotide
  modified_base (18)..(18): 5-methyl modified nucleotide
  modified_base (21)..(21): bicyclic nucleic acid (BNA)
caaggaagauggcauuucuag

SEQ ID NO: 14863 - RNA, 20 nt, Artificial Sequence
  source: /note="Description of Artificial Sequence: Synthetic oligonucleotide"
  source: /note="RNA"
  source: /note="5' tri-ethylene glycol (TEG)"
  modified_base (1)..(1): 5-methyl modified nucleotide
  modified_base (13)..(13): 5-methyl modified nucleotide
  modified_base (18)..(18): 5-methyl modified nucleotide
  modified_base (20)..(20): bicyclic nucleic acid (BNA)
caaggaagauggcauuucua

SEQ ID NO: 14864 - DNA, 19 bp, Artificial Sequence
  source: /note="Description of Artificial Sequence: Synthetic oligonucleotide"
  source: /note="Description of Combined DNA/RNA Molecule: Synthetic oligonucleotide"
  source: /note="DNA/RNA"
  source: /note="5' tri-ethylene glycol (TEG)"
  modified_base (1)..(1): 5-methyl modified nucleotide
  modified_base (13)..(13): 5-methyl modified nucleotide
  modified_base (18)..(18): 5-methyl modified nucleotide
  modified_base (19)..(19): bicyclic nucleic acid (BNA)
caaggaagauggcauuuct

SEQ ID NO: 14865 - RNA, 18 nt, Artificial Sequence
  source: /note="Description of Artificial Sequence: Synthetic oligonucleotide"
  source: /note="RNA"
  source: /note="5' tri-ethylene glycol (TEG)"
  modified_base (1)..(1): 5-methyl modified nucleotide
  modified_base (13)..(13): 5-methyl modified nucleotide
  modified_base (18)..(18): 5-methyl bicyclic nucleic acid
caaggaagauggcauuuc

SEQ ID NO: 14866 - DNA, 17 bp, Artificial Sequence
  source: /note="Description of Artificial Sequence: Synthetic oligonucleotide"
  source: /note="Description of Combined DNA/RNA Molecule: Synthetic oligonucleotide"
  source: /note="DNA/RNA"
  source: /note="5' tri-ethylene glycol (TEG)"
  modified_base (1)..(1): 5-methyl modified nucleotide
  modified_base (13)..(13): 5-methyl modified nucleotide
  modified_base (17)..(17): bicyclic nucleic acid (BNA)
caaggaagauggcauut

SEQ ID NO: 14867 - DNA, 16 bp, Artificial Sequence
  source: /note="Description of Artificial Sequence: Synthetic oligonucleotide"
  source: /note="Description of Combined DNA/RNA Molecule: Synthetic oligonucleotide"
  source: /note="DNA/RNA"
  source: /note="5' tri-ethylene glycol (TEG)"
  modified_base (1)..(1): 5-methyl modified nucleotide
  modified_base (13)..(13): 5-methyl modified nucleotide
  modified_base (16)..(16): bicyclic nucleic acid (BNA)
caaggaagauggcaut

SEQ ID NO: 14868 - DNA, 15 bp, Artificial Sequence
  source: /note="Description of Artificial Sequence: Synthetic oligonucleotide"
  source: /note="Description of Combined DNA/RNA Molecule: Synthetic oligonucleotide"
  source: /note="DNA/RNA"
  source: /note="5' tri-ethylene glycol (TEG)"
  modified_base (1)..(1): 5-methyl modified nucleotide
  modified_base (13)..(13): 5-methyl modified nucleotide
  modified_base (15)..(15): bicyclic nucleic acid (BNA)
caaggaagauggcat

SEQ ID NO: 14869 - RNA, 14 nt, Artificial Sequence
  source: /note="Description of Artificial Sequence: Synthetic oligonucleotide"
  source: /note="RNA"
  source: /note="5' tri-ethylene glycol (TEG)"
  modified_base (1)..(1): 5-methyl modified nucleotide
  modified_base (13)..(13): 5-methyl modified nucleotide
  modified_base (14)..(14): bicyclic nucleic acid (BNA)
caaggaagauggca

SEQ ID NO: 14870 - RNA, 13 nt, Artificial Sequence
  source: /note="Description of Artificial Sequence: Synthetic oligonucleotide"
  source: /note="RNA"
  source: /note="5' tri-ethylene glycol (TEG)"
  modified_base (1)..(1): 5-methyl modified nucleotide
  modified_base (13)..(13): 5-methyl bicyclic nucleic acid
caaggaagauggc

SEQ ID NO: 14871 - RNA, 12 nt, Artificial Sequence
  source: /note="Description of Artificial Sequence: Synthetic oligonucleotide"
  source: /note="RNA"
  source: /note="5' tri-ethylene glycol (TEG)"
  modified_base (1)..(1): 5-methyl modified nucleotide
  modified_base (12)..(12): bicyclic nucleic acid (BNA)
caaggaagaugg

SEQ ID NO: 14872 - RNA, 11 nt, Artificial Sequence
  source: /note="Description of Artificial Sequence: Synthetic oligonucleotide"
  source: /note="RNA"
  source: /note="5' tri-ethylene glycol (TEG)"
  modified_base (1)..(1): 5-methyl modified nucleotide
  modified_base (11)..(11): bicyclic nucleic acid (BNA)
caaggaagaug

SEQ ID NO: 14873 - DNA, 10 bp, Artificial Sequence
  source: /note="Description of Artificial Sequence: Synthetic oligonucleotide"
  source: /note="DNA/RNA"
  source: /note="5' tri-ethylene glycol (TEG)"
  modified_base (1)..(1): 5-methyl modified nucleotide
  modified_base (10)..(10): bicyclic nucleic acid (BNA)
caaggaagat

SEQ ID NO: 14874 - RNA, 9 nt, Artificial Sequence
  source: /note="Description of Artificial Sequence: Synthetic oligonucleotide"
  source: /note="RNA/Antisense Oligonucleotide"
  source: /note="5' tri-ethylene glycol (TEG)"
  modified_base (1)..(1): 5-methyl modified nucleotide
  modified_base (9)..(9): bicyclic nucleic acid (BNA)
caaggaaga

SEQ ID NO: 14875 - RNA, 8 nt, Artificial Sequence
  source: /note="Description of Artificial Sequence: Synthetic oligonucleotide"
  source: /note="RNA/Antisense Oligonucleotide"
  source: /note="5' tri-ethylene glycol (TEG)"
  modified_base (1)..(1): 5-methyl modified nucleotide
  modified_base (8)..(8): bicyclic nucleic acid (BNA)
caaggaag

SEQ ID NO: 14876 - RNA, 20 nt, Artificial Sequence
  source: /note="Description of Artificial Sequence: Synthetic oligonucleotide"
  source: /note="RNA"
  source: /note="5' tri-ethylene glycol (TEG)"
  modified_base (12)..(12): 5-methyl modified nucleotide
  modified_base (17)..(17): 5-methyl modified nucleotide
  modified_base (20)..(20): bicyclic nucleic acid (BNA)
aaggaagauggcauuucuag

SEQ ID NO: 14877 - RNA, 19 nt, Artificial Sequence
  source: /note="Description of Artificial Sequence: Synthetic oligonucleotide"
  source: /note="RNA"
  source: /note="5' tri-ethylene glycol (TEG)"
  modified_base (12)..(12): 5-methyl modified nucleotide
  modified_base (17)..(17): 5-methyl modified nucleotide
  modified_base (19)..(19): bicyclic nucleic acid (BNA)
aaggaagauggcauuucua

SEQ ID NO: 14878 - DNA, 18 bp, Artificial Sequence
  source: /note="Description of Artificial Sequence: Synthetic oligonucleotide"
  source: /note="Description of Combined DNA/RNA Molecule: Synthetic oligonucleotide"
  source: /note="DNA/RNA"
  source: /note="5' tri-ethylene glycol (TEG)"
  modified_base (12)..(12): 5-methyl modified nucleotide
  modified_base (17)..(17): 5-methyl modified nucleotide
  modified_base (18)..(18): bicyclic nucleic acid (BNA)
aaggaagauggcauuuct

SEQ ID NO: 14879 - RNA, 17 nt, Artificial Sequence
  source: /note="Description of Artificial Sequence: Synthetic oligonucleotide"
  source: /note="RNA"
  source: /note="5' tri-ethylene glycol (TEG)"
  modified_base (12)..(12): 5-methyl modified nucleotide
  modified_base (17)..(17): 5-methyl bicyclic nucleic acid
aaggaagauggcauuuc

SEQ ID NO: 14880 - DNA, 16 bp, Artificial Sequence
  source: /note="Description of Artificial Sequence: Synthetic oligonucleotide"
  source: /note="Description of Combined DNA/RNA Molecule: Synthetic oligonucleotide"
  source: /note="DNA/RNA"
  source: /note="5' tri-ethylene glycol (TEG)"
  modified_base (12)..(12): 5-methyl modified nucleotide
  modified_base (16)..(16): bicyclic nucleic acid (BNA)
aaggaagauggcauut

SEQ ID NO: 14881 - DNA, 15 bp, Artificial Sequence
  source: /note="Description of Artificial Sequence: Synthetic oligonucleotide"
  source: /note="Description of Combined DNA/RNA Molecule: Synthetic oligonucleotide"
  source: /note="DNA/RNA"
  source: /note="5' tri-ethylene glycol (TEG)"
  modified_base (12)..(12): 5-methyl modified nucleotide
  modified_base (15)..(15): bicyclic nucleic acid (BNA)
aaggaagauggcaut

SEQ ID NO: 14882 - DNA, 14 bp, Artificial Sequence
  source: /note="Description of Artificial Sequence: Synthetic oligonucleotide"
  source: /note="Description of Combined DNA/RNA Molecule: Synthetic oligonucleotide"
  source: /note="DNA/RNA"
  source: /note="5' tri-ethylene glycol (TEG)"
  modified_base (12)..(12): 5-methyl modified nucleotide
  modified_base (14)..(14): bicyclic nucleic acid (BNA)
aaggaagauggcat

SEQ ID NO: 14883 - RNA, 13 nt, Artificial Sequence
  source: /note="Description of Artificial Sequence: Synthetic oligonucleotide"
  source: /note="RNA"
  source: /note="5' tri-ethylene glycol (TEG)"
  modified_base (12)..(12): 5-methyl modified nucleotide
  modified_base (13)..(13): bicyclic nucleic acid (BNA)
aaggaagauggca

SEQ ID NO: 14884 - RNA, 12 nt, Artificial Sequence
  source: /note="Description of Artificial Sequence: Synthetic oligonucleotide"
  source: /note="RNA"
  source: /note="5' tri-ethylene glycol (TEG)"
  modified_base (12)..(12): 5-methyl bicyclic nucleic acid
aaggaagauggc

SEQ ID NO: 14885 - RNA, 11 nt, Artificial Sequence
  source: /note="Description of Artificial Sequence: Synthetic oligonucleotide"
  source: /note="RNA"
  source: /note="5' tri-ethylene glycol (TEG)"
  modified_base (11)..(11): bicyclic nucleic acid (BNA)
aaggaagaugg

SEQ ID NO: 14886 - RNA, 10 nt, Artificial Sequence
  source: /note="Description of Artificial Sequence: Synthetic oligonucleotide"
  source: /note="RNA"
  source: /note="5' tri-ethylene glycol (TEG)"
  modified_base (10)..(10): bicyclic nucleic acid (BNA)
aaggaagaug

SEQ ID NO: 14887 - DNA, 9 bp, Artificial Sequence
  source: /note="Description of Artificial Sequence: Synthetic oligonucleotide"
  source: /note="DNA/RNA"
  source: /note="5' tri-ethylene glycol (TEG)"
  modified_base (9)..(9): bicyclic nucleic acid (BNA)
aaggaagat

SEQ ID NO: 14888 - RNA, 8 nt, Artificial Sequence
  source: /note="Description of Artificial Sequence: Synthetic oligonucleotide"
  source: /note="RNA/Antisense Oligonucleotide"
  source: /note="5' tri-ethylene glycol (TEG)"
  modified_base (8)..(8): bicyclic nucleic acid (BNA)
aaggaaga

SEQ ID NO: 14889 - RNA, 19 nt, Artificial Sequence
  source: /note="Description of Artificial Sequence: Synthetic oligonucleotide"
  source: /note="RNA"
  source: /note="5' tri-ethylene glycol (TEG)"
  modified_base (11)..(11): 5-methyl modified nucleotide
  modified_base (16)..(16): 5-methyl modified nucleotide
  modified_base (19)..(19): bicyclic nucleic acid (BNA)
aggaagauggcauuucuag

SEQ ID NO: 14890 - RNA, 18 nt, Artificial Sequence
  source: /note="Description of Artificial Sequence: Synthetic oligonucleotide"
  source: /note="RNA"
  source: /note="5' tri-ethylene glycol (TEG)"
  modified_base (11)..(11): 5-methyl modified nucleotide
  modified_base (16)..(16): 5-methyl modified nucleotide
  modified_base (18)..(18): bicyclic nucleic acid (BNA)
aggaagauggcauuucua

SEQ ID NO: 14891 - DNA, 17 bp, Artificial Sequence
  source: /note="Description of Artificial Sequence: Synthetic oligonucleotide"
  source: /note="Description of Combined DNA/RNA Molecule: Synthetic oligonucleotide"
  source: /note="DNA/RNA"
  source: /note="5' tri-ethylene glycol (TEG)"
  modified_base (11)..(11): 5-methyl modified nucleotide
  modified_base (16)..(16): 5-methyl modified nucleotide
  modified_base (17)..(17): bicyclic nucleic acid (BNA)
aggaagauggcauuuct

SEQ ID NO: 14892 - RNA, 16 nt, Artificial Sequence
  source: /note="Description of Artificial Sequence: Synthetic oligonucleotide"
  source: /note="RNA"
  source: /note="5' tri-ethylene glycol (TEG)"
  modified_base (11)..(11): 5-methyl modified nucleotide
  modified_base (16)..(16): 5-methyl bicyclic nucleic acid
aggaagauggcauuuc

SEQ ID NO: 14893 - DNA, 15 bp, Artificial Sequence
  source: /note="Description of Artificial Sequence: Synthetic oligonucleotide"
  source: /note="Description of Combined DNA/RNA Molecule: Synthetic oligonucleotide"
  source: /note="DNA/RNA"
  source: /note="5' tri-ethylene glycol (TEG)"
  modified_base (11)..(11): 5-methyl modified nucleotide
  modified_base (15)..(15): bicyclic nucleic acid (BNA)
aggaagauggcauut

SEQ ID NO: 14894 - DNA, 14 bp, Artificial Sequence
  source: /note="Description of Artificial Sequence: Synthetic oligonucleotide"
  source: /note="Description of Combined DNA/RNA Molecule: Synthetic oligonucleotide"
  source: /note="DNA/RNA"
  source: /note="5' tri-ethylene glycol (TEG)"
  modified_base (11)..(11): 5-methyl modified nucleotide
  modified_base (14)..(14): bicyclic nucleic acid (BNA)
aggaagauggcaut

SEQ ID NO: 14895 - DNA, 13 bp, Artificial Sequence
  source: /note="Description of Artificial Sequence: Synthetic oligonucleotide"
  source: /note="Description of Combined DNA/RNA Molecule: Synthetic oligonucleotide"
  source: /note="DNA/RNA"
  source: /note="5' tri-ethylene glycol (TEG)"
  modified_base (11)..(11): 5-methyl modified nucleotide
  modified_base (13)..(13): bicyclic nucleic acid (BNA)
aggaagauggcat

SEQ ID NO: 14896 - RNA, 12 nt, Artificial Sequence
  source: /note="Description of Artificial Sequence: Synthetic oligonucleotide"
  source: /note="RNA"
  source: /note="5' tri-ethylene glycol (TEG)"
  modified_base (11)..(11): 5-methyl modified nucleotide
  modified_base (12)..(12): bicyclic nucleic acid (BNA)
aggaagauggca

SEQ ID NO: 14897 - RNA, 10 nt, Artificial Sequence
  source: /note="Description of Artificial Sequence: Synthetic oligonucleotide"
  source: /note="RNA"
  source: /note="5' tri-ethylene glycol (TEG)"
  modified_base (10)..(10): bicyclic nucleic acid (BNA)
aggaagaugg

SEQ ID NO: 14898 - RNA, 9 nt, Artificial Sequence
  source: /note="Description of Artificial Sequence: Synthetic oligonucleotide"
  source: /note="RNA"
  source: /note="5' tri-ethylene glycol (TEG)"
  modified_base (9)..(9): bicyclic nucleic acid (BNA)
aggaagaug

SEQ ID NO: 14899 - DNA, 8 bp, Artificial Sequence
  source: /note="Description of Artificial Sequence: Synthetic oligonucleotide"
  source: /note="DNA/RNA"
  source: /note="5' tri-ethylene glycol (TEG)"
  modified_base (8)..(8): bicyclic nucleic acid (BNA)
aggaagat

SEQ ID NO: 14900 - RNA, 18 nt, Artificial Sequence
  source: /note="Description of Artificial Sequence: Synthetic oligonucleotide"
  source: /note="RNA"
  source: /note="5' tri-ethylene glycol (TEG)"
  modified_base (10)..(10): 5-methyl modified nucleotide
  modified_base (15)..(15): 5-methyl modified nucleotide
  modified_base (18)..(18): bicyclic nucleic acid (BNA)
ggaagauggcauuucuag

SEQ ID NO: 14901 - RNA, 17 nt, Artificial Sequence
  source: /note="Description of Artificial Sequence: Synthetic oligonucleotide"
  source: /note="RNA"
  source: /note="5' tri-ethylene glycol (TEG)"
  modified_base (10)..(10): 5-methyl modified nucleotide
  modified_base (15)..(15): 5-methyl modified nucleotide
  modified_base (17)..(17): bicyclic nucleic acid (BNA)
ggaagauggcauuucua

SEQ ID NO: 14902 - DNA, 16 bp, Artificial Sequence
  source: /note="Description of Artificial Sequence: Synthetic oligonucleotide"
  source: /note="Description of Combined DNA/RNA Molecule: Synthetic oligonucleotide"
  source: /note="DNA/RNA"
  source: /note="5' tri-ethylene glycol (TEG)"
  modified_base (10)..(10): 5-methyl modified nucleotide
  modified_base (15)..(15): 5-methyl modified nucleotide
  modified_base (16)..(16): bicyclic nucleic acid (BNA)
ggaagauggcauuuct

SEQ ID NO: 14903 - RNA, 15 nt, Artificial Sequence
  source: /note="Description of Artificial Sequence: Synthetic oligonucleotide"
  source: /note="RNA"
  source: /note="5' tri-ethylene glycol (TEG)"
  modified_base (10)..(10): 5-methyl modified nucleotide
  modified_base (15)..(15): 5-methyl bicyclic nucleic acid
ggaagauggcauuuc

SEQ ID NO: 14904 - DNA, 14 bp, Artificial Sequence
  source: /note="Description of Artificial Sequence: Synthetic oligonucleotide"
  source: /note="Description of Combined DNA/RNA Molecule: Synthetic oligonucleotide"
  source: /note="DNA/RNA"
  source: /note="5' tri-ethylene glycol (TEG)"
  modified_base (10)..(10): 5-methyl modified nucleotide
  modified_base (14)..(14): bicyclic nucleic acid (BNA)
ggaagauggcauut

SEQ ID NO: 14905 - DNA, 13 bp, Artificial Sequence
  source: /note="Description of Artificial Sequence: Synthetic oligonucleotide"
  source: /note="Description of Combined DNA/RNA Molecule: Synthetic oligonucleotide"
  source: /note="DNA/RNA"
  source: /note="5' tri-ethylene glycol (TEG)"
  modified_base (10)..(10): 5-methyl modified nucleotide
  modified_base (13)..(13): bicyclic nucleic acid (BNA)
ggaagauggcaut

SEQ ID NO: 14906 - DNA, 12 bp, Artificial Sequence
  source: /note="Description of Artificial Sequence: Synthetic oligonucleotide"
  source: /note="Description of Combined DNA/RNA Molecule: Synthetic oligonucleotide"
  source: /note="DNA/RNA"
  source: /note="5' tri-ethylene glycol (TEG)"
  modified_base (10)..(10): 5-methyl modified nucleotide
  modified_base (12)..(12): bicyclic nucleic acid (BNA)
ggaagauggcat

SEQ ID NO: 14907 - RNA, 11 nt, Artificial Sequence
  source: /note="Description of Artificial Sequence: Synthetic oligonucleotide"
  source: /note="RNA"
  source: /note="5' tri-ethylene glycol (TEG)"
  modified_base (10)..(10): 5-methyl modified nucleotide
  modified_base (11)..(11): bicyclic nucleic acid (BNA)
ggaagauggca

SEQ ID NO: 14908 - RNA, 10 nt, Artificial Sequence
  source: /note="Description of Artificial Sequence: Synthetic oligonucleotide"
  source: /note="RNA"
  source: /note="5' tri-ethylene glycol (TEG)"
  modified_base (10)..(10): 5-methyl bicyclic nucleic acid
ggaagauggc

SEQ ID NO: 14909 - RNA, 8 nt, Artificial Sequence
  source: /note="Description of Artificial Sequence: Synthetic oligonucleotide"
  source: /note="RNA"
  source: /note="5' tri-ethylene glycol (TEG)"
  modified_base (8)..(8): bicyclic nucleic acid (BNA)
ggaagaug

SEQ ID NO: 14910 - RNA, 17 nt, Artificial Sequence
  source: /note="Description of Artificial Sequence: Synthetic oligonucleotide"
  source: /note="RNA"
  source: /note="5' tri-ethylene glycol (TEG)"
  modified_base (9)..(9): 5-methyl modified nucleotide
  modified_base (14)..(14): 5-methyl modified nucleotide
  modified_base (17)..(17): bicyclic nucleic acid (BNA)
gaagauggcauuucuag

SEQ ID NO: 14911 - RNA, 16 nt, Artificial Sequence
  source: /note="Description of Artificial Sequence: Synthetic oligonucleotide"
  source: /note="RNA"
  source: /note="5' tri-ethylene glycol (TEG)"
  modified_base (9)..(9): 5-methyl modified nucleotide
  modified_base (14)..(14): 5-methyl modified nucleotide
  modified_base (16)..(16): bicyclic nucleic acid (BNA)
gaagauggcauuucua

SEQ ID NO: 14912 - RNA, 14 nt, Artificial Sequence
  source: /note="Description of Artificial Sequence: Synthetic oligonucleotide"
  source: /note="RNA"
  source: /note="5' tri-ethylene glycol (TEG)"
  modified_base (9)..(9): 5-methyl modified nucleotide
  modified_base (14)..(14): 5-methyl bicyclic nucleic acid
gaagauggcauuuc

SEQ ID NO: 14913 - DNA, 13 bp, Artificial Sequence
  source: /note="Description of Artificial Sequence: Synthetic oligonucleotide"
  source: /note="Description of Combined DNA/RNA Molecule: Synthetic oligonucleotide"
  source: /note="DNA/RNA"
  source: /note="5' tri-ethylene glycol (TEG)"
  modified_base (9)..(9): 5-methyl modified nucleotide
  modified_base (13)..(13): bicyclic nucleic acid (BNA)
gaagauggcauut

SEQ ID NO: 14914 - DNA, 12 bp, Artificial Sequence
  source: /note="Description of Artificial Sequence: Synthetic oligonucleotide"
  source: /note="Description of Combined DNA/RNA Molecule: Synthetic oligonucleotide"
  source: /note="DNA/RNA"
  source: /note="5' tri-ethylene glycol (TEG)"
  modified_base (9)..(9): 5-methyl modified nucleotide
  modified_base (12)..(12): bicyclic nucleic acid (BNA)
gaagauggcaut

SEQ ID NO: 14915 - DNA, 11 bp, Artificial Sequence
  source: /note="Description of Artificial Sequence: Synthetic oligonucleotide"
  source: /note="Description of Combined DNA/RNA Molecule: Synthetic oligonucleotide"
  source: /note="DNA/RNA"
  source: /note="5' tri-ethylene glycol (TEG)"
  modified_base (9)..(9): 5-methyl modified nucleotide
  modified_base (11)..(11): bicyclic nucleic acid (BNA)
gaagauggcat

SEQ ID NO: 14916 - RNA, 10 nt, Artificial Sequence
  source: /note="Description of Artificial Sequence: Synthetic oligonucleotide"
  source: /note="RNA"
  source: /note="5' tri-ethylene glycol (TEG)"
  modified_base (9)..(9): 5-methyl modified nucleotide
  modified_base (10)..(10): bicyclic nucleic acid (BNA)
gaagauggca

SEQ ID NO: 14917 - RNA, 9 nt, Artificial Sequence
  source: /note="Description of Artificial Sequence: Synthetic oligonucleotide"
  source: /note="RNA"
  source: /note="5' tri-ethylene glycol (TEG)"
  modified_base (9)..(9): 5-methyl bicyclic nucleic acid
gaagauggc

SEQ ID NO: 14918 - RNA, 8 nt, Artificial Sequence
  source: /note="Description of Artificial Sequence: Synthetic oligonucleotide"
  source: /note="RNA"
  source: /note="5' tri-ethylene glycol (TEG)"
  modified_base (8)..(8): bicyclic nucleic acid (BNA)
gaagaugg

SEQ ID NO: 14919 - RNA, 16 nt, Artificial Sequence
  source: /note="Description of Artificial Sequence: Synthetic oligonucleotide"
  source: /note="RNA"
  source: /note="5' tri-ethylene glycol (TEG)"
  modified_base (8)..(8): 5-methyl modified nucleotide
  modified_base (13)..(13): 5-methyl modified nucleotide
  modified_base (16)..(16): bicyclic nucleic acid (BNA)
aagauggcauuucuag

SEQ ID NO: 14920 - RNA, 15 nt, Artificial Sequence
  source: /note="Description of Artificial Sequence: Synthetic oligonucleotide"
  source: /note="RNA"
  source: /note="5' tri-ethylene glycol (TEG)"
  modified_base (8)..(8): 5-methyl modified nucleotide
  modified_base (13)..(13): 5-methyl modified nucleotide
  modified_base (15)..(15): bicyclic nucleic acid (BNA)
aagauggcauuucua

SEQ ID NO: 14921 - DNA, 14 bp, Artificial Sequence
  source: /note="Description of Artificial Sequence: Synthetic oligonucleotide"
  source: /note="Description of Combined DNA/RNA Molecule: Synthetic oligonucleotide"
  source: /note="DNA/RNA"
  source: /note="5' tri-ethylene glycol (TEG)"
  modified_base (8)..(8): 5-methyl modified nucleotide
  modified_base (13)..(13): 5-methyl modified nucleotide
  modified_base (14)..(14): bicyclic nucleic acid (BNA)
aagauggcauuuct

SEQ ID NO: 14922 - RNA, 13 nt, Artificial Sequence
  source: /note="Description of Artificial Sequence: Synthetic oligonucleotide"
  source: /note="RNA"
  source: /note="5' tri-ethylene glycol (TEG)"
  modified_base (8)..(8): 5-methyl modified nucleotide
  modified_base (13)..(13): 5-methyl bicyclic nucleic acid
aagauggcauuuc

SEQ ID NO: 14923 - DNA, 12 bp, Artificial Sequence
  source: /note="Description of Artificial Sequence: Synthetic oligonucleotide"
  source: /note="Description of Combined DNA/RNA Molecule: Synthetic oligonucleotide"
  source: /note="DNA/RNA"
  source: /note="5' tri-ethylene glycol (TEG)"
  modified_base (8)..(8): 5-methyl modified nucleotide
  modified_base (12)..(12): bicyclic nucleic acid (BNA)
aagauggcauut

SEQ ID NO: 14924 - DNA, 11 bp, Artificial Sequence
  source: /note="Description of Artificial Sequence: Synthetic oligonucleotide"
  source: /note="Description of Combined DNA/RNA Molecule: Synthetic oligonucleotide"
  source: /note="DNA/RNA"
  source: /note="5' tri-ethylene glycol (TEG)"
  modified_base (8)..(8): 5-methyl modified nucleotide
  modified_base (11)..(11): bicyclic nucleic acid (BNA)
aagauggcaut

SEQ ID NO: 14925 - DNA, 10 bp, Artificial Sequence
  source: /note="Description of Artificial Sequence: Synthetic oligonucleotide"
  source: /note="Description of Combined DNA/RNA Molecule: Synthetic oligonucleotide"
  source: /note="DNA/RNA"
  source: /note="5' tri-ethylene glycol (TEG)"
  modified_base (8)..(8): 5-methyl modified nucleotide
  modified_base (10)..(10): bicyclic nucleic acid (BNA)
aagauggcat

SEQ ID NO: 14926 - RNA, 9 nt, Artificial Sequence
  source: /note="Description of Artificial Sequence: Synthetic oligonucleotide"
  source: /note="RNA"
  source: /note="5' tri-ethylene glycol (TEG)"
  modified_base (8)..(8): 5-methyl modified nucleotide
  modified_base (9)..(9): bicyclic nucleic acid (BNA)
aagauggca

SEQ ID NO: 14927 - RNA, 8 nt, Artificial Sequence
  source: /note="Description of Artificial Sequence: Synthetic oligonucleotide"
  source: /note="RNA"
  source: /note="5' tri-ethylene glycol (TEG)"
  modified_base (8)..(8): 5-methyl bicyclic nucleic acid
aagauggc

SEQ ID NO: 14928 - RNA, 15 nt, Artificial Sequence
  source: /note="Description of Artificial Sequence: Synthetic oligonucleotide"
  source: /note="RNA"
  source: /note="5' tri-ethylene glycol (TEG)"
  modified_base (7)..(7): 5-methyl modified nucleotide
  modified_base (12)..(12): 5-methyl modified nucleotide
  modified_base (15)..(15): bicyclic nucleic acid (BNA)
agauggcauuucuag

SEQ ID NO: 14929 - RNA, 14 nt, Artificial Sequence
  source: /note="Description of Artificial Sequence: Synthetic oligonucleotide"
  source: /note="RNA"
  source: /note="5' tri-ethylene glycol (TEG)"
  modified_base (7)..(7): 5-methyl modified nucleotide
  modified_base (12)..(12): 5-methyl modified nucleotide
  modified_base (14)..(14): bicyclic nucleic acid (BNA)
agauggcauuucua

SEQ ID NO: 14930 - DNA, 13 bp, Artificial Sequence
  source: /note="Description of Artificial Sequence: Synthetic oligonucleotide"
  source: /note="Description of Combined DNA/RNA Molecule: Synthetic oligonucleotide"
  source: /note="DNA/RNA"
  source: /note="5' tri-ethylene glycol (TEG)"
  modified_base (7)..(7): 5-methyl modified nucleotide
  modified_base (12)..(12): 5-methyl modified nucleotide
  modified_base (13)..(13): bicyclic nucleic acid (BNA)
agauggcauuuct

SEQ ID NO: 14931 - RNA, 12 nt, Artificial Sequence
  source: /note="Description of Artificial Sequence: Synthetic oligonucleotide"
  source: /note="RNA"
  source: /note="5' tri-ethylene glycol (TEG)"
  modified_base (7)..(7): 5-methyl modified nucleotide
  modified_base (12)..(12): 5-methyl bicyclic nucleic acid
agauggcauuuc

SEQ ID NO: 14932 - DNA, 11 bp, Artificial Sequence
  source: /note="Description of Artificial Sequence: Synthetic oligonucleotide"
  source: /note="Description of Combined DNA/RNA Molecule: Synthetic oligonucleotide"
  source: /note="DNA/RNA"
  source: /note="5' tri-ethylene glycol (TEG)"
  modified_base (7)..(7): 5-methyl modified nucleotide
  modified_base (11)..(11): bicyclic nucleic acid (BNA)
agauggcauut

SEQ ID NO: 14933 - DNA, 10 bp, Artificial Sequence
  source: /note="Description of Artificial Sequence: Synthetic oligonucleotide"
  source: /note="Description of Combined DNA/RNA Molecule: Synthetic oligonucleotide"
  source: /note="DNA/RNA"
  source: /note="5' tri-ethylene glycol (TEG)"
  modified_base (7)..(7): 5-methyl modified nucleotide
  modified_base (10)..(10): bicyclic nucleic acid (BNA)
agauggcaut

SEQ ID NO: 14934 - DNA, 9 bp, Artificial Sequence
  source: /note="Description of Artificial Sequence: Synthetic oligonucleotide"
  source: /note="Description of Combined DNA/RNA Molecule: Synthetic oligonucleotide"
  source: /note="DNA/RNA"
  source: /note="5' tri-ethylene glycol (TEG)"
  modified_base (7)..(7): 5-methyl modified nucleotide
  modified_base (9)..(9): bicyclic nucleic acid (BNA)
agauggcat

SEQ ID NO: 14935 - RNA, 8 nt, Artificial Sequence
  source: /note="Description of Artificial Sequence: Synthetic oligonucleotide"
  source: /note="RNA"
  source: /note="5' tri-ethylene glycol (TEG)"
  modified_base (7)..(7): 5-methyl modified nucleotide
  modified_base (8)..(8): bicyclic nucleic acid (BNA)
agauggca

SEQ ID NO: 14936 - RNA, 30 nt, Artificial Sequence; identical to SEQ ID NO: 284
  source: /note="Description of Artificial Sequence: Synthetic oligonucleotide"
  source: /note="RNA"
  source: /note="5' tri-ethylene glycol (TEG)"
  modified_base (1)..(1): 5-methyl modified nucleotide
  modified_base (3)..(3): 5-methyl modified nucleotide
  modified_base (4)..(4): 5-methyl modified nucleotide
  modified_base (7)..(7): 5-methyl modified nucleotide
  modified_base (10)..(10): 5-methyl modified nucleotide
  modified_base (22)..(22): 5-methyl modified nucleotide
  modified_base (27)..(27): 5-methyl modified nucleotide
  modified_base (30)..(30): bicyclic nucleic acid (BNA)

SEQ ID NO: 14937 - RNA, 29 nt, Artificial Sequence
  source: /note="Description of Artificial Sequence: Synthetic oligonucleotide"
  source: /note="RNA"
  source: /note="5' tri-ethylene glycol (TEG)"
  modified_base (1)..(1): 5-methyl modified nucleotide
  modified_base (3)..(3): 5-methyl modified nucleotide
  modified_base (4)..(4): 5-methyl modified nucleotide
  modified_base (7)..(7): 5-methyl modified nucleotide
  modified_base (10)..(10): 5-methyl modified nucleotide
  modified_base (22)..(22): 5-methyl modified nucleotide
  modified_base (27)..(27): 5-methyl modified nucleotide
  modified_base (29)..(29): bicyclic nucleic acid (BNA)
cuccaacaucaaggaagauggcauuucua

SEQ ID NO: 14938 - DNA, 28 bp, Artificial Sequence
  source: /note="Description of Artificial Sequence: Synthetic oligonucleotide"
  source: /note="Description of Combined DNA/RNA Molecule: Synthetic oligonucleotide"
  source: /note="DNA/RNA"
  source: /note="5' tri-ethylene glycol (TEG)"
  modified_base (1)..(1): 5-methyl modified nucleotide
  modified_base (3)..(3): 5-methyl modified nucleotide
  modified_base (4)..(4): 5-methyl modified nucleotide
  modified_base (7)..(7): 5-methyl modified nucleotide
  modified_base (10)..(10): 5-methyl modified nucleotide
  modified_base (22)..(22): 5-methyl modified nucleotide
  modified_base (27)..(27): 5-methyl modified nucleotide
  modified_base (28)..(28): bicyclic nucleic acid (BNA)
cuccaacaucaaggaagauggcauuuct

SEQ ID NO: 14939 - RNA, 27 nt, Artificial Sequence
  source: /note="Description of Artificial Sequence: Synthetic oligonucleotide"
  source: /note="RNA"
  source: /note="5' tri-ethylene glycol (TEG)"
  modified_base (1)..(1): 5-methyl modified nucleotide
  modified_base (3)..(3): 5-methyl modified nucleotide
  modified_base (4)..(4): 5-methyl modified nucleotide
  modified_base (7)..(7): 5-methyl modified nucleotide
  modified_base (10)..(10): 5-methyl modified nucleotide
  modified_base (22)..(22): 5-methyl modified nucleotide
  modified_base (27)..(27): 5-methyl bicyclic nucleic acid
cuccaacaucaaggaagauggcauuuc

SEQ ID NO: 14940 - DNA, 26 bp, Artificial Sequence
  source: /note="Description of Artificial Sequence: Synthetic oligonucleotide"
  source: /note="Description of Combined DNA/RNA Molecule: Synthetic oligonucleotide"
  source: /note="DNA/RNA"
  source: /note="5' tri-ethylene glycol (TEG)"
  modified_base (1)..(1): 5-methyl modified nucleotide
  modified_base (3)..(3): 5-methyl modified nucleotide
  modified_base (4)..(4): 5-methyl modified nucleotide
  modified_base (7)..(7): 5-methyl modified nucleotide
  modified_base (10)..(10): 5-methyl modified nucleotide
  modified_base (22)..(22): 5-methyl modified nucleotide
  modified_base (26)..(26): bicyclic nucleic acid (BNA)
cuccaacaucaaggaagauggcauut

SEQ ID NO: 14941 - DNA, 25 bp, Artificial Sequence
  source: /note="Description of Artificial Sequence: Synthetic oligonucleotide"
  source: /note="Description of Combined DNA/RNA Molecule: Synthetic oligonucleotide"
  source: /note="DNA/RNA"
  source: /note="5' tri-ethylene glycol (TEG)"
  modified_base (1)..(1): 5-methyl modified nucleotide
  modified_base (3)..(3): 5-methyl modified nucleotide
  modified_base (4)..(4): 5-methyl modified nucleotide
  modified_base (7)..(7): 5-methyl modified nucleotide
  modified_base (10)..(10): 5-methyl modified nucleotide
  modified_base (22)..(22): 5-methyl modified nucleotide
  modified_base (25)..(25): bicyclic nucleic acid (BNA)
cuccaacaucaaggaagauggcaut

SEQ ID NO: 14942 - DNA, 24 bp, Artificial Sequence
  source: /note="Description of Artificial Sequence: Synthetic oligonucleotide"
  source: /note="Description of Combined DNA/RNA Molecule: Synthetic oligonucleotide"
  source: /note="DNA/RNA"
  source: /note="5' tri-ethylene glycol (TEG)"
  modified_base (1)..(1): 5-methyl modified nucleotide
  modified_base (3)..(3): 5-methyl modified nucleotide
  modified_base (4)..(4): 5-methyl modified nucleotide
  modified_base (7)..(7): 5-methyl modified nucleotide
  modified_base (10)..(10): 5-methyl modified nucleotide
  modified_base (22)..(22): 5-methyl modified nucleotide
  modified_base (24)..(24): bicyclic nucleic acid (BNA)
cuccaacaucaaggaagauggcat

SEQ ID NO: 14943 - RNA, 23 nt, Artificial Sequence
  source: /note="Description of Artificial Sequence: Synthetic oligonucleotide"
  source: /note="RNA"
  source: /note="5' tri-ethylene glycol (TEG)"
  modified_base (1)..(1): 5-methyl modified nucleotide
  modified_base (3)..(3): 5-methyl modified nucleotide
  modified_base (4)..(4): 5-methyl modified nucleotide
  modified_base (7)..(7): 5-methyl modified nucleotide
  modified_base (10)..(10): 5-methyl modified nucleotide
  modified_base (22)..(22): 5-methyl modified nucleotide
  modified_base (23)..(23): bicyclic nucleic acid (BNA)
cuccaacaucaaggaagauggca

SEQ ID NO: 14944 - RNA, 22 nt, Artificial Sequence
  source: /note="Description of Artificial Sequence: Synthetic oligonucleotide"
  source: /note="RNA"
  source: /note="5' tri-ethylene glycol (TEG)"
  modified_base (1)..(1): 5-methyl modified nucleotide
  modified_base (3)..(3): 5-methyl modified nucleotide
  modified_base (4)..(4): 5-methyl modified nucleotide
  modified_base (7)..(7): 5-methyl modified nucleotide
  modified_base (10)..(10): 5-methyl modified nucleotide
  modified_base (22)..(22): 5-methyl bicyclic nucleic acid
cuccaacaucaaggaagauggc

SEQ ID NO: 14945 - RNA, 21 nt, Artificial Sequence
  source: /note="Description of Artificial Sequence: Synthetic oligonucleotide"
  source: /note="RNA"
  source: /note="5' tri-ethylene glycol (TEG)"
  modified_base (1)..(1): 5-methyl modified nucleotide
  modified_base (3)..(3): 5-methyl modified nucleotide
  modified_base (4)..(4): 5-methyl modified nucleotide
  modified_base (7)..(7): 5-methyl modified nucleotide
  modified_base (10)..(10): 5-methyl modified nucleotide
  modified_base (21)..(21): bicyclic nucleic acid (BNA)
cuccaacaucaaggaagaugg

SEQ ID NO: 14946 - RNA, 20 nt, Artificial Sequence
  source: /note="Description of Artificial Sequence: Synthetic oligonucleotide"
  source: /note="RNA"
  source: /note="5' tri-ethylene glycol (TEG)"
  modified_base (1)..(1): 5-methyl modified nucleotide
  modified_base (3)..(3): 5-methyl modified nucleotide
  modified_base (4)..(4): 5-methyl modified nucleotide
  modified_base (7)..(7): 5-methyl modified nucleotide
  modified_base (10)..(10): 5-methyl modified nucleotide
  modified_base (20)..(20): bicyclic nucleic acid (BNA)
cuccaacaucaaggaagaug

SEQ ID NO: 14947 - DNA, 19 bp, Artificial Sequence
  source: /note="Description of Artificial Sequence: Synthetic oligonucleotide"
  source: /note="Description of Combined DNA/RNA Molecule: Synthetic oligonucleotide"
  source: /note="DNA/RNA"
  source: /note="5' tri-ethylene glycol (TEG)"
  modified_base (1)..(1): 5-methyl modified nucleotide
  modified_base (3)..(3): 5-methyl modified nucleotide
  modified_base (4)..(4): 5-methyl modified nucleotide
  modified_base (7)..(7): 5-methyl modified nucleotide
  modified_base (10)..(10): 5-methyl modified nucleotide
  modified_base (19)..(19): bicyclic nucleic acid (BNA)
cuccaacaucaaggaagat

SEQ ID NO: 14948 - RNA, 18 nt, Artificial Sequence
  source: /note="Description of Artificial Sequence: Synthetic oligonucleotide"
  source: /note="RNA"
  source: /note="5' tri-ethylene glycol (TEG)"
  modified_base (1)..(1): 5-methyl modified nucleotide
  modified_base (3)..(3): 5-methyl modified nucleotide
  modified_base (4)..(4): 5-methyl modified nucleotide
  modified_base (7)..(7): 5-methyl modified nucleotide
  modified_base (10)..(10): 5-methyl modified nucleotide
  modified_base (18)..(18): bicyclic nucleic acid (BNA)
cuccaacaucaaggaaga

SEQ ID NO: 14949 - RNA, 17 nt, Artificial Sequence
  source: /note="Description of Artificial Sequence: Synthetic oligonucleotide"
  source: /note="RNA"
  source: /note="5' tri-ethylene glycol (TEG)"
  modified_base (1)..(1): 5-methyl modified nucleotide
  modified_base (3)..(3): 5-methyl modified nucleotide
  modified_base (4)..(4): 5-methyl modified nucleotide
  modified_base (7)..(7): 5-methyl modified nucleotide
  modified_base (10)..(10): 5-methyl modified nucleotide
  modified_base (17)..(17): bicyclic nucleic acid (BNA)
cuccaacaucaaggaag

SEQ ID NO: 14950 - RNA, 29 nt, Artificial Sequence
  source: /note="Description of Artificial Sequence: Synthetic oligonucleotide"
  source: /note="RNA"
  source: /note="5' tri-ethylene glycol (TEG)"
  modified_base (2)..(2): 5-methyl modified nucleotide
  modified_base (3)..(3): 5-methyl modified nucleotide
  modified_base (6)..(6): 5-methyl modified nucleotide
  modified_base (9)..(9): 5-methyl modified nucleotide
  modified_base (21)..(21): 5-methyl modified nucleotide
  modified_base (26)..(26): 5-methyl modified nucleotide
  modified_base (29)..(29): bicyclic nucleic acid (BNA)
uccaacaucaaggaagauggcauuucuag

SEQ ID NO: 14951 - RNA, 28 nt, Artificial Sequence
  source: /note="Description of Artificial Sequence: Synthetic oligonucleotide"
  source: /note="RNA"
  source: /note="5' tri-ethylene glycol (TEG)"
  modified_base (2)..(2): 5-methyl modified nucleotide
  modified_base (3)..(3): 5-methyl modified nucleotide
  modified_base (6)..(6): 5-methyl modified nucleotide
  modified_base (9)..(9): 5-methyl modified nucleotide
  modified_base (21)..(21): 5-methyl modified nucleotide
  modified_base (26)..(26): 5-methyl modified nucleotide
  modified_base (28)..(28): bicyclic nucleic acid (BNA)
uccaacaucaaggaagauggcauuucua

SEQ ID NO: 14952 - DNA, 27 bp, Artificial Sequence
  source: /note="Description of Artificial Sequence: Synthetic oligonucleotide"
  source: /note="Description of Combined DNA/RNA Molecule: Synthetic oligonucleotide"
  source: /note="DNA/RNA"
  source: /note="5' tri-ethylene glycol (TEG)"
  modified_base (2)..(2): 5-methyl modified nucleotide
  modified_base (3)..(3): 5-methyl modified nucleotide
  modified_base (6)..(6): 5-methyl modified nucleotide
  modified_base (9)..(9): 5-methyl modified nucleotide
  modified_base (21)..(21): 5-methyl modified nucleotide
  modified_base (26)..(26): 5-methyl modified nucleotide
  modified_base (27)..(27): bicyclic nucleic acid (BNA)
uccaacaucaaggaagauggcauuuct

SEQ ID NO: 14953 - RNA, 26 nt, Artificial Sequence
  source: /note="Description of Artificial Sequence: Synthetic oligonucleotide"
  source: /note="RNA"
  source: /note="5' tri-ethylene glycol (TEG)"
  modified_base (2)..(2): 5-methyl modified nucleotide
  modified_base (3)..(3): 5-methyl modified nucleotide
  modified_base (6)..(6): 5-methyl modified nucleotide
  modified_base (9)..(9): 5-methyl modified nucleotide
  modified_base (21)..(21): 5-methyl modified nucleotide
  modified_base (26)..(26): 5-methyl bicyclic nucleic acid
uccaacaucaaggaagauggcauuuc

SEQ ID NO: 14954 - DNA, 25 bp, Artificial Sequence
  source: /note="Description of Artificial Sequence: Synthetic oligonucleotide"
  source: /note="Description of Combined DNA/RNA Molecule: Synthetic oligonucleotide"
  source: /note="DNA/RNA"
  source: /note="5' tri-ethylene glycol (TEG)"
  modified_base (2)..(2): 5-methyl modified nucleotide
  modified_base (3)..(3): 5-methyl modified nucleotide
  modified_base (6)..(6): 5-methyl modified nucleotide
  modified_base (9)..(9): 5-methyl modified nucleotide
  modified_base (21)..(21): 5-methyl modified nucleotide
  modified_base (25)..(25): bicyclic nucleic acid (BNA)
uccaacaucaaggaagauggcauut

SEQ ID NO: 14955 - DNA, 24 bp, Artificial Sequence
  source: /note="Description of Artificial Sequence: Synthetic oligonucleotide"
  source: /note="Description of Combined DNA/RNA Molecule: Synthetic oligonucleotide"
  source: /note="DNA/RNA"
  source: /note="5' tri-ethylene glycol (TEG)"
  modified_base (2)..(2): 5-methyl modified nucleotide
  modified_base (3)..(3): 5-methyl modified nucleotide
  modified_base (6)..(6): 5-methyl modified nucleotide
  modified_base (9)..(9): 5-methyl modified nucleotide
  modified_base (21)..(21): 5-methyl modified nucleotide
  modified_base (24)..(24): bicyclic nucleic acid (BNA)
uccaacaucaaggaagauggcaut

SEQ ID NO: 14956 - DNA, 23 bp, Artificial Sequence
  source: /note="Description of Artificial Sequence: Synthetic oligonucleotide"
  source: /note="Description of Combined DNA/RNA Molecule: Synthetic oligonucleotide"
  source: /note="DNA/RNA"
  source: /note="5' tri-ethylene glycol (TEG)"
  modified_base (2)..(2): 5-methyl modified nucleotide
  modified_base (3)..(3): 5-methyl modified nucleotide
  modified_base (6)..(6): 5-methyl modified nucleotide
  modified_base (9)..(9): 5-methyl modified nucleotide
  modified_base (21)..(21): 5-methyl modified nucleotide
  modified_base (23)..(23): bicyclic nucleic acid (BNA)
uccaacaucaaggaagauggcat

SEQ ID NO: 14957 - RNA, 22 nt, Artificial Sequence
  source: /note="Description of Artificial Sequence: Synthetic oligonucleotide"
  source: /note="RNA"
  source: /note="5' tri-ethylene glycol (TEG)"
  modified_base (2)..(2): 5-methyl modified nucleotide
  modified_base (3)..(3): 5-methyl modified nucleotide
  modified_base (6)..(6): 5-methyl modified nucleotide
  modified_base (9)..(9): 5-methyl modified nucleotide
  modified_base (21)..(21): 5-methyl modified nucleotide
  modified_base (22)..(22): bicyclic nucleic acid (BNA)
uccaacaucaaggaagauggca

SEQ ID NO: 14958 - RNA, 21 nt, Artificial Sequence
  source: /note="Description of Artificial Sequence: Synthetic oligonucleotide"
  source: /note="RNA"
  source: /note="5' tri-ethylene glycol (TEG)"
  modified_base (2)..(2): 5-methyl modified nucleotide
  modified_base (3)..(3): 5-methyl modified nucleotide
  modified_base (6)..(6): 5-methyl modified nucleotide
  modified_base (9)..(9): 5-methyl modified nucleotide
  modified_base (21)..(21): 5-methyl bicyclic nucleic acid
uccaacaucaaggaagauggc

SEQ ID NO: 14959 - RNA, 20 nt, Artificial Sequence
  source: /note="Description of Artificial Sequence: Synthetic oligonucleotide"
  source: /note="RNA"
  source: /note="5' tri-ethylene glycol (TEG)"
  modified_base (2)..(2): 5-methyl modified nucleotide
  modified_base (3)..(3): 5-methyl modified nucleotide
  modified_base (6)..(6): 5-methyl modified nucleotide
  modified_base (9)..(9): 5-methyl modified nucleotide
  modified_base (20)..(20): bicyclic nucleic acid (BNA)
uccaacaucaaggaagaugg

SEQ ID NO: 14960 - RNA, 19 nt, Artificial Sequence
  source: /note="Description of Artificial Sequence: Synthetic oligonucleotide"
  source: /note="RNA"
  source: /note="5' tri-ethylene glycol (TEG)"
  modified_base (2)..(2): 5-methyl modified nucleotide
  modified_base (3)..(3): 5-methyl modified nucleotide
  modified_base (6)..(6): 5-methyl modified nucleotide
  modified_base (9)..(9): 5-methyl modified nucleotide
  modified_base (19)..(19): bicyclic nucleic acid (BNA)
uccaacaucaaggaagaug

SEQ ID NO: 14961 - DNA, 18 bp, Artificial Sequence
  source: /note="Description of Artificial Sequence: Synthetic oligonucleotide"
  source: /note="Description of Combined DNA/RNA Molecule: Synthetic oligonucleotide"
  source: /note="DNA/RNA"
  source: /note="5' tri-ethylene glycol (TEG)"
  modified_base (2)..(2): 5-methyl modified nucleotide
  modified_base (3)..(3): 5-methyl modified nucleotide
  modified_base (6)..(6): 5-methyl modified nucleotide
  modified_base (9)..(9): 5-methyl modified nucleotide
  modified_base (18)..(18): bicyclic nucleic acid (BNA)
uccaacaucaaggaagat

SEQ ID NO: 14962 - RNA, 17 nt, Artificial Sequence
  source: /note="Description of Artificial Sequence: Synthetic oligonucleotide"
  source: /note="RNA"
  source: /note="5' tri-ethylene glycol (TEG)"
  modified_base (2)..(2): 5-methyl modified nucleotide
  modified_base (3)..(3): 5-methyl modified nucleotide
  modified_base (6)..(6): 5-methyl modified nucleotide
  modified_base (9)..(9): 5-methyl modified nucleotide
  modified_base (17)..(17): bicyclic nucleic acid (BNA)
uccaacaucaaggaaga

SEQ ID NO: 14963 - RNA, 16 nt, Artificial Sequence
  source: /note="Description of Artificial Sequence: Synthetic oligonucleotide"
  source: /note="RNA"
  source: /note="5' tri-ethylene glycol (TEG)"
  modified_base (2)..(2): 5-methyl modified nucleotide
  modified_base (3)..(3): 5-methyl modified nucleotide
  modified_base (6)..(6): 5-methyl modified nucleotide
  modified_base (9)..(9): 5-methyl modified nucleotide
  modified_base (16)..(16): bicyclic nucleic acid (BNA)
uccaacaucaaggaag

SEQ ID NO: 14964 - RNA, 28 nt, Artificial Sequence
  source: /note="Description of Artificial Sequence: Synthetic oligonucleotide"
  source: /note="RNA"
  source: /note="5' tri-ethylene glycol (TEG)"
  modified_base (1)..(1): 5-methyl modified nucleotide
  modified_base (2)..(2): 5-methyl modified nucleotide
  modified_base (5)..(5): 5-methyl modified nucleotide
  modified_base (8)..(8): 5-methyl modified nucleotide
  modified_base (20)..(20): 5-methyl modified nucleotide
  modified_base (25)..(25): 5-methyl modified nucleotide
  modified_base (28)..(28): bicyclic nucleic acid (BNA)
ccaacaucaaggaagauggcauuucuag

SEQ ID NO: 14965 - RNA, 27 nt, Artificial Sequence
  source: /note="Description of Artificial Sequence: Synthetic oligonucleotide"
  source: /note="RNA"
  source: /note="5' tri-ethylene glycol (TEG)"
  modified_base (1)..(1): 5-methyl modified nucleotide
  modified_base (2)..(2): 5-methyl modified nucleotide
  modified_base (5)..(5): 5-methyl modified nucleotide
  modified_base (8)..(8): 5-methyl modified nucleotide
  modified_base (20)..(20): 5-methyl modified nucleotide
  modified_base (25)..(25): 5-methyl modified nucleotide
  modified_base (27)..(27): bicyclic nucleic acid (BNA)
ccaacaucaaggaagauggcauuucua

SEQ ID NO: 14966 - DNA, 26 bp, Artificial Sequence
  source: /note="Description of Artificial Sequence: Synthetic oligonucleotide"
  source: /note="Description of Combined DNA/RNA Molecule: Synthetic oligonucleotide"
  source: /note="DNA/RNA"
  source: /note="5' tri-ethylene glycol (TEG)"
  modified_base (1)..(1): 5-methyl modified nucleotide
  modified_base (2)..(2): 5-methyl modified nucleotide
  modified_base (5)..(5): 5-methyl modified nucleotide
  modified_base (8)..(8): 5-methyl modified nucleotide
  modified_base (20)..(20): 5-methyl modified nucleotide
  modified_base (25)..(25): 5-methyl modified nucleotide
  modified_base (26)..(26): bicyclic nucleic acid (BNA)
ccaacaucaaggaagauggcauuuct

SEQ ID NO: 14967 - RNA, 25 nt, Artificial Sequence
  source: /note="Description of Artificial Sequence: Synthetic oligonucleotide"
  source: /note="RNA"
  source: /note="5' tri-ethylene glycol (TEG)"
  modified_base (1)..(1): 5-methyl modified nucleotide
  modified_base (2)..(2): 5-methyl modified nucleotide
  modified_base (5)..(5): 5-methyl modified nucleotide
  modified_base (8)..(8): 5-methyl modified nucleotide
  modified_base (20)..(20): 5-methyl modified nucleotide
  modified_base (25)..(25): 5-methyl bicyclic nucleic acid
ccaacaucaaggaagauggcauuuc

SEQ ID NO: 14968 - DNA, 24 bp, Artificial Sequence
  source: /note="Description of Artificial Sequence: Synthetic oligonucleotide"
  source: /note="Description of Combined DNA/RNA Molecule: Synthetic oligonucleotide"
  source: /note="DNA/RNA"
  source: /note="5' tri-ethylene glycol (TEG)"
  modified_base (1)..(1): 5-methyl modified nucleotide
  modified_base (2)..(2): 5-methyl modified nucleotide
  modified_base (5)..(5): 5-methyl modified nucleotide
  modified_base (8)..(8): 5-methyl modified nucleotide
  modified_base (20)..(20): 5-methyl modified nucleotide
  modified_base (24)..(24): bicyclic nucleic acid (BNA)
ccaacaucaaggaagauggcauut

SEQ ID NO: 14969 - DNA, 23 bp, Artificial Sequence
  source: /note="Description of Artificial Sequence: Synthetic oligonucleotide"
  source: /note="Description of Combined DNA/RNA Molecule: Synthetic oligonucleotide"
  source: /note="DNA/RNA"
  source: /note="5' tri-ethylene glycol (TEG)"
  modified_base (1)..(1): 5-methyl modified nucleotide
  modified_base (2)..(2): 5-methyl modified nucleotide
  modified_base (5)..(5): 5-methyl modified nucleotide
  modified_base (8)..(8): 5-methyl modified nucleotide
  modified_base (20)..(20): 5-methyl modified nucleotide
  modified_base (23)..(23): bicyclic nucleic acid (BNA)
ccaacaucaaggaagauggcaut

SEQ ID NO: 14970 - DNA, 22 bp, Artificial Sequence
  source: /note="Description of Artificial Sequence: Synthetic oligonucleotide"
  source: /note="Description of Combined DNA/RNA Molecule: Synthetic oligonucleotide"
  source: /note="DNA/RNA"
  source: /note="5' tri-ethylene glycol (TEG)"
  modified_base (1)..(1): 5-methyl modified nucleotide
  modified_base (2)..(2): 5-methyl modified nucleotide
  modified_base (5)..(5): 5-methyl modified nucleotide
  modified_base (8)..(8): 5-methyl modified nucleotide
  modified_base (20)..(20): 5-methyl modified nucleotide
  modified_base (22)..(22): bicyclic nucleic acid (BNA)
ccaacaucaaggaagauggcat

SEQ ID NO: 14971 - RNA, 21 nt, Artificial Sequence
  source: /note="Description of Artificial Sequence: Synthetic oligonucleotide"
  source: /note="RNA"
  source: /note="5' tri-ethylene glycol (TEG)"
  modified_base (1)..(1): 5-methyl modified nucleotide
  modified_base (2)..(2): 5-methyl modified nucleotide
  modified_base (5)..(5): 5-methyl modified nucleotide
  modified_base (8)..(8): 5-methyl modified nucleotide
  modified_base (20)..(20): 5-methyl modified nucleotide
  modified_base (21)..(21): bicyclic nucleic acid (BNA)
ccaacaucaaggaagauggca

SEQ ID NO: 14972 - RNA, 20 nt, Artificial Sequence
  source: /note="Description of Artificial Sequence: Synthetic oligonucleotide"
  source: /note="RNA"
  source: /note="5' tri-ethylene glycol (TEG)"
  modified_base (1)..(1): 5-methyl modified nucleotide
  modified_base (2)..(2): 5-methyl modified nucleotide
  modified_base (5)..(5): 5-methyl modified nucleotide
  modified_base (8)..(8): 5-methyl modified nucleotide
  modified_base (20)..(20): 5-methyl bicyclic nucleic acid
ccaacaucaaggaagauggc

SEQ ID NO: 14973 - RNA, 19 nt, Artificial Sequence
  source: /note="Description of Artificial Sequence: Synthetic oligonucleotide"
  source: /note="RNA"
  source: /note="5' tri-ethylene glycol (TEG)"
  modified_base (1)..(1): 5-methyl modified nucleotide
  modified_base (2)..(2): 5-methyl modified nucleotide
  modified_base (5)..(5): 5-methyl modified nucleotide
  modified_base (8)..(8): 5-methyl modified nucleotide
  modified_base (19)..(19): bicyclic nucleic acid (BNA)
ccaacaucaaggaagaugg

SEQ ID NO: 14974 - RNA, 18 nt, Artificial Sequence
  source: /note="Description of Artificial Sequence: Synthetic oligonucleotide"
  source: /note="RNA"
  source: /note="5' tri-ethylene glycol (TEG)"
  modified_base (1)..(1): 5-methyl modified nucleotide
  modified_base (2)..(2): 5-methyl modified nucleotide
  modified_base (5)..(5): 5-methyl modified nucleotide
  modified_base (8)..(8): 5-methyl modified nucleotide
  modified_base (18)..(18): bicyclic nucleic acid (BNA)
ccaacaucaaggaagaug

SEQ ID NO: 14975 - DNA, 17 bp, Artificial Sequence
  source: /note="Description of Artificial Sequence: Synthetic oligonucleotide"
  source: /note="Description of Combined DNA/RNA Molecule: Synthetic oligonucleotide"
  source: /note="DNA/RNA"
  source: /note="5' tri-ethylene glycol (TEG)"
  modified_base (1)..(1): 5-methyl modified nucleotide
  modified_base (2)..(2): 5-methyl modified nucleotide
  modified_base (5)..(5): 5-methyl modified nucleotide
  modified_base (8)..(8): 5-methyl modified nucleotide
  modified_base (17)..(17): bicyclic nucleic acid (BNA)
ccaacaucaaggaagat

SEQ ID NO: 14976 - RNA, 16 nt, Artificial Sequence
  source: /note="Description of Artificial Sequence: Synthetic oligonucleotide"
  source: /note="RNA"
  source: /note="5' tri-ethylene glycol (TEG)"
  modified_base (1)..(1): 5-methyl modified nucleotide
  modified_base (2)..(2): 5-methyl modified nucleotide
  modified_base (5)..(5): 5-methyl modified nucleotide
  modified_base (8)..(8): 5-methyl modified nucleotide
  modified_base (16)..(16): bicyclic nucleic acid (BNA)
ccaacaucaaggaaga

SEQ ID NO: 14977 - RNA, 15 nt, Artificial Sequence
  source: /note="Description of Artificial Sequence: Synthetic oligonucleotide"
  source: /note="RNA"
  source: /note="5' tri-ethylene glycol (TEG)"
  modified_base (1)..(1): 5-methyl modified nucleotide
  modified_base (2)..(2): 5-methyl modified nucleotide
  modified_base (5)..(5): 5-methyl modified nucleotide
  modified_base (8)..(8): 5-methyl modified nucleotide
  modified_base (15)..(15): bicyclic nucleic acid (BNA)
ccaacaucaaggaag

SEQ ID NO: 14978 - RNA, 27 nt, Artificial Sequence
  source: /note="Description of Artificial Sequence: Synthetic oligonucleotide"
  source: /note="RNA"
  source: /note="5' tri-ethylene glycol (TEG)"
  modified_base (1)..(1): 5-methyl modified nucleotide
  modified_base (4)..(4): 5-methyl modified nucleotide
  modified_base (7)..(7): 5-methyl modified nucleotide
  modified_base (19)..(19): 5-methyl modified nucleotide
  modified_base (24)..(24): 5-methyl modified nucleotide
  modified_base (27)..(27): bicyclic nucleic acid (BNA)
caacaucaaggaagauggcauuucuag

SEQ ID NO: 14979 - RNA, 26 nt, Artificial Sequence
  source: /note="Description of Artificial Sequence: Synthetic oligonucleotide"
  source: /note="RNA"
  source: /note="5' tri-ethylene glycol (TEG)"
  modified_base (1)..(1): 5-methyl modified nucleotide
  modified_base (4)..(4): 5-methyl modified nucleotide
  modified_base (7)..(7): 5-methyl modified nucleotide
  modified_base (19)..(19): 5-methyl modified nucleotide
  modified_base (24)..(24): 5-methyl modified nucleotide
  modified_base (26)..(26): bicyclic nucleic acid (BNA)
caacaucaaggaagauggcauuucua

SEQ ID NO: 14980 - DNA, 25 bp, Artificial Sequence
  source: /note="Description of Artificial Sequence: Synthetic oligonucleotide"
  source: /note="Description of Combined DNA/RNA Molecule: Synthetic oligonucleotide"
  source: /note="DNA/RNA"
  source: /note="5' tri-ethylene glycol (TEG)"
  modified_base (1)..(1): 5-methyl modified nucleotide
  modified_base (4)..(4): 5-methyl modified nucleotide
  modified_base (7)..(7): 5-methyl modified nucleotide
  modified_base (19)..(19): 5-methyl modified nucleotide
  modified_base (24)..(24): 5-methyl modified nucleotide
  modified_base (25)..(25): bicyclic nucleic acid (BNA)
caacaucaaggaagauggcauuuct

SEQ ID NO: 14981 - RNA, 24 nt, Artificial Sequence
  source: /note="Description of Artificial Sequence: Synthetic oligonucleotide"
  source: /note="RNA"
  source: /note="5' tri-ethylene glycol (TEG)"
  modified_base (1)..(1): 5-methyl modified nucleotide
  modified_base (4)..(4): 5-methyl modified nucleotide
  modified_base (7)..(7): 5-methyl modified nucleotide
  modified_base (19)..(19): 5-methyl modified nucleotide
  modified_base (24)..(24): 5-methyl bicyclic nucleic acid
caacaucaaggaagauggcauuuc

SEQ ID NO: 14982 - DNA, 23 bp, Artificial Sequence
  source: /note="Description of Artificial Sequence: Synthetic oligonucleotide"
  source: /note="Description of Combined DNA/RNA Molecule: Synthetic oligonucleotide"
  source: /note="DNA/RNA"
  source: /note="5' tri-ethylene glycol (TEG)"
  modified_base (1)..(1): 5-methyl modified nucleotide
  modified_base (4)..(4): 5-methyl modified nucleotide
  modified_base (7)..(7): 5-methyl modified nucleotide
  modified_base (19)..(19): 5-methyl modified nucleotide
  modified_base (23)..(23): bicyclic nucleic acid (BNA)
caacaucaaggaagauggcauut

SEQ ID NO: 14983 - DNA, 22 bp, Artificial Sequence
  source: /note="Description of Artificial Sequence: Synthetic oligonucleotide"
  source: /note="Description of Combined DNA/RNA Molecule: Synthetic oligonucleotide"
  source: /note="DNA/RNA"
  source: /note="5' tri-ethylene glycol (TEG)"
  modified_base (1)..(1): 5-methyl modified nucleotide
  modified_base (4)..(4): 5-methyl modified nucleotide
  modified_base (7)..(7): 5-methyl modified nucleotide
  modified_base (19)..(19): 5-methyl modified nucleotide
  modified_base (22)..(22): bicyclic nucleic acid (BNA)
caacaucaaggaagauggcaut

SEQ ID NO: 14984 - DNA, 21 bp, Artificial Sequence
  source: /note="Description of Artificial Sequence: Synthetic oligonucleotide"
  source: /note="Description of Combined DNA/RNA Molecule: Synthetic oligonucleotide"
  source: /note="DNA/RNA"
  source: /note="5' tri-ethylene glycol (TEG)"
  modified_base (1)..(1): 5-methyl modified nucleotide
  modified_base (4)..(4): 5-methyl modified nucleotide
  modified_base (7)..(7): 5-methyl modified nucleotide
  modified_base (19)..(19): 5-methyl modified nucleotide
  modified_base (21)..(21): bicyclic nucleic acid (BNA)
caacaucaaggaagauggcat

SEQ ID NO: 14985 - RNA, 20 nt, Artificial Sequence
  source: /note="Description of Artificial Sequence: Synthetic oligonucleotide"
  source: /note="RNA"
  source: /note="5' tri-ethylene glycol (TEG)"
  modified_base (1)..(1): 5-methyl modified nucleotide
  modified_base (4)..(4): 5-methyl modified nucleotide
  modified_base (7)..(7): 5-methyl modified nucleotide
  modified_base (19)..(19): 5-methyl modified nucleotide
  modified_base (20)..(20): bicyclic nucleic acid (BNA)
caacaucaaggaagauggca

SEQ ID NO: 14986 - RNA, 19 nt, Artificial Sequence
  source: /note="Description of Artificial Sequence: Synthetic oligonucleotide"
  source: /note="RNA"
  source: /note="5' tri-ethylene glycol (TEG)"
  modified_base (1)..(1): 5-methyl modified nucleotide
  modified_base (4)..(4): 5-methyl modified nucleotide
  modified_base (7)..(7): 5-methyl modified nucleotide
  modified_base (19)..(19): 5-methyl bicyclic nucleic acid
caacaucaaggaagauggc

SEQ ID NO: 14987 - RNA, 18 nt, Artificial Sequence
  source: /note="Description of Artificial Sequence: Synthetic oligonucleotide"
  source: /note="RNA"
  source: /note="5' tri-ethylene glycol (TEG)"
  modified_base (1)..(1): 5-methyl modified nucleotide
  modified_base (4)..(4): 5-methyl modified nucleotide
  modified_base (7)..(7): 5-methyl modified nucleotide
  modified_base (18)..(18): bicyclic nucleic acid (BNA)
caacaucaaggaagaugg

SEQ ID NO: 14988 - RNA, 17 nt, Artificial Sequence
  source: /note="Description of Artificial Sequence: Synthetic oligonucleotide"
  source: /note="RNA"
  source: /note="5' tri-ethylene glycol (TEG)"
  modified_base (1)..(1): 5-methyl modified nucleotide
  modified_base (4)..(4): 5-methyl modified nucleotide
  modified_base (7)..(7): 5-methyl modified nucleotide
  modified_base (17)..(17): bicyclic nucleic acid (BNA)
caacaucaaggaagaug

SEQ ID NO: 14989 - DNA, 16 bp, Artificial Sequence
  source: /note="Description of Artificial Sequence: Synthetic oligonucleotide"
  source: /note="Description of Combined DNA/RNA Molecule: Synthetic oligonucleotide"
  source: /note="DNA/RNA"
  source: /note="5' tri-ethylene glycol (TEG)"
  modified_base (1)..(1): 5-methyl modified nucleotide
  modified_base (4)..(4): 5-methyl modified nucleotide
  modified_base (7)..(7): 5-methyl modified nucleotide
  modified_base (16)..(16): bicyclic nucleic acid (BNA)
caacaucaaggaagat

SEQ ID NO: 14990 - RNA, 15 nt, Artificial Sequence
  source: /note="Description of Artificial Sequence: Synthetic oligonucleotide"
  source: /note="RNA"
  source: /note="5' tri-ethylene glycol (TEG)"
  modified_base (1)..(1): 5-methyl modified nucleotide
  modified_base (4)..(4): 5-methyl modified nucleotide
  modified_base (7)..(7): 5-methyl modified nucleotide
  modified_base (15)..(15): bicyclic nucleic acid (BNA)
caacaucaaggaaga

SEQ ID NO: 14991 - RNA, 14 nt, Artificial Sequence
  source: /note="Description of Artificial Sequence: Synthetic oligonucleotide"
  source: /note="RNA"
  source: /note="5' tri-ethylene glycol (TEG)"
  modified_base (1)..(1): 5-methyl modified nucleotide
  modified_base (4)..(4): 5-methyl modified nucleotide
  modified_base (7)..(7): 5-methyl modified nucleotide
  modified_base (14)..(14): bicyclic nucleic acid (BNA)
caacaucaaggaag

SEQ ID NO: 14992 - RNA, 26 nt, Artificial Sequence
  source: /note="Description of Artificial Sequence: Synthetic oligonucleotide"
  source: /note="RNA"
  source: /note="5' tri-ethylene glycol (TEG)"
  modified_base (3)..(3): 5-methyl modified nucleotide
  modified_base (6)..(6): 5-methyl modified nucleotide
  modified_base (18)..(18): 5-methyl modified nucleotide
  modified_base (23)..(23): 5-methyl modified nucleotide
  modified_base (26)..(26): bicyclic nucleic acid (BNA)
aacaucaaggaagauggcauuucuag

SEQ ID NO: 14993 - RNA, 25 nt, Artificial Sequence
  source: /note="Description of Artificial Sequence: Synthetic oligonucleotide"
  source: /note="RNA"
  source: /note="5' tri-ethylene glycol (TEG)"
  modified_base (3)..(3): 5-methyl modified nucleotide
  modified_base (6)..(6): 5-methyl modified nucleotide
  modified_base (18)..(18): 5-methyl modified nucleotide
  modified_base (23)..(23): 5-methyl modified nucleotide
  modified_base (25)..(25): bicyclic nucleic acid (BNA)
aacaucaaggaagauggcauuucua

SEQ ID NO: 14994 - DNA, 24 bp, Artificial Sequence
  source: /note="Description of Artificial Sequence: Synthetic oligonucleotide"
  source: /note="Description of Combined DNA/RNA Molecule: Synthetic oligonucleotide"
  source: /note="DNA/RNA"
  source: /note="5' tri-ethylene glycol (TEG)"
  modified_base (3)..(3): 5-methyl modified nucleotide
  modified_base (6)..(6): 5-methyl modified nucleotide
  modified_base (18)..(18): 5-methyl modified nucleotide
  modified_base (23)..(23): 5-methyl modified nucleotide
  modified_base (24)..(24): bicyclic nucleic acid (BNA)
aacaucaaggaagauggcauuuct

SEQ ID NO: 14995 - RNA, 23 nt, Artificial Sequence
  source: /note="Description of Artificial Sequence: Synthetic oligonucleotide"
  source: /note="RNA"
  source: /note="5' tri-ethylene glycol (TEG)"
  modified_base (3)..(3): 5-methyl modified nucleotide
  modified_base (6)..(6): 5-methyl modified nucleotide
  modified_base (18)..(18): 5-methyl modified nucleotide
  modified_base (23)..(23): 5-methyl bicyclic nucleic acid
aacaucaaggaagauggcauuuc

SEQ ID NO: 14996 - DNA, 22 bp, Artificial Sequence
  source: /note="Description of Artificial Sequence: Synthetic oligonucleotide"
  source: /note="Description of Combined DNA/RNA Molecule: Synthetic oligonucleotide"
  source: /note="DNA/RNA"
  source: /note="5' tri-ethylene glycol (TEG)"
  modified_base (3)..(3): 5-methyl modified nucleotide
  modified_base (6)..(6): 5-methyl modified nucleotide
  modified_base (18)..(18): 5-methyl modified nucleotide
  modified_base (22)..(22): bicyclic nucleic acid (BNA)
aacaucaaggaagauggcauut

SEQ ID NO: 14997 - DNA, 21 bp, Artificial Sequence
  source: /note="Description of Artificial Sequence: Synthetic oligonucleotide"
  source: /note="Description of Combined DNA/RNA Molecule: Synthetic oligonucleotide"
  source: /note="DNA/RNA"
  source: /note="5' tri-ethylene glycol (TEG)"
  modified_base (3)..(3): 5-methyl modified nucleotide
  modified_base (6)..(6): 5-methyl modified nucleotide
  modified_base (18)..(18): 5-methyl modified nucleotide
  modified_base (21)..(21): bicyclic nucleic acid (BNA)
aacaucaaggaagauggcaut

SEQ ID NO: 14998 - DNA, 20 bp, Artificial Sequence
  source: /note="Description of Artificial Sequence: Synthetic oligonucleotide"
  source: /note="Description of Combined DNA/RNA Molecule: Synthetic oligonucleotide"
  source: /note="DNA/RNA"
  source: /note="5' tri-ethylene glycol (TEG)"
  modified_base (3)..(3): 5-methyl modified nucleotide
  modified_base (6)..(6): 5-methyl modified nucleotide
  modified_base (18)..(18): 5-methyl modified nucleotide
  modified_base (20)..(20): bicyclic nucleic acid (BNA)
aacaucaaggaagauggcat

SEQ ID NO: 14999 - RNA, 19 nt, Artificial Sequence
  source: /note="Description of Artificial Sequence: Synthetic oligonucleotide"
  source: /note="RNA"
  source: /note="5' tri-ethylene glycol (TEG)"
  modified_base (3)..(3): 5-methyl modified nucleotide
  modified_base (6)..(6): 5-methyl modified nucleotide
  modified_base (18)..(18): 5-methyl modified nucleotide
  modified_base (19)..(19): bicyclic nucleic acid (BNA)
aacaucaaggaagauggca

SEQ ID NO: 15000 - RNA, 18 nt, Artificial Sequence
  source: /note="Description of Artificial Sequence: Synthetic oligonucleotide"
  source: /note="RNA"
  source: /note="5' tri-ethylene glycol (TEG)"
  modified_base (3)..(3): 5-methyl modified nucleotide
  modified_base (6)..(6): 5-methyl modified nucleotide
  modified_base (18)..(18): 5-methyl bicyclic nucleic acid
aacaucaaggaagauggc

SEQ ID NO: 15001 - RNA, 17 nt, Artificial Sequence
  source: /note="Description of Artificial Sequence: Synthetic oligonucleotide"
  source: /note="RNA"
  source: /note="5' tri-ethylene glycol (TEG)"
  modified_base (3)..(3): 5-methyl modified nucleotide
  modified_base (6)..(6): 5-methyl modified nucleotide
  modified_base (17)..(17): bicyclic nucleic acid (BNA)
aacaucaaggaagaugg

SEQ ID NO: 15002 - RNA, 16 nt, Artificial Sequence
  source: /note="Description of Artificial Sequence: Synthetic oligonucleotide"
  source: /note="RNA"
  source: /note="5' tri-ethylene glycol (TEG)"
  modified_base (3)..(3): 5-methyl modified nucleotide
  modified_base (6)..(6): 5-methyl modified nucleotide
  modified_base (16)..(16): bicyclic nucleic acid (BNA)
aacaucaaggaagaug

SEQ ID NO: 15003 - DNA, 15 bp, Artificial Sequence
  source: /note="Description of Artificial Sequence: Synthetic oligonucleotide"
  source: /note="Description of Combined DNA/RNA Molecule: Synthetic oligonucleotide"
  source: /note="DNA/RNA"
  source: /note="5' tri-ethylene glycol (TEG)"
  modified_base (3)..(3): 5-methyl modified nucleotide
  modified_base (6)..(6): 5-methyl modified nucleotide
  modified_base (15)..(15): bicyclic nucleic acid (BNA)
aacaucaaggaagat

SEQ ID NO: 15004 - RNA, 14 nt, Artificial Sequence
  source: /note="Description of Artificial Sequence: Synthetic oligonucleotide"
  source: /note="RNA"
  source: /note="5' tri-ethylene glycol (TEG)"
  modified_base (3)..(3): 5-methyl modified nucleotide
  modified_base (6)..(6): 5-methyl modified nucleotide
  modified_base (14)..(14): bicyclic nucleic acid (BNA)
aacaucaaggaaga

SEQ ID NO: 15005 - RNA, 13 nt, Artificial Sequence
  source: /note="Description of Artificial Sequence: Synthetic oligonucleotide"
  source: /note="RNA"
  source: /note="5' tri-ethylene glycol (TEG)"
  modified_base (3)..(3): 5-methyl modified nucleotide
  modified_base (6)..(6): 5-methyl modified nucleotide
  modified_base (13)..(13): bicyclic nucleic acid (BNA)
aacaucaaggaag

SEQ ID NO: 15006 - RNA, 25 nt, Artificial Sequence
  source: /note="Description of Artificial Sequence: Synthetic oligonucleotide"
  source: /note="RNA"
  source: /note="5' tri-ethylene glycol (TEG)"
  modified_base (2)..(2): 5-methyl modified nucleotide
  modified_base (5)..(5): 5-methyl modified nucleotide
  modified_base (17)..(17): 5-methyl modified nucleotide
  modified_base (22)..(22): 5-methyl modified nucleotide
  modified_base (25)..(25): bicyclic nucleic acid (BNA)
acaucaaggaagauggcauuucuag

SEQ ID NO: 15007 - RNA, 24 nt, Artificial Sequence
  source: /note="Description of Artificial Sequence: Synthetic oligonucleotide"
  source: /note="RNA"
  source: /note="5' tri-ethylene glycol (TEG)"
  modified_base (2)..(2): 5-methyl modified nucleotide
  modified_base (5)..(5): 5-methyl modified nucleotide
  modified_base (17)..(17): 5-methyl modified nucleotide
  modified_base (22)..(22): 5-methyl modified nucleotide
  modified_base (24)..(24): bicyclic nucleic acid (BNA)
acaucaaggaagauggcauuucua

SEQ ID NO: 15008 - DNA, 23 bp, Artificial Sequence
  source: /note="Description of Artificial Sequence: Synthetic oligonucleotide"
  source: /note="Description of Combined DNA/RNA Molecule: Synthetic oligonucleotide"
  source: /note="DNA/RNA"
  source: /note="5' tri-ethylene glycol (TEG)"
  modified_base (2)..(2): 5-methyl modified nucleotide
  modified_base (5)..(5): 5-methyl modified nucleotide
  modified_base (17)..(17): 5-methyl modified nucleotide
  modified_base (22)..(22): 5-methyl modified nucleotide
  modified_base (23)..(23): bicyclic nucleic acid (BNA)
acaucaaggaagauggcauuuct

SEQ ID NO: 15009 - RNA, 22 nt, Artificial Sequence
  source: /note="Description of Artificial Sequence: Synthetic oligonucleotide"
  source: /note="RNA"
  source: /note="5' tri-ethylene glycol (TEG)"
  modified_base (2)..(2): 5-methyl modified nucleotide
  modified_base (5)..(5): 5-methyl modified nucleotide
  modified_base (17)..(17): 5-methyl modified nucleotide
  modified_base (22)..(22): 5-methyl bicyclic nucleic acid
acaucaaggaagauggcauuuc

SEQ ID NO: 15010 - DNA, 21 bp, Artificial Sequence
  source: /note="Description of Artificial Sequence: Synthetic oligonucleotide"
  source: /note="Description of Combined DNA/RNA Molecule: Synthetic oligonucleotide"
  source: /note="DNA/RNA"
  source: /note="5' tri-ethylene glycol (TEG)"
  modified_base (2)..(2): 5-methyl modified nucleotide
  modified_base (5)..(5): 5-methyl modified nucleotide
  modified_base (17)..(17): 5-methyl modified nucleotide
  modified_base (21)..(21): bicyclic nucleic acid (BNA)
acaucaaggaagauggcauut

SEQ ID NO: 15011 - DNA, 20 bp, Artificial Sequence
  source: /note="Description of Artificial Sequence: Synthetic oligonucleotide"
  source: /note="Description of Combined DNA/RNA Molecule: Synthetic oligonucleotide"
  source: /note="DNA/RNA"
  source: /note="5' tri-ethylene glycol (TEG)"
  modified_base (2)..(2): 5-methyl modified nucleotide
  modified_base (5)..(5): 5-methyl modified nucleotide
  modified_base (17)..(17): 5-methyl modified nucleotide
  modified_base (20)..(20): bicyclic nucleic acid (BNA)
acaucaaggaagauggcaut

SEQ ID NO: 15012 - DNA, 19 bp, Artificial Sequence
  source: /note="Description of Artificial Sequence: Synthetic oligonucleotide"
  source: /note="Description of Combined DNA/RNA Molecule: Synthetic oligonucleotide"
  source: /note="DNA/RNA"
  source: /note="5' tri-ethylene glycol (TEG)"
  modified_base (2)..(2): 5-methyl modified nucleotide
  modified_base (5)..(5): 5-methyl modified nucleotide
  modified_base (17)..(17): 5-methyl modified nucleotide
  modified_base (19)..(19): bicyclic nucleic acid (BNA)
acaucaaggaagauggcat

SEQ ID NO: 15013 - RNA, 18 nt, Artificial Sequence
  source: /note="Description of Artificial Sequence: Synthetic oligonucleotide"
  source: /note="RNA"
  source: /note="5' tri-ethylene glycol (TEG)"
  modified_base (2)..(2): 5-methyl modified nucleotide
  modified_base (5)..(5): 5-methyl modified nucleotide
  modified_base (17)..(17): 5-methyl modified nucleotide
  modified_base (18)..(18): bicyclic nucleic acid (BNA)
acaucaaggaagauggca

SEQ ID NO: 15014 - RNA, 17 nt, Artificial Sequence
  source: /note="Description of Artificial Sequence: Synthetic oligonucleotide"
  source: /note="RNA"
  source: /note="5' tri-ethylene glycol (TEG)"
  modified_base (2)..(2): 5-methyl modified nucleotide
  modified_base (5)..(5): 5-methyl modified nucleotide
  modified_base (17)..(17): 5-methyl bicyclic nucleic acid
acaucaaggaagauggc

SEQ ID NO: 15015 - RNA, 16 nt, Artificial Sequence
  source: /note="Description of Artificial Sequence: Synthetic oligonucleotide"
  source: /note="RNA"
  source: /note="5' tri-ethylene glycol (TEG)"
  modified_base (2)..(2): 5-methyl modified nucleotide
  modified_base (5)..(5): 5-methyl modified nucleotide
  modified_base (16)..(16): bicyclic nucleic acid (BNA)
acaucaaggaagaugg

SEQ ID NO: 15016 - RNA, 15 nt, Artificial Sequence
  source: /note="Description of Artificial Sequence: Synthetic oligonucleotide"
  source: /note="RNA"
  source: /note="5' tri-ethylene glycol (TEG)"
  modified_base (2)..(2): 5-methyl modified nucleotide
  modified_base (5)..(5): 5-methyl modified nucleotide
  modified_base (15)..(15): bicyclic nucleic acid (BNA)
acaucaaggaagaug

SEQ ID NO: 15017 - DNA, 14 bp, Artificial Sequence
  source: /note="Description of Artificial Sequence: Synthetic oligonucleotide"
  source: /note="Description of Combined DNA/RNA Molecule: Synthetic oligonucleotide"
  source: /note="DNA/RNA"
  source: /note="5' tri-ethylene glycol (TEG)"
  modified_base (2)..(2): 5-methyl modified nucleotide
  modified_base (5)..(5): 5-methyl modified nucleotide
  modified_base (14)..(14): bicyclic nucleic acid (BNA)
acaucaaggaagat

SEQ ID NO: 15018 - RNA, 13 nt, Artificial Sequence
  source: /note="Description of Artificial Sequence: Synthetic oligonucleotide"
  source: /note="RNA"
  source: /note="5' tri-ethylene glycol (TEG)"
  modified_base (2)..(2): 5-methyl modified nucleotide
  modified_base (5)..(5): 5-methyl modified nucleotide
  modified_base (13)..(13): bicyclic nucleic acid (BNA)
acaucaaggaaga

SEQ ID NO: 15019 - RNA, 12 nt, Artificial Sequence
  source: /note="Description of Artificial Sequence: Synthetic oligonucleotide"
  source: /note="RNA"
  source: /note="5' tri-ethylene glycol (TEG)"
  modified_base (2)..(2): 5-methyl modified nucleotide
  modified_base (5)..(5): 5-methyl modified nucleotide
  modified_base (12)..(12): bicyclic nucleic acid (BNA)
acaucaaggaag

SEQ ID NO: 15020 - RNA, 24 nt, Artificial Sequence
  source: /note="Description of Artificial Sequence: Synthetic oligonucleotide"
  source: /note="RNA"
  source: /note="5' tri-ethylene glycol (TEG)"
  modified_base (1)..(1): 5-methyl modified nucleotide
  modified_base (4)..(4): 5-methyl modified nucleotide
  modified_base (16)..(16): 5-methyl modified nucleotide
  modified_base (21)..(21): 5-methyl modified nucleotide
  modified_base (24)..(24): bicyclic nucleic acid (BNA)
caucaaggaagauggcauuucuag

SEQ ID NO: 15021 - RNA, 23 nt, Artificial Sequence
  source: /note="Description of Artificial Sequence: Synthetic oligonucleotide"
  source: /note="RNA"
  source: /note="5' tri-ethylene glycol (TEG)"
  modified_base (1)..(1): 5-methyl modified nucleotide
  modified_base (4)..(4): 5-methyl modified nucleotide
  modified_base (16)..(16): 5-methyl modified nucleotide
  modified_base (21)..(21): 5-methyl modified nucleotide
  modified_base (23)..(23): bicyclic nucleic acid (BNA)
caucaaggaagauggcauuucua

SEQ ID NO: 15022 - DNA, 22 bp, Artificial Sequence
  source: /note="Description of Artificial Sequence: Synthetic oligonucleotide"
  source: /note="Description of Combined DNA/RNA Molecule: Synthetic oligonucleotide"
  source: /note="DNA/RNA"
  source: /note="5' tri-ethylene glycol (TEG)"
  modified_base (1)..(1): 5-methyl modified nucleotide
  modified_base (4)..(4): 5-methyl modified nucleotide
  modified_base (16)..(16): 5-methyl modified nucleotide
  modified_base (21)..(21): 5-methyl modified nucleotide
  modified_base (22)..(22): bicyclic nucleic acid (BNA)
caucaaggaagauggcauuuct

SEQ ID NO: 15023 - RNA, 21 nt, Artificial Sequence
  source: /note="Description of Artificial Sequence: Synthetic oligonucleotide"
  source: /note="RNA"
  source: /note="5' tri-ethylene glycol (TEG)"
  modified_base (1)..(1): 5-methyl modified nucleotide
  modified_base (4)..(4): 5-methyl modified nucleotide
  modified_base (16)..(16): 5-methyl modified nucleotide
  modified_base (21)..(21): 5-methyl bicyclic nucleic acid
caucaaggaagauggcauuuc

SEQ ID NO: 15024 - DNA, 20 bp, Artificial Sequence
  source: /note="Description of Artificial Sequence: Synthetic oligonucleotide"
  source: /note="Description of Combined DNA/RNA Molecule: Synthetic oligonucleotide"
  source: /note="DNA/RNA"
  source: /note="5' tri-ethylene glycol (TEG)"
  modified_base (1)..(1): 5-methyl modified nucleotide
  modified_base (4)..(4): 5-methyl modified nucleotide
  modified_base (16)..(16): 5-methyl modified nucleotide
  modified_base (20)..(20): bicyclic nucleic acid (BNA)
caucaaggaagauggcauut

SEQ ID NO: 15025 - DNA, 19 bp, Artificial Sequence
  source: /note="Description of Artificial Sequence: Synthetic oligonucleotide"
  source: /note="Description of Combined DNA/RNA Molecule: Synthetic oligonucleotide"
  source: /note="DNA/RNA"
  source: /note="5' tri-ethylene glycol (TEG)"
  modified_base (1)..(1): 5-methyl modified nucleotide
  modified_base (4)..(4): 5-methyl modified nucleotide
  modified_base (16)..(16): 5-methyl modified nucleotide
  modified_base (19)..(19): bicyclic nucleic acid (BNA)
caucaaggaagauggcaut

SEQ ID NO: 15026 - DNA, 18 bp, Artificial Sequence
  source: /note="Description of Artificial Sequence: Synthetic oligonucleotide"
  source: /note="Description of Combined DNA/RNA Molecule: Synthetic oligonucleotide"
  source: /note="DNA/RNA"
  source: /note="5' tri-ethylene glycol (TEG)"
  modified_base (1)..(1): 5-methyl modified nucleotide
  modified_base (4)..(4): 5-methyl modified nucleotide
  modified_base (16)..(16): 5-methyl modified nucleotide
  modified_base (18)..(18): bicyclic nucleic acid (BNA)
caucaaggaagauggcat

SEQ ID NO: 15027 - RNA, 17 nt, Artificial Sequence
  source: /note="Description of Artificial Sequence: Synthetic oligonucleotide"
  source: /note="RNA"
  source: /note="5' tri-ethylene glycol (TEG)"
  modified_base (1)..(1): 5-methyl modified nucleotide
  modified_base (4)..(4): 5-methyl modified nucleotide
  modified_base (16)..(16): 5-methyl modified nucleotide
  modified_base (17)..(17): bicyclic nucleic acid (BNA)
caucaaggaagauggca

SEQ ID NO: 15028 - RNA, 16 nt, Artificial Sequence
  source: /note="Description of Artificial Sequence: Synthetic oligonucleotide"
  source: /note="RNA"
  source: /note="5' tri-ethylene glycol (TEG)"
  modified_base (1)..(1): 5-methyl modified nucleotide
  modified_base (4)..(4): 5-methyl modified nucleotide
  modified_base (16)..(16): 5-methyl bicyclic nucleic acid
caucaaggaagauggc

SEQ ID NO: 15029 - RNA, 15 nt, Artificial Sequence
  source: /note="Description of Artificial Sequence: Synthetic oligonucleotide"
  source: /note="RNA"
  source: /note="5' tri-ethylene glycol (TEG)"
  modified_base (1)..(1): 5-methyl modified nucleotide
  modified_base (4)..(4): 5-methyl modified nucleotide
  modified_base (15)..(15): bicyclic nucleic acid (BNA)
caucaaggaagaugg

SEQ ID NO: 15030 - RNA, 14 nt, Artificial Sequence
  source: /note="Description of Artificial Sequence: Synthetic oligonucleotide"
  source: /note="RNA"
  source: /note="5' tri-ethylene glycol (TEG)"
  modified_base (1)..(1): 5-methyl modified nucleotide
  modified_base (4)..(4): 5-methyl modified nucleotide
  modified_base (14)..(14): bicyclic nucleic acid (BNA)
caucaaggaagaug

SEQ ID NO: 15031 - DNA, 13 bp, Artificial Sequence
  source: /note="Description of Artificial Sequence: Synthetic oligonucleotide"
  source: /note="Description of Combined DNA/RNA Molecule: Synthetic oligonucleotide"
  source: /note="DNA/RNA"
  source: /note="5' tri-ethylene glycol (TEG)"
  modified_base (1)..(1): 5-methyl modified nucleotide
  modified_base (4)..(4): 5-methyl modified nucleotide
  modified_base (13)..(13): bicyclic nucleic acid (BNA)
caucaaggaagat

SEQ ID NO: 15032 - RNA, 12 nt, Artificial Sequence
  source: /note="Description of Artificial Sequence: Synthetic oligonucleotide"
  source: /note="RNA"
  source: /note="5' tri-ethylene glycol (TEG)"
  modified_base (1)..(1): 5-methyl modified nucleotide
  modified_base (4)..(4): 5-methyl modified nucleotide
  modified_base (12)..(12): bicyclic nucleic acid (BNA)
caucaaggaaga

SEQ ID NO: 15033 - RNA, 11 nt, Artificial Sequence
  source: /note="Description of Artificial Sequence: Synthetic oligonucleotide"
  source: /note="RNA"
  source: /note="5' tri-ethylene glycol (TEG)"
  modified_base (1)..(1): 5-methyl modified nucleotide
  modified_base (4)..(4): 5-methyl modified nucleotide
  modified_base (11)..(11): bicyclic nucleic acid (BNA)
caucaaggaag

SEQ ID NO: 15034 - RNA, 23 nt, Artificial Sequence
  source: /note="Description of Artificial Sequence: Synthetic oligonucleotide"
  source: /note="RNA"
  source: /note="5' tri-ethylene glycol (TEG)"
  modified_base (3)..(3): 5-methyl modified nucleotide
  modified_base (15)..(15): 5-methyl modified nucleotide
  modified_base (20)..(20): 5-methyl modified nucleotide
  modified_base (23)..(23): bicyclic nucleic acid (BNA)
aucaaggaagauggcauuucuag

SEQ ID NO: 15035 - RNA, 22 nt, Artificial Sequence
  source: /note="Description of Artificial Sequence: Synthetic oligonucleotide"
  source: /note="RNA"
  source: /note="5' tri-ethylene glycol (TEG)"
  modified_base (3)..(3): 5-methyl modified nucleotide
  modified_base (15)..(15): 5-methyl modified nucleotide
  modified_base (20)..(20): 5-methyl modified nucleotide
  modified_base (22)..(22): bicyclic nucleic acid (BNA)
aucaaggaagauggcauuucua

SEQ ID NO: 15036 - DNA, 21 bp, Artificial Sequence
  source: /note="Description of Artificial Sequence: Synthetic oligonucleotide"
  source: /note="Description of Combined DNA/RNA Molecule: Synthetic oligonucleotide"
  source: /note="DNA/RNA"
  source: /note="5' tri-ethylene glycol (TEG)"
  modified_base (3)..(3): 5-methyl modified nucleotide
  modified_base (15)..(15): 5-methyl modified nucleotide
  modified_base (20)..(20): 5-methyl modified nucleotide
  modified_base (21)..(21): bicyclic nucleic acid (BNA)
aucaaggaagauggcauuuct

SEQ ID NO: 15037 - RNA, 20 nt, Artificial Sequence
  source: /note="Description of Artificial Sequence: Synthetic oligonucleotide"
  source: /note="RNA"
  source: /note="5' tri-ethylene glycol (TEG)"
  modified_base (3)..(3): 5-methyl modified nucleotide
  modified_base (15)..(15): 5-methyl modified nucleotide
  modified_base (20)..(20): 5-methyl bicyclic nucleic acid
aucaaggaagauggcauuuc

SEQ ID NO: 15038 - DNA, 19 bp, Artificial Sequence
  source: /note="Description of Artificial Sequence: Synthetic oligonucleotide"
  source: /note="Description of Combined DNA/RNA Molecule: Synthetic oligonucleotide"
  source: /note="DNA/RNA"
  source: /note="5' tri-ethylene glycol (TEG)"
  modified_base (3)..(3): 5-methyl modified nucleotide
  modified_base (15)..(15): 5-methyl modified nucleotide
  modified_base (19)..(19): bicyclic nucleic acid (BNA)
aucaaggaagauggcauut

SEQ ID NO: 15039 - DNA, 18 bp, Artificial Sequence
  source: /note="Description of Artificial Sequence: Synthetic oligonucleotide"
  source: /note="Description of Combined DNA/RNA Molecule: Synthetic oligonucleotide"
  source: /note="DNA/RNA"
  source: /note="5' tri-ethylene glycol (TEG)"
  modified_base (3)..(3): 5-methyl modified nucleotide
  modified_base (15)..(15): 5-methyl modified nucleotide
  modified_base (18)..(18): bicyclic nucleic acid (BNA)
aucaaggaagauggcaut

SEQ ID NO: 15040 - DNA, 17 bp, Artificial Sequence
  source: /note="Description of Artificial Sequence: Synthetic oligonucleotide"
  source: /note="Description of Combined DNA/RNA Molecule: Synthetic oligonucleotide"
  source: /note="DNA/RNA"
  source: /note="5' tri-ethylene glycol (TEG)"
  modified_base (3)..(3): 5-methyl modified nucleotide
  modified_base (15)..(15): 5-methyl modified nucleotide
  modified_base (17)..(17): bicyclic nucleic acid (BNA)
aucaaggaagauggcat

SEQ ID NO: 15041 - RNA, 16 nt, Artificial Sequence
  source: /note="Description of Artificial Sequence: Synthetic oligonucleotide"
  source: /note="RNA"
  source: /note="5' tri-ethylene glycol (TEG)"
  modified_base (3)..(3): 5-methyl modified nucleotide
  modified_base (15)..(15): 5-methyl modified nucleotide
  modified_base (16)..(16): bicyclic nucleic acid (BNA)
aucaaggaagauggca

SEQ ID NO: 15042 - RNA, 15 nt, Artificial Sequence
  source: /note="Description of Artificial Sequence: Synthetic oligonucleotide"
  source: /note="RNA"
  source: /note="5' tri-ethylene glycol (TEG)"
  modified_base (3)..(3): 5-methyl modified nucleotide
  modified_base (15)..(15): 5-methyl bicyclic nucleic acid
aucaaggaagauggc

SEQ ID NO: 15043 - RNA, 14 nt, Artificial Sequence
  source: /note="Description of Artificial Sequence: Synthetic oligonucleotide"
  source: /note="RNA"
  source: /note="5' tri-ethylene glycol (TEG)"
  modified_base (3)..(3): 5-methyl modified nucleotide
  modified_base (14)..(14): bicyclic nucleic acid (BNA)
aucaaggaagaugg

SEQ ID NO: 15044 - RNA, 13 nt, Artificial Sequence
  source: /note="Description of Artificial Sequence: Synthetic oligonucleotide"
  source: /note="RNA"
  source: /note="5' tri-ethylene glycol (TEG)"
  modified_base (3)..(3): 5-methyl modified nucleotide
  modified_base (13)..(13): bicyclic nucleic acid (BNA)
aucaaggaagaug

SEQ ID NO: 15045 - DNA, 12 bp, Artificial Sequence
  source: /note="Description of Artificial Sequence: Synthetic oligonucleotide"
  source: /note="Description of Combined DNA/RNA Molecule: Synthetic oligonucleotide"
  source: /note="DNA/RNA"
  source: /note="5' tri-ethylene glycol (TEG)"
  modified_base (3)..(3): 5-methyl modified nucleotide
  modified_base (12)..(12): bicyclic nucleic acid (BNA)
aucaaggaagat

SEQ ID NO: 15046 - RNA, 11 nt, Artificial Sequence
  source: /note="Description of Artificial Sequence: Synthetic oligonucleotide"
  source: /note="RNA"
  source: /note="5' tri-ethylene glycol (TEG)"
  modified_base (3)..(3): 5-methyl modified nucleotide
  modified_base (11)..(11): bicyclic nucleic acid (BNA)
aucaaggaaga

SEQ ID NO: 15047 - RNA, 10 nt, Artificial Sequence
  source: /note="Description of Artificial Sequence: Synthetic oligonucleotide"
  source: /note="RNA"
  source: /note="5' tri-ethylene glycol (TEG)"
  modified_base (3)..(3): 5-methyl modified nucleotide
  modified_base (10)..(10): bicyclic nucleic acid (BNA)
aucaaggaag

SEQ ID NO: 15048 - RNA, 23 nt, Artificial Sequence
  source: /note="Description of Artificial Sequence: Synthetic oligonucleotide"
  source: /note="RNA"
  source: /note="5' tri-ethylene glycol (TEG)"
  modified_base (1)..(1): 5-methyl modified nucleotide
  modified_base (2)..(2): 5-methyl modified nucleotide
  modified_base (7)..(7): 5-methyl modified nucleotide
  modified_base (13)..(13): 5-methyl modified nucleotide
  modified_base (14)..(14): 5-methyl modified nucleotide
  modified_base (16)..(16): 5-methyl modified nucleotide
  modified_base (17)..(17): 5-methyl modified nucleotide
  modified_base (20)..(20): 5-methyl modified nucleotide
  modified_base (23)..(23): 5-methyl bicyclic nucleic acid
ccagagcagguaccuccaacauc

SEQ ID NO: 15049 - RNA, 18 nt, Artificial Sequence
  source: /note="Description of Artificial Sequence: Synthetic oligonucleotide"
  source: /note="RNA"
  source: /note="5' tri-ethylene glycol (TEG)"
  modified_base (1)..(1): 5-methyl modified nucleotide
  modified_base (2)..(2): 5-methyl modified nucleotide
  modified_base (7)..(7): 5-methyl modified nucleotide
  modified_base (13)..(13): 5-methyl modified nucleotide
  modified_base (14)..(14): 5-methyl modified nucleotide
  modified_base (16)..(16): 5-methyl modified nucleotide
  modified_base (17)..(17): 5-methyl modified nucleotide
  modified_base (18)..(18): bicyclic nucleic acid (BNA)
ccagagcagguaccucca

SEQ ID NO: 15050 - DNA, 23 bp, Artificial Sequence
  source: /note="Description of Artificial Sequence: Synthetic oligonucleotide"
  source: /note="Description of Combined DNA/RNA Molecule: Synthetic oligonucleotide"
  source: /note="DNA/RNA"
  source: /note="5' tri-ethylene glycol (TEG)"
  modified_base (1)..(1): 5-methyl modified nucleotide
  modified_base (2)..(2): 5-methyl modified nucleotide
  modified_base (4)..(4): 5-methyl modified nucleotide
  modified_base (18)..(18): 5-methyl modified nucleotide
  modified_base (23)..(23): bicyclic nucleic acid (BNA)
ccucugugauuuuauaacuugat

SEQ ID NO: 15051 - DNA, 17 bp, Artificial Sequence
  source: /note="Description of Artificial Sequence: Synthetic oligonucleotide"
  source: /note="Description of Combined DNA/RNA Molecule: Synthetic oligonucleotide"
  source: /note="DNA/RNA"
  source: /note="5' tri-ethylene glycol (TEG)"
  modified_base (2)..(2): 5-methyl modified nucleotide
  modified_base (4)..(4): 5-methyl modified nucleotide
  modified_base (5)..(5): 5-methyl modified nucleotide
  modified_base (6)..(6): 5-methyl modified nucleotide
  modified_base (8)..(8): 5-methyl modified nucleotide
  modified_base (9)..(9): 5-methyl modified nucleotide
  modified_base (12)..(12): 5-methyl modified nucleotide
  modified_base (14)..(14): 5-methyl modified nucleotide
  modified_base (15)..(15): 5-methyl modified nucleotide
  modified_base (16)..(16): 5-methyl modified nucleotide
  modified_base (17)..(17): bicyclic nucleic acid (BNA)
ucacccaccaucaccct

SEQ ID NO: 15052 - RNA, 20 nt, Artificial Sequence
  source: /note="Description of Artificial Sequence: Synthetic oligonucleotide"
  source: /note="RNA"
  source: /note="5' tri-ethylene glycol (TEG)"
  modified_base (7)..(7): 5-methyl modified nucleotide
  modified_base (8)..(8): 5-methyl modified nucleotide
  modified_base (10)..(10): 5-methyl modified nucleotide
  modified_base (16)..(16): 5-methyl modified nucleotide
  modified_base (18)..(18): 5-methyl modified nucleotide
  modified_base (19)..(19): 5-methyl modified nucleotide
  modified_base (20)..(20): 5-methyl bicyclic nucleic acid
ugauauccucaaggucaccc

SEQ ID NO: 15053 - RNA, 22 nt, Artificial Sequence
  source: /note="Description of Artificial Sequence: Synthetic oligonucleotide"
  source: /note="RNA"
  source: /note="5' tri-ethylene glycol (TEG)"
  modified_base (1)..(1): 5-methyl modified nucleotide
  modified_base (4)..(4): 5-methyl modified nucleotide
  modified_base (13)..(13): 5-methyl modified nucleotide
  modified_base (16)..(16): 5-methyl modified nucleotide
  modified_base (18)..(18): 5-methyl modified nucleotide
  modified_base (22)..(22): bicyclic nucleic acid (BNA)
cugcuugaugaucaucucguug

SEQ ID NO: 15054 - RNA, 18 nt, Artificial Sequence
  source: /note="Description of Artificial Sequence: Synthetic oligonucleotide"
  source: /note="RNA"
  source: /note="5' tri-ethylene glycol (TEG)"
  modified_base (1)..(1): 5-methyl modified nucleotide
  modified_base (4)..(4): 5-methyl modified nucleotide
  modified_base (13)..(13): 5-methyl modified nucleotide
  modified_base (16)..(16): 5-methyl modified nucleotide
  modified_base (18)..(18): 5-methyl bicyclic nucleic acid
cugcuugaugaucaucuc

SEQ ID NO: 15055 - RNA, 19 nt, Artificial Sequence
  source: /note="Description of Artificial Sequence: Synthetic oligonucleotide"
  source: /note="RNA"
  source: /note="5' tri-ethylene glycol (TEG)"
  modified_base (5)..(5): 5-methyl modified nucleotide
  modified_base (6)..(6): 5-methyl modified nucleotide
  modified_base (14)..(14): 5-methyl modified nucleotide
  modified_base (15)..(15): 5-methyl modified nucleotide
  modified_base (17)..(17): 5-methyl modified nucleotide
  modified_base (19)..(19): bicyclic nucleic acid (BNA)
guuuccuuaguaaccacag

SEQ ID NO: 15056 - RNA, 17 nt, Artificial Sequence
  source: /note="Description of Artificial Sequence: Synthetic oligonucleotide"
  source: /note="RNA"
  source: /note="5' tri-ethylene glycol (TEG)"
  modified_base (5)..(5): 5-methyl modified nucleotide
  modified_base (6)..(6): 5-methyl modified nucleotide
  modified_base (14)..(14): 5-methyl modified nucleotide
  modified_base (15)..(15): 5-methyl modified nucleotide
  modified_base (17)..(17): 5-methyl bicyclic nucleic acid
guuuccuuaguaaccac

SEQ ID NO: 15057 - DNA, 20 bp, Artificial Sequence
  source: /note="Description of Artificial Sequence: Synthetic oligonucleotide"
  source: /note="Description of Combined DNA/RNA Molecule: Synthetic oligonucleotide"
  source: /note="DNA/RNA"
  modified_base (2)..(2): 5-methyl modified nucleotide
  modified_base (14)..(14): 5-methyl modified nucleotide
  modified_base (19)..(19): 5-methyl modified nucleotide
  modified_base (20)..(20): bicyclic nucleic acid (BNA)
  source: /note="3' tri-ethylene glycol (TEG)"
ucaaggaagauggcauuuct

SEQ ID NO: 15058 - RNA, 22 nt, Artificial Sequence
  source: /note="Description of Artificial Sequence: Synthetic oligonucleotide"
  source: /note="RNA"
  modified_base (2)..(2): 5-methyl modified nucleotide
  modified_base (14)..(14): 5-methyl modified nucleotide
  modified_base (19)..(19): 5-methyl modified nucleotide
  modified_base (22)..(22): bicyclic nucleic acid (BNA)
  source: /note="3' tri-ethylene glycol (TEG)"
ucaaggaagauggcauuucuag

SEQ ID NO: 15059 - RNA, 18 nt, Artificial Sequence
  source: /note="Description of Artificial Sequence: Synthetic oligonucleotide"
  source: /note="RNA"
  modified_base (9)..(9): 5-methyl modified nucleotide
  modified_base (13)..(13): 5-methyl modified nucleotide
  modified_base (14)..(14): 5-methyl modified nucleotide
  modified_base (18)..(18): 5-methyl bicyclic nucleic acid
  source: /note="3' tri-ethylene glycol (TEG)"
gguaaguucuguccaagc

SEQ ID NO: 15060 - RNA, 18 nt, Artificial Sequence
  source: /note="Description of Artificial Sequence: Synthetic oligonucleotide"
  source: /note="RNA"
  modified_base (8)..(8): 5-methyl modified nucleotide
  modified_base (12)..(12): 5-methyl modified nucleotide
  modified_base (13)..(13): 5-methyl modified nucleotide
  modified_base (17)..(17): 5-methyl modified nucleotide
  modified_base (18)..(18): 5-methyl bicyclic nucleic acid
  source: /note="3' tri-ethylene glycol (TEG)"
guaaguucuguccaagcc

SEQ ID NO: 15061 - RNA, 18 nt, Artificial Sequence
  source: /note="Description of Artificial Sequence: Synthetic oligonucleotide"
  source: /note="RNA"
  modified_base (4)..(4): 5-methyl modified nucleotide
  modified_base (13)..(13): 5-methyl modified nucleotide
  modified_base (17)..(17): 5-methyl modified nucleotide
  modified_base (18)..(18): 5-methyl bicyclic nucleic acid
  source: /note="3' tri-ethylene glycol (TEG)"
agucgguaaguucugucc

SEQ ID NO: 15062 - RNA, 18 nt, Artificial Sequence
  source: /note="Description of Artificial Sequence: Synthetic oligonucleotide"
  source: /note="RNA"
  modified_base (1)..(1): 5-methyl modified nucleotide
  modified_base (5)..(5): 5-methyl modified nucleotide
  modified_base (6)..(6): 5-methyl modified nucleotide
  modified_base (10)..(10): 5-methyl modified nucleotide
  modified_base (11)..(11): 5-methyl modified nucleotide
  modified_base (12)..(12): 5-methyl modified nucleotide
  modified_base (18)..(18): bicyclic nucleic acid (BNA)
  source: /note="3' tri-ethylene glycol (TEG)"
cuguccaagcccgguuga

SEQ ID NO: 15063 - RNA, 15 nt, Artificial Sequence
  source: /note="Description of Artificial Sequence: Synthetic oligonucleotide"
  source: /note="RNA"
  modified_base (7)..(7): 5-methyl modified nucleotide
  modified_base (11)..(11): 5-methyl modified nucleotide
  modified_base (12)..(12): 5-methyl modified nucleotide
  modified_base (15)..(15): bicyclic nucleic acid (BNA)
  source: /note="3' tri-ethylene glycol (TEG)"
uaaguucuguccaag

SEQ ID NO: 15064 - RNA, 20 nt, Artificial Sequence
  source: /note="Description of Artificial Sequence: Synthetic oligonucleotide"
  source: /note="RNA"
  modified_base (3)..(3): 5-methyl modified nucleotide
  modified_base (7)..(7): 5-methyl modified nucleotide
  modified_base (8)..(8): 5-methyl modified nucleotide
  modified_base (12)..(12): 5-methyl modified nucleotide
  modified_base (13)..(13): 5-methyl modified nucleotide
  modified_base (14)..(14): 5-methyl modified nucleotide
  modified_base (20)..(20): bicyclic nucleic acid (BNA)
  source: /note="3' tri-ethylene glycol (TEG)"
uucuguccaagcccgguuga

SEQ ID NO: 15065 - RNA, 19 nt, Artificial Sequence
  source: /note="Description of Artificial Sequence: Synthetic oligonucleotide"
  source: /note="RNA"
  modified_base (3)..(3): 5-methyl modified nucleotide
  modified_base (7)..(7): 5-methyl modified nucleotide
  modified_base (8)..(8): 5-methyl modified nucleotide
  modified_base (12)..(12): 5-methyl modified nucleotide
  modified_base (13)..(13): 5-methyl modified nucleotide
  modified_base (14)..(14): 5-methyl modified nucleotide
  modified_base (19)..(19): bicyclic nucleic acid (BNA)
  source: /note="3' tri-ethylene glycol (TEG)"
uucuguccaagcccgguug

SEQ ID NO: 15066 - DNA, 18 bp, Artificial Sequence
  source: /note="Description of Artificial Sequence: Synthetic oligonucleotide"
  source: /note="Description of Combined DNA/RNA Molecule: Synthetic oligonucleotide"
  source: /note="DNA/RNA"
  modified_base (3)..(3): 5-methyl modified nucleotide
  modified_base (7)..(7): 5-methyl modified nucleotide
  modified_base (8)..(8): 5-methyl modified nucleotide
  modified_base (12)..(12): 5-methyl modified nucleotide
  modified_base (13)..(13): 5-methyl modified nucleotide
  modified_base (14)..(14): 5-methyl modified nucleotide
  modified_base (18)..(18): bicyclic nucleic acid (BNA)
  source: /note="3' tri-ethylene glycol (TEG)"
uucuguccaagcccggut

SEQ ID NO: 15067 - DNA, 17 bp, Artificial Sequence
  source: /note="Description of Artificial Sequence: Synthetic oligonucleotide"
  source: /note="Description of Combined DNA/RNA Molecule: Synthetic oligonucleotide"
  source: /note="DNA/RNA"
  modified_base (3)..(3): 5-methyl modified nucleotide
  modified_base (7)..(7): 5-methyl modified nucleotide
  modified_base (8)..(8): 5-methyl modified nucleotide
  modified_base (12)..(12): 5-methyl modified nucleotide
  modified_base (13)..(13): 5-methyl modified nucleotide
  modified_base (14)..(14): 5-methyl modified nucleotide
  modified_base (17)..(17): bicyclic nucleic acid (BNA)
  source: /note="3' tri-ethylene glycol (TEG)"
uucuguccaagcccggt

SEQ ID NO: 15068 - RNA, 16 nt, Artificial Sequence
  source: /note="Description of Artificial Sequence: Synthetic oligonucleotide"
  source: /note="RNA"
  modified_base (3)..(3): 5-methyl modified nucleotide
  modified_base (7)..(7): 5-methyl modified nucleotide
  modified_base (8)..(8): 5-methyl modified nucleotide
  modified_base (12)..(12): 5-methyl modified nucleotide
  modified_base (13)..(13): 5-methyl modified nucleotide
  modified_base (14)..(14): 5-methyl modified nucleotide
  modified_base (16)..(16): bicyclic nucleic acid (BNA)
  source: /note="3' tri-ethylene glycol (TEG)"
uucuguccaagcccgg

SEQ ID NO: 15069 - RNA, 15 nt, Artificial Sequence
  source: /note="Description of Artificial Sequence: Synthetic oligonucleotide"
  source: /note="RNA"
  modified_base (3)..(3): 5-methyl modified nucleotide
  modified_base (7)..(7): 5-methyl modified nucleotide
  modified_base (8)..(8): 5-methyl modified nucleotide
  modified_base (12)..(12): 5-methyl modified nucleotide
  modified_base (13)..(13): 5-methyl modified nucleotide
  modified_base (14)..(14): 5-methyl modified nucleotide
  modified_base (15)..(15): bicyclic nucleic acid (BNA)
  source: /note="3' tri-ethylene glycol (TEG)"
uucuguccaagcccg

SEQ ID NO: 15070 - RNA, 14 nt, Artificial Sequence
  source: /note="Description of Artificial Sequence: Synthetic oligonucleotide"
  source: /note="RNA"
  modified_base (3)..(3): 5-methyl modified nucleotide
  modified_base (7)..(7): 5-methyl modified nucleotide
  modified_base (8)..(8): 5-methyl modified nucleotide
  modified_base (12)..(12): 5-methyl modified nucleotide
  modified_base (13)..(13): 5-methyl modified nucleotide
  modified_base (14)..(14): 5-methyl bicyclic nucleic acid
  source: /note="3' tri-ethylene glycol (TEG)"
uucuguccaagccc

SEQ ID NO: 15071 - RNA, 13 nt, Artificial Sequence
  source: /note="Description of Artificial Sequence: Synthetic oligonucleotide"
  source: /note="RNA"
  modified_base (3)..(3): 5-methyl modified nucleotide
  modified_base (7)..(7): 5-methyl modified nucleotide
  modified_base (8)..(8): 5-methyl modified nucleotide
  modified_base (12)..(12): 5-methyl modified nucleotide
  modified_base (13)..(13): 5-methyl bicyclic nucleic acid
  source: /note="3' tri-ethylene glycol (TEG)"
uucuguccaagcc

SEQ ID NO: 15072 - RNA, 12 nt, Artificial Sequence
  source: /note="Description of Artificial Sequence: Synthetic oligonucleotide"
  source: /note="RNA"
  modified_base (3)..(3): 5-methyl modified nucleotide
  modified_base (7)..(7): 5-methyl modified nucleotide
  modified_base (8)..(8): 5-methyl modified nucleotide
  modified_base (12)..(12): 5-methyl bicyclic nucleic acid
  source: /note="3' tri-ethylene glycol (TEG)"
uucuguccaagc

SEQ ID NO: 15073 - RNA, 11 nt, Artificial Sequence
  source: /note="Description of Artificial Sequence: Synthetic oligonucleotide"
  source: /note="RNA"
  modified_base (3)..(3): 5-methyl modified nucleotide
  modified_base (7)..(7): 5-methyl modified nucleotide
  modified_base (8)..(8): 5-methyl modified nucleotide
  modified_base (11)..(11): bicyclic nucleic acid (BNA)
  source: /note="3' tri-ethylene glycol (TEG)"
uucuguccaag

SEQ ID NO: 15074 - RNA, 10 nt, Artificial Sequence
  source: /note="Description of Artificial Sequence: Synthetic oligonucleotide"
  source: /note="RNA"
  modified_base (3)..(3): 5-methyl modified nucleotide
  modified_base (7)..(7): 5-methyl modified nucleotide
  modified_base (8)..(8): 5-methyl modified nucleotide
  modified_base (10)..(10): bicyclic nucleic acid (BNA)
  source: /note="3' tri-ethylene glycol (TEG)"
uucuguccaa

SEQ ID NO: 15075 - RNA, 9 nt, Artificial Sequence
  source: /note="Description of Artificial Sequence: Synthetic oligonucleotide"
  source: /note="RNA"
  modified_base (3)..(3): 5-methyl modified nucleotide
  modified_base (7)..(7): 5-methyl modified nucleotide
  modified_base (8)..(8): 5-methyl modified nucleotide
  modified_base (9)..(9): bicyclic nucleic acid (BNA)
  source: /note="3' tri-ethylene glycol (TEG)"
uucugucca

SEQ ID NO: 15076 - RNA, 8 nt, Artificial Sequence
  source: /note="Description of Artificial Sequence: Synthetic oligonucleotide"
  source: /note="RNA"
  modified_base (3)..(3): 5-methyl modified nucleotide
  modified_base (7)..(7): 5-methyl modified nucleotide
  modified_base (8)..(8): 5-methyl bicyclic nucleic acid
  source: /note="3' tri-ethylene glycol (TEG)"
uucugucc

SEQ ID NO: 15077 - RNA, 19 nt, Artificial Sequence
  source: /note="Description of Artificial Sequence: Synthetic oligonucleotide"
  source: /note="RNA"
  modified_base (2)..(2): 5-methyl modified nucleotide
  modified_base (6)..(6): 5-methyl modified nucleotide
  modified_base (7)..(7): 5-methyl modified nucleotide
  modified_base (11)..(11): 5-methyl modified nucleotide
  modified_base (12)..(12): 5-methyl modified nucleotide
  modified_base (13)..(13): 5-methyl modified nucleotide
  modified_base (19)..(19): bicyclic nucleic acid (BNA)
  source: /note="3' tri-ethylene glycol (TEG)"
ucuguccaagcccgguuga

SEQ ID NO: 15078 - RNA, 18 nt, Artificial Sequence
  source: /note="Description of Artificial Sequence: Synthetic oligonucleotide"
  source: /note="RNA"
  modified_base (2)..(2): 5-methyl modified nucleotide
  modified_base (6)..(6): 5-methyl modified nucleotide
  modified_base (7)..(7): 5-methyl modified nucleotide
  modified_base (11)..(11): 5-methyl modified nucleotide
  modified_base (12)..(12): 5-methyl modified nucleotide
  modified_base (13)..(13): 5-methyl modified nucleotide
  modified_base (18)..(18): bicyclic nucleic acid (BNA)
  source: /note="3' tri-ethylene glycol (TEG)"
ucuguccaagcccgguug

SEQ ID NO: 15079 - DNA, 17 bp, Artificial Sequence
  source: /note="Description of Artificial Sequence: Synthetic oligonucleotide"
  source: /note="Description of Combined DNA/RNA Molecule: Synthetic oligonucleotide"
  source: /note="DNA/RNA"
  modified_base (2)..(2): 5-methyl modified nucleotide
  modified_base (6)..(6): 5-methyl modified nucleotide
  modified_base (7)..(7): 5-methyl modified nucleotide
  modified_base (11)..(11): 5-methyl modified nucleotide
  modified_base (12)..(12): 5-methyl modified nucleotide
  modified_base (13)..(13): 5-methyl modified nucleotide
  modified_base (17)..(17): bicyclic nucleic acid (BNA)
  source: /note="3' tri-ethylene glycol (TEG)"
ucuguccaagcccggut

SEQ ID NO: 15080 - DNA, 16 bp, Artificial Sequence
  source: /note="Description of Artificial Sequence: Synthetic oligonucleotide"
  source: /note="Description of Combined DNA/RNA Molecule: Synthetic oligonucleotide"
  source: /note="DNA/RNA"
  modified_base (2)..(2): 5-methyl modified nucleotide
  modified_base (6)..(6): 5-methyl modified nucleotide
  modified_base (7)..(7): 5-methyl modified nucleotide
  modified_base (11)..(11): 5-methyl modified nucleotide
  modified_base (12)..(12): 5-methyl modified nucleotide
  modified_base (13)..(13): 5-methyl modified nucleotide
  modified_base (16)..(16): bicyclic nucleic acid (BNA)
  source: /note="3' tri-ethylene glycol (TEG)"
ucuguccaagcccggt

SEQ ID NO: 15081 - RNA, 15 nt, Artificial Sequence
  source: /note="Description of Artificial Sequence: Synthetic oligonucleotide"
  source: /note="RNA"
  modified_base (2)..(2): 5-methyl modified nucleotide
  modified_base (6)..(6): 5-methyl modified nucleotide
  modified_base (7)..(7): 5-methyl modified nucleotide
  modified_base (11)..(11): 5-methyl modified nucleotide
  modified_base (12)..(12): 5-methyl modified nucleotide
  modified_base (13)..(13): 5-methyl modified nucleotide
  modified_base (15)..(15): bicyclic nucleic acid (BNA)
  source: /note="3' tri-ethylene glycol (TEG)"
ucuguccaagcccgg

SEQ ID NO: 15082 - RNA, 14 nt, Artificial Sequence
  source: /note="Description of Artificial Sequence: Synthetic oligonucleotide"
  source: /note="RNA"
  modified_base (2)..(2): 5-methyl modified nucleotide
  modified_base (6)..(6): 5-methyl modified nucleotide
  modified_base (7)..(7): 5-methyl modified nucleotide
  modified_base (11)..(11): 5-methyl modified nucleotide
  modified_base (12)..(12): 5-methyl modified nucleotide
  modified_base (13)..(13): 5-methyl modified nucleotide
  modified_base (14)..(14): bicyclic nucleic acid (BNA)
  source: /note="3' tri-ethylene glycol (TEG)"
ucuguccaagcccg

SEQ ID NO: 15083 - RNA, 13 nt, Artificial Sequence
  source: /note="Description of Artificial Sequence: Synthetic oligonucleotide"
  source: /note="RNA"
  modified_base (2)..(2): 5-methyl modified nucleotide
  modified_base (6)..(6): 5-methyl modified nucleotide
  modified_base (7)..(7): 5-methyl modified nucleotide
  modified_base (11)..(11): 5-methyl modified nucleotide
  modified_base (12)..(12): 5-methyl modified nucleotide
  modified_base (13)..(13): 5-methyl bicyclic nucleic acid
  source: /note="3' tri-ethylene glycol (TEG)"
ucuguccaagccc

SEQ ID NO: 15084 - RNA, 12 nt, Artificial Sequence
  source: /note="Description of Artificial Sequence: Synthetic oligonucleotide"
  source: /note="RNA"
  modified_base (2)..(2): 5-methyl modified nucleotide
  modified_base (6)..(6): 5-methyl modified nucleotide
  modified_base (7)..(7): 5-methyl modified nucleotide
  modified_base (11)..(11): 5-methyl modified nucleotide
  modified_base (12)..(12): 5-methyl bicyclic nucleic acid
  source: /note="3' tri-ethylene glycol (TEG)"
ucuguccaagcc

SEQ ID NO: 15085 - RNA, 11 nt, Artificial Sequence
  source: /note="Description of Artificial Sequence: Synthetic oligonucleotide"
  source: /note="RNA"
  modified_base (2)..(2): 5-methyl modified nucleotide
  modified_base (6)..(6): 5-methyl modified nucleotide
  modified_base (7)..(7): 5-methyl modified nucleotide
  modified_base (11)..(11): 5-methyl bicyclic nucleic acid
  source: /note="3' tri-ethylene glycol (TEG)"
ucuguccaagc

SEQ ID NO: 15086 - RNA, 10 nt, Artificial Sequence
  source: /note="Description of Artificial Sequence: Synthetic oligonucleotide"
  source: /note="RNA"
  modified_base (2)..(2): 5-methyl modified nucleotide
  modified_base (6)..(6): 5-methyl modified nucleotide
  modified_base (7)..(7): 5-methyl modified nucleotide
  modified_base (10)..(10): bicyclic nucleic acid (BNA)
  source: /note="3' tri-ethylene glycol (TEG)"
ucuguccaag

SEQ ID NO: 15087 - RNA, 9 nt, Artificial Sequence
  source: /note="Description of Artificial Sequence: Synthetic oligonucleotide"
  source: /note="RNA"
  modified_base (2)..(2): 5-methyl modified nucleotide
  modified_base (6)..(6): 5-methyl modified nucleotide
  modified_base (7)..(7): 5-methyl modified nucleotide
  modified_base (9)..(9): bicyclic nucleic acid (BNA)
  source: /note="3' tri-ethylene glycol (TEG)"
ucuguccaa

SEQ ID NO: 15088 - RNA, 8 nt, Artificial Sequence
  source: /note="Description of Artificial Sequence: Synthetic oligonucleotide"
  source: /note="RNA"
  modified_base (2)..(2): 5-methyl modified nucleotide
  modified_base (6)..(6): 5-methyl modified nucleotide
  modified_base (7)..(7): 5-methyl modified nucleotide
  modified_base (8)..(8): bicyclic nucleic acid (BNA)
  source: /note="3' tri-ethylene glycol (TEG)"
ucugucca

SEQ ID NO: 15089 - RNA, 17 nt, Artificial Sequence
  source: /note="Description of Artificial Sequence: Synthetic oligonucleotide"
  source: /note="RNA"
  modified_base (1)..(1): 5-methyl modified nucleotide
  modified_base (5)..(5): 5-methyl modified nucleotide
  modified_base (6)..(6): 5-methyl modified nucleotide
  modified_base (10)..(10): 5-methyl modified nucleotide
  modified_base (11)..(11): 5-methyl modified nucleotide
  modified_base (12)..(12): 5-methyl modified nucleotide
  modified_base (17)..(17): bicyclic nucleic acid (BNA)
  source: /note="3' tri-ethylene glycol (TEG)"
cuguccaagcccgguug

SEQ ID NO: 15090 - DNA, 16 bp, Artificial Sequence
  source: /note="Description of Artificial Sequence: Synthetic oligonucleotide"
  source: /note="Description of Combined DNA/RNA Molecule: Synthetic oligonucleotide"
  source: /note="DNA/RNA"
  modified_base (1)..(1): 5-methyl modified nucleotide
  modified_base (5)..(5): 5-methyl modified nucleotide
  modified_base (6)..(6): 5-methyl modified nucleotide
  modified_base (10)..(10): 5-methyl modified nucleotide
  modified_base (11)..(11): 5-methyl modified nucleotide
  modified_base (12)..(12): 5-methyl modified nucleotide
  modified_base (16)..(16): bicyclic nucleic acid (BNA)
  source: /note="3' tri-ethylene glycol (TEG)"
cuguccaagcccggut

SEQ ID NO: 15091 - DNA, 15 bp, Artificial Sequence
  source: /note="Description of Artificial Sequence: Synthetic oligonucleotide"
  source: /note="Description of Combined DNA/RNA Molecule: Synthetic oligonucleotide"
  source: /note="DNA/RNA"
  modified_base (1)..(1): 5-methyl modified nucleotide
  modified_base (5)..(5): 5-methyl modified nucleotide
  modified_base (6)..(6): 5-methyl modified nucleotide
  modified_base (10)..(10): 5-methyl modified nucleotide
  modified_base (11)..(11): 5-methyl modified nucleotide
  modified_base (12)..(12): 5-methyl modified nucleotide
  modified_base (15)..(15): bicyclic nucleic acid (BNA)
  source: /note="3' tri-ethylene glycol (TEG)"
cuguccaagcccggt

SEQ ID NO: 15092 - RNA, 14 nt, Artificial Sequence
  source: /note="Description of Artificial Sequence: Synthetic oligonucleotide"
  source: /note="RNA"
  modified_base (1)..(1): 5-methyl modified nucleotide
  modified_base (5)..(5): 5-methyl modified nucleotide
  modified_base (6)..(6): 5-methyl modified nucleotide
  modified_base (10)..(10): 5-methyl modified nucleotide
  modified_base (11)..(11): 5-methyl modified nucleotide
  modified_base (12)..(12): 5-methyl modified nucleotide
  modified_base (14)..(14): bicyclic nucleic acid (BNA)
  source: /note="3' tri-ethylene glycol (TEG)"
cuguccaagcccgg

SEQ ID NO: 15093 - RNA, 13 nt, Artificial Sequence
  source: /note="Description of Artificial Sequence: Synthetic oligonucleotide"
  source: /note="RNA"
  modified_base (1)..(1): 5-methyl modified nucleotide
  modified_base (5)..(5): 5-methyl modified nucleotide
  modified_base (6)..(6): 5-methyl modified nucleotide
  modified_base (10)..(10): 5-methyl modified nucleotide
  modified_base (11)..(11): 5-methyl modified nucleotide
  modified_base (12)..(12): 5-methyl modified nucleotide
  modified_base (13)..(13): bicyclic nucleic acid (BNA)
  source: /note="3' tri-ethylene glycol (TEG)"
cuguccaagcccg

SEQ ID NO: 15094 - RNA, 12 nt, Artificial Sequence
  source: /note="Description of Artificial Sequence: Synthetic oligonucleotide"
  source: /note="RNA"
  modified_base (1)..(1): 5-methyl modified nucleotide
  modified_base (5)..(5): 5-methyl modified nucleotide
  modified_base (6)..(6): 5-methyl modified nucleotide
  modified_base (10)..(10): 5-methyl modified nucleotide
  modified_base (11)..(11): 5-methyl modified nucleotide
  modified_base (12)..(12): 5-methyl bicyclic nucleic acid
  source: /note="3' tri-ethylene glycol (TEG)"
cuguccaagccc

SEQ ID NO: 15095 - RNA, 11 nt, Artificial Sequence
  source: /note="Description of Artificial Sequence: Synthetic oligonucleotide"
  source: /note="RNA"
  modified_base (1)..(1): 5-methyl modified nucleotide
  modified_base (5)..(5): 5-methyl modified nucleotide
  modified_base (6)..(6): 5-methyl modified nucleotide
  modified_base (10)..(10): 5-methyl modified nucleotide
  modified_base (11)..(11): 5-methyl bicyclic nucleic acid
  source: /note="3' tri-ethylene glycol (TEG)"
cuguccaagcc

SEQ ID NO: 15096 - RNA, 10 nt, Artificial Sequence
  source: /note="Description of Artificial Sequence: Synthetic oligonucleotide"
  source: /note="RNA"
  modified_base (1)..(1): 5-methyl modified nucleotide
  modified_base (5)..(5): 5-methyl modified nucleotide
  modified_base (6)..(6): 5-methyl modified nucleotide
  modified_base (10)..(10): 5-methyl bicyclic nucleic acid
  source: /note="3' tri-ethylene glycol (TEG)"
cuguccaagc

SEQ ID NO: 15097 - RNA, 9 nt, Artificial Sequence
  source: /note="Description of Artificial Sequence: Synthetic oligonucleotide"
  source: /note="RNA"
  modified_base (1)..(1): 5-methyl modified nucleotide
  modified_base (5)..(5): 5-methyl modified nucleotide
  modified_base (6)..(6): 5-methyl modified nucleotide
  modified_base (9)..(9): bicyclic nucleic acid (BNA)
  source: /note="3' tri-ethylene glycol (TEG)"
cuguccaag

SEQ ID NO: 15098 - RNA, 8 nt, Artificial Sequence
  source: /note="Description of Artificial Sequence: Synthetic oligonucleotide"
  source: /note="RNA"
  modified_base (1)..(1): 5-methyl modified nucleotide
  modified_base (5)..(5): 5-methyl modified nucleotide
  modified_base (6)..(6): 5-methyl modified nucleotide
  modified_base (8)..(8): bicyclic nucleic acid (BNA)
  source: /note="3' tri-ethylene glycol (TEG)"
cuguccaa

SEQ ID NO: 15099 - RNA, 20 nt, Artificial Sequence
  source: /note="Description of Artificial Sequence: Synthetic oligonucleotide"
  source: /note="RNA"
  modified_base (4)..(4): 5-methyl modified nucleotide
  modified_base (8)..(8): 5-methyl modified nucleotide
  modified_base (9)..(9): 5-methyl modified nucleotide
  modified_base (13)..(13): 5-methyl modified nucleotide
  modified_base (14)..(14): 5-methyl modified nucleotide
  modified_base (15)..(15): 5-methyl modified nucleotide
  modified_base (20)..(20): bicyclic nucleic acid (BNA)
  source: /note="3' tri-ethylene glycol (TEG)"
guucuguccaagcccgguug

SEQ ID NO: 15100 - DNA, 19 bp, Artificial Sequence
  source: /note="Description of Artificial Sequence: Synthetic oligonucleotide"
  source: /note="Description of Combined DNA/RNA Molecule: Synthetic oligonucleotide"
  source: /note="DNA/RNA"
  modified_base (4)..(4): 5-methyl modified nucleotide
  modified_base (8)..(8): 5-methyl modified nucleotide
  modified_base (9)..(9): 5-methyl modified nucleotide
  modified_base (13)..(13): 5-methyl modified nucleotide
  modified_base (14)..(14): 5-methyl modified nucleotide
  modified_base (15)..(15): 5-methyl modified nucleotide
  modified_base (19)..(19): bicyclic nucleic acid (BNA)
  source: /note="3' tri-ethylene glycol (TEG)"
guucuguccaagcccggut

SEQ ID NO: 15101 - DNA, 18 bp, Artificial Sequence
  source: /note="Description of Artificial Sequence: Synthetic oligonucleotide"
  source: /note="Description of Combined DNA/RNA Molecule: Synthetic oligonucleotide"
  source: /note="DNA/RNA"
  modified_base (4)..(4): 5-methyl modified nucleotide
  modified_base (8)..(8): 5-methyl modified nucleotide
  modified_base (9)..(9): 5-methyl modified nucleotide
  modified_base (13)..(13): 5-methyl modified nucleotide
  modified_base (14)..(14): 5-methyl modified nucleotide
  modified_base (15)..(15): 5-methyl modified nucleotide
  modified_base (18)..(18): bicyclic nucleic acid (BNA)
  source: /note="3' tri-ethylene glycol (TEG)"
guucuguccaagcccggt

SEQ ID NO: 15102 - RNA, 17 nt, Artificial Sequence
  source: /note="Description of Artificial Sequence: Synthetic oligonucleotide"
  source: /note="RNA"
  modified_base (4)..(4): 5-methyl modified nucleotide
  modified_base (8)..(8): 5-methyl modified nucleotide
  modified_base (9)..(9): 5-methyl modified nucleotide
  modified_base (13)..(13): 5-methyl modified nucleotide
  modified_base (14)..(14): 5-methyl modified nucleotide
  modified_base (15)..(15): 5-methyl modified nucleotide
  modified_base (17)..(17): bicyclic nucleic acid (BNA)
  source: /note="3' tri-ethylene glycol (TEG)"
guucuguccaagcccgg

SEQ ID NO: 15103 - RNA, 16 nt, Artificial Sequence
  source: /note="Description of Artificial Sequence: Synthetic oligonucleotide"
  source: /note="RNA"
  modified_base (4)..(4): 5-methyl modified nucleotide
  modified_base (8)..(8): 5-methyl modified nucleotide
  modified_base (9)..(9): 5-methyl modified nucleotide
  modified_base (13)..(13): 5-methyl modified nucleotide
  modified_base (14)..(14): 5-methyl modified nucleotide
  modified_base (15)..(15): 5-methyl modified nucleotide
  modified_base (16)..(16): bicyclic nucleic acid (BNA)
  source: /note="3' tri-ethylene glycol (TEG)"
guucuguccaagcccg

SEQ ID NO: 15104 - RNA, 15 nt, Artificial Sequence
  source: /note="Description of Artificial Sequence: Synthetic oligonucleotide"
  source: /note="RNA"
  modified_base (4)..(4): 5-methyl modified nucleotide
  modified_base (8)..(8): 5-methyl modified nucleotide
  modified_base (9)..(9): 5-methyl modified nucleotide
  modified_base (13)..(13): 5-methyl modified nucleotide
  modified_base (14)..(14): 5-methyl modified nucleotide
  modified_base (15)..(15): 5-methyl bicyclic nucleic acid
  source: /note="3' tri-ethylene glycol (TEG)"
guucuguccaagccc

SEQ ID NO: 15105 - RNA, 14 nt, Artificial Sequence
  source: /note="Description of Artificial Sequence: Synthetic oligonucleotide"
  source: /note="RNA"
  modified_base (4)..(4): 5-methyl modified nucleotide
  modified_base (8)..(8): 5-methyl modified nucleotide
  modified_base (9)..(9): 5-methyl modified nucleotide
  modified_base (13)..(13): 5-methyl modified nucleotide
  modified_base (14)..(14): 5-methyl bicyclic nucleic acid
  source: /note="3' tri-ethylene glycol (TEG)"
guucuguccaagcc

SEQ ID NO: 15106 - RNA, 13 nt, Artificial Sequence
  source: /note="Description of Artificial Sequence: Synthetic oligonucleotide"
  source: /note="RNA"
  modified_base (4)..(4): 5-methyl modified nucleotide
  modified_base (8)..(8): 5-methyl modified nucleotide
  modified_base (9)..(9): 5-methyl modified nucleotide
  modified_base (13)..(13): 5-methyl bicyclic nucleic acid
  source: /note="3' tri-ethylene glycol (TEG)"
guucuguccaagc

SEQ ID NO: 15107 - RNA, 12 nt, Artificial Sequence
  source: /note="Description of Artificial Sequence: Synthetic oligonucleotide"
  source: /note="RNA"
  modified_base (4)..(4): 5-methyl modified nucleotide
  modified_base (8)..(8): 5-methyl modified nucleotide
  modified_base (9)..(9): 5-methyl modified nucleotide
  modified_base (12)..(12): bicyclic nucleic acid (BNA)
  source: /note="3' tri-ethylene glycol (TEG)"
guucuguccaag

SEQ ID NO: 15108 - RNA, 11 nt, Artificial Sequence
  source: /note="Description of Artificial Sequence: Synthetic oligonucleotide"
  source: /note="RNA"
  modified_base (4)..(4): 5-methyl modified nucleotide
  modified_base (8)..(8): 5-methyl modified nucleotide
  modified_base (9)..(9): 5-methyl modified nucleotide
  modified_base (11)..(11): bicyclic nucleic acid (BNA)
  source: /note="3' tri-ethylene glycol (TEG)"
guucuguccaa

SEQ ID NO: 15109 - RNA, 10 nt, Artificial Sequence
  source: /note="Description of Artificial Sequence: Synthetic oligonucleotide"
  source: /note="RNA"
  modified_base (4)..(4): 5-methyl modified nucleotide
  modified_base (8)..(8): 5-methyl modified nucleotide
  modified_base (9)..(9): 5-methyl modified nucleotide
  modified_base (10)..(10): bicyclic nucleic acid (BNA)
  source: /note="3' tri-ethylene glycol (TEG)"
guucugucca

SEQ ID NO: 15110 - RNA, 9 nt, Artificial Sequence
  source: /note="Description of Artificial Sequence: Synthetic oligonucleotide"
  source: /note="RNA"
  modified_base (4)..(4): 5-methyl modified nucleotide
  modified_base (8)..(8): 5-methyl modified nucleotide
  modified_base (9)..(9): 5-methyl bicyclic nucleic acid
  source: /note="3' tri-ethylene glycol (TEG)"
guucugucc

SEQ ID NO: 15111 - RNA, 8 nt, Artificial Sequence
  source: /note="Description of Artificial Sequence: Synthetic oligonucleotide"
  source: /note="RNA"
  modified_base (4)..(4): 5-methyl modified nucleotide
  modified_base (8)..(8): 5-methyl bicyclic nucleic acid
  source: /note="3' tri-ethylene glycol (TEG)"
guucuguc

SEQ ID NO: 15112 - DNA, 20 bp, Artificial Sequence
  source: /note="Description of Artificial Sequence: Synthetic oligonucleotide"
  source: /note="Description of Combined DNA/RNA Molecule: Synthetic oligonucleotide"
  source: /note="DNA/RNA"
  modified_base (5)..(5): 5-methyl modified nucleotide
  modified_base (9)..(9): 5-methyl modified nucleotide
  modified_base (10)..(10): 5-methyl modified nucleotide
  modified_base (14)..(14): 5-methyl modified nucleotide
  modified_base (15)..(15): 5-methyl modified nucleotide
  modified_base (16)..(16): 5-methyl modified nucleotide
  modified_base (20)..(20): bicyclic nucleic acid (BNA)
  source: /note="3' tri-ethylene glycol (TEG)"
aguucuguccaagcccggut

SEQ ID NO: 15113 - DNA, 19 bp, Artificial Sequence
  source: /note="Description of Artificial Sequence: Synthetic oligonucleotide"
  source: /note="Description of Combined DNA/RNA Molecule: Synthetic oligonucleotide"
  source: /note="DNA/RNA"
  modified_base (5)..(5): 5-methyl modified nucleotide
  modified_base (9)..(9): 5-methyl modified nucleotide
  modified_base (10)..(10): 5-methyl modified nucleotide
  modified_base (14)..(14): 5-methyl modified nucleotide
  modified_base (15)..(15): 5-methyl modified nucleotide
  modified_base (16)..(16): 5-methyl modified nucleotide
  modified_base (19)..(19): bicyclic nucleic acid (BNA)
  source: /note="3' tri-ethylene glycol (TEG)"
aguucuguccaagcccggt

SEQ ID NO: 15114 - RNA, 18 nt, Artificial Sequence
  source: /note="Description of Artificial Sequence: Synthetic oligonucleotide"
  source: /note="RNA"
  modified_base (5)..(5): 5-methyl modified nucleotide
  modified_base (9)..(9): 5-methyl modified nucleotide
  modified_base (10)..(10): 5-methyl modified nucleotide
  modified_base (14)..(14): 5-methyl modified nucleotide
  modified_base (15)..(15): 5-methyl modified nucleotide
  modified_base (16)..(16): 5-methyl modified nucleotide
  modified_base (18)..(18): bicyclic nucleic acid (BNA)
  source: /note="3' tri-ethylene glycol (TEG)"
aguucuguccaagcccgg

SEQ ID NO: 15115 - RNA, 17 nt, Artificial Sequence
  source: /note="Description of Artificial Sequence: Synthetic oligonucleotide"
  source: /note="RNA"
  modified_base (5)..(5): 5-methyl modified nucleotide
  modified_base (9)..(9): 5-methyl modified nucleotide
  modified_base (10)..(10): 5-methyl modified nucleotide
  modified_base (14)..(14): 5-methyl modified nucleotide
  modified_base (15)..(15): 5-methyl modified nucleotide
  modified_base (16)..(16): 5-methyl modified nucleotide
  modified_base (17)..(17): bicyclic nucleic acid (BNA)
  source: /note="3' tri-ethylene glycol (TEG)"
aguucuguccaagcccg

SEQ ID NO: 15116 - RNA, 16 nt, Artificial Sequence
  source: /note="Description of Artificial Sequence: Synthetic oligonucleotide"
  source: /note="RNA"
  modified_base (5)..(5): 5-methyl modified nucleotide
  modified_base (9)..(9): 5-methyl modified nucleotide
  modified_base (10)..(10): 5-methyl modified nucleotide
  modified_base (14)..(14): 5-methyl modified nucleotide
  modified_base (15)..(15): 5-methyl modified nucleotide
  modified_base (16)..(16): 5-methyl bicyclic nucleic acid
  source: /note="3' tri-ethylene glycol (TEG)"
aguucuguccaagccc

SEQ ID NO: 15117 - RNA, 15 nt, Artificial Sequence
  source: /note="Description of Artificial Sequence: Synthetic oligonucleotide"
  source: /note="RNA"
  modified_base (5)..(5): 5-methyl modified nucleotide
  modified_base (9)..(9): 5-methyl modified nucleotide
  modified_base (10)..(10): 5-methyl modified nucleotide
  modified_base (14)..(14): 5-methyl modified nucleotide
  modified_base (15)..(15): 5-methyl bicyclic nucleic acid
  source: /note="3' tri-ethylene glycol (TEG)"
aguucuguccaagcc

SEQ ID NO: 15118 - RNA, 14 nt, Artificial Sequence
  source: /note="Description of Artificial Sequence: Synthetic oligonucleotide"
  source: /note="RNA"
  modified_base (5)..(5): 5-methyl modified nucleotide
  modified_base (9)..(9): 5-methyl modified nucleotide
  modified_base (10)..(10): 5-methyl modified nucleotide
  modified_base (14)..(14): 5-methyl bicyclic nucleic acid
  source: /note="3' tri-ethylene glycol (TEG)"
aguucuguccaagc

SEQ ID NO: 15119 - RNA, 13 nt, Artificial Sequence
  source: /note="Description of Artificial Sequence: Synthetic oligonucleotide"
  source: /note="RNA"
  modified_base (5)..(5): 5-methyl modified nucleotide
  modified_base (9)..(9): 5-methyl modified nucleotide
  modified_base (10)..(10): 5-methyl modified nucleotide
  modified_base (13)..(13): bicyclic nucleic acid (BNA)
  source: /note="3' tri-ethylene glycol (TEG)"
aguucuguccaag

SEQ ID NO: 15120 - RNA, 12 nt, Artificial Sequence
  source: /note="Description of Artificial Sequence: Synthetic oligonucleotide"
  source: /note="RNA"
  modified_base (5)..(5): 5-methyl modified nucleotide
  modified_base (9)..(9): 5-methyl modified nucleotide
  modified_base (10)..(10): 5-methyl modified nucleotide
  modified_base (12)..(12): bicyclic nucleic acid (BNA)
  source: /note="3' tri-ethylene glycol (TEG)"
aguucuguccaa

SEQ ID NO: 15121 - RNA, 11 nt, Artificial Sequence
  source: /note="Description of Artificial Sequence: Synthetic oligonucleotide"
  source: /note="RNA"
  modified_base (5)..(5): 5-methyl modified nucleotide
  modified_base (9)..(9): 5-methyl modified nucleotide
  modified_base (10)..(10): 5-methyl modified nucleotide
  modified_base (11)..(11): bicyclic nucleic acid (BNA)
  source: /note="3' tri-ethylene glycol (TEG)"
aguucugucca

SEQ ID NO: 15122 - RNA, 10 nt, Artificial Sequence
  source: /note="Description of Artificial Sequence: Synthetic oligonucleotide"
  source: /note="RNA"
  modified_base (5)..(5): 5-methyl modified nucleotide
  modified_base (9)..(9): 5-methyl modified nucleotide
  modified_base (10)..(10): 5-methyl bicyclic nucleic acid
  source: /note="3' tri-ethylene glycol (TEG)"
aguucugucc

SEQ ID NO: 15123 - RNA, 9 nt, Artificial Sequence
  source: /note="Description of Artificial Sequence: Synthetic oligonucleotide"
  source: /note="RNA"
  modified_base (5)..(5): 5-methyl modified nucleotide
  modified_base (9)..(9): 5-methyl bicyclic nucleic acid
  source: /note="3' tri-ethylene glycol (TEG)"
aguucuguc

SEQ ID NO: 15124 - DNA, 8 bp, Artificial Sequence
  source: /note="Description of Artificial Sequence: Synthetic oligonucleotide"
  source: /note="Description of Combined DNA/RNA Molecule: Synthetic oligonucleotide"
  source: /note="DNA/RNA"
  modified_base (5)..(5): 5-methyl modified nucleotide
  modified_base (8)..(8): bicyclic nucleic acid (BNA)
  source: /note="3' tri-ethylene glycol (TEG)"
aguucugt

SEQ ID NO: 15125 - DNA, 20 bp, Artificial Sequence
  source: /note="Description of Artificial Sequence: Synthetic oligonucleotide"
  source: /note="Description of Combined DNA/RNA Molecule: Synthetic oligonucleotide"
  source: /note="DNA/RNA"
  modified_base (6)..(6): 5-methyl modified nucleotide
  modified_base (10)..(10): 5-methyl modified nucleotide
  modified_base (11)..(11): 5-methyl modified nucleotide
  modified_base (15)..(15): 5-methyl modified nucleotide
  modified_base (16)..(16): 5-methyl modified nucleotide
  modified_base (17)..(17): 5-methyl modified nucleotide
  modified_base (20)..(20): bicyclic nucleic acid (BNA)
  source: /note="3' tri-ethylene glycol (TEG)"
aaguucuguccaagcccggt

SEQ ID NO: 15126 - RNA, 19 nt, Artificial Sequence
  source: /note="Description of Artificial Sequence: Synthetic oligonucleotide"
  source: /note="RNA"
  modified_base (6)..(6): 5-methyl modified nucleotide
  modified_base (10)..(10): 5-methyl modified nucleotide
  modified_base (11)..(11): 5-methyl modified nucleotide
  modified_base (15)..(15): 5-methyl modified nucleotide
  modified_base (16)..(16): 5-methyl modified nucleotide
  modified_base (17)..(17): 5-methyl modified nucleotide
  modified_base (19)..(19): bicyclic nucleic acid (BNA)
  source: /note="3' tri-ethylene glycol (TEG)"
aaguucuguccaagcccgg

SEQ ID NO: 15127 - RNA, 18 nt, Artificial Sequence
  source: /note="Description of Artificial Sequence: Synthetic oligonucleotide"
  source: /note="RNA"
  modified_base (6)..(6): 5-methyl modified nucleotide
  modified_base (10)..(10): 5-methyl modified nucleotide
  modified_base (11)..(11): 5-methyl modified nucleotide
  modified_base (15)..(15): 5-methyl modified nucleotide
  modified_base (16)..(16): 5-methyl modified nucleotide
  modified_base (17)..(17): 5-methyl modified nucleotide
  modified_base (18)..(18): bicyclic nucleic acid (BNA)
  source: /note="3' tri-ethylene glycol (TEG)"
aaguucuguccaagcccg

SEQ ID NO: 15128 - RNA, 17 nt, Artificial Sequence
  source: /note="Description of Artificial Sequence: Synthetic oligonucleotide"
  source: /note="RNA"
  modified_base (6)..(6): 5-methyl modified nucleotide
  modified_base (10)..(10): 5-methyl modified nucleotide
  modified_base (11)..(11): 5-methyl modified nucleotide
  modified_base (15)..(15): 5-methyl modified nucleotide
  modified_base (16)..(16): 5-methyl modified nucleotide
  modified_base (17)..(17): 5-methyl bicyclic nucleic acid
  source: /note="3' tri-ethylene glycol (TEG)"
aaguucuguccaagccc

SEQ ID NO: 15129 - RNA, 16 nt, Artificial Sequence
  source: /note="Description of Artificial Sequence: Synthetic oligonucleotide"
  source: /note="RNA"
  modified_base (6)..(6): 5-methyl modified nucleotide
  modified_base (10)..(10): 5-methyl modified nucleotide
  modified_base (11)..(11): 5-methyl modified nucleotide
  modified_base (15)..(15): 5-methyl modified nucleotide
  modified_base (16)..(16): 5-methyl bicyclic nucleic acid
  source: /note="3' tri-ethylene glycol (TEG)"
aaguucuguccaagcc

SEQ ID NO: 15130 - RNA, 15 nt, Artificial Sequence
  source: /note="Description of Artificial Sequence: Synthetic oligonucleotide"
  source: /note="RNA"
  modified_base (6)..(6): 5-methyl modified nucleotide
  modified_base (10)..(10): 5-methyl modified nucleotide
  modified_base (11)..(11): 5-methyl modified nucleotide
  modified_base (15)..(15): 5-methyl bicyclic nucleic acid
  source: /note="3' tri-ethylene glycol (TEG)"
aaguucuguccaagc

SEQ ID NO: 15131 - RNA, 14 nt, Artificial Sequence
  source: /note="Description of Artificial Sequence: Synthetic oligonucleotide"
  source: /note="RNA"
  modified_base (6)..(6): 5-methyl modified nucleotide
  modified_base (10)..(10): 5-methyl modified nucleotide
  modified_base (11)..(11): 5-methyl modified nucleotide
  modified_base (14)..(14): bicyclic nucleic acid (BNA)
  source: /note="3' tri-ethylene glycol (TEG)"
aaguucuguccaag

SEQ ID NO: 15132 - RNA, 13 nt, Artificial Sequence
  source: /note="Description of Artificial Sequence: Synthetic oligonucleotide"
  source: /note="RNA"
  modified_base (6)..(6): 5-methyl modified nucleotide
  modified_base (10)..(10): 5-methyl modified nucleotide
  modified_base (11)..(11): 5-methyl modified nucleotide
  modified_base (13)..(13): bicyclic nucleic acid (BNA)
  source: /note="3' tri-ethylene glycol (TEG)"
aaguucuguccaa

SEQ ID NO: 15133 - RNA, 12 nt, Artificial Sequence
  source: /note="Description of Artificial Sequence: Synthetic oligonucleotide"
  source: /note="RNA"
  modified_base (6)..(6): 5-methyl modified nucleotide
  modified_base (10)..(10): 5-methyl modified nucleotide
  modified_base (11)..(11): 5-methyl modified nucleotide
  modified_base (12)..(12): bicyclic nucleic acid (BNA)
  source: /note="3' tri-ethylene glycol (TEG)"
aaguucugucca

SEQ ID NO: 15134 - RNA, 11 nt, Artificial Sequence
  source: /note="Description of Artificial Sequence: Synthetic oligonucleotide"
  source: /note="RNA"
  modified_base (6)..(6): 5-methyl modified nucleotide
  modified_base (10)..(10): 5-methyl modified nucleotide
  modified_base (11)..(11): 5-methyl bicyclic nucleic acid
  source: /note="3' tri-ethylene glycol (TEG)"
aaguucugucc

SEQ ID NO: 15135 - RNA, 10 nt, Artificial Sequence
  source: /note="Description of Artificial Sequence: Synthetic oligonucleotide"
  source: /note="RNA"
  modified_base (6)..(6): 5-methyl modified nucleotide
  modified_base (10)..(10): 5-methyl bicyclic nucleic acid
  source: /note="3' tri-ethylene glycol (TEG)"
aaguucuguc

SEQ ID NO: 15136 - DNA, 9 bp, Artificial Sequence
  source: /note="Description of Artificial Sequence: Synthetic oligonucleotide"
  source: /note="Description of Combined DNA/RNA Molecule: Synthetic oligonucleotide"
  source: /note="DNA/RNA"
  modified_base (6)..(6): 5-methyl modified nucleotide
  modified_base (9)..(9): bicyclic nucleic acid (BNA)
  source: /note="3' tri-ethylene glycol (TEG)"
aaguucugt

SEQ ID NO: 15137 - RNA, 8 nt, Artificial Sequence
  source: /note="Description of Artificial Sequence: Synthetic oligonucleotide"
  source: /note="RNA"
  modified_base (6)..(6): 5-methyl modified nucleotide
  modified_base (8)..(8): bicyclic nucleic acid (BNA)
  source: /note="3' tri-ethylene glycol (TEG)"
aaguucug

SEQ ID NO: 15138 - RNA, 20 nt, Artificial Sequence
  source: /note="Description of Artificial Sequence: Synthetic oligonucleotide"
  source: /note="RNA"
  modified_base (7)..(7): 5-methyl modified nucleotide
  modified_base (11)..(11): 5-methyl modified nucleotide
  modified_base (12)..(12): 5-methyl modified nucleotide
  modified_base (16)..(16): 5-methyl modified nucleotide
  modified_base (17)..(17): 5-methyl modified nucleotide
  modified_base (18)..(18): 5-methyl modified nucleotide
  modified_base (20)..(20): bicyclic nucleic acid (BNA)
  source: /note="3' tri-ethylene glycol (TEG)"
uaaguucuguccaagcccgg

SEQ ID NO: 15139 - RNA, 19 nt, Artificial Sequence
  source: /note="Description of Artificial Sequence: Synthetic oligonucleotide"
  source: /note="RNA"
  modified_base (7)..(7): 5-methyl modified nucleotide
  modified_base (11)..(11): 5-methyl modified nucleotide
  modified_base (12)..(12): 5-methyl modified nucleotide
  modified_base (16)..(16): 5-methyl modified nucleotide
  modified_base (17)..(17): 5-methyl modified nucleotide
  modified_base (18)..(18): 5-methyl modified nucleotide
  modified_base (19)..(19): bicyclic nucleic acid (BNA)
  source: /note="3' tri-ethylene glycol (TEG)"
uaaguucuguccaagcccg

SEQ ID NO: 15140 - RNA, 18 nt, Artificial Sequence
  source: /note="Description of Artificial Sequence: Synthetic oligonucleotide"
  source: /note="RNA"
  modified_base (7)..(7): 5-methyl modified nucleotide
  modified_base (11)..(11): 5-methyl modified nucleotide
  modified_base (12)..(12): 5-methyl modified nucleotide
  modified_base (16)..(16): 5-methyl modified nucleotide
  modified_base (17)..(17): 5-methyl modified nucleotide
  modified_base (18)..(18): 5-methyl bicyclic nucleic acid
  source: /note="3' tri-ethylene glycol (TEG)"
uaaguucuguccaagccc

SEQ ID NO: 15141 - RNA, 17 nt, Artificial Sequence
  source: /note="Description of Artificial Sequence: Synthetic oligonucleotide"
  source: /note="RNA"
  modified_base (7)..(7): 5-methyl modified nucleotide
  modified_base (11)..(11): 5-methyl modified nucleotide
  modified_base (12)..(12): 5-methyl modified nucleotide
  modified_base (16)..(16): 5-methyl modified nucleotide
  modified_base (17)..(17): 5-methyl bicyclic nucleic acid
  source: /note="3' tri-ethylene glycol (TEG)"
uaaguucuguccaagcc

SEQ ID NO: 15142 - RNA, 16 nt, Artificial Sequence
  source: /note="Description of Artificial Sequence: Synthetic oligonucleotide"
  source: /note="RNA"
  modified_base (7)..(7): 5-methyl modified nucleotide
  modified_base (11)..(11): 5-methyl modified nucleotide
  modified_base (12)..(12): 5-methyl modified nucleotide
  modified_base (16)..(16): 5-methyl bicyclic nucleic acid
  source: /note="3' tri-ethylene glycol (TEG)"
uaaguucuguccaagc

SEQ ID NO: 15143 - RNA, 14 nt, Artificial Sequence
  source: /note="Description of Artificial Sequence: Synthetic oligonucleotide"
  source: /note="RNA"
  modified_base (7)..(7): 5-methyl modified nucleotide
  modified_base (11)..(11): 5-methyl modified nucleotide
  modified_base (12)..(12): 5-methyl modified nucleotide
  modified_base (14)..(14): bicyclic nucleic acid (BNA)
  source: /note="3' tri-ethylene glycol (TEG)"
uaaguucuguccaa

SEQ ID NO: 15144 - RNA, 13 nt, Artificial Sequence
  source: /note="Description of Artificial Sequence: Synthetic oligonucleotide"
  source: /note="RNA"
  modified_base (7)..(7): 5-methyl modified nucleotide
  modified_base (11)..(11): 5-methyl modified nucleotide
  modified_base (12)..(12): 5-methyl modified nucleotide
  modified_base (13)..(13): bicyclic nucleic acid (BNA)
  source: /note="3' tri-ethylene glycol (TEG)"
uaaguucugucca

SEQ ID NO: 15145 - RNA, 12 nt, Artificial Sequence
  source: /note="Description of Artificial Sequence: Synthetic oligonucleotide"
  source: /note="RNA"
  modified_base (7)..(7): 5-methyl modified nucleotide
  modified_base (11)..(11): 5-methyl modified nucleotide
  modified_base (12)..(12): 5-methyl bicyclic nucleic acid
  source: /note="3' tri-ethylene glycol (TEG)"
uaaguucugucc

SEQ ID NO: 15146 - RNA, 11 nt, Artificial Sequence
  source: /note="Description of Artificial Sequence: Synthetic oligonucleotide"
  source: /note="RNA"
  modified_base (7)..(7): 5-methyl modified nucleotide
  modified_base (11)..(11): 5-methyl bicyclic nucleic acid
  source: /note="3' tri-ethylene glycol (TEG)"
uaaguucuguc

SEQ ID NO: 15147 - DNA, 10 bp, Artificial Sequence
  source: /note="Description of Artificial Sequence: Synthetic oligonucleotide"
  source: /note="Description of Combined DNA/RNA Molecule: Synthetic oligonucleotide"
  source: /note="DNA/RNA"
  modified_base (7)..(7): 5-methyl modified nucleotide
  modified_base (10)..(10): bicyclic nucleic acid (BNA)
  source: /note="3' tri-ethylene glycol (TEG)"
uaaguucugt

SEQ ID NO: 15148 - RNA, 9 nt, Artificial Sequence
  source: /note="Description of Artificial Sequence: Synthetic oligonucleotide"
  source: /note="RNA"
  modified_base (7)..(7): 5-methyl modified nucleotide
  modified_base (9)..(9): bicyclic nucleic acid (BNA)
  source: /note="3' tri-ethylene glycol (TEG)"
uaaguucug

SEQ ID NO: 15149 - DNA, 8 bp, Artificial Sequence
  source: /note="Description of Artificial Sequence: Synthetic oligonucleotide"
  source: /note="Description of Combined DNA/RNA Molecule: Synthetic oligonucleotide"
  source: /note="DNA/RNA"
  modified_base (7)..(7): 5-methyl modified nucleotide
  modified_base (8)..(8): bicyclic nucleic acid (BNA)
  source: /note="3' tri-ethylene glycol (TEG)"
uaaguuct

SEQ ID NO: 15150 - RNA, 20 nt, Artificial Sequence
  source: /note="Description of Artificial Sequence: Synthetic oligonucleotide"
  source: /note="RNA"
  modified_base (8)..(8): 5-methyl modified nucleotide
  modified_base (12)..(12): 5-methyl modified nucleotide
  modified_base (13)..(13): 5-methyl modified nucleotide
  modified_base (17)..(17): 5-methyl modified nucleotide
  modified_base (18)..(18): 5-methyl modified nucleotide
  modified_base (19)..(19): 5-methyl modified nucleotide
  modified_base (20)..(20): bicyclic nucleic acid (BNA)
  source: /note="3' tri-ethylene glycol (TEG)"
guaaguucuguccaagcccg

SEQ ID NO: 15151 - RNA, 19 nt, Artificial Sequence
  source: /note="Description of Artificial Sequence: Synthetic oligonucleotide"
  source: /note="RNA"
  modified_base (8)..(8): 5-methyl modified nucleotide
  modified_base (12)..(12): 5-methyl modified nucleotide
  modified_base (13)..(13): 5-methyl modified nucleotide
  modified_base (17)..(17): 5-methyl modified nucleotide
  modified_base (18)..(18): 5-methyl modified nucleotide
  modified_base (19)..(19): 5-methyl bicyclic nucleic acid
  source: /note="3' tri-ethylene glycol (TEG)"
guaaguucuguccaagccc

SEQ ID NO: 15152 - RNA, 17 nt, Artificial Sequence
  source: /note="Description of Artificial Sequence: Synthetic oligonucleotide"
  source: /note="RNA"
  modified_base (8)..(8): 5-methyl modified nucleotide
  modified_base (12)..(12): 5-methyl modified nucleotide
  modified_base (13)..(13): 5-methyl modified nucleotide
  modified_base (17)..(17): 5-methyl bicyclic nucleic acid
  source: /note="3' tri-ethylene glycol (TEG)"
guaaguucuguccaagc

SEQ ID NO: 15153 - RNA, 16 nt, Artificial Sequence
  source: /note="Description of Artificial Sequence: Synthetic oligonucleotide"
  source: /note="RNA"
  modified_base (8)..(8): 5-methyl modified nucleotide
  modified_base (12)..(12): 5-methyl modified nucleotide
  modified_base (13)..(13): 5-methyl modified nucleotide
  modified_base (16)..(16): bicyclic nucleic acid (BNA)
  source: /note="3' tri-ethylene glycol (TEG)"
guaaguucuguccaag

SEQ ID NO: 15154 - RNA, 15 nt, Artificial Sequence
  source: /note="Description of Artificial Sequence: Synthetic oligonucleotide"
  source: /note="RNA"
  modified_base (8)..(8): 5-methyl modified nucleotide
  modified_base (12)..(12): 5-methyl modified nucleotide
  modified_base (13)..(13): 5-methyl modified nucleotide
  modified_base (15)..(15): bicyclic nucleic acid (BNA)
  source: /note="3' tri-ethylene glycol (TEG)"
guaaguucuguccaa

SEQ ID NO: 15155 - RNA, 14 nt, Artificial Sequence
  source: /note="Description of Artificial Sequence: Synthetic oligonucleotide"
  source: /note="RNA"
  modified_base (8)..(8): 5-methyl modified nucleotide
  modified_base (12)..(12): 5-methyl modified nucleotide
  modified_base (13)..(13): 5-methyl modified nucleotide
  modified_base (14)..(14): bicyclic nucleic acid (BNA)
  source: /note="3' tri-ethylene glycol (TEG)"
guaaguucugucca

SEQ ID NO: 15156 - RNA, 13 nt, Artificial Sequence
  source: /note="Description of Artificial Sequence: Synthetic oligonucleotide"
  source: /note="RNA"
  modified_base (8)..(8): 5-methyl modified nucleotide
  modified_base (12)..(12): 5-methyl modified nucleotide
  modified_base (13)..(13): 5-methyl bicyclic nucleic acid
  source: /note="3' tri-ethylene glycol (TEG)"
guaaguucugucc

SEQ ID NO: 15157 - RNA, 12 nt, Artificial Sequence
  source: /note="Description of Artificial Sequence: Synthetic oligonucleotide"
  source: /note="RNA"
  modified_base (8)..(8): 5-methyl modified nucleotide
  modified_base (12)..(12): 5-methyl bicyclic nucleic acid
  source: /note="3' tri-ethylene glycol (TEG)"
guaaguucuguc

SEQ ID NO: 15158 - DNA, 11 bp, Artificial Sequence
  source: /note="Description of Artificial Sequence: Synthetic oligonucleotide"
  source: /note="Description of Combined DNA/RNA Molecule: Synthetic oligonucleotide"
  source: /note="DNA/RNA"
  modified_base (8)..(8): 5-methyl modified nucleotide
  modified_base (11)..(11): bicyclic nucleic acid (BNA)
  source: /note="3' tri-ethylene glycol (TEG)"
guaaguucugt

SEQ ID NO: 15159 - RNA, 10 nt, Artificial Sequence
  source: /note="Description of Artificial Sequence: Synthetic oligonucleotide"
  source: /note="RNA"
  modified_base (8)..(8): 5-methyl modified nucleotide
  modified_base (10)..(10): bicyclic nucleic acid (BNA)
  source: /note="3' tri-ethylene glycol (TEG)"
guaaguucug

SEQ ID NO: 15160 - DNA, 9 bp, Artificial Sequence
  source: /note="Description of Artificial Sequence: Synthetic oligonucleotide"
  source: /note="Description of Combined DNA/RNA Molecule: Synthetic oligonucleotide"
  source: /note="DNA/RNA"
  modified_base (8)..(8): 5-methyl modified nucleotide
  modified_base (9)..(9): bicyclic nucleic acid (BNA)
  source: /note="3' tri-ethylene glycol (TEG)"
guaaguuct

SEQ ID NO: 15161 - RNA, 8 nt, Artificial Sequence
  source: /note="Description of Artificial Sequence: Synthetic oligonucleotide"
  source: /note="RNA"
  modified_base (8)..(8): 5-methyl bicyclic nucleic acid
  source: /note="3' tri-ethylene glycol (TEG)"
guaaguuc

SEQ ID NO: 15162 - RNA, 20 nt, Artificial Sequence
  source: /note="Description of Artificial Sequence: Synthetic oligonucleotide"
  source: /note="RNA"
  modified_base (9)..(9): 5-methyl modified nucleotide
  modified_base (13)..(13): 5-methyl modified nucleotide
  modified_base (14)..(14): 5-methyl modified nucleotide
  modified_base (18)..(18): 5-methyl modified nucleotide
  modified_base (19)..(19): 5-methyl modified nucleotide
  modified_base (20)..(20): 5-methyl bicyclic nucleic acid
  source: /note="3' tri-ethylene glycol (TEG)"
gguaaguucuguccaagccc

SEQ ID NO: 15163 - RNA, 19 nt, Artificial Sequence
  source: /note="Description of Artificial Sequence: Synthetic oligonucleotide"
  source: /note="RNA"
  modified_base (9)..(9): 5-methyl modified nucleotide
  modified_base (13)..(13): 5-methyl modified nucleotide
  modified_base (14)..(14): 5-methyl modified nucleotide
  modified_base (18)..(18): 5-methyl modified nucleotide
  modified_base (19)..(19): 5-methyl bicyclic nucleic acid
  source: /note="3' tri-ethylene glycol (TEG)"
gguaaguucuguccaagcc

SEQ ID NO: 15164 - RNA, 17 nt, Artificial Sequence
  source: /note="Description of Artificial Sequence: Synthetic oligonucleotide"
  source: /note="RNA"
  modified_base (9)..(9): 5-methyl modified nucleotide
  modified_base (13)..(13): 5-methyl modified nucleotide
  modified_base (14)..(14): 5-methyl modified nucleotide
  modified_base (17)..(17): bicyclic nucleic acid (BNA)
  source: /note="3' tri-ethylene glycol (TEG)"
gguaaguucuguccaag

SEQ ID NO: 15165 - RNA, 16 nt, Artificial Sequence
  source: /note="Description of Artificial Sequence: Synthetic oligonucleotide"
  source: /note="RNA"
  modified_base (9)..(9): 5-methyl modified nucleotide
  modified_base (13)..(13): 5-methyl modified nucleotide
  modified_base (14)..(14): 5-methyl modified nucleotide
  modified_base (16)..(16): bicyclic nucleic acid (BNA)
  source: /note="3' tri-ethylene glycol (TEG)"
gguaaguucuguccaa

SEQ ID NO: 15166 - RNA, 15 nt, Artificial Sequence
  source: /note="Description of Artificial Sequence: Synthetic oligonucleotide"
  source: /note="RNA"
  modified_base (9)..(9): 5-methyl modified nucleotide
  modified_base (13)..(13): 5-methyl modified nucleotide
  modified_base (14)..(14): 5-methyl modified nucleotide
  modified_base (15)..(15): bicyclic nucleic acid (BNA)
  source: /note="3' tri-ethylene glycol (TEG)"
gguaaguucugucca

SEQ ID NO: 15167 - RNA, 14 nt, Artificial Sequence
  source: /note="Description of Artificial Sequence: Synthetic oligonucleotide"
  source: /note="RNA"
  modified_base (9)..(9): 5-methyl modified nucleotide
  modified_base (13)..(13): 5-methyl modified nucleotide
  modified_base (14)..(14): 5-methyl bicyclic nucleic acid
  source: /note="3' tri-ethylene glycol (TEG)"
gguaaguucugucc

SEQ ID NO: 15168 - RNA, 13 nt, Artificial Sequence
  source: /note="Description of Artificial Sequence: Synthetic oligonucleotide"
  source: /note="RNA"
  modified_base (9)..(9): 5-methyl modified nucleotide
  modified_base (13)..(13): 5-methyl bicyclic nucleic acid
  source: /note="3' tri-ethylene glycol (TEG)"
gguaaguucuguc

SEQ ID NO: 15169 - DNA, 12 bp, Artificial Sequence
  source: /note="Description of Artificial Sequence: Synthetic oligonucleotide"
  source: /note="Description of Combined DNA/RNA Molecule: Synthetic oligonucleotide"
  source: /note="DNA/RNA"
  modified_base (9)..(9): 5-methyl modified nucleotide
  modified_base (12)..(12): bicyclic nucleic acid (BNA)
  source: /note="3' tri-ethylene glycol (TEG)"
gguaaguucugt

SEQ ID NO: 15170 - RNA, 11 nt, Artificial Sequence
  source: /note="Description of Artificial Sequence: Synthetic oligonucleotide"
  source: /note="RNA"
  modified_base (9)..(9): 5-methyl modified nucleotide
  modified_base (11)..(11): bicyclic nucleic acid (BNA)
  source: /note="3' tri-ethylene glycol (TEG)"
gguaaguucug

SEQ ID NO: 15171 - DNA, 10 bp, Artificial Sequence
  source: /note="Description of Artificial Sequence: Synthetic oligonucleotide"
  source: /note="Description of Combined DNA/RNA Molecule: Synthetic oligonucleotide"
  source: /note="DNA/RNA"
  modified_base (9)..(9): 5-methyl modified nucleotide
  modified_base (10)..(10): bicyclic nucleic acid (BNA)
  source: /note="3' tri-ethylene glycol (TEG)"
gguaaguuct

SEQ ID NO: 15172 - RNA, 9 nt, Artificial Sequence
  source: /note="Description of Artificial Sequence: Synthetic oligonucleotide"
  source: /note="RNA"
  modified_base (9)..(9): 5-methyl bicyclic nucleic acid
  source: /note="3' tri-ethylene glycol (TEG)"
gguaaguuc

SEQ ID NO: 15173 - DNA, 8 bp, Artificial Sequence
  source: /note="Description of Artificial Sequence: Synthetic oligonucleotide"
  source: /note="Description of Combined DNA/RNA Molecule: Synthetic oligonucleotide"
  source: /note="DNA/RNA"
  modified_base (8)..(8): bicyclic nucleic acid (BNA)
  source: /note="3' tri-ethylene glycol (TEG)"
gguaagut

SEQ ID NO: 15174 - RNA, 20 nt, Artificial Sequence
  source: /note="Description of Artificial Sequence: Synthetic oligonucleotide"
  source: /note="RNA"
  modified_base (1)..(1): 5-methyl modified nucleotide
  modified_base (10)..(10): 5-methyl modified nucleotide
  modified_base (14)..(14): 5-methyl modified nucleotide
  modified_base (15)..(15): 5-methyl modified nucleotide
  modified_base (19)..(19): 5-methyl modified nucleotide
  modified_base (20)..(20): 5-methyl bicyclic nucleic acid
  source: /note="3' tri-ethylene glycol (TEG)"
cgguaaguucuguccaagcc

SEQ ID NO: 15175 - RNA, 19 nt, Artificial Sequence
  source: /note="Description of Artificial Sequence: Synthetic oligonucleotide"
  source: /note="RNA"
  modified_base (1)..(1): 5-methyl modified nucleotide
  modified_base (10)..(10): 5-methyl modified nucleotide
  modified_base (14)..(14): 5-methyl modified nucleotide
  modified_base (15)..(15): 5-methyl modified nucleotide
  modified_base (19)..(19): 5-methyl bicyclic nucleic acid
  source: /note="3' tri-ethylene glycol (TEG)"
cgguaaguucuguccaagc

SEQ ID NO: 15176 - RNA, 18 nt, Artificial Sequence
  source: /note="Description of Artificial Sequence: Synthetic oligonucleotide"
  source: /note="RNA"
  modified_base (1)..(1): 5-methyl modified nucleotide
  modified_base (10)..(10): 5-methyl modified nucleotide
  modified_base (14)..(14): 5-methyl modified nucleotide
  modified_base (15)..(15): 5-methyl modified nucleotide
  modified_base (18)..(18): bicyclic nucleic acid (BNA)
  source: /note="3' tri-ethylene glycol (TEG)"
cgguaaguucuguccaag

SEQ ID NO: 15177 - RNA, 17 nt, Artificial Sequence
  source: /note="Description of Artificial Sequence: Synthetic oligonucleotide"
  source: /note="RNA"
  modified_base (1)..(1): 5-methyl modified nucleotide
  modified_base (10)..(10): 5-methyl modified nucleotide
  modified_base (14)..(14): 5-methyl modified nucleotide
  modified_base (15)..(15): 5-methyl modified nucleotide
  modified_base (17)..(17): bicyclic nucleic acid (BNA)
  source: /note="3' tri-ethylene glycol (TEG)"
cgguaaguucuguccaa

SEQ ID NO: 15178 - RNA, 16 nt, Artificial Sequence
  source: /note="Description of Artificial Sequence: Synthetic oligonucleotide"
  source: /note="RNA"
  modified_base (1)..(1): 5-methyl modified nucleotide
  modified_base (10)..(10): 5-methyl modified nucleotide
  modified_base (14)..(14): 5-methyl modified nucleotide
  modified_base (15)..(15): 5-methyl modified nucleotide
  modified_base (16)..(16): bicyclic nucleic acid (BNA)
  source: /note="3' tri-ethylene glycol (TEG)"
cgguaaguucugucca

SEQ ID NO: 15179 - RNA, 15 nt, Artificial Sequence
  source: /note="Description of Artificial Sequence: Synthetic oligonucleotide"
  source: /note="RNA"
  modified_base (1)..(1): 5-methyl modified nucleotide
  modified_base (10)..(10): 5-methyl modified nucleotide
  modified_base (14)..(14): 5-methyl modified nucleotide
  modified_base (15)..(15): 5-methyl bicyclic nucleic acid
  source: /note="3' tri-ethylene glycol (TEG)"
cgguaaguucugucc

SEQ ID NO: 15180 - RNA, 14 nt, Artificial Sequence
  source: /note="Description of Artificial Sequence: Synthetic oligonucleotide"
  source: /note="RNA"
  modified_base (1)..(1): 5-methyl modified nucleotide
  modified_base (10)..(10): 5-methyl modified nucleotide
  modified_base (14)..(14): 5-methyl bicyclic nucleic acid
  source: /note="3' tri-ethylene glycol (TEG)"
cgguaaguucuguc

SEQ ID NO: 15181 - DNA, 13 bp, Artificial Sequence
  source: /note="Description of Artificial Sequence: Synthetic oligonucleotide"
  source: /note="Description of Combined DNA/RNA Molecule: Synthetic oligonucleotide"
  source: /note="DNA/RNA"
  modified_base (1)..(1): 5-methyl modified nucleotide
  modified_base (10)..(10): 5-methyl modified nucleotide
  modified_base (13)..(13): bicyclic nucleic acid (BNA)
  source: /note="3' tri-ethylene glycol (TEG)"
cgguaaguucugt

SEQ ID NO: 15182 - RNA, 12 nt, Artificial Sequence
  source: /note="Description of Artificial Sequence: Synthetic oligonucleotide"
  source: /note="RNA"
  modified_base (1)..(1): 5-methyl modified nucleotide
  modified_base (10)..(10): 5-methyl modified nucleotide
  modified_base (12)..(12): bicyclic nucleic acid (BNA)
  source: /note="3' tri-ethylene glycol (TEG)"
cgguaaguucug

SEQ ID NO: 15183 - DNA, 11 bp, Artificial Sequence
  source: /note="Description of Artificial Sequence: Synthetic oligonucleotide"
  source: /note="Description of Combined DNA/RNA Molecule: Synthetic oligonucleotide"
  source: /note="DNA/RNA"
  modified_base (1)..(1): 5-methyl modified nucleotide
  modified_base (10)..(10): 5-methyl modified nucleotide
  modified_base (11)..(11): bicyclic nucleic acid (BNA)
  source: /note="3' tri-ethylene glycol (TEG)"
cgguaaguuct

SEQ ID NO: 15184 - RNA, 10 nt, Artificial Sequence
  source: /note="Description of Artificial Sequence: Synthetic oligonucleotide"
  source: /note="RNA"
  modified_base (1)..(1): 5-methyl modified nucleotide
  modified_base (10)..(10): 5-methyl bicyclic nucleic acid
  source: /note="3' tri-ethylene glycol (TEG)"
cgguaaguuc

SEQ ID NO: 15185 - DNA, 9 bp, Artificial Sequence
  source: /note="Description of Artificial Sequence: Synthetic oligonucleotide"
  source: /note="Description of Combined DNA/RNA Molecule: Synthetic oligonucleotide"
  source: /note="DNA/RNA"
  modified_base (1)..(1): 5-methyl modified nucleotide
  modified_base (9)..(9): bicyclic nucleic acid (BNA)
  source: /note="3' tri-ethylene glycol (TEG)"
cgguaagut

SEQ ID NO: 15186 - DNA, 8 bp, Artificial Sequence
  source: /note="Description of Artificial Sequence: Synthetic oligonucleotide"
  source: /note="Description of Combined DNA/RNA Molecule: Synthetic oligonucleotide"
  source: /note="DNA/RNA"
  modified_base (1)..(1): 5-methyl modified nucleotide
  modified_base (8)..(8): bicyclic nucleic acid (BNA)
  source: /note="3' tri-ethylene glycol (TEG)"
cgguaagt

SEQ ID NO: 15187 - RNA, 20 nt, Artificial Sequence
  source: /note="Description of Artificial Sequence: Synthetic oligonucleotide"
  source: /note="RNA"
  modified_base (2)..(2): 5-methyl modified nucleotide
  modified_base (11)..(11): 5-methyl modified nucleotide
  modified_base (15)..(15): 5-methyl modified nucleotide
  modified_base (16)..(16): 5-methyl modified nucleotide
  modified_base (20)..(20): 5-methyl bicyclic nucleic acid
  source: /note="3' tri-ethylene glycol (TEG)"
ucgguaaguucuguccaagc

SEQ ID NO: 15188 - RNA, 19 nt, Artificial Sequence
  source: /note="Description of Artificial Sequence: Synthetic oligonucleotide"
  source: /note="RNA"
  modified_base (2)..(2): 5-methyl modified nucleotide
  modified_base (11)..(11): 5-methyl modified nucleotide
  modified_base (15)..(15): 5-methyl modified nucleotide
  modified_base (16)..(16): 5-methyl modified nucleotide
  modified_base (19)..(19): bicyclic nucleic acid (BNA)
  source: /note="3' tri-ethylene glycol (TEG)"
ucgguaaguucuguccaag

SEQ ID NO: 15189 - RNA, 18 nt, Artificial Sequence
  source: /note="Description of Artificial Sequence: Synthetic oligonucleotide"
  source: /note="RNA"
  modified_base (2)..(2): 5-methyl modified nucleotide
  modified_base (11)..(11): 5-methyl modified nucleotide
  modified_base (15)..(15): 5-methyl modified nucleotide
  modified_base (16)..(16): 5-methyl modified nucleotide
  modified_base (18)..(18): bicyclic nucleic acid (BNA)
  source: /note="3' tri-ethylene glycol (TEG)"
ucgguaaguucuguccaa

SEQ ID NO: 15190 - RNA, 17 nt, Artificial Sequence
  source: /note="Description of Artificial Sequence: Synthetic oligonucleotide"
  source: /note="RNA"
  modified_base (2)..(2): 5-methyl modified nucleotide
  modified_base (11)..(11): 5-methyl modified nucleotide
  modified_base (15)..(15): 5-methyl modified nucleotide
  modified_base (16)..(16): 5-methyl modified nucleotide
  modified_base (17)..(17): bicyclic nucleic acid (BNA)
  source: /note="3' tri-ethylene glycol (TEG)"
ucgguaaguucugucca

SEQ ID NO: 15191 - RNA, 16 nt, Artificial Sequence
  source: /note="Description of Artificial Sequence: Synthetic oligonucleotide"
  source: /note="RNA"
  modified_base (2)..(2): 5-methyl modified nucleotide
  modified_base (11)..(11): 5-methyl modified nucleotide
  modified_base (15)..(15): 5-methyl modified nucleotide
  modified_base (16)..(16): 5-methyl bicyclic nucleic acid
  source: /note="3' tri-ethylene glycol (TEG)"
ucgguaaguucugucc

SEQ ID NO: 15192 - RNA, 15 nt, Artificial Sequence
  source: /note="Description of Artificial Sequence: Synthetic oligonucleotide"
  source: /note="RNA"
  modified_base (2)..(2): 5-methyl modified nucleotide
  modified_base (11)..(11): 5-methyl modified nucleotide
  modified_base (15)..(15): 5-methyl bicyclic nucleic acid
  source: /note="3' tri-ethylene glycol (TEG)"
ucgguaaguucuguc

SEQ ID NO: 15193 - DNA, 14 bp, Artificial Sequence
  source: /note="Description of Artificial Sequence: Synthetic oligonucleotide"
  source: /note="Description of Combined DNA/RNA Molecule: Synthetic oligonucleotide"
  source: /note="DNA/RNA"
  modified_base (2)..(2): 5-methyl modified nucleotide
  modified_base (11)..(11): 5-methyl modified nucleotide
  modified_base (14)..(14): bicyclic nucleic acid (BNA)
  source: /note="3' tri-ethylene glycol (TEG)"
ucgguaaguucugt

SEQ ID NO: 15194 - RNA, 13 nt, Artificial Sequence
  source: /note="Description of Artificial Sequence: Synthetic oligonucleotide"
  source: /note="RNA"
  modified_base (2)..(2): 5-methyl modified nucleotide
  modified_base (11)..(11): 5-methyl modified nucleotide
  modified_base (13)..(13): bicyclic nucleic acid (BNA)
  source: /note="3' tri-ethylene glycol (TEG)"
ucgguaaguucug

SEQ ID NO: 15195 - DNA, 12 bp, Artificial Sequence
  source: /note="Description of Artificial Sequence: Synthetic oligonucleotide"
  source: /note="Description of Combined DNA/RNA Molecule: Synthetic oligonucleotide"
  source: /note="DNA/RNA"
  modified_base (2)..(2): 5-methyl modified nucleotide
  modified_base (11)..(11): 5-methyl modified nucleotide
  modified_base (12)..(12): bicyclic nucleic acid (BNA)
  source: /note="3' tri-ethylene glycol (TEG)"
ucgguaaguuct

SEQ ID NO: 15196 - RNA, 11 nt, Artificial Sequence
  source: /note="Description of Artificial Sequence: Synthetic oligonucleotide"
  source: /note="RNA"
  modified_base (2)..(2): 5-methyl modified nucleotide
  modified_base (11)..(11): 5-methyl bicyclic nucleic acid
  source: /note="3' tri-ethylene glycol (TEG)"
ucgguaaguuc

SEQ ID NO: 15197 - DNA, 10 bp, Artificial Sequence
  source: /note="Description of Artificial Sequence: Synthetic oligonucleotide"
  source: /note="Description of Combined DNA/RNA Molecule: Synthetic oligonucleotide"
  source: /note="DNA/RNA"
  modified_base (2)..(2): 5-methyl modified nucleotide
  modified_base (10)..(10): bicyclic nucleic acid (BNA)
  source: /note="3' tri-ethylene glycol (TEG)"
ucgguaagut

SEQ ID NO: 15198 - DNA, 9 bp, Artificial Sequence
  source: /note="Description of Artificial Sequence: Synthetic oligonucleotide"
  source: /note="Description of Combined DNA/RNA Molecule: Synthetic oligonucleotide"
  source: /note="DNA/RNA"
  modified_base (2)..(2): 5-methyl modified nucleotide
  modified_base (9)..(9): bicyclic nucleic acid (BNA)
  source: /note="3' tri-ethylene glycol (TEG)"
ucgguaagt

SEQ ID NO: 15199 - RNA, 20 nt, Artificial Sequence
  source: /note="Description of Artificial Sequence: Synthetic oligonucleotide"
  source: /note="RNA"
  modified_base (3)..(3): 5-methyl modified nucleotide
  modified_base (12)..(12): 5-methyl modified nucleotide
  modified_base (16)..(16): 5-methyl modified nucleotide
  modified_base (17)..(17): 5-methyl modified nucleotide
  modified_base (20)..(20): bicyclic nucleic acid (BNA)
  source: /note="3' tri-ethylene glycol (TEG)"
gucgguaaguucuguccaag

SEQ ID NO: 15200 - RNA, 19 nt, Artificial Sequence
  source: /note="Description of Artificial Sequence: Synthetic oligonucleotide"
  source: /note="RNA"
  modified_base (3)..(3): 5-methyl modified nucleotide
  modified_base (12)..(12): 5-methyl modified nucleotide
  modified_base (16)..(16): 5-methyl modified nucleotide
  modified_base (17)..(17): 5-methyl modified nucleotide
  modified_base (19)..(19): bicyclic nucleic acid (BNA)
  source: /note="3' tri-ethylene glycol (TEG)"
gucgguaaguucuguccaa

SEQ ID NO: 15201 - RNA, 18 nt, Artificial Sequence
  source: /note="Description of Artificial Sequence: Synthetic oligonucleotide"
  source: /note="RNA"
  modified_base (3)..(3): 5-methyl modified nucleotide
  modified_base (12)..(12): 5-methyl modified nucleotide
  modified_base (16)..(16): 5-methyl modified nucleotide
  modified_base (17)..(17): 5-methyl modified nucleotide
  modified_base (18)..(18): bicyclic nucleic acid (BNA)
  source: /note="3' tri-ethylene glycol (TEG)"
gucgguaaguucugucca

SEQ ID NO: 15202 - RNA, 17 nt, Artificial Sequence
  source: /note="Description of Artificial Sequence: Synthetic oligonucleotide"
  source: /note="RNA"
  modified_base (3)..(3): 5-methyl modified nucleotide
  modified_base (12)..(12): 5-methyl modified nucleotide
  modified_base (16)..(16): 5-methyl modified nucleotide
  modified_base (17)..(17): 5-methyl bicyclic nucleic acid
  source: /note="3' tri-ethylene glycol (TEG)"
gucgguaaguucugucc

SEQ ID NO: 15203 - RNA, 16 nt, Artificial Sequence
  source: /note="Description of Artificial Sequence: Synthetic oligonucleotide"
  source: /note="RNA"
  modified_base (3)..(3): 5-methyl modified nucleotide
  modified_base (12)..(12): 5-methyl modified nucleotide
  modified_base (16)..(16): 5-methyl bicyclic nucleic acid
  source: /note="3' tri-ethylene glycol (TEG)"
gucgguaaguucuguc

SEQ ID NO: 15204 - DNA, 15 bp, Artificial Sequence
  source: /note="Description of Artificial Sequence: Synthetic oligonucleotide"
  source: /note="Description of Combined DNA/RNA Molecule: Synthetic oligonucleotide"
  source: /note="DNA/RNA"
  modified_base (3)..(3): 5-methyl modified nucleotide
  modified_base (12)..(12): 5-methyl modified nucleotide
  modified_base (15)..(15): bicyclic nucleic acid (BNA)
  source: /note="3' tri-ethylene glycol (TEG)"
gucgguaaguucugt

SEQ ID NO: 15205 - RNA, 14 nt, Artificial Sequence
  source: /note="Description of Artificial Sequence: Synthetic oligonucleotide"
  source: /note="RNA"
  modified_base (3)..(3): 5-methyl modified nucleotide
  modified_base (12)..(12): 5-methyl modified nucleotide
  modified_base (14)..(14): bicyclic nucleic acid (BNA)
  source: /note="3' tri-ethylene glycol (TEG)"
gucgguaaguucug

SEQ ID NO: 15206 - DNA, 13 bp, Artificial Sequence
  source: /note="Description of Artificial Sequence: Synthetic oligonucleotide"
  source: /note="Description of Combined DNA/RNA Molecule: Synthetic oligonucleotide"
  source: /note="DNA/RNA"
  modified_base (3)..(3): 5-methyl modified nucleotide
  modified_base (12)..(12): 5-methyl modified nucleotide
  modified_base (13)..(13): bicyclic nucleic acid (BNA)
  source: /note="3' tri-ethylene glycol (TEG)"
gucgguaaguuct

SEQ ID NO: 15207 - RNA, 12 nt, Artificial Sequence
  source: /note="Description of Artificial Sequence: Synthetic oligonucleotide"
  source: /note="RNA"
  modified_base (3)..(3): 5-methyl modified nucleotide
  modified_base (12)..(12): 5-methyl bicyclic nucleic acid
  source: /note="3' tri-ethylene glycol (TEG)"
gucgguaaguuc

SEQ ID NO: 15208 - DNA, 11 bp, Artificial Sequence
  source: /note="Description of Artificial Sequence: Synthetic oligonucleotide"
  source: /note="Description of Combined DNA/RNA Molecule: Synthetic oligonucleotide"
  source: /note="DNA/RNA"
  modified_base (3)..(3): 5-methyl modified nucleotide
  modified_base (11)..(11): bicyclic nucleic acid (BNA)
  source: /note="3' tri-ethylene glycol (TEG)"
gucgguaagut

SEQ ID NO: 15209 - DNA, 10 bp, Artificial Sequence
  source: /note="Description of Artificial Sequence: Synthetic oligonucleotide"
  source: /note="Description of Combined DNA/RNA Molecule: Synthetic oligonucleotide"
  source: /note="DNA/RNA"
  modified_base (3)..(3): 5-methyl modified nucleotide
  modified_base (10)..(10): bicyclic nucleic acid (BNA)
  source: /note="3' tri-ethylene glycol (TEG)"
gucgguaagt

SEQ ID NO: 15210 - RNA, 20 nt, Artificial Sequence
  source: /note="Description of Artificial Sequence: Synthetic oligonucleotide"
  source: /note="RNA"
  modified_base (4)..(4): 5-methyl modified nucleotide
  modified_base (13)..(13): 5-methyl modified nucleotide
  modified_base (17)..(17): 5-methyl modified nucleotide
  modified_base (18)..(18): 5-methyl modified nucleotide
  modified_base (20)..(20): bicyclic nucleic acid (BNA)
  source: /note="3' tri-ethylene glycol (TEG)"
agucgguaaguucuguccaa

SEQ ID NO: 15211 - RNA, 19 nt, Artificial Sequence
  source: /note="Description of Artificial Sequence: Synthetic oligonucleotide"
  source: /note="RNA"
  modified_base (4)..(4): 5-methyl modified nucleotide
  modified_base (13)..(13): 5-methyl modified nucleotide
  modified_base (17)..(17): 5-methyl modified nucleotide
  modified_base (18)..(18): 5-methyl modified nucleotide
  modified_base (19)..(19): bicyclic nucleic acid (BNA)
  source: /note="3' tri-ethylene glycol (TEG)"
agucgguaaguucugucca

SEQ ID NO: 15212 - RNA, 17 nt, Artificial Sequence
  source: /note="Description of Artificial Sequence: Synthetic oligonucleotide"
  source: /note="RNA"
  modified_base (4)..(4): 5-methyl modified nucleotide
  modified_base (13)..(13): 5-methyl modified nucleotide
  modified_base (17)..(17): 5-methyl bicyclic nucleic acid
  source: /note="3' tri-ethylene glycol (TEG)"
agucgguaaguucuguc

SEQ ID NO: 15213 - DNA, 16 bp, Artificial Sequence
  source: /note="Description of Artificial Sequence: Synthetic oligonucleotide"
  source: /note="Description of Combined DNA/RNA Molecule: Synthetic oligonucleotide"
  source: /note="DNA/RNA"
  modified_base (4)..(4): 5-methyl modified nucleotide
  modified_base (13)..(13): 5-methyl modified nucleotide
  modified_base (16)..(16): bicyclic nucleic acid (BNA)
  source: /note="3' tri-ethylene glycol (TEG)"
agucgguaaguucugt

SEQ ID NO: 15214 - RNA, 15 nt, Artificial Sequence
  source: /note="Description of Artificial Sequence: Synthetic oligonucleotide"
  source: /note="RNA"
  modified_base (4)..(4): 5-methyl modified nucleotide
  modified_base (13)..(13): 5-methyl modified nucleotide
  modified_base (15)..(15): bicyclic nucleic acid (BNA)
  source: /note="3' tri-ethylene glycol (TEG)"
agucgguaaguucug

SEQ ID NO: 15215 - DNA, 14 bp, Artificial Sequence
  source: /note="Description of Artificial Sequence: Synthetic oligonucleotide"
  source: /note="Description of Combined DNA/RNA Molecule: Synthetic oligonucleotide"
  source: /note="DNA/RNA"
  modified_base (4)..(4): 5-methyl modified nucleotide
  modified_base (13)..(13): 5-methyl modified nucleotide
  modified_base (14)..(14): bicyclic nucleic acid (BNA)
  source: /note="3' tri-ethylene glycol (TEG)"
agucgguaaguuct

SEQ ID NO: 15216 - RNA, 13 nt, Artificial Sequence
  source: /note="Description of Artificial Sequence: Synthetic oligonucleotide"
  source: /note="RNA"
  modified_base (4)..(4): 5-methyl modified nucleotide
  modified_base (13)..(13): 5-methyl bicyclic nucleic acid
  source: /note="3' tri-ethylene glycol (TEG)"
agucgguaaguuc

SEQ ID NO: 15217 - DNA, 12 bp, Artificial Sequence
  source: /note="Description of Artificial Sequence: Synthetic oligonucleotide"
  source: /note="Description of Combined DNA/RNA Molecule: Synthetic oligonucleotide"
  source: /note="DNA/RNA"
  modified_base (4)..(4): 5-methyl modified nucleotide
  modified_base (12)..(12): bicyclic nucleic acid (BNA)
  source: /note="3' tri-ethylene glycol (TEG)"
agucgguaagut

SEQ ID NO: 15218 - DNA, 11 bp, Artificial Sequence
  source: /note="Description of Artificial Sequence: Synthetic oligonucleotide"
  source: /note="Description of Combined DNA/RNA Molecule: Synthetic oligonucleotide"
  source: /note="DNA/RNA"
  modified_base (4)..(4): 5-methyl modified nucleotide
  modified_base (11)..(11): bicyclic nucleic acid (BNA)
  source: /note="3' tri-ethylene glycol (TEG)"
agucgguaagt

SEQ ID NO: 15219 - RNA, 20 nt, Artificial Sequence
  source: /note="Description of Artificial Sequence: Synthetic oligonucleotide"
  source: /note="RNA"
  modified_base (1)..(1): 5-methyl modified nucleotide
  modified_base (5)..(5): 5-methyl modified nucleotide
  modified_base (14)..(14): 5-methyl modified nucleotide
  modified_base (18)..(18): 5-methyl modified nucleotide
  modified_base (19)..(19): 5-methyl modified nucleotide
  modified_base (20)..(20): bicyclic nucleic acid (BNA)
  source: /note="3' tri-ethylene glycol (TEG)"
cagucgguaaguucugucca

SEQ ID NO: 15220 - RNA, 19 nt, Artificial Sequence
  source: /note="Description of Artificial Sequence: Synthetic oligonucleotide"
  source: /note="RNA"
  modified_base (1)..(1): 5-methyl modified nucleotide
  modified_base (5)..(5): 5-methyl modified nucleotide
  modified_base (14)..(14): 5-methyl modified nucleotide
  modified_base (18)..(18): 5-methyl modified nucleotide
  modified_base (19)..(19): 5-methyl bicyclic nucleic acid
  source: /note="3' tri-ethylene glycol (TEG)"
cagucgguaaguucugucc

SEQ ID NO: 15221 - RNA, 18 nt, Artificial Sequence
  source: /note="Description of Artificial Sequence: Synthetic oligonucleotide"
  source: /note="RNA"
  modified_base (1)..(1): 5-methyl modified nucleotide
  modified_base (5)..(5): 5-methyl modified nucleotide
  modified_base (14)..(14): 5-methyl modified nucleotide
  modified_base (18)..(18): 5-methyl bicyclic nucleic acid
  source: /note="3' tri-ethylene glycol (TEG)"
cagucgguaaguucuguc

SEQ ID NO: 15222 - DNA, 17 bp, Artificial Sequence
  source: /note="Description of Artificial Sequence: Synthetic oligonucleotide"
  source: /note="Description of Combined DNA/RNA Molecule: Synthetic oligonucleotide"
  source: /note="DNA/RNA"
  modified_base (1)..(1): 5-methyl modified nucleotide
  modified_base (5)..(5): 5-methyl modified nucleotide
  modified_base (14)..(14): 5-methyl modified nucleotide
  modified_base (17)..(17): bicyclic nucleic acid (BNA)
  source: /note="3' tri-ethylene glycol (TEG)"
cagucgguaaguucugt

SEQ ID NO: 15223 - RNA, 16 nt, Artificial Sequence
  source: /note="Description of Artificial Sequence: Synthetic oligonucleotide"
  source: /note="RNA"
  modified_base (1)..(1): 5-methyl modified nucleotide
  modified_base (5)..(5): 5-methyl modified nucleotide
  modified_base (14)..(14): 5-methyl modified nucleotide
  modified_base (16)..(16): bicyclic nucleic acid (BNA)
  source: /note="3' tri-ethylene glycol (TEG)"
cagucgguaaguucug

SEQ ID NO: 15224 - DNA, 15 bp, Artificial Sequence
  source: /note="Description of Artificial Sequence: Synthetic oligonucleotide"
  source: /note="Description of Combined DNA/RNA Molecule: Synthetic oligonucleotide"
  source: /note="DNA/RNA"
  modified_base (1)..(1): 5-methyl modified nucleotide
  modified_base (5)..(5): 5-methyl modified nucleotide
  modified_base (14)..(14): 5-methyl modified nucleotide
  modified_base (15)..(15): bicyclic nucleic acid (BNA)
  source: /note="3' tri-ethylene glycol (TEG)"
cagucgguaaguuct

SEQ ID NO: 15225 - RNA, 14 nt, Artificial Sequence
  source: /note="Description of Artificial Sequence: Synthetic oligonucleotide"
  source: /note="RNA"
  modified_base (1)..(1): 5-methyl modified nucleotide
  modified_base (5)..(5): 5-methyl modified nucleotide
  modified_base (14)..(14): 5-methyl bicyclic nucleic acid
  source: /note="3' tri-ethylene glycol (TEG)"
cagucgguaaguuc

SEQ ID NO: 15226 - DNA, 13 bp, Artificial Sequence
  source: /note="Description of Artificial Sequence: Synthetic oligonucleotide"
  source: /note="Description of Combined DNA/RNA Molecule: Synthetic oligonucleotide"
  source: /note="DNA/RNA"
  modified_base (1)..(1): 5-methyl modified nucleotide
  modified_base (5)..(5): 5-methyl modified nucleotide
  modified_base (13)..(13): bicyclic nucleic acid (BNA)
  source: /note="3' tri-ethylene glycol (TEG)"
cagucgguaagut

SEQ ID NO: 15227 - DNA, 12 bp, Artificial Sequence
  source: /note="Description of Artificial Sequence: Synthetic oligonucleotide"
  source: /note="Description of Combined DNA/RNA Molecule: Synthetic oligonucleotide"
  source: /note="DNA/RNA"
  modified_base (1)..(1): 5-methyl modified nucleotide
  modified_base (5)..(5): 5-methyl modified nucleotide
  modified_base (12)..(12): bicyclic nucleic acid (BNA)
  source: /note="3' tri-ethylene glycol (TEG)"
cagucgguaagt

SEQ ID NO: 15228 - RNA, 20 nt, Artificial Sequence
  source: /note="Description of Artificial Sequence: Synthetic oligonucleotide"
  source: /note="RNA"
  modified_base (1)..(1): 5-methyl modified nucleotide
  modified_base (2)..(2): 5-methyl modified nucleotide
  modified_base (6)..(6): 5-methyl modified nucleotide
  modified_base (15)..(15): 5-methyl modified nucleotide
  modified_base (19)..(19): 5-methyl modified nucleotide
  modified_base (20)..(20): 5-methyl bicyclic nucleic acid
  source: /note="3' tri-ethylene glycol (TEG)"
ccagucgguaaguucugucc

SEQ ID NO: 15229 - RNA, 19 nt, Artificial Sequence
  source: /note="Description of Artificial Sequence: Synthetic oligonucleotide"
  source: /note="RNA"
  modified_base (1)..(1): 5-methyl modified nucleotide
  modified_base (2)..(2): 5-methyl modified nucleotide
  modified_base (6)..(6): 5-methyl modified nucleotide
  modified_base (15)..(15): 5-methyl modified nucleotide
  modified_base (19)..(19): 5-methyl bicyclic nucleic acid
  source: /note="3' tri-ethylene glycol (TEG)"
ccagucgguaaguucuguc

SEQ ID NO: 15230 - DNA, 18 bp, Artificial Sequence
  source: /note="Description of Artificial Sequence: Synthetic oligonucleotide"
  source: /note="Description of Combined DNA/RNA Molecule: Synthetic oligonucleotide"
  source: /note="DNA/RNA"
  modified_base (1)..(1): 5-methyl modified nucleotide
  modified_base (2)..(2): 5-methyl modified nucleotide
  modified_base (6)..(6): 5-methyl modified nucleotide
  modified_base (15)..(15): 5-methyl modified nucleotide
  modified_base (18)..(18): bicyclic nucleic acid (BNA)
  source: /note="3' tri-ethylene glycol (TEG)"
ccagucgguaaguucugt

SEQ ID NO: 15231 - RNA, 17 nt, Artificial Sequence
  source: /note="Description of Artificial Sequence: Synthetic oligonucleotide"
  source: /note="RNA"
  modified_base (1)..(1): 5-methyl modified nucleotide
  modified_base (2)..(2): 5-methyl modified nucleotide
  modified_base (6)..(6): 5-methyl modified nucleotide
  modified_base (15)..(15): 5-methyl modified nucleotide
  modified_base (17)..(17): bicyclic nucleic acid (BNA)
  source: /note="3' tri-ethylene glycol (TEG)"
ccagucgguaaguucug

SEQ ID NO: 15232 - DNA, 16 bp, Artificial Sequence
  source: /note="Description of Artificial Sequence: Synthetic oligonucleotide"
  source: /note="Description of Combined DNA/RNA Molecule: Synthetic oligonucleotide"
  source: /note="DNA/RNA"
  modified_base (1)..(1): 5-methyl modified nucleotide
  modified_base (2)..(2): 5-methyl modified nucleotide
  modified_base (6)..(6): 5-methyl modified nucleotide
  modified_base (15)..(15): 5-methyl modified nucleotide
  modified_base (16)..(16): bicyclic nucleic acid (BNA)
  source: /note="3' tri-ethylene glycol (TEG)"
ccagucgguaaguuct

SEQ ID NO: 15233 - RNA, 15 nt, Artificial Sequence
  source: /note="Description of Artificial Sequence: Synthetic oligonucleotide"
  source: /note="RNA"
  modified_base (1)..(1): 5-methyl modified nucleotide
  modified_base (2)..(2): 5-methyl modified nucleotide
  modified_base (6)..(6): 5-methyl modified nucleotide
  modified_base (15)..(15): 5-methyl bicyclic nucleic acid
  source: /note="3' tri-ethylene glycol (TEG)"
ccagucgguaaguuc

SEQ ID NO: 15234 - DNA, 14 bp, Artificial Sequence
  source: /note="Description of Artificial Sequence: Synthetic oligonucleotide"
  source: /note="Description of Combined DNA/RNA Molecule: Synthetic oligonucleotide"
  source: /note="DNA/RNA"
  modified_base (1)..(1): 5-methyl modified nucleotide
  modified_base (2)..(2): 5-methyl modified nucleotide
  modified_base (6)..(6): 5-methyl modified nucleotide
  modified_base (14)..(14): bicyclic nucleic acid (BNA)
  source: /note="3' tri-ethylene glycol (TEG)"
ccagucgguaagut

SEQ ID NO: 15235 - DNA, 13 bp, Artificial Sequence
  source: /note="Description of Artificial Sequence: Synthetic oligonucleotide"
  source: /note="Description of Combined DNA/RNA Molecule: Synthetic oligonucleotide"
  source: /note="DNA/RNA"
  modified_base (1)..(1): 5-methyl modified nucleotide
  modified_base (2)..(2): 5-methyl modified nucleotide
  modified_base (6)..(6): 5-methyl modified nucleotide
  modified_base (13)..(13): bicyclic nucleic acid (BNA)
  source: /note="3' tri-ethylene glycol (TEG)"
ccagucgguaagt

SEQ ID NO: 15236 - RNA, 20 nt, Artificial Sequence
  source: /note="Description of Artificial Sequence: Synthetic oligonucleotide"
  source: /note="RNA"
  modified_base (2)..(2): 5-methyl modified nucleotide
  modified_base (3)..(3): 5-methyl modified nucleotide
  modified_base (7)..(7): 5-methyl modified nucleotide
  modified_base (16)..(16): 5-methyl modified nucleotide
  modified_base (20)..(20): 5-methyl bicyclic nucleic acid
  source: /note="3' tri-ethylene glycol (TEG)"
gccagucgguaaguucuguc

SEQ ID NO: 15237 - DNA, 19 bp, Artificial Sequence
  source: /note="Description of Artificial Sequence: Synthetic oligonucleotide"
  source: /note="Description of Combined DNA/RNA Molecule: Synthetic oligonucleotide"
  source: /note="DNA/RNA"
  modified_base (2)..(2): 5-methyl modified nucleotide
  modified_base (3)..(3): 5-methyl modified nucleotide
  modified_base (7)..(7): 5-methyl modified nucleotide
  modified_base (16)..(16): 5-methyl modified nucleotide
  modified_base (19)..(19): bicyclic nucleic acid (BNA)
  source: /note="3' tri-ethylene glycol (TEG)"
gccagucgguaaguucugt

SEQ ID NO: 15238 - RNA, 18 nt, Artificial Sequence
  source: /note="Description of Artificial Sequence: Synthetic oligonucleotide"
  source: /note="RNA"
  modified_base (2)..(2): 5-methyl modified nucleotide
  modified_base (3)..(3): 5-methyl modified nucleotide
  modified_base (7)..(7): 5-methyl modified nucleotide
  modified_base (16)..(16): 5-methyl modified nucleotide
  modified_base (18)..(18): bicyclic nucleic acid (BNA)
  source: /note="3' tri-ethylene glycol (TEG)"
gccagucgguaaguucug

SEQ ID NO: 15239 - DNA, 17 bp, Artificial Sequence
  source: /note="Description of Artificial Sequence: Synthetic oligonucleotide"
  source: /note="Description of Combined DNA/RNA Molecule: Synthetic oligonucleotide"
  source: /note="DNA/RNA"
  modified_base (2)..(2): 5-methyl modified nucleotide
  modified_base (3)..(3): 5-methyl modified nucleotide
  modified_base (7)..(7): 5-methyl modified nucleotide
  modified_base (16)..(16): 5-methyl modified nucleotide
  modified_base (17)..(17): bicyclic nucleic acid (BNA)
  source: /note="3' tri-ethylene glycol (TEG)"
gccagucgguaaguuct

SEQ ID NO: 15240 - RNA, 16 nt, Artificial Sequence
  source: /note="Description of Artificial Sequence: Synthetic oligonucleotide"
  source: /note="RNA"
  modified_base (2)..(2): 5-methyl modified nucleotide
  modified_base (3)..(3): 5-methyl modified nucleotide
  modified_base (7)..(7): 5-methyl modified nucleotide
  modified_base (16)..(16): 5-methyl bicyclic nucleic acid
  source: /note="3' tri-ethylene glycol (TEG)"
gccagucgguaaguuc

SEQ ID NO: 15241 - DNA, 15 bp, Artificial Sequence
  source: /note="Description of Artificial Sequence: Synthetic oligonucleotide"
  source: /note="Description of Combined DNA/RNA Molecule: Synthetic oligonucleotide"
  source: /note="DNA/RNA"
  modified_base (2)..(2): 5-methyl modified nucleotide
  modified_base (3)..(3): 5-methyl modified nucleotide
  modified_base (7)..(7): 5-methyl modified nucleotide
  modified_base (15)..(15): bicyclic nucleic acid (BNA)
  source: /note="3' tri-ethylene glycol (TEG)"
gccagucgguaagut

SEQ ID NO: 15242 - DNA, 14 bp, Artificial Sequence
  source: /note="Description of Artificial Sequence: Synthetic oligonucleotide"
  source: /note="Description of Combined DNA/RNA Molecule: Synthetic oligonucleotide"
  source: /note="DNA/RNA"
  modified_base (2)..(2): 5-methyl modified nucleotide
  modified_base (3)..(3): 5-methyl modified nucleotide
  modified_base (7)..(7): 5-methyl modified nucleotide
  modified_base (14)..(14): bicyclic nucleic acid (BNA)
  source: /note="3' tri-ethylene glycol (TEG)"
gccagucgguaagt

SEQ ID NO: 15243 - DNA, 20 bp, Artificial Sequence
  source: /note="Description of Artificial Sequence: Synthetic oligonucleotide"
  source: /note="Description of Combined DNA/RNA Molecule: Synthetic oligonucleotide"
  source: /note="DNA/RNA"
  modified_base (2)..(2): 5-methyl modified nucleotide
  modified_base (14)..(14): 5-methyl modified nucleotide
  modified_base (19)..(19): 5-methyl modified nucleotide
  modified_base (20)..(20): bicyclic nucleic acid (BNA)
  source: /note="3' tri-ethylene glycol (TEG)"
ucaaggaagauggcauuuct

SEQ ID NO: 15244 - RNA, 22 nt, Artificial Sequence
  source: /note="Description of Artificial Sequence: Synthetic oligonucleotide"
  source: /note="RNA"
  modified_base (2)..(2): 5-methyl modified nucleotide
  modified_base (14)..(14): 5-methyl modified nucleotide
  modified_base (19)..(19): 5-methyl modified nucleotide
  modified_base (22)..(22): bicyclic nucleic acid (BNA)
  source: /note="3' tri-ethylene glycol (TEG)"
ucaaggaagauggcauuucuag

SEQ ID NO: 15245 - DNA, 16 bp, Artificial Sequence
  source: /note="Description of Artificial Sequence: Synthetic oligonucleotide"
  source: /note="Description of Combined DNA/RNA Molecule: Synthetic oligonucleotide"
  source: /note="DNA/RNA"
  modified_base (2)..(2): 5-methyl modified nucleotide
  modified_base (14)..(14): 5-methyl modified nucleotide
  modified_base (16)..(16): bicyclic nucleic acid (BNA)
  source: /note="3' tri-ethylene glycol (TEG)"
ucaaggaagauggcat

SEQ ID NO: 15246 - DNA, 15 bp, Artificial Sequence
  source: /note="Description of Artificial Sequence: Synthetic oligonucleotide"
  source: /note="Description of Combined DNA/RNA Molecule: Synthetic oligonucleotide"
  source: /note="DNA/RNA"
  modified_base (9)..(9): 5-methyl modified nucleotide
  modified_base (14)..(14): 5-methyl modified nucleotide
  modified_base (15)..(15): bicyclic nucleic acid (BNA)
  source: /note="3' tri-ethylene glycol (TEG)"
gaagauggcauuuct

SEQ ID NO: 15247 - RNA, 21 nt, Artificial Sequence
  source: /note="Description of Artificial Sequence: Synthetic oligonucleotide"
  source: /note="RNA"
  modified_base (2)..(2): 5-methyl modified nucleotide
  modified_base (14)..(14): 5-methyl modified nucleotide
  modified_base (19)..(19): 5-methyl modified nucleotide
  modified_base (21)..(21): bicyclic nucleic acid (BNA)
  source: /note="3' tri-ethylene glycol (TEG)"
ucaaggaagauggcauuucua

SEQ ID NO: 15248 - RNA, 19 nt, Artificial Sequence
  source: /note="Description of Artificial Sequence: Synthetic oligonucleotide"
  source: /note="RNA"
  modified_base (2)..(2): 5-methyl modified nucleotide
  modified_base (14)..(14): 5-methyl modified nucleotide
  modified_base (19)..(19): 5-methyl bicyclic nucleic acid
  source: /note="3' tri-ethylene glycol (TEG)"
ucaaggaagauggcauuuc

SEQ ID NO: 15249 - DNA, 18 bp, Artificial Sequence
  source: /note="Description of Artificial Sequence: Synthetic oligonucleotide"
  source: /note="Description of Combined DNA/RNA Molecule: Synthetic oligonucleotide"
  source: /note="DNA/RNA"
  modified_base (2)..(2): 5-methyl modified nucleotide
  modified_base (14)..(14): 5-methyl modified nucleotide
  modified_base (18)..(18): bicyclic nucleic acid (BNA)
  source: /note="3' tri-ethylene glycol (TEG)"
ucaaggaagauggcauut

SEQ ID NO: 15250 - DNA, 17 bp, Artificial Sequence
  source: /note="Description of Artificial Sequence: Synthetic oligonucleotide"
  source: /note="Description of Combined DNA/RNA Molecule: Synthetic oligonucleotide"
  source: /note="DNA/RNA"
  modified_base (2)..(2): 5-methyl modified nucleotide
  modified_base (14)..(14): 5-methyl modified nucleotide
  modified_base (17)..(17): bicyclic nucleic acid (BNA)
  source: /note="3' tri-ethylene glycol (TEG)"
ucaaggaagauggcaut

SEQ ID NO: 15251 - RNA, 15 nt, Artificial Sequence
  source: /note="Description of Artificial Sequence: Synthetic oligonucleotide"
  source: /note="RNA"
  modified_base (2)..(2): 5-methyl modified nucleotide
  modified_base (14)..(14): 5-methyl modified nucleotide
  modified_base (15)..(15): bicyclic nucleic acid (BNA)
  source: /note="3' tri-ethylene glycol (TEG)"
ucaaggaagauggca

SEQ ID NO: 15252 - RNA, 14 nt, Artificial Sequence
  source: /note="Description of Artificial Sequence: Synthetic oligonucleotide"
  source: /note="RNA"
  modified_base (2)..(2): 5-methyl modified nucleotide
  modified_base (14)..(14): 5-methyl bicyclic nucleic acid
  source: /note="3' tri-ethylene glycol (TEG)"
ucaaggaagauggc

SEQ ID NO: 15253 - RNA, 13 nt, Artificial Sequence
  source: /note="Description of Artificial Sequence: Synthetic oligonucleotide"
  source: /note="RNA"
  modified_base (2)..(2): 5-methyl modified nucleotide
  modified_base (13)..(13): bicyclic nucleic acid (BNA)
  source: /note="3' tri-ethylene glycol (TEG)"
ucaaggaagaugg

SEQ ID NO: 15254 - RNA, 12 nt, Artificial Sequence
  source: /note="Description of Artificial Sequence: Synthetic oligonucleotide"
  source: /note="RNA"
  modified_base (2)..(2): 5-methyl modified nucleotide
  modified_base (12)..(12): bicyclic nucleic acid (BNA)
  source: /note="3' tri-ethylene glycol (TEG)"
ucaaggaagaug

SEQ ID NO: 15255 - DNA, 11 bp, Artificial Sequence
  source: /note="Description of Artificial Sequence: Synthetic oligonucleotide"
  source: /note="Description of Combined DNA/RNA Molecule: Synthetic oligonucleotide"
  source: /note="DNA/RNA"
  modified_base (2)..(2): 5-methyl modified nucleotide
  modified_base (11)..(11): bicyclic nucleic acid (BNA)
  source: /note="3' tri-ethylene glycol (TEG)"
ucaaggaagat

SEQ ID NO: 15256 - RNA, 10 nt, Artificial Sequence
  source: /note="Description of Artificial Sequence: Synthetic oligonucleotide"
  source: /note="RNA"
  modified_base (2)..(2): 5-methyl modified nucleotide
  modified_base (10)..(10): bicyclic nucleic acid (BNA)
  source: /note="3' tri-ethylene glycol (TEG)"
ucaaggaaga

SEQ ID NO: 15257 - RNA, 9 nt, Artificial Sequence
  source: /note="Description of Artificial Sequence: Synthetic oligonucleotide"
  source: /note="RNA"
  modified_base (2)..(2): 5-methyl modified nucleotide
  modified_base (9)..(9): bicyclic nucleic acid (BNA)
  source: /note="3' tri-ethylene glycol (TEG)"
ucaaggaag

SEQ ID NO: 15258 - RNA, 21 nt, Artificial Sequence
  source: /note="Description of Artificial Sequence: Synthetic oligonucleotide"
  source: /note="RNA"
  modified_base (1)..(1): 5-methyl modified nucleotide
  modified_base (13)..(13): 5-methyl modified nucleotide
  modified_base (18)..(18): 5-methyl modified nucleotide
  modified_base (21)..(21): bicyclic nucleic acid (BNA)
  source: /note="3' tri-ethylene glycol (TEG)"
caaggaagauggcauuucuag

SEQ ID NO: 15259 - RNA, 20 nt, Artificial Sequence
  source: /note="Description of Artificial Sequence: Synthetic oligonucleotide"
  source: /note="RNA"
  modified_base (1)..(1): 5-methyl modified nucleotide
  modified_base (13)..(13): 5-methyl modified nucleotide
  modified_base (18)..(18): 5-methyl modified nucleotide
  modified_base (20)..(20): bicyclic nucleic acid (BNA)
  source: /note="3' tri-ethylene glycol (TEG)"
caaggaagauggcauuucua

SEQ ID NO: 15260 - DNA, 19 bp, Artificial Sequence
  source: /note="Description of Artificial Sequence: Synthetic oligonucleotide"
  source: /note="Description of Combined DNA/RNA Molecule: Synthetic oligonucleotide"
  source: /note="DNA/RNA"
  modified_base (1)..(1): 5-methyl modified nucleotide
  modified_base (13)..(13): 5-methyl modified nucleotide
  modified_base (18)..(18): 5-methyl modified nucleotide
  modified_base (19)..(19): bicyclic nucleic acid (BNA)
  source: /note="3' tri-ethylene glycol (TEG)"
caaggaagauggcauuuct

SEQ ID NO: 15261 - RNA, 18 nt, Artificial Sequence
  source: /note="Description of Artificial Sequence: Synthetic oligonucleotide"
  source: /note="RNA"
  modified_base (1)..(1): 5-methyl modified nucleotide
  modified_base (13)..(13): 5-methyl modified nucleotide
  modified_base (18)..(18): 5-methyl bicyclic nucleic acid
  source: /note="3' tri-ethylene glycol (TEG)"
caaggaagauggcauuuc

SEQ ID NO: 15262 - DNA, 17 bp, Artificial Sequence
  source: /note="Description of Artificial Sequence: Synthetic oligonucleotide"
  source: /note="Description of Combined DNA/RNA Molecule: Synthetic oligonucleotide"
  source: /note="DNA/RNA"
  modified_base (1)..(1): 5-methyl modified nucleotide
  modified_base (13)..(13): 5-methyl modified nucleotide
  modified_base (17)..(17): bicyclic nucleic acid (BNA)
  source: /note="3' tri-ethylene glycol (TEG)"
caaggaagauggcauut

SEQ ID NO: 15263 - DNA, 16 bp, Artificial Sequence
  source: /note="Description of Artificial Sequence: Synthetic oligonucleotide"
  source: /note="Description of Combined DNA/RNA Molecule: Synthetic oligonucleotide"
  source: /note="DNA/RNA"
  modified_base (1)..(1): 5-methyl modified nucleotide
  modified_base (13)..(13): 5-methyl modified nucleotide
  modified_base (16)..(16): bicyclic nucleic acid (BNA)
  source: /note="3' tri-ethylene glycol (TEG)"
caaggaagauggcaut

SEQ ID NO: 15264 - DNA, 15 bp, Artificial Sequence
  source: /note="Description of Artificial Sequence: Synthetic oligonucleotide"
  source: /note="Description of Combined DNA/RNA Molecule: Synthetic oligonucleotide"
  source: /note="DNA/RNA"
  modified_base (1)..(1): 5-methyl modified nucleotide
  modified_base (13)..(13): 5-methyl modified nucleotide
  modified_base (15)..(15): bicyclic nucleic acid (BNA)
  source: /note="3' tri-ethylene glycol (TEG)"
caaggaagauggcat

SEQ ID NO: 15265 - RNA, 14 nt, Artificial Sequence
  source: /note="Description of Artificial Sequence: Synthetic oligonucleotide"
  source: /note="RNA"
  modified_base (1)..(1): 5-methyl modified nucleotide
  modified_base (13)..(13): 5-methyl modified nucleotide
  modified_base (14)..(14): bicyclic nucleic acid (BNA)
  source: /note="3' tri-ethylene glycol (TEG)"
caaggaagauggca

SEQ ID NO: 15266 - RNA, 13 nt, Artificial Sequence
  source: /note="Description of Artificial Sequence: Synthetic oligonucleotide"
  source: /note="RNA"
  modified_base (1)..(1): 5-methyl modified nucleotide
  modified_base (13)..(13): 5-methyl bicyclic nucleic acid
  source: /note="3' tri-ethylene glycol (TEG)"
caaggaagauggc

SEQ ID NO: 15267 - RNA, 12 nt, Artificial Sequence
  source: /note="Description of Artificial Sequence: Synthetic oligonucleotide"
  source: /note="RNA"
  modified_base (1)..(1): 5-methyl modified nucleotide
  modified_base (12)..(12): bicyclic nucleic acid (BNA)
  source: /note="3' tri-ethylene glycol (TEG)"
caaggaagaugg

SEQ ID NO: 15268 - RNA, 11 nt, Artificial Sequence
  source: /note="Description of Artificial Sequence: Synthetic oligonucleotide"
  source: /note="RNA"
  modified_base (1)..(1): 5-methyl modified nucleotide
  modified_base (11)..(11): bicyclic nucleic acid (BNA)
  source: /note="3' tri-ethylene glycol (TEG)"
caaggaagaug

SEQ ID NO: 15269 - DNA, 10 bp, Artificial Sequence
  source: /note="Description of Artificial Sequence: Synthetic oligonucleotide"
  source: /note="DNA/RNA"
  modified_base (1)..(1): 5-methyl modified nucleotide
  modified_base (10)..(10): bicyclic nucleic acid (BNA)
  source: /note="3' tri-ethylene glycol (TEG)"
caaggaagat

SEQ ID NO: 15270 - RNA, 9 nt, Artificial Sequence
  source: /note="Description of Artificial Sequence: Synthetic oligonucleotide"
  source: /note="RNA/Antisense Oligonucleotide"
  modified_base (1)..(1): 5-methyl modified nucleotide
  modified_base (9)..(9): bicyclic nucleic acid (BNA)
  source: /note="3' tri-ethylene glycol (TEG)"
caaggaaga

SEQ ID NO: 15271 - RNA, 8 nt, Artificial Sequence
  source: /note="Description of Artificial Sequence: Synthetic oligonucleotide"
  source: /note="RNA/Antisense Oligonucleotide"
  modified_base (1)..(1): 5-methyl modified nucleotide
  modified_base (8)..(8): bicyclic nucleic acid (BNA)
  source: /note="3' tri-ethylene glycol (TEG)"
caaggaag

SEQ ID NO: 15272 - RNA, 20 nt, Artificial Sequence
  source: /note="Description of Artificial Sequence: Synthetic oligonucleotide"
  source: /note="RNA"
  modified_base (12)..(12): 5-methyl modified nucleotide
  modified_base (17)..(17): 5-methyl modified nucleotide
  modified_base (20)..(20): bicyclic nucleic acid (BNA)
  source: /note="3' tri-ethylene glycol (TEG)"
aaggaagauggcauuucuag

SEQ ID NO: 15273 - RNA, 19 nt, Artificial Sequence
  source: /note="Description of Artificial Sequence: Synthetic oligonucleotide"
  source: /note="RNA"
  modified_base (12)..(12): 5-methyl modified nucleotide
  modified_base (17)..(17): 5-methyl modified nucleotide
  modified_base (19)..(19): bicyclic nucleic acid (BNA)
  source: /note="3' tri-ethylene glycol (TEG)"
aaggaagauggcauuucua

SEQ ID NO: 15274 - DNA, 18 bp, Artificial Sequence
  source: /note="Description of Artificial Sequence: Synthetic oligonucleotide"
  source: /note="Description of Combined DNA/RNA Molecule: Synthetic oligonucleotide"
  source: /note="DNA/RNA"
  modified_base (12)..(12): 5-methyl modified nucleotide
  modified_base (17)..(17): 5-methyl modified nucleotide
  modified_base (18)..(18): bicyclic nucleic acid (BNA)
  source: /note="3' tri-ethylene glycol (TEG)"
aaggaagauggcauuuct

SEQ ID NO: 15275 - RNA, 17 nt, Artificial Sequence
  source: /note="Description of Artificial Sequence: Synthetic oligonucleotide"
  source: /note="RNA"
  modified_base (12)..(12): 5-methyl modified nucleotide
  modified_base (17)..(17): 5-methyl bicyclic nucleic acid
  source: /note="3' tri-ethylene glycol (TEG)"
aaggaagauggcauuuc

SEQ ID NO: 15276 - DNA, 16 bp, Artificial Sequence
  source: /note="Description of Artificial Sequence: Synthetic oligonucleotide"
  source: /note="Description of Combined DNA/RNA Molecule: Synthetic oligonucleotide"
  source: /note="DNA/RNA"
  modified_base (12)..(12): 5-methyl modified nucleotide
  modified_base (16)..(16): bicyclic nucleic acid (BNA)
  source: /note="3' tri-ethylene glycol (TEG)"
aaggaagauggcauut

SEQ ID NO: 15277 - DNA, 15 bp, Artificial Sequence
  source: /note="Description of Artificial Sequence: Synthetic oligonucleotide"
  source: /note="Description of Combined DNA/RNA Molecule: Synthetic oligonucleotide"
  source: /note="DNA/RNA"
  modified_base (12)..(12): 5-methyl modified nucleotide
  modified_base (15)..(15): bicyclic nucleic acid (BNA)
  source: /note="3' tri-ethylene glycol (TEG)"
aaggaagauggcaut

SEQ ID NO: 15278 - DNA, 14 bp, Artificial Sequence
  source: /note="Description of Artificial Sequence: Synthetic oligonucleotide"
  source: /note="Description of Combined DNA/RNA Molecule: Synthetic oligonucleotide"
  source: /note="DNA/RNA"
  modified_base (12)..(12): 5-methyl modified nucleotide
  modified_base (14)..(14): bicyclic nucleic acid (BNA)
  source: /note="3' tri-ethylene glycol (TEG)"
aaggaagauggcat

SEQ ID NO: 15279 - RNA, 13 nt, Artificial Sequence
  source: /note="Description of Artificial Sequence: Synthetic oligonucleotide"
  source: /note="RNA"
  modified_base (12)..(12): 5-methyl modified nucleotide
  modified_base (13)..(13): bicyclic nucleic acid (BNA)
  source: /note="3' tri-ethylene glycol (TEG)"
aaggaagauggca

SEQ ID NO: 15280 - RNA, 12 nt, Artificial Sequence
  source: /note="Description of Artificial Sequence: Synthetic oligonucleotide"
  source: /note="RNA"
  modified_base (12)..(12): 5-methyl bicyclic nucleic acid
  source: /note="3' tri-ethylene glycol (TEG)"
aaggaagauggc

SEQ ID NO: 15281 - RNA, 11 nt, Artificial Sequence
  source: /note="Description of Artificial Sequence: Synthetic oligonucleotide"
  source: /note="RNA"
  modified_base (11)..(11): bicyclic nucleic acid (BNA)
  source: /note="3' tri-ethylene glycol (TEG)"
aaggaagaugg

SEQ ID NO: 15282 - RNA, 10 nt, Artificial Sequence
  source: /note="Description of Artificial Sequence: Synthetic oligonucleotide"
  source: /note="RNA"
  modified_base (10)..(10): bicyclic nucleic acid (BNA)
  source: /note="3' tri-ethylene glycol (TEG)"
aaggaagaug

SEQ ID NO: 15283 - DNA, 9 bp, Artificial Sequence
  source: /note="Description of Artificial Sequence: Synthetic oligonucleotide"
  source: /note="DNA/RNA"
  modified_base (9)..(9): bicyclic nucleic acid (BNA)
  source: /note="3' tri-ethylene glycol (TEG)"
aaggaagat

SEQ ID NO: 15284 - RNA, 8 nt, Artificial Sequence
  source: /note="Description of Artificial Sequence: Synthetic oligonucleotide"
  source: /note="RNA/Antisense Oligonucleotide"
  modified_base (8)..(8): bicyclic nucleic acid (BNA)
  source: /note="3' tri-ethylene glycol (TEG)"
aaggaaga

SEQ ID NO: 15285 - RNA, 19 nt, Artificial Sequence
  source: /note="Description of Artificial Sequence: Synthetic oligonucleotide"
  source: /note="RNA"
  modified_base (11)..(11): 5-methyl modified nucleotide
  modified_base (16)..(16): 5-methyl modified nucleotide
  modified_base (19)..(19): bicyclic nucleic acid (BNA)
  source: /note="3' tri-ethylene glycol (TEG)"
aggaagauggcauuucuag

SEQ ID NO: 15286 - RNA, 18 nt, Artificial Sequence
  source: /note="Description of Artificial Sequence: Synthetic oligonucleotide"
  source: /note="RNA"
  modified_base (11)..(11): 5-methyl modified nucleotide
  modified_base (16)..(16): 5-methyl modified nucleotide
  modified_base (18)..(18): bicyclic nucleic acid (BNA)
  source: /note="3' tri-ethylene glycol (TEG)"
aggaagauggcauuucua

SEQ ID NO: 15287 - DNA, 17 bp, Artificial Sequence
  source: /note="Description of Artificial Sequence: Synthetic oligonucleotide"
  source: /note="Description of Combined DNA/RNA Molecule: Synthetic oligonucleotide"
  source: /note="DNA/RNA"
  modified_base (11)..(11): 5-methyl modified nucleotide
  modified_base (16)..(16): 5-methyl modified nucleotide
  modified_base (17)..(17): bicyclic nucleic acid (BNA)
  source: /note="3' tri-ethylene glycol (TEG)"
aggaagauggcauuuct

SEQ ID NO: 15288 - RNA, 16 nt, Artificial Sequence
  source: /note="Description of Artificial Sequence: Synthetic oligonucleotide"
  source: /note="RNA"
  modified_base (11)..(11): 5-methyl modified nucleotide
  modified_base (16)..(16): 5-methyl bicyclic nucleic acid
  source: /note="3' tri-ethylene glycol (TEG)"
aggaagauggcauuuc

SEQ ID NO: 15289 - DNA, 15 bp, Artificial Sequence
  source: /note="Description of Artificial Sequence: Synthetic oligonucleotide"
  source: /note="Description of Combined DNA/RNA Molecule: Synthetic oligonucleotide"
  source: /note="DNA/RNA"
  modified_base (11)..(11): 5-methyl modified nucleotide
  modified_base (15)..(15): bicyclic nucleic acid (BNA)
  source: /note="3' tri-ethylene glycol (TEG)"
aggaagauggcauut

SEQ ID NO: 15290 - DNA, 14 bp, Artificial Sequence
  source: /note="Description of Artificial Sequence: Synthetic oligonucleotide"
  source: /note="Description of Combined DNA/RNA Molecule: Synthetic oligonucleotide"
  source: /note="DNA/RNA"
  modified_base (11)..(11): 5-methyl modified nucleotide
  modified_base (14)..(14): bicyclic nucleic acid (BNA)
  source: /note="3' tri-ethylene glycol (TEG)"
aggaagauggcaut

SEQ ID NO: 15291 - DNA, 13 bp, Artificial Sequence
  source: /note="Description of Artificial Sequence: Synthetic oligonucleotide"
  source: /note="Description of Combined DNA/RNA Molecule: Synthetic oligonucleotide"
  source: /note="DNA/RNA"
  modified_base (11)..(11): 5-methyl modified nucleotide
  modified_base (13)..(13): bicyclic nucleic acid (BNA)
  source: /note="3' tri-ethylene glycol (TEG)"
aggaagauggcat

SEQ ID NO: 15292 - RNA, 12 nt, Artificial Sequence
  source: /note="Description of Artificial Sequence: Synthetic oligonucleotide"
  source: /note="RNA"
  modified_base (11)..(11): 5-methyl modified nucleotide
  modified_base (12)..(12): bicyclic nucleic acid (BNA)
  source: /note="3' tri-ethylene glycol (TEG)"
aggaagauggca

SEQ ID NO: 15293 - RNA, 10 nt, Artificial Sequence
  source: /note="Description of Artificial Sequence: Synthetic oligonucleotide"
  source: /note="RNA"
  modified_base (10)..(10): bicyclic nucleic acid (BNA)
  source: /note="3' tri-ethylene glycol (TEG)"
aggaagaugg

SEQ ID NO: 15294 - RNA, 9 nt, Artificial Sequence
  source: /note="Description of Artificial Sequence: Synthetic oligonucleotide"
  source: /note="RNA"
  modified_base (9)..(9): bicyclic nucleic acid (BNA)
  source: /note="3' tri-ethylene glycol (TEG)"
aggaagaug

SEQ ID NO: 15295 - DNA, 8 bp, Artificial Sequence
  source: /note="Description of Artificial Sequence: Synthetic oligonucleotide"
  source: /note="DNA/RNA"
  modified_base (8)..(8): bicyclic nucleic acid (BNA)
  source: /note="3' tri-ethylene glycol (TEG)"
aggaagat

SEQ ID NO: 15296 - RNA, 18 nt, Artificial Sequence
  source: /note="Description of Artificial Sequence: Synthetic oligonucleotide"
  source: /note="RNA"
  modified_base (10)..(10): 5-methyl modified nucleotide
  modified_base (15)..(15): 5-methyl modified nucleotide
  modified_base (18)..(18): bicyclic nucleic acid (BNA)
  source: /note="3' tri-ethylene glycol (TEG)"
ggaagauggcauuucuag

SEQ ID NO: 15297 - RNA, 17 nt, Artificial Sequence
  source: /note="Description of Artificial Sequence: Synthetic oligonucleotide"
  source: /note="RNA"
  modified_base (10)..(10): 5-methyl modified nucleotide
  modified_base (15)..(15): 5-methyl modified nucleotide
  modified_base (17)..(17): bicyclic nucleic acid (BNA)
  source: /note="3' tri-ethylene glycol (TEG)"
ggaagauggcauuucua

SEQ ID NO: 15298 - DNA, 16 bp, Artificial Sequence
  source: /note="Description of Artificial Sequence: Synthetic oligonucleotide"
  source: /note="Description of Combined DNA/RNA Molecule: Synthetic oligonucleotide"
  source: /note="DNA/RNA"
  modified_base (10)..(10): 5-methyl modified nucleotide
  modified_base (15)..(15): 5-methyl modified nucleotide
  modified_base (16)..(16): bicyclic nucleic acid (BNA)
  source: /note="3' tri-ethylene glycol (TEG)"
ggaagauggcauuuct

SEQ ID NO: 15299 - RNA, 15 nt, Artificial Sequence
  source: /note="Description of Artificial Sequence: Synthetic oligonucleotide"
  source: /note="RNA"
  modified_base (10)..(10): 5-methyl modified nucleotide
  modified_base (15)..(15): 5-methyl bicyclic nucleic acid
  source: /note="3' tri-ethylene glycol (TEG)"
ggaagauggcauuuc

SEQ ID NO: 15300 - DNA, 14 bp, Artificial Sequence
  source: /note="Description of Artificial Sequence: Synthetic oligonucleotide"
  source: /note="Description of Combined DNA/RNA Molecule: Synthetic oligonucleotide"
  source: /note="DNA/RNA"
  modified_base (10)..(10): 5-methyl modified nucleotide
  modified_base (14)..(14): bicyclic nucleic acid (BNA)
  source: /note="3' tri-ethylene glycol (TEG)"
ggaagauggcauut

SEQ ID NO: 15301 - DNA, 13 bp, Artificial Sequence
  source: /note="Description of Artificial Sequence: Synthetic oligonucleotide"
  source: /note="Description of Combined DNA/RNA Molecule: Synthetic oligonucleotide"
  source: /note="DNA/RNA"
  modified_base (10)..(10): 5-methyl modified nucleotide
  modified_base (13)..(13): bicyclic nucleic acid (BNA)
  source: /note="3' tri-ethylene glycol (TEG)"
ggaagauggcaut

SEQ ID NO: 15302 - DNA, 12 bp, Artificial Sequence
  source: /note="Description of Artificial Sequence: Synthetic oligonucleotide"
  source: /note="Description of Combined DNA/RNA Molecule: Synthetic oligonucleotide"
  source: /note="DNA/RNA"
  modified_base (10)..(10): 5-methyl modified nucleotide
  modified_base (12)..(12): bicyclic nucleic acid (BNA)
  source: /note="3' tri-ethylene glycol (TEG)"
ggaagauggcat

SEQ ID NO: 15303 - RNA, 11 nt, Artificial Sequence
  source: /note="Description of Artificial Sequence: Synthetic oligonucleotide"
  source: /note="RNA"
  modified_base (10)..(10): 5-methyl modified nucleotide
  modified_base (11)..(11): bicyclic nucleic acid (BNA)
  source: /note="3' tri-ethylene glycol (TEG)"
ggaagauggca

SEQ ID NO: 15304 - RNA, 10 nt, Artificial Sequence
  source: /note="Description of Artificial Sequence: Synthetic oligonucleotide"
  source: /note="RNA"
  modified_base (10)..(10): 5-methyl bicyclic nucleic acid
  source: /note="3' tri-ethylene glycol (TEG)"
ggaagauggc

SEQ ID NO: 15305 - RNA, 8 nt, Artificial Sequence
  source: /note="Description of Artificial Sequence: Synthetic oligonucleotide"
  source: /note="RNA"
  modified_base (8)..(8): bicyclic nucleic acid (BNA)
  source: /note="3' tri-ethylene glycol (TEG)"
ggaagaug

SEQ ID NO: 15306 - RNA, 17 nt, Artificial Sequence
  source: /note="Description of Artificial Sequence: Synthetic oligonucleotide"
  source: /note="RNA"
  modified_base (9)..(9): 5-methyl modified nucleotide
  modified_base (14)..(14): 5-methyl modified nucleotide
  modified_base (17)..(17): bicyclic nucleic acid (BNA)
  source: /note="3' tri-ethylene glycol (TEG)"
gaagauggcauuucuag

SEQ ID NO: 15307 - RNA, 16 nt, Artificial Sequence
  source: /note="Description of Artificial Sequence: Synthetic oligonucleotide"
  source: /note="RNA"
  modified_base (9)..(9): 5-methyl modified nucleotide
  modified_base (14)..(14): 5-methyl modified nucleotide
  modified_base (16)..(16): bicyclic nucleic acid (BNA)
  source: /note="3' tri-ethylene glycol (TEG)"
gaagauggcauuucua

SEQ ID NO: 15308 - RNA, 14 nt, Artificial Sequence
  source: /note="Description of Artificial Sequence: Synthetic oligonucleotide"
  source: /note="RNA"
  modified_base (9)..(9): 5-methyl modified nucleotide
  modified_base (14)..(14): 5-methyl bicyclic nucleic acid
  source: /note="3' tri-ethylene glycol (TEG)"
gaagauggcauuuc

SEQ ID NO: 15309 - DNA, 13 bp, Artificial Sequence
  source: /note="Description of Artificial Sequence: Synthetic oligonucleotide"
  source: /note="Description of Combined DNA/RNA Molecule: Synthetic oligonucleotide"
  source: /note="DNA/RNA"
  modified_base (9)..(9): 5-methyl modified nucleotide
  modified_base (13)..(13): bicyclic nucleic acid (BNA)
  source: /note="3' tri-ethylene glycol (TEG)"
gaagauggcauut

SEQ ID NO: 15310 - DNA, 12 bp, Artificial Sequence
  source: /note="Description of Artificial Sequence: Synthetic oligonucleotide"
  source: /note="Description of Combined DNA/RNA Molecule: Synthetic oligonucleotide"
  source: /note="DNA/RNA"
  modified_base (9)..(9): 5-methyl modified nucleotide
  modified_base (12)..(12): bicyclic nucleic acid (BNA)
  source: /note="3' tri-ethylene glycol (TEG)"
gaagauggcaut

SEQ ID NO: 15311 - DNA, 11 bp, Artificial Sequence
  source: /note="Description of Artificial Sequence: Synthetic oligonucleotide"
  source: /note="Description of Combined DNA/RNA Molecule: Synthetic oligonucleotide"
  source: /note="DNA/RNA"
  modified_base (9)..(9): 5-methyl modified nucleotide
  modified_base (11)..(11): bicyclic nucleic acid (BNA)
  source: /note="3' tri-ethylene glycol (TEG)"
gaagauggcat

SEQ ID NO: 15312 - RNA, 10 nt, Artificial Sequence
  source: /note="Description of Artificial Sequence: Synthetic oligonucleotide"
  source: /note="RNA"
  modified_base (9)..(9): 5-methyl modified nucleotide
  modified_base (10)..(10): bicyclic nucleic acid (BNA)
  source: /note="3' tri-ethylene glycol (TEG)"
gaagauggca

SEQ ID NO: 15313 - RNA, 9 nt, Artificial Sequence
  source: /note="Description of Artificial Sequence: Synthetic oligonucleotide"
  source: /note="RNA"
  modified_base (9)..(9): 5-methyl bicyclic nucleic acid
  source: /note="3' tri-ethylene glycol (TEG)"
gaagauggc

SEQ ID NO: 15314 - RNA, 8 nt, Artificial Sequence
  source: /note="Description of Artificial Sequence: Synthetic oligonucleotide"
  source: /note="RNA"
  modified_base (8)..(8): bicyclic nucleic acid (BNA)
  source: /note="3' tri-ethylene glycol (TEG)"
gaagaugg

SEQ ID NO: 15315 - RNA, 16 nt, Artificial Sequence
  source: /note="Description of Artificial Sequence: Synthetic oligonucleotide"
  source: /note="RNA"
  modified_base (8)..(8): 5-methyl modified nucleotide
  modified_base (13)..(13): 5-methyl modified nucleotide
  modified_base (16)..(16): bicyclic nucleic acid (BNA)
  source: /note="3' tri-ethylene glycol (TEG)"
aagauggcauuucuag

SEQ ID NO: 15316 - RNA, 15 nt, Artificial Sequence
  source: /note="Description of Artificial Sequence: Synthetic oligonucleotide"
  source: /note="RNA"
  modified_base (8)..(8): 5-methyl modified nucleotide
  modified_base (13)..(13): 5-methyl modified nucleotide
  modified_base (15)..(15): bicyclic nucleic acid (BNA)
  source: /note="3' tri-ethylene glycol (TEG)"
aagauggcauuucua

SEQ ID NO: 15317 - DNA, 14 bp, Artificial Sequence
  source: /note="Description of Artificial Sequence: Synthetic oligonucleotide"
  source: /note="Description of Combined DNA/RNA Molecule: Synthetic oligonucleotide"
  source: /note="DNA/RNA"
  modified_base (8)..(8): 5-methyl modified nucleotide
  modified_base (13)..(13): 5-methyl modified nucleotide
  modified_base (14)..(14): bicyclic nucleic acid (BNA)
  source: /note="3' tri-ethylene glycol (TEG)"
aagauggcauuuct

SEQ ID NO: 15318 - RNA, 13 nt, Artificial Sequence
  source: /note="Description of Artificial Sequence: Synthetic oligonucleotide"
  source: /note="RNA"
  modified_base (8)..(8): 5-methyl modified nucleotide
  modified_base (13)..(13): 5-methyl bicyclic nucleic acid
  source: /note="3' tri-ethylene glycol (TEG)"
aagauggcauuuc

SEQ ID NO: 15319 - DNA, 12 bp, Artificial Sequence
  source: /note="Description of Artificial Sequence: Synthetic oligonucleotide"
  source: /note="Description of Combined DNA/RNA Molecule: Synthetic oligonucleotide"
  source: /note="DNA/RNA"
  modified_base (8)..(8): 5-methyl modified nucleotide
  modified_base (12)..(12): bicyclic nucleic acid (BNA)
  source: /note="3' tri-ethylene glycol (TEG)"
aagauggcauut

SEQ ID NO: 15320 - DNA, 11 bp, Artificial Sequence
  source: /note="Description of Artificial Sequence: Synthetic oligonucleotide"
  source: /note="Description of Combined DNA/RNA Molecule: Synthetic oligonucleotide"
  source: /note="DNA/RNA"
  modified_base (8)..(8): 5-methyl modified nucleotide
  modified_base (11)..(11): bicyclic nucleic acid (BNA)
  source: /note="3' tri-ethylene glycol (TEG)"
aagauggcaut

SEQ ID NO: 15321 - DNA, 10 bp, Artificial Sequence
  source: /note="Description of Artificial Sequence: Synthetic oligonucleotide"
  source: /note="Description of Combined DNA/RNA Molecule: Synthetic oligonucleotide"
  source: /note="DNA/RNA"
  modified_base (8)..(8): 5-methyl modified nucleotide
  modified_base (10)..(10): bicyclic nucleic acid (BNA)
  source: /note="3' tri-ethylene glycol (TEG)"
aagauggcat

SEQ ID NO: 15322 - RNA, 9 nt, Artificial Sequence
  source: /note="Description of Artificial Sequence: Synthetic oligonucleotide"
  source: /note="RNA"
  modified_base (8)..(8): 5-methyl modified nucleotide
  modified_base (9)..(9): bicyclic nucleic acid (BNA)
  source: /note="3' tri-ethylene glycol (TEG)"
aagauggca

SEQ ID NO: 15323 - RNA, 8 nt, Artificial Sequence
  source: /note="Description of Artificial Sequence: Synthetic oligonucleotide"
  source: /note="RNA"
  modified_base (8)..(8): 5-methyl bicyclic nucleic acid
  source: /note="3' tri-ethylene glycol (TEG)"
aagauggc

SEQ ID NO: 15324 - RNA, 15 nt, Artificial Sequence
  source: /note="Description of Artificial Sequence: Synthetic oligonucleotide"
  source: /note="RNA"
  modified_base (7)..(7): 5-methyl modified nucleotide
  modified_base (12)..(12): 5-methyl modified nucleotide
  modified_base (15)..(15): bicyclic nucleic acid (BNA)
  source: /note="3' tri-ethylene glycol (TEG)"
agauggcauuucuag

SEQ ID NO: 15325 - RNA, 14 nt, Artificial Sequence
  source: /note="Description of Artificial Sequence: Synthetic oligonucleotide"
  source: /note="RNA"
  modified_base (7)..(7): 5-methyl modified nucleotide
  modified_base (12)..(12): 5-methyl modified nucleotide
  modified_base (14)..(14): bicyclic nucleic acid (BNA)
  source: /note="3' tri-ethylene glycol (TEG)"
agauggcauuucua

SEQ ID NO: 15326 - DNA, 13 bp, Artificial Sequence
  source: /note="Description of Artificial Sequence: Synthetic oligonucleotide"
  source: /note="Description of Combined DNA/RNA Molecule: Synthetic oligonucleotide"
  source: /note="DNA/RNA"
  modified_base (7)..(7): 5-methyl modified nucleotide
  modified_base (12)..(12): 5-methyl modified nucleotide
  modified_base (13)..(13): bicyclic nucleic acid (BNA)
  source: /note="3' tri-ethylene glycol (TEG)"
agauggcauuuct

SEQ ID NO: 15327 - RNA, 12 nt, Artificial Sequence
  source: /note="Description of Artificial Sequence: Synthetic oligonucleotide"
  source: /note="RNA"
  modified_base (7)..(7): 5-methyl modified nucleotide
  modified_base (12)..(12): 5-methyl bicyclic nucleic acid
  source: /note="3' tri-ethylene glycol (TEG)"
agauggcauuuc

SEQ ID NO: 15328 - DNA, 11 bp, Artificial Sequence
  source: /note="Description of Artificial Sequence: Synthetic oligonucleotide"
  source: /note="Description of Combined DNA/RNA Molecule: Synthetic oligonucleotide"
  source: /note="DNA/RNA"
  modified_base (7)..(7): 5-methyl modified nucleotide
  modified_base (11)..(11): bicyclic nucleic acid (BNA)
  source: /note="3' tri-ethylene glycol (TEG)"
agauggcauut

SEQ ID NO: 15329 - DNA, 10 bp, Artificial Sequence
  source: /note="Description of Artificial Sequence: Synthetic oligonucleotide"
  source: /note="Description of Combined DNA/RNA Molecule: Synthetic oligonucleotide"
  source: /note="DNA/RNA"
  modified_base (7)..(7): 5-methyl modified nucleotide
  modified_base (10)..(10): bicyclic nucleic acid (BNA)
  source: /note="3' tri-ethylene glycol (TEG)"
agauggcaut

SEQ ID NO: 15330 - DNA, 9 bp, Artificial Sequence
  source: /note="Description of Artificial Sequence: Synthetic oligonucleotide"
  source: /note="Description of Combined DNA/RNA Molecule: Synthetic oligonucleotide"
  source: /note="DNA/RNA"
  modified_base (7)..(7): 5-methyl modified nucleotide
  modified_base (9)..(9): bicyclic nucleic acid (BNA)
  source: /note="3' tri-ethylene glycol (TEG)"
agauggcat

SEQ ID NO: 15331 - RNA, 8 nt, Artificial Sequence
  source: /note="Description of Artificial Sequence: Synthetic oligonucleotide"
  source: /note="RNA"
  modified_base (7)..(7): 5-methyl modified nucleotide
  modified_base (8)..(8): bicyclic nucleic acid (BNA)
  source: /note="3' tri-ethylene glycol (TEG)"
agauggca

SEQ ID NO: 15332 - RNA, 30 nt, Artificial Sequence; identical to SEQ ID NO: 284
  source: /note="Description of Artificial Sequence: Synthetic oligonucleotide"
  source: /note="RNA"
  modified_base (1)..(1): 5-methyl modified nucleotide
  modified_base (3)..(3): 5-methyl modified nucleotide
  modified_base (4)..(4): 5-methyl modified nucleotide
  modified_base (7)..(7): 5-methyl modified nucleotide
  modified_base (10)..(10): 5-methyl modified nucleotide
  modified_base (22)..(22): 5-methyl modified nucleotide
  modified_base (27)..(27): 5-methyl modified nucleotide
  modified_base (30)..(30): bicyclic nucleic acid (BNA)
  source: /note="3' tri-ethylene glycol (TEG)"

SEQ ID NO: 15333 - RNA, 29 nt, Artificial Sequence
  source: /note="Description of Artificial Sequence: Synthetic oligonucleotide"
  source: /note="RNA"
  modified_base (1)..(1): 5-methyl modified nucleotide
  modified_base (3)..(3): 5-methyl modified nucleotide
  modified_base (4)..(4): 5-methyl modified nucleotide
  modified_base (7)..(7): 5-methyl modified nucleotide
  modified_base (10)..(10): 5-methyl modified nucleotide
  modified_base (22)..(22): 5-methyl modified nucleotide
  modified_base (27)..(27): 5-methyl modified nucleotide
  modified_base (29)..(29): bicyclic nucleic acid (BNA)
  source: /note="3' tri-ethylene glycol (TEG)"
cuccaacaucaaggaagauggcauuucua

SEQ ID NO: 15334 - DNA, 28 bp, Artificial Sequence
  source: /note="Description of Artificial Sequence: Synthetic oligonucleotide"
  source: /note="Description of Combined DNA/RNA Molecule: Synthetic oligonucleotide"
  source: /note="DNA/RNA"
  modified_base (1)..(1): 5-methyl modified nucleotide
  modified_base (3)..(3): 5-methyl modified nucleotide
  modified_base (4)..(4): 5-methyl modified nucleotide
  modified_base (7)..(7): 5-methyl modified nucleotide
  modified_base (10)..(10): 5-methyl modified nucleotide
  modified_base (22)..(22): 5-methyl modified nucleotide
  modified_base (27)..(27): 5-methyl modified nucleotide
  modified_base (28)..(28): bicyclic nucleic acid (BNA)
  source: /note="3' tri-ethylene glycol (TEG)"
cuccaacaucaaggaagauggcauuuct

SEQ ID NO: 15335 - RNA, 27 nt, Artificial Sequence
  source: /note="Description of Artificial Sequence: Synthetic oligonucleotide"
  source: /note="RNA"
  modified_base (1)..(1): 5-methyl modified nucleotide
  modified_base (3)..(3): 5-methyl modified nucleotide
  modified_base (4)..(4): 5-methyl modified nucleotide
  modified_base (7)..(7): 5-methyl modified nucleotide
  modified_base (10)..(10): 5-methyl modified nucleotide
  modified_base (22)..(22): 5-methyl modified nucleotide
  modified_base (27)..(27): 5-methyl bicyclic nucleic acid
  source: /note="3' tri-ethylene glycol (TEG)"
cuccaacaucaaggaagauggcauuuc

SEQ ID NO: 15336 - DNA, 26 bp, Artificial Sequence
  source: /note="Description of Artificial Sequence: Synthetic oligonucleotide"
  source: /note="Description of Combined DNA/RNA Molecule: Synthetic oligonucleotide"
  source: /note="DNA/RNA"
  modified_base (1)..(1): 5-methyl modified nucleotide
  modified_base (3)..(3): 5-methyl modified nucleotide
  modified_base (4)..(4): 5-methyl modified nucleotide
  modified_base (7)..(7): 5-methyl modified nucleotide
  modified_base (10)..(10): 5-methyl modified nucleotide
  modified_base (22)..(22): 5-methyl modified nucleotide
  modified_base (26)..(26): bicyclic nucleic acid (BNA)
  source: /note="3' tri-ethylene glycol (TEG)"
cuccaacaucaaggaagauggcauut

SEQ ID NO: 15337 - DNA, 25 bp, Artificial Sequence
  source: /note="Description of Artificial Sequence: Synthetic oligonucleotide"
  source: /note="Description of Combined DNA/RNA Molecule: Synthetic oligonucleotide"
  source: /note="DNA/RNA"
  modified_base (1)..(1): 5-methyl modified nucleotide
  modified_base (3)..(3): 5-methyl modified nucleotide
  modified_base (4)..(4): 5-methyl modified nucleotide
  modified_base (7)..(7): 5-methyl modified nucleotide
  modified_base (10)..(10): 5-methyl modified nucleotide
  modified_base (22)..(22): 5-methyl modified nucleotide
  modified_base (25)..(25): bicyclic nucleic acid (BNA)
  source: /note="3' tri-ethylene glycol (TEG)"
cuccaacaucaaggaagauggcaut

SEQ ID NO: 15338 - DNA, 24 bp, Artificial Sequence
  source: /note="Description of Artificial Sequence: Synthetic oligonucleotide"
  source: /note="Description of Combined DNA/RNA Molecule: Synthetic oligonucleotide"
  source: /note="DNA/RNA"
  modified_base (1)..(1): 5-methyl modified nucleotide
  modified_base (3)..(3): 5-methyl modified nucleotide
  modified_base (4)..(4): 5-methyl modified nucleotide
  modified_base (7)..(7): 5-methyl modified nucleotide
  modified_base (10)..(10): 5-methyl modified nucleotide
  modified_base (22)..(22): 5-methyl modified nucleotide
  modified_base (24)..(24): bicyclic nucleic acid (BNA)
  source: /note="3' tri-ethylene glycol (TEG)"
cuccaacaucaaggaagauggcat

SEQ ID NO: 15339 - RNA, 23 nt, Artificial Sequence
  source: /note="Description of Artificial Sequence: Synthetic oligonucleotide"
  source: /note="RNA"
  modified_base (1)..(1): 5-methyl modified nucleotide
  modified_base (3)..(3): 5-methyl modified nucleotide
  modified_base (4)..(4): 5-methyl modified nucleotide
  modified_base (7)..(7): 5-methyl modified nucleotide
  modified_base (10)..(10): 5-methyl modified nucleotide
  modified_base (22)..(22): 5-methyl modified nucleotide
  modified_base (23)..(23): bicyclic nucleic acid (BNA)
  source: /note="3' tri-ethylene glycol (TEG)"
cuccaacaucaaggaagauggca

SEQ ID NO: 15340 - RNA, 22 nt, Artificial Sequence
  source: /note="Description of Artificial Sequence: Synthetic oligonucleotide"
  source: /note="RNA"
  modified_base (1)..(1): 5-methyl modified nucleotide
  modified_base (3)..(3): 5-methyl modified nucleotide
  modified_base (4)..(4): 5-methyl modified nucleotide
  modified_base (7)..(7): 5-methyl modified nucleotide
  modified_base (10)..(10): 5-methyl modified nucleotide
  modified_base (22)..(22): 5-methyl bicyclic nucleic acid
  source: /note="3' tri-ethylene glycol (TEG)"
cuccaacaucaaggaagauggc

SEQ ID NO: 15341 - RNA, 21 nt, Artificial Sequence
  source: /note="Description of Artificial Sequence: Synthetic oligonucleotide"
  source: /note="RNA"
  modified_base (1)..(1): 5-methyl modified nucleotide
  modified_base (3)..(3): 5-methyl modified nucleotide
  modified_base (4)..(4): 5-methyl modified nucleotide
  modified_base (7)..(7): 5-methyl modified nucleotide
  modified_base (10)..(10): 5-methyl modified nucleotide
  modified_base (21)..(21): bicyclic nucleic acid (BNA)
  source: /note="3' tri-ethylene glycol (TEG)"
cuccaacaucaaggaagaugg

SEQ ID NO: 15342 - RNA, 20 nt, Artificial Sequence
  source: /note="Description of Artificial Sequence: Synthetic oligonucleotide"
  source: /note="RNA"
  modified_base (1)..(1): 5-methyl modified nucleotide
  modified_base (3)..(3): 5-methyl modified nucleotide
  modified_base (4)..(4): 5-methyl modified nucleotide
  modified_base (7)..(7): 5-methyl modified nucleotide
  modified_base (10)..(10): 5-methyl modified nucleotide
  modified_base (20)..(20): bicyclic nucleic acid (BNA)
  source: /note="3' tri-ethylene glycol (TEG)"
cuccaacaucaaggaagaug

SEQ ID NO: 15343 - DNA, 19 bp, Artificial Sequence
  source: /note="Description of Artificial Sequence: Synthetic oligonucleotide"
  source: /note="Description of Combined DNA/RNA Molecule: Synthetic oligonucleotide"
  source: /note="DNA/RNA"
  modified_base (1)..(1): 5-methyl modified nucleotide
  modified_base (3)..(3): 5-methyl modified nucleotide
  modified_base (4)..(4): 5-methyl modified nucleotide
  modified_base (7)..(7): 5-methyl modified nucleotide
  modified_base (10)..(10): 5-methyl modified nucleotide
  modified_base (19)..(19): bicyclic nucleic acid (BNA)
  source: /note="3' tri-ethylene glycol (TEG)"
cuccaacaucaaggaagat

SEQ ID NO: 15344 - RNA, 18 nt, Artificial Sequence
  source: /note="Description of Artificial Sequence: Synthetic oligonucleotide"
  source: /note="RNA"
  modified_base (1)..(1): 5-methyl modified nucleotide
  modified_base (3)..(3): 5-methyl modified nucleotide
  modified_base (4)..(4): 5-methyl modified nucleotide
  modified_base (7)..(7): 5-methyl modified nucleotide
  modified_base (10)..(10): 5-methyl modified nucleotide
  modified_base (18)..(18): bicyclic nucleic acid (BNA)
  source: /note="3' tri-ethylene glycol (TEG)"
cuccaacaucaaggaaga

SEQ ID NO: 15345 - RNA, 17 nt, Artificial Sequence
  source: /note="Description of Artificial Sequence: Synthetic oligonucleotide"
  source: /note="RNA"
  modified_base (1)..(1): 5-methyl modified nucleotide
  modified_base (3)..(3): 5-methyl modified nucleotide
  modified_base (4)..(4): 5-methyl modified nucleotide
  modified_base (7)..(7): 5-methyl modified nucleotide
  modified_base (10)..(10): 5-methyl modified nucleotide
  modified_base (17)..(17): bicyclic nucleic acid (BNA)
  source: /note="3' tri-ethylene glycol (TEG)"
cuccaacaucaaggaag

SEQ ID NO: 15346 - RNA, 29 nt, Artificial Sequence
  source: /note="Description of Artificial Sequence: Synthetic oligonucleotide"
  source: /note="RNA"
  modified_base (2)..(2): 5-methyl modified nucleotide
  modified_base (3)..(3): 5-methyl modified nucleotide
  modified_base (6)..(6): 5-methyl modified nucleotide
  modified_base (9)..(9): 5-methyl modified nucleotide
  modified_base (21)..(21): 5-methyl modified nucleotide
  modified_base (26)..(26): 5-methyl modified nucleotide
  modified_base (29)..(29): bicyclic nucleic acid (BNA)
  source: /note="3' tri-ethylene glycol (TEG)"
uccaacaucaaggaagauggcauuucuag

SEQ ID NO: 15347 - RNA, 28 nt, Artificial Sequence
  source: /note="Description of Artificial Sequence: Synthetic oligonucleotide"
  source: /note="RNA"
  modified_base (2)..(2): 5-methyl modified nucleotide
  modified_base (3)..(3): 5-methyl modified nucleotide
  modified_base (6)..(6): 5-methyl modified nucleotide
  modified_base (9)..(9): 5-methyl modified nucleotide
  modified_base (21)..(21): 5-methyl modified nucleotide
  modified_base (26)..(26): 5-methyl modified nucleotide
  modified_base (28)..(28): bicyclic nucleic acid (BNA)
  source: /note="3' tri-ethylene glycol (TEG)"
uccaacaucaaggaagauggcauuucua

SEQ ID NO: 15348 - DNA, 27 bp, Artificial Sequence
  source: /note="Description of Artificial Sequence: Synthetic oligonucleotide"
  source: /note="Description of Combined DNA/RNA Molecule: Synthetic oligonucleotide"
  source: /note="DNA/RNA"
  modified_base (2)..(2): 5-methyl modified nucleotide
  modified_base (3)..(3): 5-methyl modified nucleotide
  modified_base (6)..(6): 5-methyl modified nucleotide
  modified_base (9)..(9): 5-methyl modified nucleotide
  modified_base (21)..(21): 5-methyl modified nucleotide
  modified_base (26)..(26): 5-methyl modified nucleotide
  modified_base (27)..(27): bicyclic nucleic acid (BNA)
  source: /note="3' tri-ethylene glycol (TEG)"
uccaacaucaaggaagauggcauuuct

SEQ ID NO: 15349 - RNA, 26 nt, Artificial Sequence
  source: /note="Description of Artificial Sequence: Synthetic oligonucleotide"
  source: /note="RNA"
  modified_base (2)..(2): 5-methyl modified nucleotide
  modified_base (3)..(3): 5-methyl modified nucleotide
  modified_base (6)..(6): 5-methyl modified nucleotide
  modified_base (9)..(9): 5-methyl modified nucleotide
  modified_base (21)..(21): 5-methyl modified nucleotide
  modified_base (26)..(26): 5-methyl bicyclic nucleic acid
  source: /note="3' tri-ethylene glycol (TEG)"
uccaacaucaaggaagauggcauuuc

SEQ ID NO: 15350 - DNA, 25 bp, Artificial Sequence
  source: /note="Description of Artificial Sequence: Synthetic oligonucleotide"
  source: /note="Description of Combined DNA/RNA Molecule: Synthetic oligonucleotide"
  source: /note="DNA/RNA"
  modified_base (2)..(2): 5-methyl modified nucleotide
  modified_base (3)..(3): 5-methyl modified nucleotide
  modified_base (6)..(6): 5-methyl modified nucleotide
  modified_base (9)..(9): 5-methyl modified nucleotide
  modified_base (21)..(21): 5-methyl modified nucleotide
  modified_base (25)..(25): bicyclic nucleic acid (BNA)
  source: /note="3' tri-ethylene glycol (TEG)"
uccaacaucaaggaagauggcauut

SEQ ID NO: 15351 - DNA, 24 bp, Artificial Sequence
  source: /note="Description of Artificial Sequence: Synthetic oligonucleotide"
  source: /note="Description of Combined DNA/RNA Molecule: Synthetic oligonucleotide"
  source: /note="DNA/RNA"
  modified_base (2)..(2): 5-methyl modified nucleotide
  modified_base (3)..(3): 5-methyl modified nucleotide
  modified_base (6)..(6): 5-methyl modified nucleotide
  modified_base (9)..(9): 5-methyl modified nucleotide
  modified_base (21)..(21): 5-methyl modified nucleotide
  modified_base (24)..(24): bicyclic nucleic acid (BNA)
  source: /note="3' tri-ethylene glycol (TEG)"
uccaacaucaaggaagauggcaut

SEQ ID NO: 15352 - DNA, 23 bp, Artificial Sequence
  source: /note="Description of Artificial Sequence: Synthetic oligonucleotide"
  source: /note="Description of Combined DNA/RNA Molecule: Synthetic oligonucleotide"
  source: /note="DNA/RNA"
  modified_base (2)..(2): 5-methyl modified nucleotide
  modified_base (3)..(3): 5-methyl modified nucleotide
  modified_base (6)..(6): 5-methyl modified nucleotide
  modified_base (9)..(9): 5-methyl modified nucleotide
  modified_base (21)..(21): 5-methyl modified nucleotide
  modified_base (23)..(23): bicyclic nucleic acid (BNA)
  source: /note="3' tri-ethylene glycol (TEG)"
uccaacaucaaggaagauggcat

SEQ ID NO: 15353 - RNA, 22 nt, Artificial Sequence
  source: /note="Description of Artificial Sequence: Synthetic oligonucleotide"
  source: /note="RNA"
  modified_base (2)..(2): 5-methyl modified nucleotide
  modified_base (3)..(3): 5-methyl modified nucleotide
  modified_base (6)..(6): 5-methyl modified nucleotide
  modified_base (9)..(9): 5-methyl modified nucleotide
  modified_base (21)..(21): 5-methyl modified nucleotide
  modified_base (22)..(22): bicyclic nucleic acid (BNA)
  source: /note="3' tri-ethylene glycol (TEG)"
uccaacaucaaggaagauggca

SEQ ID NO: 15354 - RNA, 21 nt, Artificial Sequence
  source: /note="Description of Artificial Sequence: Synthetic oligonucleotide"
  source: /note="RNA"
  modified_base (2)..(2): 5-methyl modified nucleotide
  modified_base (3)..(3): 5-methyl modified nucleotide
  modified_base (6)..(6): 5-methyl modified nucleotide
  modified_base (9)..(9): 5-methyl modified nucleotide
  modified_base (21)..(21): 5-methyl bicyclic nucleic acid
  source: /note="3' tri-ethylene glycol (TEG)"
uccaacaucaaggaagauggc

SEQ ID NO: 15355 - RNA, 20 nt, Artificial Sequence
  source: /note="Description of Artificial Sequence: Synthetic oligonucleotide"
  source: /note="RNA"
  modified_base (2)..(2): 5-methyl modified nucleotide
  modified_base (3)..(3): 5-methyl modified nucleotide
  modified_base (6)..(6): 5-methyl modified nucleotide
  modified_base (9)..(9): 5-methyl modified nucleotide
  modified_base (20)..(20): bicyclic nucleic acid (BNA)
  source: /note="3' tri-ethylene glycol (TEG)"
uccaacaucaaggaagaugg

SEQ ID NO: 15356 - RNA, 19 nt, Artificial Sequence
  source: /note="Description of Artificial Sequence: Synthetic oligonucleotide"
  source: /note="RNA"
  modified_base (2)..(2): 5-methyl modified nucleotide
  modified_base (3)..(3): 5-methyl modified nucleotide
  modified_base (6)..(6): 5-methyl modified nucleotide
  modified_base (9)..(9): 5-methyl modified nucleotide
  modified_base (19)..(19): bicyclic nucleic acid (BNA)
  source: /note="3' tri-ethylene glycol (TEG)"
uccaacaucaaggaagaug

SEQ ID NO: 15357 - DNA, 18 bp, Artificial Sequence
  source: /note="Description of Artificial Sequence: Synthetic oligonucleotide"
  source: /note="Description of Combined DNA/RNA Molecule: Synthetic oligonucleotide"
  source: /note="DNA/RNA"
  modified_base (2)..(2): 5-methyl modified nucleotide
  modified_base (3)..(3): 5-methyl modified nucleotide
  modified_base (6)..(6): 5-methyl modified nucleotide
  modified_base (9)..(9): 5-methyl modified nucleotide
  modified_base (18)..(18): bicyclic nucleic acid (BNA)
  source: /note="3' tri-ethylene glycol (TEG)"
uccaacaucaaggaagat

SEQ ID NO: 15358 - RNA, 17 nt, Artificial Sequence
  source: /note="Description of Artificial Sequence: Synthetic oligonucleotide"
  source: /note="RNA"
  modified_base (2)..(2): 5-methyl modified nucleotide
  modified_base (3)..(3): 5-methyl modified nucleotide
  modified_base (6)..(6): 5-methyl modified nucleotide
  modified_base (9)..(9): 5-methyl modified nucleotide
  modified_base (17)..(17): bicyclic nucleic acid (BNA)
  source: /note="3' tri-ethylene glycol (TEG)"
uccaacaucaaggaaga

SEQ ID NO: 15359 - RNA, 16 nt, Artificial Sequence
  source: /note="Description of Artificial Sequence: Synthetic oligonucleotide"
  source: /note="RNA"
  modified_base (2)..(2): 5-methyl modified nucleotide
  modified_base (3)..(3): 5-methyl modified nucleotide
  modified_base (6)..(6): 5-methyl modified nucleotide
  modified_base (9)..(9): 5-methyl modified nucleotide
  modified_base (16)..(16): bicyclic nucleic acid (BNA)
  source: /note="3' tri-ethylene glycol (TEG)"
uccaacaucaaggaag

SEQ ID NO: 15360 - RNA, 28 nt, Artificial Sequence
  source: /note="Description of Artificial Sequence: Synthetic oligonucleotide"
  source: /note="RNA"
  modified_base (1)..(1): 5-methyl modified nucleotide
  modified_base (2)..(2): 5-methyl modified nucleotide
  modified_base (5)..(5): 5-methyl modified nucleotide
  modified_base (8)..(8): 5-methyl modified nucleotide
  modified_base (20)..(20): 5-methyl modified nucleotide
  modified_base (25)..(25): 5-methyl modified nucleotide
  modified_base (28)..(28): bicyclic nucleic acid (BNA)
  source: /note="3' tri-ethylene glycol (TEG)"
ccaacaucaaggaagauggcauuucuag

SEQ ID NO: 15361 - RNA, 27 nt, Artificial Sequence
  source: /note="Description of Artificial Sequence: Synthetic oligonucleotide"
  source: /note="RNA"
  modified_base (1)..(1): 5-methyl modified nucleotide
  modified_base (2)..(2): 5-methyl modified nucleotide
  modified_base (5)..(5): 5-methyl modified nucleotide
  modified_base (8)..(8): 5-methyl modified nucleotide
  modified_base (20)..(20): 5-methyl modified nucleotide
  modified_base (25)..(25): 5-methyl modified nucleotide
  modified_base (27)..(27): bicyclic nucleic acid (BNA)
  source: /note="3' tri-ethylene glycol (TEG)"
ccaacaucaaggaagauggcauuucua

SEQ ID NO: 15362 - DNA, 26 bp, Artificial Sequence
  source: /note="Description of Artificial Sequence: Synthetic oligonucleotide"
  source: /note="Description of Combined DNA/RNA Molecule: Synthetic oligonucleotide"
  source: /note="DNA/RNA"
  modified_base (1)..(1): 5-methyl modified nucleotide
  modified_base (2)..(2): 5-methyl modified nucleotide
  modified_base (5)..(5): 5-methyl modified nucleotide
  modified_base (8)..(8): 5-methyl modified nucleotide
  modified_base (20)..(20): 5-methyl modified nucleotide
  modified_base (25)..(25): 5-methyl modified nucleotide
  modified_base (26)..(26): bicyclic nucleic acid (BNA)
  source: /note="3' tri-ethylene glycol (TEG)"
ccaacaucaaggaagauggcauuuct

SEQ ID NO: 15363 - RNA, 25 nt, Artificial Sequence
  source: /note="Description of Artificial Sequence: Synthetic oligonucleotide"
  source: /note="RNA"
  modified_base (1)..(1): 5-methyl modified nucleotide
  modified_base (2)..(2): 5-methyl modified nucleotide
  modified_base (5)..(5): 5-methyl modified nucleotide
  modified_base (8)..(8): 5-methyl modified nucleotide
  modified_base (20)..(20): 5-methyl modified nucleotide
  modified_base (25)..(25): 5-methyl bicyclic nucleic acid
  source: /note="3' tri-ethylene glycol (TEG)"
ccaacaucaaggaagauggcauuuc

SEQ ID NO: 15364 - DNA, 24 bp, Artificial Sequence
  source: /note="Description of Artificial Sequence: Synthetic oligonucleotide"
  source: /note="Description of Combined DNA/RNA Molecule: Synthetic oligonucleotide"
  source: /note="DNA/RNA"
  modified_base (1)..(1): 5-methyl modified nucleotide
  modified_base (2)..(2): 5-methyl modified nucleotide
  modified_base (5)..(5): 5-methyl modified nucleotide
  modified_base (8)..(8): 5-methyl modified nucleotide
  modified_base (20)..(20): 5-methyl modified nucleotide
  modified_base (24)..(24): bicyclic nucleic acid (BNA)
  source: /note="3' tri-ethylene glycol (TEG)"
ccaacaucaaggaagauggcauut

SEQ ID NO: 15365 - DNA, 23 bp, Artificial Sequence
  source: /note="Description of Artificial Sequence: Synthetic oligonucleotide"
  source: /note="Description of Combined DNA/RNA Molecule: Synthetic oligonucleotide"
  source: /note="DNA/RNA"
  modified_base (1)..(1): 5-methyl modified nucleotide
  modified_base (2)..(2): 5-methyl modified nucleotide
  modified_base (5)..(5): 5-methyl modified nucleotide
  modified_base (8)..(8): 5-methyl modified nucleotide
  modified_base (20)..(20): 5-methyl modified nucleotide
  modified_base (23)..(23): bicyclic nucleic acid (BNA)
  source: /note="3' tri-ethylene glycol (TEG)"
ccaacaucaaggaagauggcaut

SEQ ID NO: 15366 - DNA, 22 bp, Artificial Sequence
  source: /note="Description of Artificial Sequence: Synthetic oligonucleotide"
  source: /note="Description of Combined DNA/RNA Molecule: Synthetic oligonucleotide"
  source: /note="DNA/RNA"
  modified_base (1)..(1): 5-methyl modified nucleotide
  modified_base (2)..(2): 5-methyl modified nucleotide
  modified_base (5)..(5): 5-methyl modified nucleotide
  modified_base (8)..(8): 5-methyl modified nucleotide
  modified_base (20)..(20): 5-methyl modified nucleotide
  modified_base (22)..(22): bicyclic nucleic acid (BNA)
  source: /note="3' tri-ethylene glycol (TEG)"
ccaacaucaaggaagauggcat

SEQ ID NO: 15367 - RNA, 21 nt, Artificial Sequence
  source: /note="Description of Artificial Sequence: Synthetic oligonucleotide"
  source: /note="RNA"
  modified_base (1)..(1): 5-methyl modified nucleotide
  modified_base (2)..(2): 5-methyl modified nucleotide
  modified_base (5)..(5): 5-methyl modified nucleotide
  modified_base (8)..(8): 5-methyl modified nucleotide
  modified_base (20)..(20): 5-methyl modified nucleotide
  modified_base (21)..(21): bicyclic nucleic acid (BNA)
  source: /note="3' tri-ethylene glycol (TEG)"
ccaacaucaaggaagauggca

SEQ ID NO: 15368 - RNA, 20 nt, Artificial Sequence
  source: /note="Description of Artificial Sequence: Synthetic oligonucleotide"
  source: /note="RNA"
  modified_base (1)..(1): 5-methyl modified nucleotide
  modified_base (2)..(2): 5-methyl modified nucleotide
  modified_base (5)..(5): 5-methyl modified nucleotide
  modified_base (8)..(8): 5-methyl modified nucleotide
  modified_base (20)..(20): 5-methyl bicyclic nucleic acid
  source: /note="3' tri-ethylene glycol (TEG)"
ccaacaucaaggaagauggc

SEQ ID NO: 15369 - RNA, 19 nt, Artificial Sequence
  source: /note="Description of Artificial Sequence: Synthetic oligonucleotide"
  source: /note="RNA"
  modified_base (1)..(1): 5-methyl modified nucleotide
  modified_base (2)..(2): 5-methyl modified nucleotide
  modified_base (5)..(5): 5-methyl modified nucleotide
  modified_base (8)..(8): 5-methyl modified nucleotide
  modified_base (19)..(19): bicyclic nucleic acid (BNA)
  source: /note="3' tri-ethylene glycol (TEG)"
ccaacaucaaggaagaugg

SEQ ID NO: 15370 - RNA, 18 nt, Artificial Sequence
  source: /note="Description of Artificial Sequence: Synthetic oligonucleotide"
  source: /note="RNA"
  modified_base (1)..(1): 5-methyl modified nucleotide
  modified_base (2)..(2): 5-methyl modified nucleotide
  modified_base (5)..(5): 5-methyl modified nucleotide
  modified_base (8)..(8): 5-methyl modified nucleotide
  modified_base (18)..(18): bicyclic nucleic acid (BNA)
  source: /note="3' tri-ethylene glycol (TEG)"
ccaacaucaaggaagaug

SEQ ID NO: 15371 - DNA, 17 bp, Artificial Sequence
  source: /note="Description of Artificial Sequence: Synthetic oligonucleotide"
  source: /note="Description of Combined DNA/RNA Molecule: Synthetic oligonucleotide"
  source: /note="DNA/RNA"
  modified_base (1)..(1): 5-methyl modified nucleotide
  modified_base (2)..(2): 5-methyl modified nucleotide
  modified_base (5)..(5): 5-methyl modified nucleotide
  modified_base (8)..(8): 5-methyl modified nucleotide
  modified_base (17)..(17): bicyclic nucleic acid (BNA)
  source: /note="3' tri-ethylene glycol (TEG)"
ccaacaucaaggaagat

SEQ ID NO: 15372 - RNA, 16 nt, Artificial Sequence
  source: /note="Description of Artificial Sequence: Synthetic oligonucleotide"
  source: /note="RNA"
  modified_base (1)..(1): 5-methyl modified nucleotide
  modified_base (2)..(2): 5-methyl modified nucleotide
  modified_base (5)..(5): 5-methyl modified nucleotide
  modified_base (8)..(8): 5-methyl modified nucleotide
  modified_base (16)..(16): bicyclic nucleic acid (BNA)
  source: /note="3' tri-ethylene glycol (TEG)"
ccaacaucaaggaaga

SEQ ID NO: 15373 - RNA, 15 nt, Artificial Sequence
  source: /note="Description of Artificial Sequence: Synthetic oligonucleotide"
  source: /note="RNA"
  modified_base (1)..(1): 5-methyl modified nucleotide
  modified_base (2)..(2): 5-methyl modified nucleotide
  modified_base (5)..(5): 5-methyl modified nucleotide
  modified_base (8)..(8): 5-methyl modified nucleotide
  modified_base (15)..(15): bicyclic nucleic acid (BNA)
  source: /note="3' tri-ethylene glycol (TEG)"
ccaacaucaaggaag

SEQ ID NO: 15374 - RNA, 27 nt, Artificial Sequence
  source: /note="Description of Artificial Sequence: Synthetic oligonucleotide"
  source: /note="RNA"
  modified_base (1)..(1): 5-methyl modified nucleotide
  modified_base (4)..(4): 5-methyl modified nucleotide
  modified_base (7)..(7): 5-methyl modified nucleotide
  modified_base (19)..(19): 5-methyl modified nucleotide
  modified_base (24)..(24): 5-methyl modified nucleotide
  modified_base (27)..(27): bicyclic nucleic acid (BNA)
  source: /note="3' tri-ethylene glycol (TEG)"
caacaucaaggaagauggcauuucuag

SEQ ID NO: 15375 - RNA, 26 nt, Artificial Sequence
  source: /note="Description of Artificial Sequence: Synthetic oligonucleotide"
  source: /note="RNA"
  modified_base (1)..(1): 5-methyl modified nucleotide
  modified_base (4)..(4): 5-methyl modified nucleotide
  modified_base (7)..(7): 5-methyl modified nucleotide
  modified_base (19)..(19): 5-methyl modified nucleotide
  modified_base (24)..(24): 5-methyl modified nucleotide
  modified_base (26)..(26): bicyclic nucleic acid (BNA)
  source: /note="3' tri-ethylene glycol (TEG)"
caacaucaaggaagauggcauuucua

SEQ ID NO: 15376 - DNA, 25 bp, Artificial Sequence
  source: /note="Description of Artificial Sequence: Synthetic oligonucleotide"
  source: /note="Description of Combined DNA/RNA Molecule: Synthetic oligonucleotide"
  source: /note="DNA/RNA"
  modified_base (1)..(1): 5-methyl modified nucleotide
  modified_base (4)..(4): 5-methyl modified nucleotide
  modified_base (7)..(7): 5-methyl modified nucleotide
  modified_base (19)..(19): 5-methyl modified nucleotide
  modified_base (24)..(24): 5-methyl modified nucleotide
  modified_base (25)..(25): bicyclic nucleic acid (BNA)
  source: /note="3' tri-ethylene glycol (TEG)"
caacaucaaggaagauggcauuuct

SEQ ID NO: 15377 - RNA, 24 nt, Artificial Sequence
  source: /note="Description of Artificial Sequence: Synthetic oligonucleotide"
  source: /note="RNA"
  modified_base (1)..(1): 5-methyl modified nucleotide
  modified_base (4)..(4): 5-methyl modified nucleotide
  modified_base (7)..(7): 5-methyl modified nucleotide
  modified_base (19)..(19): 5-methyl modified nucleotide
  modified_base (24)..(24): 5-methyl bicyclic nucleic acid
  source: /note="3' tri-ethylene glycol (TEG)"
caacaucaaggaagauggcauuuc

SEQ ID NO: 15378 - DNA, 23 bp, Artificial Sequence
  source: /note="Description of Artificial Sequence: Synthetic oligonucleotide"
  source: /note="Description of Combined DNA/RNA Molecule: Synthetic oligonucleotide"
  source: /note="DNA/RNA"
  modified_base (1)..(1): 5-methyl modified nucleotide
  modified_base (4)..(4): 5-methyl modified nucleotide
  modified_base (7)..(7): 5-methyl modified nucleotide
  modified_base (19)..(19): 5-methyl modified nucleotide
  modified_base (23)..(23): bicyclic nucleic acid (BNA)
  source: /note="3' tri-ethylene glycol (TEG)"
caacaucaaggaagauggcauut

SEQ ID NO: 15379 - DNA, 22 bp, Artificial Sequence
  source: /note="Description of Artificial Sequence: Synthetic oligonucleotide"
  source: /note="Description of Combined DNA/RNA Molecule: Synthetic oligonucleotide"
  source: /note="DNA/RNA"
  modified_base (1)..(1): 5-methyl modified nucleotide
  modified_base (4)..(4): 5-methyl modified nucleotide
  modified_base (7)..(7): 5-methyl modified nucleotide
  modified_base (19)..(19): 5-methyl modified nucleotide
  modified_base (22)..(22): bicyclic nucleic acid (BNA)
  source: /note="3' tri-ethylene glycol (TEG)"
caacaucaaggaagauggcaut

SEQ ID NO: 15380 - DNA, 21 bp, Artificial Sequence
  source: /note="Description of Artificial Sequence: Synthetic oligonucleotide"
  source: /note="Description of Combined DNA/RNA Molecule: Synthetic oligonucleotide"
  source: /note="DNA/RNA"
  modified_base (1)..(1): 5-methyl modified nucleotide
  modified_base (4)..(4): 5-methyl modified nucleotide
  modified_base (7)..(7): 5-methyl modified nucleotide
  modified_base (19)..(19): 5-methyl modified nucleotide
  modified_base (21)..(21): bicyclic nucleic acid (BNA)
  source: /note="3' tri-ethylene glycol (TEG)"
caacaucaaggaagauggcat

SEQ ID NO: 15381 - RNA, 20 nt, Artificial Sequence
  source: /note="Description of Artificial Sequence: Synthetic oligonucleotide"
  source: /note="RNA"
  modified_base (1)..(1): 5-methyl modified nucleotide
  modified_base (4)..(4): 5-methyl modified nucleotide
  modified_base (7)..(7): 5-methyl modified nucleotide
  modified_base (19)..(19): 5-methyl modified nucleotide
  modified_base (20)..(20): bicyclic nucleic acid (BNA)
  source: /note="3' tri-ethylene glycol (TEG)"
caacaucaaggaagauggca

SEQ ID NO: 15382 - RNA, 19 nt, Artificial Sequence
  source: /note="Description of Artificial Sequence: Synthetic oligonucleotide"
  source: /note="RNA"
  modified_base (1)..(1): 5-methyl modified nucleotide
  modified_base (4)..(4): 5-methyl modified nucleotide
  modified_base (7)..(7): 5-methyl modified nucleotide
  modified_base (19)..(19): 5-methyl bicyclic nucleic acid
  source: /note="3' tri-ethylene glycol (TEG)"
caacaucaaggaagauggc

SEQ ID NO: 15383 - RNA, 18 nt, Artificial Sequence
  source: /note="Description of Artificial Sequence: Synthetic oligonucleotide"
  source: /note="RNA"
  modified_base (1)..(1): 5-methyl modified nucleotide
  modified_base (4)..(4): 5-methyl modified nucleotide
  modified_base (7)..(7): 5-methyl modified nucleotide
  modified_base (18)..(18): bicyclic nucleic acid (BNA)
  source: /note="3' tri-ethylene glycol (TEG)"
caacaucaaggaagaugg

SEQ ID NO: 15384 - RNA, 17 nt, Artificial Sequence
  source: /note="Description of Artificial Sequence: Synthetic oligonucleotide"
  source: /note="RNA"
  modified_base (1)..(1): 5-methyl modified nucleotide
  modified_base (4)..(4): 5-methyl modified nucleotide
  modified_base (7)..(7): 5-methyl modified nucleotide
  modified_base (17)..(17): bicyclic nucleic acid (BNA)
  source: /note="3' tri-ethylene glycol (TEG)"
caacaucaaggaagaug

SEQ ID NO: 15385 - DNA, 16 bp, Artificial Sequence
  source: /note="Description of Artificial Sequence: Synthetic oligonucleotide"
  source: /note="Description of Combined DNA/RNA Molecule: Synthetic oligonucleotide"
  source: /note="DNA/RNA"
  modified_base (1)..(1): 5-methyl modified nucleotide
  modified_base (4)..(4): 5-methyl modified nucleotide
  modified_base (7)..(7): 5-methyl modified nucleotide
  modified_base (16)..(16): bicyclic nucleic acid (BNA)
  source: /note="3' tri-ethylene glycol (TEG)"
caacaucaaggaagat

SEQ ID NO: 15386 - RNA, 15 nt, Artificial Sequence
  source: /note="Description of Artificial Sequence: Synthetic oligonucleotide"
  source: /note="RNA"
  modified_base (1)..(1): 5-methyl modified nucleotide
  modified_base (4)..(4): 5-methyl modified nucleotide
  modified_base (7)..(7): 5-methyl modified nucleotide
  modified_base (15)..(15): bicyclic nucleic acid (BNA)
  source: /note="3' tri-ethylene glycol (TEG)"
caacaucaaggaaga

SEQ ID NO: 15387 - RNA, 14 nt, Artificial Sequence
  source: /note="Description of Artificial Sequence: Synthetic oligonucleotide"
  source: /note="RNA"
  modified_base (1)..(1): 5-methyl modified nucleotide
  modified_base (4)..(4): 5-methyl modified nucleotide
  modified_base (7)..(7): 5-methyl modified nucleotide
  modified_base (14)..(14): bicyclic nucleic acid (BNA)
  source: /note="3' tri-ethylene glycol (TEG)"
caacaucaaggaag

SEQ ID NO: 15388 - RNA, 26 nt, Artificial Sequence
  source: /note="Description of Artificial Sequence: Synthetic oligonucleotide"
  source: /note="RNA"
  modified_base (3)..(3): 5-methyl modified nucleotide
  modified_base (6)..(6): 5-methyl modified nucleotide
  modified_base (18)..(18): 5-methyl modified nucleotide
  modified_base (23)..(23): 5-methyl modified nucleotide
  modified_base (26)..(26): bicyclic nucleic acid (BNA)
  source: /note="3' tri-ethylene glycol (TEG)"
aacaucaaggaagauggcauuucuag

SEQ ID NO: 15389 - RNA, 25 nt, Artificial Sequence
  source: /note="Description of Artificial Sequence: Synthetic oligonucleotide"
  source: /note="RNA"
  modified_base (3)..(3): 5-methyl modified nucleotide
  modified_base (6)..(6): 5-methyl modified nucleotide
  modified_base (18)..(18): 5-methyl modified nucleotide
  modified_base (23)..(23): 5-methyl modified nucleotide
  modified_base (25)..(25): bicyclic nucleic acid (BNA)
  source: /note="3' tri-ethylene glycol (TEG)"
aacaucaaggaagauggcauuucua

SEQ ID NO: 15390 - DNA, 24 bp, Artificial Sequence
  source: /note="Description of Artificial Sequence: Synthetic oligonucleotide"
  source: /note="Description of Combined DNA/RNA Molecule: Synthetic oligonucleotide"
  source: /note="DNA/RNA"
  modified_base (3)..(3): 5-methyl modified nucleotide
  modified_base (6)..(6): 5-methyl modified nucleotide
  modified_base (18)..(18): 5-methyl modified nucleotide
  modified_base (23)..(23): 5-methyl modified nucleotide
  modified_base (24)..(24): bicyclic nucleic acid (BNA)
  source: /note="3' tri-ethylene glycol (TEG)"
aacaucaaggaagauggcauuuct

SEQ ID NO: 15391 - RNA, 23 nt, Artificial Sequence
  source: /note="Description of Artificial Sequence: Synthetic oligonucleotide"
  source: /note="RNA"
  modified_base (3)..(3): 5-methyl modified nucleotide
  modified_base (6)..(6): 5-methyl modified nucleotide
  modified_base (18)..(18): 5-methyl modified nucleotide
  modified_base (23)..(23): 5-methyl bicyclic nucleic acid
  source: /note="3' tri-ethylene glycol (TEG)"
aacaucaaggaagauggcauuuc

SEQ ID NO: 15392 - DNA, 22 bp, Artificial Sequence
  source: /note="Description of Artificial Sequence: Synthetic oligonucleotide"
  source: /note="Description of Combined DNA/RNA Molecule: Synthetic oligonucleotide"
  source: /note="DNA/RNA"
  modified_base (3)..(3): 5-methyl modified nucleotide
  modified_base (6)..(6): 5-methyl modified nucleotide
  modified_base (18)..(18): 5-methyl modified nucleotide
  modified_base (22)..(22): bicyclic nucleic acid (BNA)
  source: /note="3' tri-ethylene glycol (TEG)"
aacaucaaggaagauggcauut

SEQ ID NO: 15393 - DNA, 21 bp, Artificial Sequence
  source: /note="Description of Artificial Sequence: Synthetic oligonucleotide"
  source: /note="Description of Combined DNA/RNA Molecule: Synthetic oligonucleotide"
  source: /note="DNA/RNA"
  modified_base (3)..(3): 5-methyl modified nucleotide
  modified_base (6)..(6): 5-methyl modified nucleotide
  modified_base (18)..(18): 5-methyl modified nucleotide
  modified_base (21)..(21): bicyclic nucleic acid (BNA)
  source: /note="3' tri-ethylene glycol (TEG)"
aacaucaaggaagauggcaut

SEQ ID NO: 15394 - DNA, 20 bp, Artificial Sequence
  source: /note="Description of Artificial Sequence: Synthetic oligonucleotide"
  source: /note="Description of Combined DNA/RNA Molecule: Synthetic oligonucleotide"
  source: /note="DNA/RNA"
  modified_base (3)..(3): 5-methyl modified nucleotide
  modified_base (6)..(6): 5-methyl modified nucleotide
  modified_base (18)..(18): 5-methyl modified nucleotide
  modified_base (20)..(20): bicyclic nucleic acid (BNA)
  source: /note="3' tri-ethylene glycol (TEG)"
aacaucaaggaagauggcat

SEQ ID NO: 15395 - RNA, 19 nt, Artificial Sequence
  source: /note="Description of Artificial Sequence: Synthetic oligonucleotide"
  source: /note="RNA"
  modified_base (3)..(3): 5-methyl modified nucleotide
  modified_base (6)..(6): 5-methyl modified nucleotide
  modified_base (18)..(18): 5-methyl modified nucleotide
  modified_base (19)..(19): bicyclic nucleic acid (BNA)
  source: /note="3' tri-ethylene glycol (TEG)"
aacaucaaggaagauggca

SEQ ID NO: 15396 - RNA, 18 nt, Artificial Sequence
  source: /note="Description of Artificial Sequence: Synthetic oligonucleotide"
  source: /note="RNA"
  modified_base (3)..(3): 5-methyl modified nucleotide
  modified_base (6)..(6): 5-methyl modified nucleotide
  modified_base (18)..(18): 5-methyl bicyclic nucleic acid
  source: /note="3' tri-ethylene glycol (TEG)"
aacaucaaggaagauggc

SEQ ID NO: 15397 - RNA, 17 nt, Artificial Sequence
  source: /note="Description of Artificial Sequence: Synthetic oligonucleotide"
  source: /note="RNA"
  modified_base (3)..(3): 5-methyl modified nucleotide
  modified_base (6)..(6): 5-methyl modified nucleotide
  modified_base (17)..(17): bicyclic nucleic acid (BNA)
  source: /note="3' tri-ethylene glycol (TEG)"
aacaucaaggaagaugg

SEQ ID NO: 15398 - RNA, 16 nt, Artificial Sequence
  source: /note="Description of Artificial Sequence: Synthetic oligonucleotide"
  source: /note="RNA"
  modified_base (3)..(3): 5-methyl modified nucleotide
  modified_base (6)..(6): 5-methyl modified nucleotide
  modified_base (16)..(16): bicyclic nucleic acid (BNA)
  source: /note="3' tri-ethylene glycol (TEG)"
aacaucaaggaagaug

SEQ ID NO: 15399 - DNA, 15 bp, Artificial Sequence
  source: /note="Description of Artificial Sequence: Synthetic oligonucleotide"
  source: /note="Description of Combined DNA/RNA Molecule: Synthetic oligonucleotide"
  source: /note="DNA/RNA"
  modified_base (3)..(3): 5-methyl modified nucleotide
  modified_base (6)..(6): 5-methyl modified nucleotide
  modified_base (15)..(15): bicyclic nucleic acid (BNA)
  source: /note="3' tri-ethylene glycol (TEG)"
aacaucaaggaagat

SEQ ID NO: 15400 - RNA, 14 nt, Artificial Sequence
  source: /note="Description of Artificial Sequence: Synthetic oligonucleotide"
  source: /note="RNA"
  modified_base (3)..(3): 5-methyl modified nucleotide
  modified_base (6)..(6): 5-methyl modified nucleotide
  modified_base (14)..(14): bicyclic nucleic acid (BNA)
  source: /note="3' tri-ethylene glycol (TEG)"
aacaucaaggaaga

SEQ ID NO: 15401 - RNA, 13 nt, Artificial Sequence
  source: /note="Description of Artificial Sequence: Synthetic oligonucleotide"
  source: /note="RNA"
  modified_base (3)..(3): 5-methyl modified nucleotide
  modified_base (6)..(6): 5-methyl modified nucleotide
  modified_base (13)..(13): bicyclic nucleic acid (BNA)
  source: /note="3' tri-ethylene glycol (TEG)"
aacaucaaggaag

SEQ ID NO: 15402 - RNA, 25 nt, Artificial Sequence
  source: /note="Description of Artificial Sequence: Synthetic oligonucleotide"
  source: /note="RNA"
  modified_base (2)..(2): 5-methyl modified nucleotide
  modified_base (5)..(5): 5-methyl modified nucleotide
  modified_base (17)..(17): 5-methyl modified nucleotide
  modified_base (22)..(22): 5-methyl modified nucleotide
  modified_base (25)..(25): bicyclic nucleic acid (BNA)
  source: /note="3' tri-ethylene glycol (TEG)"
acaucaaggaagauggcauuucuag

SEQ ID NO: 15403 - RNA, 24 nt, Artificial Sequence
  source: /note="Description of Artificial Sequence: Synthetic oligonucleotide"
  source: /note="RNA"
  modified_base (2)..(2): 5-methyl modified nucleotide
  modified_base (5)..(5): 5-methyl modified nucleotide
  modified_base (17)..(17): 5-methyl modified nucleotide
  modified_base (22)..(22): 5-methyl modified nucleotide
  modified_base (24)..(24): bicyclic nucleic acid (BNA)
  source: /note="3' tri-ethylene glycol (TEG)"
acaucaaggaagauggcauuucua

SEQ ID NO: 15404 - DNA, 23 bp, Artificial Sequence
  source: /note="Description of Artificial Sequence: Synthetic oligonucleotide"
  source: /note="Description of Combined DNA/RNA Molecule: Synthetic oligonucleotide"
  source: /note="DNA/RNA"
  modified_base (2)..(2): 5-methyl modified nucleotide
  modified_base (5)..(5): 5-methyl modified nucleotide
  modified_base (17)..(17): 5-methyl modified nucleotide
  modified_base (22)..(22): 5-methyl modified nucleotide
  modified_base (23)..(23): bicyclic nucleic acid (BNA)
  source: /note="3' tri-ethylene glycol (TEG)"
acaucaaggaagauggcauuuct

SEQ ID NO: 15405 - RNA, 22 nt, Artificial Sequence
  source: /note="Description of Artificial Sequence: Synthetic oligonucleotide"
  source: /note="RNA"
  modified_base (2)..(2): 5-methyl modified nucleotide
  modified_base (5)..(5): 5-methyl modified nucleotide
  modified_base (17)..(17): 5-methyl modified nucleotide
  modified_base (22)..(22): 5-methyl bicyclic nucleic acid
  source: /note="3' tri-ethylene glycol (TEG)"
acaucaaggaagauggcauuuc

SEQ ID NO: 15406 - DNA, 21 bp, Artificial Sequence
  source: /note="Description of Artificial Sequence: Synthetic oligonucleotide"
  source: /note="Description of Combined DNA/RNA Molecule: Synthetic oligonucleotide"
  source: /note="DNA/RNA"
  modified_base (2)..(2): 5-methyl modified nucleotide
  modified_base (5)..(5): 5-methyl modified nucleotide
  modified_base (17)..(17): 5-methyl modified nucleotide
  modified_base (21)..(21): bicyclic nucleic acid (BNA)
  source: /note="3' tri-ethylene glycol (TEG)"
acaucaaggaagauggcauut

SEQ ID NO: 15407 - DNA, 20 bp, Artificial Sequence
  source: /note="Description of Artificial Sequence: Synthetic oligonucleotide"
  source: /note="Description of Combined DNA/RNA Molecule: Synthetic oligonucleotide"
  source: /note="DNA/RNA"
  modified_base (2)..(2): 5-methyl modified nucleotide
  modified_base (5)..(5): 5-methyl modified nucleotide
  modified_base (17)..(17): 5-methyl modified nucleotide
  modified_base (20)..(20): bicyclic nucleic acid (BNA)
  source: /note="3' tri-ethylene glycol (TEG)"
acaucaaggaagauggcaut

SEQ ID NO: 15408 - DNA, 19 bp, Artificial Sequence
  source: /note="Description of Artificial Sequence: Synthetic oligonucleotide"
  source: /note="Description of Combined DNA/RNA Molecule: Synthetic oligonucleotide"
  source: /note="DNA/RNA"
  modified_base (2)..(2): 5-methyl modified nucleotide
  modified_base (5)..(5): 5-methyl modified nucleotide
  modified_base (17)..(17): 5-methyl modified nucleotide
  modified_base (19)..(19): bicyclic nucleic acid (BNA)
  source: /note="3' tri-ethylene glycol (TEG)"
acaucaaggaagauggcat

SEQ ID NO: 15409 - RNA, 18 nt, Artificial Sequence
  source: /note="Description of Artificial Sequence: Synthetic oligonucleotide"
  source: /note="RNA"
  modified_base (2)..(2): 5-methyl modified nucleotide
  modified_base (5)..(5): 5-methyl modified nucleotide
  modified_base (17)..(17): 5-methyl modified nucleotide
  modified_base (18)..(18): bicyclic nucleic acid (BNA)
  source: /note="3' tri-ethylene glycol (TEG)"
acaucaaggaagauggca

SEQ ID NO: 15410 - RNA, 17 nt, Artificial Sequence
  source: /note="Description of Artificial Sequence: Synthetic oligonucleotide"
  source: /note="RNA"
  modified_base (2)..(2): 5-methyl modified nucleotide
  modified_base (5)..(5): 5-methyl modified nucleotide
  modified_base (17)..(17): 5-methyl bicyclic nucleic acid
  source: /note="3' tri-ethylene glycol (TEG)"
acaucaaggaagauggc

SEQ ID NO: 15411 - RNA, 16 nt, Artificial Sequence
  source: /note="Description of Artificial Sequence: Synthetic oligonucleotide"
  source: /note="RNA"
  modified_base (2)..(2): 5-methyl modified nucleotide
  modified_base (5)..(5): 5-methyl modified nucleotide
  modified_base (16)..(16): bicyclic nucleic acid (BNA)
  source: /note="3' tri-ethylene glycol (TEG)"
acaucaaggaagaugg

SEQ ID NO: 15412 - RNA, 15 nt, Artificial Sequence
  source: /note="Description of Artificial Sequence: Synthetic oligonucleotide"
  source: /note="RNA"
  modified_base (2)..(2): 5-methyl modified nucleotide
  modified_base (5)..(5): 5-methyl modified nucleotide
  modified_base (15)..(15): bicyclic nucleic acid (BNA)
  source: /note="3' tri-ethylene glycol (TEG)"
acaucaaggaagaug

SEQ ID NO: 15413 - DNA, 14 bp, Artificial Sequence
  source: /note="Description of Artificial Sequence: Synthetic oligonucleotide"
  source: /note="Description of Combined DNA/RNA Molecule: Synthetic oligonucleotide"
  source: /note="DNA/RNA"
  modified_base (2)..(2): 5-methyl modified nucleotide
  modified_base (5)..(5): 5-methyl modified nucleotide
  modified_base (14)..(14): bicyclic nucleic acid (BNA)
  source: /note="3' tri-ethylene glycol (TEG)"
acaucaaggaagat

SEQ ID NO: 15414 - RNA, 13 nt, Artificial Sequence
  source: /note="Description of Artificial Sequence: Synthetic oligonucleotide"
  source: /note="RNA"
  modified_base (2)..(2): 5-methyl modified nucleotide
  modified_base (5)..(5): 5-methyl modified nucleotide
  modified_base (13)..(13): bicyclic nucleic acid (BNA)
  source: /note="3' tri-ethylene glycol (TEG)"
acaucaaggaaga

SEQ ID NO: 15415 - RNA, 12 nt, Artificial Sequence
  source: /note="Description of Artificial Sequence: Synthetic oligonucleotide"
  source: /note="RNA"
  modified_base (2)..(2): 5-methyl modified nucleotide
  modified_base (5)..(5): 5-methyl modified nucleotide
  modified_base (12)..(12): bicyclic nucleic acid (BNA)
  source: /note="3' tri-ethylene glycol (TEG)"
acaucaaggaag

SEQ ID NO: 15416 - RNA, 24 nt, Artificial Sequence
  source: /note="Description of Artificial Sequence: Synthetic oligonucleotide"
  source: /note="RNA"
  modified_base (1)..(1): 5-methyl modified nucleotide
  modified_base (4)..(4): 5-methyl modified nucleotide
  modified_base (16)..(16): 5-methyl modified nucleotide
  modified_base (21)..(21): 5-methyl modified nucleotide
  modified_base (24)..(24): bicyclic nucleic acid (BNA)
  source: /note="3' tri-ethylene glycol (TEG)"
caucaaggaagauggcauuucuag

SEQ ID NO: 15417 - RNA, 23 nt, Artificial Sequence
  source: /note="Description of Artificial Sequence: Synthetic oligonucleotide"
  source: /note="RNA"
  modified_base (1)..(1): 5-methyl modified nucleotide
  modified_base (4)..(4): 5-methyl modified nucleotide
  modified_base (16)..(16): 5-methyl modified nucleotide
  modified_base (21)..(21): 5-methyl modified nucleotide
  modified_base (23)..(23): bicyclic nucleic acid (BNA)
  source: /note="3' tri-ethylene glycol (TEG)"
caucaaggaagauggcauuucua

SEQ ID NO: 15418 - DNA, 22 bp, Artificial Sequence
  source: /note="Description of Artificial Sequence: Synthetic oligonucleotide"
  source: /note="Description of Combined DNA/RNA Molecule: Synthetic oligonucleotide"
  source: /note="DNA/RNA"
  modified_base (1)..(1): 5-methyl modified nucleotide
  modified_base (4)..(4): 5-methyl modified nucleotide
  modified_base (16)..(16): 5-methyl modified nucleotide
  modified_base (21)..(21): 5-methyl modified nucleotide
  modified_base (22)..(22): bicyclic nucleic acid (BNA)
  source: /note="3' tri-ethylene glycol (TEG)"
caucaaggaagauggcauuuct

SEQ ID NO: 15419 - RNA, 21 nt, Artificial Sequence
  source: /note="Description of Artificial Sequence: Synthetic oligonucleotide"
  source: /note="RNA"
  modified_base (1)..(1): 5-methyl modified nucleotide
  modified_base (4)..(4): 5-methyl modified nucleotide
  modified_base (16)..(16): 5-methyl modified nucleotide
  modified_base (21)..(21): 5-methyl bicyclic nucleic acid
  source: /note="3' tri-ethylene glycol (TEG)"
caucaaggaagauggcauuuc

SEQ ID NO: 15420 - DNA, 20 bp, Artificial Sequence
  source: /note="Description of Artificial Sequence: Synthetic oligonucleotide"
  source: /note="Description of Combined DNA/RNA Molecule: Synthetic oligonucleotide"
  source: /note="DNA/RNA"
  modified_base (1)..(1): 5-methyl modified nucleotide
  modified_base (4)..(4): 5-methyl modified nucleotide
  modified_base (16)..(16): 5-methyl modified nucleotide
  modified_base (20)..(20): bicyclic nucleic acid (BNA)
  source: /note="3' tri-ethylene glycol (TEG)"
caucaaggaagauggcauut

SEQ ID NO: 15421 - DNA, 19 bp, Artificial Sequence
  source: /note="Description of Artificial Sequence: Synthetic oligonucleotide"
  source: /note="Description of Combined DNA/RNA Molecule: Synthetic oligonucleotide"
  source: /note="DNA/RNA"
  modified_base (1)..(1): 5-methyl modified nucleotide
  modified_base (4)..(4): 5-methyl modified nucleotide
  modified_base (16)..(16): 5-methyl modified nucleotide
  modified_base (19)..(19): bicyclic nucleic acid (BNA)
  source: /note="3' tri-ethylene glycol (TEG)"
caucaaggaagauggcaut

SEQ ID NO: 15422 - DNA, 18 bp, Artificial Sequence
  source: /note="Description of Artificial Sequence: Synthetic oligonucleotide"
  source: /note="Description of Combined DNA/RNA Molecule: Synthetic oligonucleotide"
  source: /note="DNA/RNA"
  modified_base (1)..(1): 5-methyl modified nucleotide
  modified_base (4)..(4): 5-methyl modified nucleotide
  modified_base (16)..(16): 5-methyl modified nucleotide
  modified_base (18)..(18): bicyclic nucleic acid (BNA)
  source: /note="3' tri-ethylene glycol (TEG)"
caucaaggaagauggcat

SEQ ID NO: 15423 - RNA, 17 nt, Artificial Sequence
  source: /note="Description of Artificial Sequence: Synthetic oligonucleotide"
  source: /note="RNA"
  modified_base (1)..(1): 5-methyl modified nucleotide
  modified_base (4)..(4): 5-methyl modified nucleotide
  modified_base (16)..(16): 5-methyl modified nucleotide
  modified_base (17)..(17): bicyclic nucleic acid (BNA)
  source: /note="3' tri-ethylene glycol (TEG)"
caucaaggaagauggca

SEQ ID NO: 15424 - RNA, 16 nt, Artificial Sequence
  source: /note="Description of Artificial Sequence: Synthetic oligonucleotide"
  source: /note="RNA"
  modified_base (1)..(1): 5-methyl modified nucleotide
  modified_base (4)..(4): 5-methyl modified nucleotide
  modified_base (16)..(16): 5-methyl bicyclic nucleic acid
  source: /note="3' tri-ethylene glycol (TEG)"
caucaaggaagauggc

SEQ ID NO: 15425 - RNA, 15 nt, Artificial Sequence
  source: /note="Description of Artificial Sequence: Synthetic oligonucleotide"
  source: /note="RNA"
  modified_base (1)..(1): 5-methyl modified nucleotide
  modified_base (4)..(4): 5-methyl modified nucleotide
  modified_base (15)..(15): bicyclic nucleic acid (BNA)
  source: /note="3' tri-ethylene glycol (TEG)"
caucaaggaagaugg

SEQ ID NO: 15426 - RNA, 14 nt, Artificial Sequence
  source: /note="Description of Artificial Sequence: Synthetic oligonucleotide"
  source: /note="RNA"
  modified_base (1)..(1): 5-methyl modified nucleotide
  modified_base (4)..(4): 5-methyl modified nucleotide
  modified_base (14)..(14): bicyclic nucleic acid (BNA)
  source: /note="3' tri-ethylene glycol (TEG)"
caucaaggaagaug

SEQ ID NO: 15427 - DNA, 13 bp, Artificial Sequence
  source: /note="Description of Artificial Sequence: Synthetic oligonucleotide"
  source: /note="Description of Combined DNA/RNA Molecule: Synthetic oligonucleotide"
  source: /note="DNA/RNA"
  modified_base (1)..(1): 5-methyl modified nucleotide
  modified_base (4)..(4): 5-methyl modified nucleotide
  modified_base (13)..(13): bicyclic nucleic acid (BNA)
  source: /note="3' tri-ethylene glycol (TEG)"
caucaaggaagat

SEQ ID NO: 15428 - RNA, 12 nt, Artificial Sequence
  source: /note="Description of Artificial Sequence: Synthetic oligonucleotide"
  source: /note="RNA"
  modified_base (1)..(1): 5-methyl modified nucleotide
  modified_base (4)..(4): 5-methyl modified nucleotide
  modified_base (12)..(12): bicyclic nucleic acid (BNA)
  source: /note="3' tri-ethylene glycol (TEG)"
caucaaggaaga

SEQ ID NO: 15429 - RNA, 11 nt, Artificial Sequence
  source: /note="Description of Artificial Sequence: Synthetic oligonucleotide"
  source: /note="RNA"
  modified_base (1)..(1): 5-methyl modified nucleotide
  modified_base (4)..(4): 5-methyl modified nucleotide
  modified_base (11)..(11): bicyclic nucleic acid (BNA)
  source: /note="3' tri-ethylene glycol (TEG)"
caucaaggaag

SEQ ID NO: 15430 - RNA, 23 nt, Artificial Sequence
  source: /note="Description of Artificial Sequence: Synthetic oligonucleotide"
  source: /note="RNA"
  modified_base (3)..(3): 5-methyl modified nucleotide
  modified_base (15)..(15): 5-methyl modified nucleotide
  modified_base (20)..(20): 5-methyl modified nucleotide
  modified_base (23)..(23): bicyclic nucleic acid (BNA)
  source: /note="3' tri-ethylene glycol (TEG)"
aucaaggaagauggcauuucuag

SEQ ID NO: 15431 - RNA, 22 nt, Artificial Sequence
  source: /note="Description of Artificial Sequence: Synthetic oligonucleotide"
  source: /note="RNA"
  modified_base (3)..(3): 5-methyl modified nucleotide
  modified_base (15)..(15): 5-methyl modified nucleotide
  modified_base (20)..(20): 5-methyl modified nucleotide
  modified_base (22)..(22): bicyclic nucleic acid (BNA)
  source: /note="3' tri-ethylene glycol (TEG)"
aucaaggaagauggcauuucua

SEQ ID NO: 15432 - DNA, 21 bp, Artificial Sequence
  source: /note="Description of Artificial Sequence: Synthetic oligonucleotide"
  source: /note="Description of Combined DNA/RNA Molecule: Synthetic oligonucleotide"
  source: /note="DNA/RNA"
  modified_base (3)..(3): 5-methyl modified nucleotide
  modified_base (15)..(15): 5-methyl modified nucleotide
  modified_base (20)..(20): 5-methyl modified nucleotide
  modified_base (21)..(21): bicyclic nucleic acid (BNA)
  source: /note="3' tri-ethylene glycol (TEG)"
aucaaggaagauggcauuuct

SEQ ID NO: 15433 - RNA, 20 nt, Artificial Sequence
  source: /note="Description of Artificial Sequence: Synthetic oligonucleotide"
  source: /note="RNA"
  modified_base (3)..(3): 5-methyl modified nucleotide
  modified_base (15)..(15): 5-methyl modified nucleotide
  modified_base (20)..(20): 5-methyl bicyclic nucleic acid
  source: /note="3' tri-ethylene glycol (TEG)"
aucaaggaagauggcauuuc

SEQ ID NO: 15434 - DNA, 19 bp, Artificial Sequence
  source: /note="Description of Artificial Sequence: Synthetic oligonucleotide"
  source: /note="Description of Combined DNA/RNA Molecule: Synthetic oligonucleotide"
  source: /note="DNA/RNA"
  modified_base (3)..(3): 5-methyl modified nucleotide
  modified_base (15)..(15): 5-methyl modified nucleotide
  modified_base (19)..(19): bicyclic nucleic acid (BNA)
  source: /note="3' tri-ethylene glycol (TEG)"
aucaaggaagauggcauut

SEQ ID NO: 15435 - DNA, 18 bp, Artificial Sequence
  source: /note="Description of Artificial Sequence: Synthetic oligonucleotide"
  source: /note="Description of Combined DNA/RNA Molecule: Synthetic oligonucleotide"
  source: /note="DNA/RNA"
  modified_base (3)..(3): 5-methyl modified nucleotide
  modified_base (15)..(15): 5-methyl modified nucleotide
  modified_base (18)..(18): bicyclic nucleic acid (BNA)
  source: /note="3' tri-ethylene glycol (TEG)"
aucaaggaagauggcaut

SEQ ID NO: 15436 - DNA, 17 bp, Artificial Sequence
  source: /note="Description of Artificial Sequence: Synthetic oligonucleotide"
  source: /note="Description of Combined DNA/RNA Molecule: Synthetic oligonucleotide"
  source: /note="DNA/RNA"
  modified_base (3)..(3): 5-methyl modified nucleotide
  modified_base (15)..(15): 5-methyl modified nucleotide
  modified_base (17)..(17): bicyclic nucleic acid (BNA)
  source: /note="3' tri-ethylene glycol (TEG)"
aucaaggaagauggcat

SEQ ID NO: 15437 - RNA, 16 nt, Artificial Sequence
  source: /note="Description of Artificial Sequence: Synthetic oligonucleotide"
  source: /note="RNA"
  modified_base (3)..(3): 5-methyl modified nucleotide
  modified_base (15)..(15): 5-methyl modified nucleotide
  modified_base (16)..(16): bicyclic nucleic acid (BNA)
  source: /note="3' tri-ethylene glycol (TEG)"
aucaaggaagauggca

SEQ ID NO: 15438 - RNA, 15 nt, Artificial Sequence
  source: /note="Description of Artificial Sequence: Synthetic oligonucleotide"
  source: /note="RNA"
  modified_base (3)..(3): 5-methyl modified nucleotide
  modified_base (15)..(15): 5-methyl bicyclic nucleic acid
  source: /note="3' tri-ethylene glycol (TEG)"
aucaaggaagauggc

SEQ ID NO: 15439 - RNA, 14 nt, Artificial Sequence
  source: /note="Description of Artificial Sequence: Synthetic oligonucleotide"
  source: /note="RNA"
  modified_base (3)..(3): 5-methyl modified nucleotide
  modified_base (14)..(14): bicyclic nucleic acid (BNA)
  source: /note="3' tri-ethylene glycol (TEG)"
aucaaggaagaugg

SEQ ID NO: 15440 - RNA, 13 nt, Artificial Sequence
  source: /note="Description of Artificial Sequence: Synthetic oligonucleotide"
  source: /note="RNA"
  modified_base (3)..(3): 5-methyl modified nucleotide
  modified_base (13)..(13): bicyclic nucleic acid (BNA)
  source: /note="3' tri-ethylene glycol (TEG)"
aucaaggaagaug

SEQ ID NO: 15441 - DNA, 12 bp, Artificial Sequence
  source: /note="Description of Artificial Sequence: Synthetic oligonucleotide"
  source: /note="Description of Combined DNA/RNA Molecule: Synthetic oligonucleotide"
  source: /note="DNA/RNA"
  modified_base (3)..(3): 5-methyl modified nucleotide
  modified_base (12)..(12): bicyclic nucleic acid (BNA)
  source: /note="3' tri-ethylene glycol (TEG)"
aucaaggaagat

SEQ ID NO: 15442 - RNA, 11 nt, Artificial Sequence
  source: /note="Description of Artificial Sequence: Synthetic oligonucleotide"
  source: /note="RNA"
  modified_base (3)..(3): 5-methyl modified nucleotide
  modified_base (11)..(11): bicyclic nucleic acid (BNA)
  source: /note="3' tri-ethylene glycol (TEG)"
aucaaggaaga

SEQ ID NO: 15443 - RNA, 10 nt, Artificial Sequence
  source: /note="Description of Artificial Sequence: Synthetic oligonucleotide"
  source: /note="RNA"
  modified_base (3)..(3): 5-methyl modified nucleotide
  modified_base (10)..(10): bicyclic nucleic acid (BNA)
  source: /note="3' tri-ethylene glycol (TEG)"
aucaaggaag

SEQ ID NO: 15444 - RNA, 23 nt, Artificial Sequence
  source: /note="Description of Artificial Sequence: Synthetic oligonucleotide"
  source: /note="RNA"
  modified_base (1)..(1): 5-methyl modified nucleotide
  modified_base (2)..(2): 5-methyl modified nucleotide
  modified_base (7)..(7): 5-methyl modified nucleotide
  modified_base (13)..(13): 5-methyl modified nucleotide
  modified_base (14)..(14): 5-methyl modified nucleotide
  modified_base (16)..(16): 5-methyl modified nucleotide
  modified_base (17)..(17): 5-methyl modified nucleotide
  modified_base (20)..(20): 5-methyl modified nucleotide
  modified_base (23)..(23): 5-methyl bicyclic nucleic acid
  source: /note="3' tri-ethylene glycol (TEG)"
ccagagcagguaccuccaacauc

SEQ ID NO: 15445 - RNA, 18 nt, Artificial Sequence
  source: /note="Description of Artificial Sequence: Synthetic oligonucleotide"
  source: /note="RNA"
  modified_base (1)..(1): 5-methyl modified nucleotide
  modified_base (2)..(2): 5-methyl modified nucleotide
  modified_base (7)..(7): 5-methyl modified nucleotide
  modified_base (13)..(13): 5-methyl modified nucleotide
  modified_base (14)..(14): 5-methyl modified nucleotide
  modified_base (16)..(16): 5-methyl modified nucleotide
  modified_base (17)..(17): 5-methyl modified nucleotide
  modified_base (18)..(18): bicyclic nucleic acid (BNA)
  source: /note="3' tri-ethylene glycol (TEG)"
ccagagcagguaccucca

SEQ ID NO: 15446 - DNA, 23 bp, Artificial Sequence
  source: /note="Description of Artificial Sequence: Synthetic oligonucleotide"
  source: /note="Description of Combined DNA/RNA Molecule: Synthetic oligonucleotide"
  source: /note="DNA/RNA"
  modified_base (1)..(1): 5-methyl modified nucleotide
  modified_base (2)..(2): 5-methyl modified nucleotide
  modified_base (4)..(4): 5-methyl modified nucleotide
  modified_base (18)..(18): 5-methyl modified nucleotide
  modified_base (23)..(23): bicyclic nucleic acid (BNA)
  source: /note="3' tri-ethylene glycol (TEG)"
ccucugugauuuuauaacuugat

SEQ ID NO: 15447 - DNA, 17 bp, Artificial Sequence
  source: /note="Description of Artificial Sequence: Synthetic oligonucleotide"
  source: /note="Description of Combined DNA/RNA Molecule: Synthetic oligonucleotide"
  source: /note="DNA/RNA"
  modified_base (2)..(2): 5-methyl modified nucleotide
  modified_base (4)..(4): 5-methyl modified nucleotide
  modified_base (5)..(5): 5-methyl modified nucleotide
  modified_base (6)..(6): 5-methyl modified nucleotide
  modified_base (8)..(8): 5-methyl modified nucleotide
  modified_base (9)..(9): 5-methyl modified nucleotide
  modified_base (12)..(12): 5-methyl modified nucleotide
  modified_base (14)..(14): 5-methyl modified nucleotide
  modified_base (15)..(15): 5-methyl modified nucleotide
  modified_base (16)..(16): 5-methyl modified nucleotide
  modified_base (17)..(17): bicyclic nucleic acid (BNA)
  source: /note="3' tri-ethylene glycol (TEG)"
ucacccaccaucaccct

SEQ ID NO: 15448 - RNA, 20 nt, Artificial Sequence
  source: /note="Description of Artificial Sequence: Synthetic oligonucleotide"
  source: /note="RNA"
  modified_base (7)..(7): 5-methyl modified nucleotide
  modified_base (8)..(8): 5-methyl modified nucleotide
  modified_base (10)..(10): 5-methyl modified nucleotide
  modified_base (16)..(16): 5-methyl modified nucleotide
  modified_base (18)..(18): 5-methyl modified nucleotide
  modified_base (19)..(19): 5-methyl modified nucleotide
  modified_base (20)..(20): 5-methyl bicyclic nucleic acid
  source: /note="3' tri-ethylene glycol (TEG)"
ugauauccucaaggucaccc

SEQ ID NO: 15449 - RNA, 22 nt, Artificial Sequence
  source: /note="Description of Artificial Sequence: Synthetic oligonucleotide"
  source: /note="RNA"
  modified_base (1)..(1): 5-methyl modified nucleotide
  modified_base (4)..(4): 5-methyl modified nucleotide
  modified_base (13)..(13): 5-methyl modified nucleotide
  modified_base (16)..(16): 5-methyl modified nucleotide
  modified_base (18)..(18): 5-methyl modified nucleotide
  modified_base (22)..(22): bicyclic nucleic acid (BNA)
  source: /note="3' tri-ethylene glycol (TEG)"
cugcuugaugaucaucucguug

SEQ ID NO: 15450 - RNA, 18 nt, Artificial Sequence
  source: /note="Description of Artificial Sequence: Synthetic oligonucleotide"
  source: /note="RNA"
  modified_base (1)..(1): 5-methyl modified nucleotide
  modified_base (4)..(4): 5-methyl modified nucleotide
  modified_base (13)..(13): 5-methyl modified nucleotide
  modified_base (16)..(16): 5-methyl modified nucleotide
  modified_base (18)..(18): 5-methyl bicyclic nucleic acid
  source: /note="3' tri-ethylene glycol (TEG)"
cugcuugaugaucaucuc

SEQ ID NO: 15451 - RNA, 19 nt, Artificial Sequence
  source: /note="Description of Artificial Sequence: Synthetic oligonucleotide"
  source: /note="RNA"
  modified_base (5)..(5): 5-methyl modified nucleotide
  modified_base (6)..(6): 5-methyl modified nucleotide
  modified_base (14)..(14): 5-methyl modified nucleotide
  modified_base (15)..(15): 5-methyl modified nucleotide
  modified_base (17)..(17): 5-methyl modified nucleotide
  modified_base (19)..(19): bicyclic nucleic acid (BNA)
  source: /note="3' tri-ethylene glycol (TEG)"
guuuccuuaguaaccacag

SEQ ID NO: 15452 - RNA, 17 nt, Artificial Sequence
  source: /note="Description of Artificial Sequence: Synthetic oligonucleotide"
  source: /note="RNA"
  modified_base (5)..(5): 5-methyl modified nucleotide
  modified_base (6)..(6): 5-methyl modified nucleotide
  modified_base (14)..(14): 5-methyl modified nucleotide
  modified_base (15)..(15): 5-methyl modified nucleotide
  modified_base (17)..(17): 5-methyl bicyclic nucleic acid
  source: /note="3' tri-ethylene glycol (TEG)"
guuuccuuaguaaccac

SEQ ID NO: 15453 - DNA, 20 bp, Artificial Sequence
  source: /note="Description of Artificial Sequence: Synthetic oligonucleotide"
  source: /note="Description of Combined DNA/RNA Molecule: Synthetic oligonucleotide"
  source: /note="DNA/RNA"
  source: /note="5' tri-ethylene glycol (TEG)"
  modified_base (2)..(2): 5-methyl modified nucleotide
  modified_base (14)..(14): 5-methyl modified nucleotide
  modified_base (19)..(19): 5-methyl modified nucleotide
  modified_base (20)..(20): bicyclic nucleic acid (BNA)
  source: /note="3' tri-ethylene glycol (TEG)"
ucaaggaagauggcauuuct

SEQ ID NO: 15454 - RNA, 22 nt, Artificial Sequence
  source: /note="Description of Artificial Sequence: Synthetic oligonucleotide"
  source: /note="RNA"
  source: /note="5' tri-ethylene glycol (TEG)"
  modified_base (2)..(2): 5-methyl modified nucleotide
  modified_base (14)..(14): 5-methyl modified nucleotide
  modified_base (19)..(19): 5-methyl modified nucleotide
  modified_base (22)..(22): bicyclic nucleic acid (BNA)
  source: /note="3' tri-ethylene glycol (TEG)"
ucaaggaagauggcauuucuag

SEQ ID NO: 15455 - RNA, 18 nt, Artificial Sequence
  source: /note="Description of Artificial Sequence: Synthetic oligonucleotide"
  source: /note="RNA"
  source: /note="5' tri-ethylene glycol (TEG)"
  modified_base (9)..(9): 5-methyl modified nucleotide
  modified_base (13)..(13): 5-methyl modified nucleotide
  modified_base (14)..(14): 5-methyl modified nucleotide
  modified_base (18)..(18): 5-methyl bicyclic nucleic acid
  source: /note="3' tri-ethylene glycol (TEG)"
gguaaguucuguccaagc

SEQ ID NO: 15456 - RNA, 18 nt, Artificial Sequence
  source: /note="Description of Artificial Sequence: Synthetic oligonucleotide"
  source: /note="RNA"
  source: /note="5' tri-ethylene glycol (TEG)"
  modified_base (8)..(8): 5-methyl modified nucleotide
  modified_base (12)..(12): 5-methyl modified nucleotide
  modified_base (13)..(13): 5-methyl modified nucleotide
  modified_base (17)..(17): 5-methyl modified nucleotide
  modified_base (18)..(18): 5-methyl bicyclic nucleic acid
  source: /note="3' tri-ethylene glycol (TEG)"
guaaguucuguccaagcc

SEQ ID NO: 15457 - RNA, 18 nt, Artificial Sequence
  source: /note="Description of Artificial Sequence: Synthetic oligonucleotide"
  source: /note="RNA"
  source: /note="5' tri-ethylene glycol (TEG)"
  modified_base (4)..(4): 5-methyl modified nucleotide
  modified_base (13)..(13): 5-methyl modified nucleotide
  modified_base (17)..(17): 5-methyl modified nucleotide
  modified_base (18)..(18): 5-methyl bicyclic nucleic acid
  source: /note="3' tri-ethylene glycol (TEG)"
agucgguaaguucugucc

SEQ ID NO: 15458 - RNA, 18 nt, Artificial Sequence
  source: /note="Description of Artificial Sequence: Synthetic oligonucleotide"
  source: /note="RNA"
  source: /note="5' tri-ethylene glycol (TEG)"
  modified_base (1)..(1): 5-methyl modified nucleotide
  modified_base (5)..(5): 5-methyl modified nucleotide
  modified_base (6)..(6): 5-methyl modified nucleotide
  modified_base (10)..(10): 5-methyl modified nucleotide
  modified_base (11)..(11): 5-methyl modified nucleotide
  modified_base (12)..(12): 5-methyl modified nucleotide
  modified_base (18)..(18): bicyclic nucleic acid (BNA)
  source: /note="3' tri-ethylene glycol (TEG)"
cuguccaagcccgguuga

SEQ ID NO: 15459 - RNA, 15 nt, Artificial Sequence
  source: /note="Description of Artificial Sequence: Synthetic oligonucleotide"
  source: /note="RNA"
  source: /note="5' tri-ethylene glycol (TEG)"
  modified_base (7)..(7): 5-methyl modified nucleotide
  modified_base (11)..(11): 5-methyl modified nucleotide
  modified_base (12)..(12): 5-methyl modified nucleotide
  modified_base (15)..(15): bicyclic nucleic acid (BNA)
  source: /note="3' tri-ethylene glycol (TEG)"
uaaguucuguccaag

SEQ ID NO: 15460 - RNA, 20 nt, Artificial Sequence
  source: /note="Description of Artificial Sequence: Synthetic oligonucleotide"
  source: /note="RNA"
  source: /note="5' tri-ethylene glycol (TEG)"
  modified_base (3)..(3): 5-methyl modified nucleotide
  modified_base (7)..(7): 5-methyl modified nucleotide
  modified_base (8)..(8): 5-methyl modified nucleotide
  modified_base (12)..(12): 5-methyl modified nucleotide
  modified_base (13)..(13): 5-methyl modified nucleotide
  modified_base (14)..(14): 5-methyl modified nucleotide
  modified_base (20)..(20): bicyclic nucleic acid (BNA)
  source: /note="3' tri-ethylene glycol (TEG)"
uucuguccaagcccgguuga

SEQ ID NO: 15461 - RNA, 19 nt, Artificial Sequence
  source: /note="Description of Artificial Sequence: Synthetic oligonucleotide"
  source: /note="RNA"
  source: /note="5' tri-ethylene glycol (TEG)"
  modified_base (3)..(3): 5-methyl modified nucleotide
  modified_base (7)..(7): 5-methyl modified nucleotide
  modified_base (8)..(8): 5-methyl modified nucleotide
  modified_base (12)..(12): 5-methyl modified nucleotide
  modified_base (13)..(13): 5-methyl modified nucleotide
  modified_base (14)..(14): 5-methyl modified nucleotide
  modified_base (19)..(19): bicyclic nucleic acid (BNA)
  source: /note="3' tri-ethylene glycol (TEG)"
uucuguccaagcccgguug

SEQ ID NO: 15462 - DNA, 18 bp, Artificial Sequence
  source: /note="Description of Artificial Sequence: Synthetic oligonucleotide"
  source: /note="Description of Combined DNA/RNA Molecule: Synthetic oligonucleotide"
  source: /note="DNA/RNA"
  source: /note="5' tri-ethylene glycol (TEG)"
  modified_base (3)..(3): 5-methyl modified nucleotide
  modified_base (7)..(7): 5-methyl modified nucleotide
  modified_base (8)..(8): 5-methyl modified nucleotide
  modified_base (12)..(12): 5-methyl modified nucleotide
  modified_base (13)..(13): 5-methyl modified nucleotide
  modified_base (14)..(14): 5-methyl modified nucleotide
  modified_base (18)..(18): bicyclic nucleic acid (BNA)
  source: /note="3' tri-ethylene glycol (TEG)"
uucuguccaagcccggut

SEQ ID NO: 15463 - DNA, 17 bp, Artificial Sequence
  source: /note="Description of Artificial Sequence: Synthetic oligonucleotide"
  source: /note="Description of Combined DNA/RNA Molecule: Synthetic oligonucleotide"
  source: /note="DNA/RNA"
  source: /note="5' tri-ethylene glycol (TEG)"
  modified_base (3)..(3): 5-methyl modified nucleotide
  modified_base (7)..(7): 5-methyl modified nucleotide
  modified_base (8)..(8): 5-methyl modified nucleotide
  modified_base (12)..(12): 5-methyl modified nucleotide
  modified_base (13)..(13): 5-methyl modified nucleotide
  modified_base (14)..(14): 5-methyl modified nucleotide
  modified_base (17)..(17): bicyclic nucleic acid (BNA)
  source: /note="3' tri-ethylene glycol (TEG)"
uucuguccaagcccggt

SEQ ID NO: 15464 - RNA, 16 nt, Artificial Sequence
  source: /note="Description of Artificial Sequence: Synthetic oligonucleotide"
  source: /note="RNA"
  source: /note="5' tri-ethylene glycol (TEG)"
  modified_base (3)..(3): 5-methyl modified nucleotide
  modified_base (7)..(7): 5-methyl modified nucleotide
  modified_base (8)..(8): 5-methyl modified nucleotide
  modified_base (12)..(12): 5-methyl modified nucleotide
  modified_base (13)..(13): 5-methyl modified nucleotide
  modified_base (14)..(14): 5-methyl modified nucleotide
  modified_base (16)..(16): bicyclic nucleic acid (BNA)
  source: /note="3' tri-ethylene glycol (TEG)"
uucuguccaagcccgg

SEQ ID NO: 15465 - RNA, 15 nt, Artificial Sequence
  source: /note="Description of Artificial Sequence: Synthetic oligonucleotide"
  source: /note="RNA"
  source: /note="5' tri-ethylene glycol (TEG)"
  modified_base (3)..(3): 5-methyl modified nucleotide
  modified_base (7)..(7): 5-methyl modified nucleotide
  modified_base (8)..(8): 5-methyl modified nucleotide
  modified_base (12)..(12): 5-methyl modified nucleotide
  modified_base (13)..(13): 5-methyl modified nucleotide
  modified_base (14)..(14): 5-methyl modified nucleotide
  modified_base (15)..(15): bicyclic nucleic acid (BNA)
  source: /note="3' tri-ethylene glycol (TEG)"
uucuguccaagcccg

SEQ ID NO: 15466 - RNA, 14 nt, Artificial Sequence
  source: /note="Description of Artificial Sequence: Synthetic oligonucleotide"
  source: /note="RNA"
  source: /note="5' tri-ethylene glycol (TEG)"
  modified_base (3)..(3): 5-methyl modified nucleotide
  modified_base (7)..(7): 5-methyl modified nucleotide
  modified_base (8)..(8): 5-methyl modified nucleotide
  modified_base (12)..(12): 5-methyl modified nucleotide
  modified_base (13)..(13): 5-methyl modified nucleotide
  modified_base (14)..(14): 5-methyl bicyclic nucleic acid
  source: /note="3' tri-ethylene glycol (TEG)"
uucuguccaagccc

SEQ ID NO: 15467 - RNA, 13 nt, Artificial Sequence
  source: /note="Description of Artificial Sequence: Synthetic oligonucleotide"
  source: /note="RNA"
  source: /note="5' tri-ethylene glycol (TEG)"
  modified_base (3)..(3): 5-methyl modified nucleotide
  modified_base (7)..(7): 5-methyl modified nucleotide
  modified_base (8)..(8): 5-methyl modified nucleotide
  modified_base (12)..(12): 5-methyl modified nucleotide
  modified_base (13)..(13): 5-methyl bicyclic nucleic acid
  source: /note="3' tri-ethylene glycol (TEG)"
uucuguccaagcc

SEQ ID NO: 15468 - RNA, 12 nt, Artificial Sequence
  source: /note="Description of Artificial Sequence: Synthetic oligonucleotide"
  source: /note="RNA"
  source: /note="5' tri-ethylene glycol (TEG)"
  modified_base (3)..(3): 5-methyl modified nucleotide
  modified_base (7)..(7): 5-methyl modified nucleotide
  modified_base (8)..(8): 5-methyl modified nucleotide
  modified_base (12)..(12): 5-methyl bicyclic nucleic acid
  source: /note="3' tri-ethylene glycol (TEG)"
uucuguccaagc

SEQ ID NO: 15469 - RNA, 11 nt, Artificial Sequence
  source: /note="Description of Artificial Sequence: Synthetic oligonucleotide"
  source: /note="RNA"
  source: /note="5' tri-ethylene glycol (TEG)"
  modified_base (3)..(3): 5-methyl modified nucleotide
  modified_base (7)..(7): 5-methyl modified nucleotide
  modified_base (8)..(8): 5-methyl modified nucleotide
  modified_base (11)..(11): bicyclic nucleic acid (BNA)
  source: /note="3' tri-ethylene glycol (TEG)"
uucuguccaag

SEQ ID NO: 15470 - RNA, 10 nt, Artificial Sequence
  source: /note="Description of Artificial Sequence: Synthetic oligonucleotide"
  source: /note="RNA"
  source: /note="5' tri-ethylene glycol (TEG)"
  modified_base (3)..(3): 5-methyl modified nucleotide
  modified_base (7)..(7): 5-methyl modified nucleotide
  modified_base (8)..(8): 5-methyl modified nucleotide
  modified_base (10)..(10): bicyclic nucleic acid (BNA)
  source: /note="3' tri-ethylene glycol (TEG)"
uucuguccaa

SEQ ID NO: 15471 - RNA, 9 nt, Artificial Sequence
  source: /note="Description of Artificial Sequence: Synthetic oligonucleotide"
  source: /note="RNA"
  source: /note="5' tri-ethylene glycol (TEG)"
  modified_base (3)..(3): 5-methyl modified nucleotide
  modified_base (7)..(7): 5-methyl modified nucleotide
  modified_base (8)..(8): 5-methyl modified nucleotide
  modified_base (9)..(9): bicyclic nucleic acid (BNA)
  source: /note="3' tri-ethylene glycol (TEG)"
uucugucca

SEQ ID NO: 15472 - RNA, 8 nt, Artificial Sequence
  source: /note="Description of Artificial Sequence: Synthetic oligonucleotide"
  source: /note="RNA"
  source: /note="5' tri-ethylene glycol (TEG)"
  modified_base (3)..(3): 5-methyl modified nucleotide
  modified_base (7)..(7): 5-methyl modified nucleotide
  modified_base (8)..(8): 5-methyl bicyclic nucleic acid
  source: /note="3' tri-ethylene glycol (TEG)"
uucugucc

SEQ ID NO: 15473 - RNA, 19 nt, Artificial Sequence
  source: /note="Description of Artificial Sequence: Synthetic oligonucleotide"
  source: /note="RNA"
  source: /note="5' tri-ethylene glycol (TEG)"
  modified_base (2)..(2): 5-methyl modified nucleotide
  modified_base (6)..(6): 5-methyl modified nucleotide
  modified_base (7)..(7): 5-methyl modified nucleotide
  modified_base (11)..(11): 5-methyl modified nucleotide
  modified_base (12)..(12): 5-methyl modified nucleotide
  modified_base (13)..(13): 5-methyl modified nucleotide
  modified_base (19)..(19): bicyclic nucleic acid (BNA)
  source: /note="3' tri-ethylene glycol (TEG)"
ucuguccaagcccgguuga

SEQ ID NO: 15474 - RNA, 18 nt, Artificial Sequence
  source: /note="Description of Artificial Sequence: Synthetic oligonucleotide"
  source: /note="RNA"
  source: /note="5' tri-ethylene glycol (TEG)"
  modified_base (2)..(2): 5-methyl modified nucleotide
  modified_base (6)..(6): 5-methyl modified nucleotide
  modified_base (7)..(7): 5-methyl modified nucleotide
  modified_base (11)..(11): 5-methyl modified nucleotide
  modified_base (12)..(12): 5-methyl modified nucleotide
  modified_base (13)..(13): 5-methyl modified nucleotide
  modified_base (18)..(18): bicyclic nucleic acid (BNA)
  source: /note="3' tri-ethylene glycol (TEG)"
ucuguccaagcccgguug

SEQ ID NO: 15475 - DNA, 17 bp, Artificial Sequence
  source: /note="Description of Artificial Sequence: Synthetic oligonucleotide"
  source: /note="Description of Combined DNA/RNA Molecule: Synthetic oligonucleotide"
  source: /note="DNA/RNA"
  source: /note="5' tri-ethylene glycol (TEG)"
  modified_base (2)..(2): 5-methyl modified nucleotide
  modified_base (6)..(6): 5-methyl modified nucleotide
  modified_base (7)..(7): 5-methyl modified nucleotide
  modified_base (11)..(11): 5-methyl modified nucleotide
  modified_base (12)..(12): 5-methyl modified nucleotide
  modified_base (13)..(13): 5-methyl modified nucleotide
  modified_base (17)..(17): bicyclic nucleic acid (BNA)
  source: /note="3' tri-ethylene glycol (TEG)"
ucuguccaagcccggut

SEQ ID NO: 15476 - DNA, 16 bp, Artificial Sequence
  source: /note="Description of Artificial Sequence: Synthetic oligonucleotide"
  source: /note="Description of Combined DNA/RNA Molecule: Synthetic oligonucleotide"
  source: /note="DNA/RNA"
  source: /note="5' tri-ethylene glycol (TEG)"
  modified_base (2)..(2): 5-methyl modified nucleotide
  modified_base (6)..(6): 5-methyl modified nucleotide
  modified_base (7)..(7): 5-methyl modified nucleotide
  modified_base (11)..(11): 5-methyl modified nucleotide
  modified_base (12)..(12): 5-methyl modified nucleotide
  modified_base (13)..(13): 5-methyl modified nucleotide
  modified_base (16)..(16): bicyclic nucleic acid (BNA)
  source: /note="3' tri-ethylene glycol (TEG)"
ucuguccaagcccggt

SEQ ID NO: 15477 - RNA, 15 nt, Artificial Sequence
  source: /note="Description of Artificial Sequence: Synthetic oligonucleotide"
  source: /note="RNA"
  source: /note="5' tri-ethylene glycol (TEG)"
  modified_base (2)..(2): 5-methyl modified nucleotide
  modified_base (6)..(6): 5-methyl modified nucleotide
  modified_base (7)..(7): 5-methyl modified nucleotide
  modified_base (11)..(11): 5-methyl modified nucleotide
  modified_base (12)..(12): 5-methyl modified nucleotide
  modified_base (13)..(13): 5-methyl modified nucleotide
  modified_base (15)..(15): bicyclic nucleic acid (BNA)
  source: /note="3' tri-ethylene glycol (TEG)"
ucuguccaagcccgg

SEQ ID NO: 15478 - RNA, 14 nt, Artificial Sequence
  source: /note="Description of Artificial Sequence: Synthetic oligonucleotide"
  source: /note="RNA"
  source: /note="5' tri-ethylene glycol (TEG)"
  modified_base (2)..(2): 5-methyl modified nucleotide
  modified_base (6)..(6): 5-methyl modified nucleotide
  modified_base (7)..(7): 5-methyl modified nucleotide
  modified_base (11)..(11): 5-methyl modified nucleotide
  modified_base (12)..(12): 5-methyl modified nucleotide
  modified_base (13)..(13): 5-methyl modified nucleotide
  modified_base (14)..(14): bicyclic nucleic acid (BNA)
  source: /note="3' tri-ethylene glycol (TEG)"
ucuguccaagcccg

SEQ ID NO: 15479 - RNA, 13 nt, Artificial Sequence
  source: /note="Description of Artificial Sequence: Synthetic oligonucleotide"
  source: /note="RNA"
  source: /note="5' tri-ethylene glycol (TEG)"
  modified_base (2)..(2): 5-methyl modified nucleotide
  modified_base (6)..(6): 5-methyl modified nucleotide
  modified_base (7)..(7): 5-methyl modified nucleotide
  modified_base (11)..(11): 5-methyl modified nucleotide
  modified_base (12)..(12): 5-methyl modified nucleotide
  modified_base (13)..(13): 5-methyl bicyclic nucleic acid
  source: /note="3' tri-ethylene glycol (TEG)"
ucuguccaagccc

SEQ ID NO: 15480 - RNA, 12 nt, Artificial Sequence
  source: /note="Description of Artificial Sequence: Synthetic oligonucleotide"
  source: /note="RNA"
  source: /note="5' tri-ethylene glycol (TEG)"
  modified_base (2)..(2): 5-methyl modified nucleotide
  modified_base (6)..(6): 5-methyl modified nucleotide
  modified_base (7)..(7): 5-methyl modified nucleotide
  modified_base (11)..(11): 5-methyl modified nucleotide
  modified_base (12)..(12): 5-methyl bicyclic nucleic acid
  source: /note="3' tri-ethylene glycol (TEG)"
ucuguccaagcc

SEQ ID NO: 15481 - RNA, 11 nt, Artificial Sequence
  source: /note="Description of Artificial Sequence: Synthetic oligonucleotide"
  source: /note="RNA"
  source: /note="5' tri-ethylene glycol (TEG)"
  modified_base (2)..(2): 5-methyl modified nucleotide
  modified_base (6)..(6): 5-methyl modified nucleotide
  modified_base (7)..(7): 5-methyl modified nucleotide
  modified_base (11)..(11): 5-methyl bicyclic nucleic acid
  source: /note="3' tri-ethylene glycol (TEG)"
ucuguccaagc

SEQ ID NO: 15482 - RNA, 10 nt, Artificial Sequence
  source: /note="Description of Artificial Sequence: Synthetic oligonucleotide"
  source: /note="RNA"
  source: /note="5' tri-ethylene glycol (TEG)"
  modified_base (2)..(2): 5-methyl modified nucleotide
  modified_base (6)..(6): 5-methyl modified nucleotide
  modified_base (7)..(7): 5-methyl modified nucleotide
  modified_base (10)..(10): bicyclic nucleic acid (BNA)
  source: /note="3' tri-ethylene glycol (TEG)"
ucuguccaag

SEQ ID NO: 15483 - RNA, 9 nt, Artificial Sequence
  source: /note="Description of Artificial Sequence: Synthetic oligonucleotide"
  source: /note="RNA"
  source: /note="5' tri-ethylene glycol (TEG)"
  modified_base (2)..(2): 5-methyl modified nucleotide
  modified_base (6)..(6): 5-methyl modified nucleotide
  modified_base (7)..(7): 5-methyl modified nucleotide
  modified_base (9)..(9): bicyclic nucleic acid (BNA)
  source: /note="3' tri-ethylene glycol (TEG)"
ucuguccaa

SEQ ID NO: 15484 - RNA, 8 nt, Artificial Sequence
  source: /note="Description of Artificial Sequence: Synthetic oligonucleotide"
  source: /note="RNA"
  source: /note="5' tri-ethylene glycol (TEG)"
  modified_base (2)..(2): 5-methyl modified nucleotide
  modified_base (6)..(6): 5-methyl modified nucleotide
  modified_base (7)..(7): 5-methyl modified nucleotide
  modified_base (8)..(8): bicyclic nucleic acid (BNA)
  source: /note="3' tri-ethylene glycol (TEG)"
ucugucca

SEQ ID NO: 15485 - RNA, 17 nt, Artificial Sequence
  source: /note="Description of Artificial Sequence: Synthetic oligonucleotide"
  source: /note="RNA"
  source: /note="5' tri-ethylene glycol (TEG)"
  modified_base (1)..(1): 5-methyl modified nucleotide
  modified_base (5)..(5): 5-methyl modified nucleotide
  modified_base (6)..(6): 5-methyl modified nucleotide
  modified_base (10)..(10): 5-methyl modified nucleotide
  modified_base (11)..(11): 5-methyl modified nucleotide
  modified_base (12)..(12): 5-methyl modified nucleotide
  modified_base (17)..(17): bicyclic nucleic acid (BNA)
  source: /note="3' tri-ethylene glycol (TEG)"
cuguccaagcccgguug

SEQ ID NO: 15486 - DNA, 16 bp, Artificial Sequence
  source: /note="Description of Artificial Sequence: Synthetic oligonucleotide"
  source: /note="Description of Combined DNA/RNA Molecule: Synthetic oligonucleotide"
  source: /note="DNA/RNA"
  source: /note="5' tri-ethylene glycol (TEG)"
  modified_base (1)..(1): 5-methyl modified nucleotide
  modified_base (5)..(5): 5-methyl modified nucleotide
  modified_base (6)..(6): 5-methyl modified nucleotide
  modified_base (10)..(10): 5-methyl modified nucleotide
  modified_base (11)..(11): 5-methyl modified nucleotide
  modified_base (12)..(12): 5-methyl modified nucleotide
  modified_base (16)..(16): bicyclic nucleic acid (BNA)
  source: /note="3' tri-ethylene glycol (TEG)"
cuguccaagcccggut

SEQ ID NO: 15487 - DNA, 15 bp, Artificial Sequence
  source: /note="Description of Artificial Sequence: Synthetic oligonucleotide"
  source: /note="Description of Combined DNA/RNA Molecule: Synthetic oligonucleotide"
  source: /note="DNA/RNA"
  source: /note="5' tri-ethylene glycol (TEG)"
  modified_base (1)..(1): 5-methyl modified nucleotide
  modified_base (5)..(5): 5-methyl modified nucleotide
  modified_base (6)..(6): 5-methyl modified nucleotide
  modified_base (10)..(10): 5-methyl modified nucleotide
  modified_base (11)..(11): 5-methyl modified nucleotide
  modified_base (12)..(12): 5-methyl modified nucleotide
  modified_base (15)..(15): bicyclic nucleic acid (BNA)
  source: /note="3' tri-ethylene glycol (TEG)"
cuguccaagcccggt

SEQ ID NO: 15488 - RNA, 14 nt, Artificial Sequence
  source: /note="Description of Artificial Sequence: Synthetic oligonucleotide"
  source: /note="RNA"
  source: /note="5' tri-ethylene glycol (TEG)"
  modified_base (1)..(1): 5-methyl modified nucleotide
  modified_base (5)..(5): 5-methyl modified nucleotide
  modified_base (6)..(6): 5-methyl modified nucleotide
  modified_base (10)..(10): 5-methyl modified nucleotide
  modified_base (11)..(11): 5-methyl modified nucleotide
  modified_base (12)..(12): 5-methyl modified nucleotide
  modified_base (14)..(14): bicyclic nucleic acid (BNA)
  source: /note="3' tri-ethylene glycol (TEG)"
cuguccaagcccgg

SEQ ID NO: 15489 - RNA, 13 nt, Artificial Sequence
  source: /note="Description of Artificial Sequence: Synthetic oligonucleotide"
  source: /note="RNA"
  source: /note="5' tri-ethylene glycol (TEG)"
  modified_base (1)..(1): 5-methyl modified nucleotide
  modified_base (5)..(5): 5-methyl modified nucleotide
  modified_base (6)..(6): 5-methyl modified nucleotide
  modified_base (10)..(10): 5-methyl modified nucleotide
  modified_base (11)..(11): 5-methyl modified nucleotide
  modified_base (12)..(12): 5-methyl modified nucleotide
  modified_base (13)..(13): bicyclic nucleic acid (BNA)
  source: /note="3' tri-ethylene glycol (TEG)"
cuguccaagcccg

SEQ ID NO: 15490 - RNA, 12 nt, Artificial Sequence
  source: /note="Description of Artificial Sequence: Synthetic oligonucleotide"
  source: /note="RNA"
  source: /note="5' tri-ethylene glycol (TEG)"
  modified_base (1)..(1): 5-methyl modified nucleotide
  modified_base (5)..(5): 5-methyl modified nucleotide
  modified_base (6)..(6): 5-methyl modified nucleotide
  modified_base (10)..(10): 5-methyl modified nucleotide
  modified_base (11)..(11): 5-methyl modified nucleotide
  modified_base (12)..(12): 5-methyl bicyclic nucleic acid
  source: /note="3' tri-ethylene glycol (TEG)"
cuguccaagccc

SEQ ID NO: 15491 - RNA, 11 nt, Artificial Sequence
  source: /note="Description of Artificial Sequence: Synthetic oligonucleotide"
  source: /note="RNA"
  source: /note="5' tri-ethylene glycol (TEG)"
  modified_base (1)..(1): 5-methyl modified nucleotide
  modified_base (5)..(5): 5-methyl modified nucleotide
  modified_base (6)..(6): 5-methyl modified nucleotide
  modified_base (10)..(10): 5-methyl modified nucleotide
  modified_base (11)..(11): 5-methyl bicyclic nucleic acid
  source: /note="3' tri-ethylene glycol (TEG)"
cuguccaagcc

SEQ ID NO: 15492 - RNA, 10 nt, Artificial Sequence
  source: /note="Description of Artificial Sequence: Synthetic oligonucleotide"
  source: /note="RNA"
  source: /note="5' tri-ethylene glycol (TEG)"
  modified_base (1)..(1): 5-methyl modified nucleotide
  modified_base (5)..(5): 5-methyl modified nucleotide
  modified_base (6)..(6): 5-methyl modified nucleotide
  modified_base (10)..(10): 5-methyl bicyclic nucleic acid
  source: /note="3' tri-ethylene glycol (TEG)"
cuguccaagc

SEQ ID NO: 15493 - RNA, 9 nt, Artificial Sequence
  source: /note="Description of Artificial Sequence: Synthetic oligonucleotide"
  source: /note="RNA"
  source: /note="5' tri-ethylene glycol (TEG)"
  modified_base (1)..(1): 5-methyl modified nucleotide
  modified_base (5)..(5): 5-methyl modified nucleotide
  modified_base (6)..(6): 5-methyl modified nucleotide
  modified_base (9)..(9): bicyclic nucleic acid (BNA)
  source: /note="3' tri-ethylene glycol (TEG)"
cuguccaag

SEQ ID NO: 15494 - RNA, 8 nt, Artificial Sequence
  source: /note="Description of Artificial Sequence: Synthetic oligonucleotide"
  source: /note="RNA"
  source: /note="5' tri-ethylene glycol (TEG)"
  modified_base (1)..(1): 5-methyl modified nucleotide
  modified_base (5)..(5): 5-methyl modified nucleotide
  modified_base (6)..(6): 5-methyl modified nucleotide
  modified_base (8)..(8): bicyclic nucleic acid (BNA)
  source: /note="3' tri-ethylene glycol (TEG)"
cuguccaa

SEQ ID NO: 15495 - RNA, 20 nt, Artificial Sequence
  source: /note="Description of Artificial Sequence: Synthetic oligonucleotide"
  source: /note="RNA"
  source: /note="5' tri-ethylene glycol (TEG)"
  modified_base (4)..(4): 5-methyl modified nucleotide
  modified_base (8)..(8): 5-methyl modified nucleotide
  modified_base (9)..(9): 5-methyl modified nucleotide
  modified_base (13)..(13): 5-methyl modified nucleotide
  modified_base (14)..(14): 5-methyl modified nucleotide
  modified_base (15)..(15): 5-methyl modified nucleotide
  modified_base (20)..(20): bicyclic nucleic acid (BNA)
  source: /note="3' tri-ethylene glycol (TEG)"
guucuguccaagcccgguug

SEQ ID NO: 15496 - DNA, 19 bp, Artificial Sequence
  source: /note="Description of Artificial Sequence: Synthetic oligonucleotide"
  source: /note="Description of Combined DNA/RNA Molecule: Synthetic oligonucleotide"
  source: /note="DNA/RNA"
  source: /note="5' tri-ethylene glycol (TEG)"
  modified_base (4)..(4): 5-methyl modified nucleotide
  modified_base (8)..(8): 5-methyl modified nucleotide
  modified_base (9)..(9): 5-methyl modified nucleotide
  modified_base (13)..(13): 5-methyl modified nucleotide
  modified_base (14)..(14): 5-methyl modified nucleotide
  modified_base (15)..(15): 5-methyl modified nucleotide
  modified_base (19)..(19): bicyclic nucleic acid (BNA)
  source: /note="3' tri-ethylene glycol (TEG)"
guucuguccaagcccggut

SEQ ID NO: 15497 - DNA, 18 bp, Artificial Sequence
  source: /note="Description of Artificial Sequence: Synthetic oligonucleotide"
  source: /note="Description of Combined DNA/RNA Molecule: Synthetic oligonucleotide"
  source: /note="DNA/RNA"
  source: /note="5' tri-ethylene glycol (TEG)"
  modified_base (4)..(4): 5-methyl modified nucleotide
  modified_base (8)..(8): 5-methyl modified nucleotide
  modified_base (9)..(9): 5-methyl modified nucleotide
  modified_base (13)..(13): 5-methyl modified nucleotide
  modified_base (14)..(14): 5-methyl modified nucleotide
  modified_base (15)..(15): 5-methyl modified nucleotide
  modified_base (18)..(18): bicyclic nucleic acid (BNA)
  source: /note="3' tri-ethylene glycol (TEG)"
guucuguccaagcccggt

SEQ ID NO: 15498 - RNA, 17 nt, Artificial Sequence
  source: /note="Description of Artificial Sequence: Synthetic oligonucleotide"
  source: /note="RNA"
  source: /note="5' tri-ethylene glycol (TEG)"
  modified_base (4)..(4): 5-methyl modified nucleotide
  modified_base (8)..(8): 5-methyl modified nucleotide
  modified_base (9)..(9): 5-methyl modified nucleotide
  modified_base (13)..(13): 5-methyl modified nucleotide
  modified_base (14)..(14): 5-methyl modified nucleotide
  modified_base (15)..(15): 5-methyl modified nucleotide
  modified_base (17)..(17): bicyclic nucleic acid (BNA)
  source: /note="3' tri-ethylene glycol (TEG)"
guucuguccaagcccgg

SEQ ID NO: 15499 - RNA, 16 nt, Artificial Sequence
  source: /note="Description of Artificial Sequence: Synthetic oligonucleotide"
  source: /note="RNA"
  source: /note="5' tri-ethylene glycol (TEG)"
  modified_base (4)..(4): 5-methyl modified nucleotide
  modified_base (8)..(8): 5-methyl modified nucleotide
  modified_base (9)..(9): 5-methyl modified nucleotide
  modified_base (13)..(13): 5-methyl modified nucleotide
  modified_base (14)..(14): 5-methyl modified nucleotide
  modified_base (15)..(15): 5-methyl modified nucleotide
  modified_base (16)..(16): bicyclic nucleic acid (BNA)
  source: /note="3' tri-ethylene glycol (TEG)"
guucuguccaagcccg

SEQ ID NO: 15500 - RNA, 15 nt, Artificial Sequence
  source: /note="Description of Artificial Sequence: Synthetic oligonucleotide"
  source: /note="RNA"
  source: /note="5' tri-ethylene glycol (TEG)"
  modified_base (4)..(4): 5-methyl modified nucleotide
  modified_base (8)..(8): 5-methyl modified nucleotide
  modified_base (9)..(9): 5-methyl modified nucleotide
  modified_base (13)..(13): 5-methyl modified nucleotide
  modified_base (14)..(14): 5-methyl modified nucleotide
  modified_base (15)..(15): 5-methyl bicyclic nucleic acid
  source: /note="3' tri-ethylene glycol (TEG)"
guucuguccaagccc

SEQ ID NO: 15501 - RNA, 14 nt, Artificial Sequence
  source: /note="Description of Artificial Sequence: Synthetic oligonucleotide"
  source: /note="RNA"
  source: /note="5' tri-ethylene glycol (TEG)"
  modified_base (4)..(4): 5-methyl modified nucleotide
  modified_base (8)..(8): 5-methyl modified nucleotide
  modified_base (9)..(9): 5-methyl modified nucleotide
  modified_base (13)..(13): 5-methyl modified nucleotide
  modified_base (14)..(14): 5-methyl bicyclic nucleic acid
  source: /note="3' tri-ethylene glycol (TEG)"
guucuguccaagcc

SEQ ID NO: 15502 - RNA, 13 nt, Artificial Sequence
  source: /note="Description of Artificial Sequence: Synthetic oligonucleotide"
  source: /note="RNA"
  source: /note="5' tri-ethylene glycol (TEG)"
  modified_base (4)..(4): 5-methyl modified nucleotide
  modified_base (8)..(8): 5-methyl modified nucleotide
  modified_base (9)..(9): 5-methyl modified nucleotide
  modified_base (13)..(13): 5-methyl bicyclic nucleic acid
  source: /note="3' tri-ethylene glycol (TEG)"
guucuguccaagc

SEQ ID NO: 15503 - RNA, 12 nt, Artificial Sequence
  source: /note="Description of Artificial Sequence: Synthetic oligonucleotide"
  source: /note="RNA"
  source: /note="5' tri-ethylene glycol (TEG)"
  modified_base (4)..(4): 5-methyl modified nucleotide
  modified_base (8)..(8): 5-methyl modified nucleotide
  modified_base (9)..(9): 5-methyl modified nucleotide
  modified_base (12)..(12): bicyclic nucleic acid (BNA)
  source: /note="3' tri-ethylene glycol (TEG)"
guucuguccaag

SEQ ID NO: 15504 - RNA, 11 nt, Artificial Sequence
  source: /note="Description of Artificial Sequence: Synthetic oligonucleotide"
  source: /note="RNA"
  source: /note="5' tri-ethylene glycol (TEG)"
  modified_base (4)..(4): 5-methyl modified nucleotide
  modified_base (8)..(8): 5-methyl modified nucleotide
  modified_base (9)..(9): 5-methyl modified nucleotide
  modified_base (11)..(11): bicyclic nucleic acid (BNA)
  source: /note="3' tri-ethylene glycol (TEG)"
guucuguccaa

SEQ ID NO: 15505 - RNA, 10 nt, Artificial Sequence
  source: /note="Description of Artificial Sequence: Synthetic oligonucleotide"
  source: /note="RNA"
  source: /note="5' tri-ethylene glycol (TEG)"
  modified_base (4)..(4): 5-methyl modified nucleotide
  modified_base (8)..(8): 5-methyl modified nucleotide
  modified_base (9)..(9): 5-methyl modified nucleotide
  modified_base (10)..(10): bicyclic nucleic acid (BNA)
  source: /note="3' tri-ethylene glycol (TEG)"
guucugucca

SEQ ID NO: 15506 - RNA, 9 nt, Artificial Sequence
  source: /note="Description of Artificial Sequence: Synthetic oligonucleotide"
  source: /note="RNA"
  source: /note="5' tri-ethylene glycol (TEG)"
  modified_base (4)..(4): 5-methyl modified nucleotide
  modified_base (8)..(8): 5-methyl modified nucleotide
  modified_base (9)..(9): 5-methyl bicyclic nucleic acid
  source: /note="3' tri-ethylene glycol (TEG)"
guucugucc

SEQ ID NO: 15507 - RNA, 8 nt, Artificial Sequence
  source: /note="Description of Artificial Sequence: Synthetic oligonucleotide"
  source: /note="RNA"
  source: /note="5' tri-ethylene glycol (TEG)"
  modified_base (4)..(4): 5-methyl modified nucleotide
  modified_base (8)..(8): 5-methyl bicyclic nucleic acid
  source: /note="3' tri-ethylene glycol (TEG)"
guucuguc

SEQ ID NO: 15508 - DNA, 20 bp, Artificial Sequence
  source: /note="Description of Artificial Sequence: Synthetic oligonucleotide"
  source: /note="Description of Combined DNA/RNA Molecule: Synthetic oligonucleotide"
  source: /note="DNA/RNA"
  source: /note="5' tri-ethylene glycol (TEG)"
  modified_base (5)..(5): 5-methyl modified nucleotide
  modified_base (9)..(9): 5-methyl modified nucleotide
  modified_base (10)..(10): 5-methyl modified nucleotide
  modified_base (14)..(14): 5-methyl modified nucleotide
  modified_base (15)..(15): 5-methyl modified nucleotide
  modified_base (16)..(16): 5-methyl modified nucleotide
  modified_base (20)..(20): bicyclic nucleic acid (BNA)
  source: /note="3' tri-ethylene glycol (TEG)"
aguucuguccaagcccggut

SEQ ID NO: 15509 - DNA, 19 bp, Artificial Sequence
  source: /note="Description of Artificial Sequence: Synthetic oligonucleotide"
  source: /note="Description of Combined DNA/RNA Molecule: Synthetic oligonucleotide"
  source: /note="DNA/RNA"
  source: /note="5' tri-ethylene glycol (TEG)"
  modified_base (5)..(5): 5-methyl modified nucleotide
  modified_base (9)..(9): 5-methyl modified nucleotide
  modified_base (10)..(10): 5-methyl modified nucleotide
  modified_base (14)..(14): 5-methyl modified nucleotide
  modified_base (15)..(15): 5-methyl modified nucleotide
  modified_base (16)..(16): 5-methyl modified nucleotide
  modified_base (19)..(19): bicyclic nucleic acid (BNA)
  source: /note="3' tri-ethylene glycol (TEG)"
aguucuguccaagcccggt

SEQ ID NO: 15510 - RNA, 18 nt, Artificial Sequence
  source: /note="Description of Artificial Sequence: Synthetic oligonucleotide"
  source: /note="RNA"
  source: /note="5' tri-ethylene glycol (TEG)"
  modified_base (5)..(5): 5-methyl modified nucleotide
  modified_base (9)..(9): 5-methyl modified nucleotide
  modified_base (10)..(10): 5-methyl modified nucleotide
  modified_base (14)..(14): 5-methyl modified nucleotide
  modified_base (15)..(15): 5-methyl modified nucleotide
  modified_base (16)..(16): 5-methyl modified nucleotide
  modified_base (18)..(18): bicyclic nucleic acid (BNA)
  source: /note="3' tri-ethylene glycol (TEG)"
aguucuguccaagcccgg

SEQ ID NO: 15511 - RNA, 17 nt, Artificial Sequence
  source: /note="Description of Artificial Sequence: Synthetic oligonucleotide"
  source: /note="RNA"
  source: /note="5' tri-ethylene glycol (TEG)"
  modified_base (5)..(5): 5-methyl modified nucleotide
  modified_base (9)..(9): 5-methyl modified nucleotide
  modified_base (10)..(10): 5-methyl modified nucleotide
  modified_base (14)..(14): 5-methyl modified nucleotide
  modified_base (15)..(15): 5-methyl modified nucleotide
  modified_base (16)..(16): 5-methyl modified nucleotide
  modified_base (17)..(17): bicyclic nucleic acid (BNA)
  source: /note="3' tri-ethylene glycol (TEG)"
aguucuguccaagcccg

SEQ ID NO: 15512 - RNA, 16 nt, Artificial Sequence
  source: /note="Description of Artificial Sequence: Synthetic oligonucleotide"
  source: /note="RNA"
  source: /note="5' tri-ethylene glycol (TEG)"
  modified_base (5)..(5): 5-methyl modified nucleotide
  modified_base (9)..(9): 5-methyl modified nucleotide
  modified_base (10)..(10): 5-methyl modified nucleotide
  modified_base (14)..(14): 5-methyl modified nucleotide
  modified_base (15)..(15): 5-methyl modified nucleotide
  modified_base (16)..(16): 5-methyl bicyclic nucleic acid
  source: /note="3' tri-ethylene glycol (TEG)"
aguucuguccaagccc

SEQ ID NO: 15513 - RNA, 15 nt, Artificial Sequence
  source: /note="Description of Artificial Sequence: Synthetic oligonucleotide"
  source: /note="RNA"
  source: /note="5' tri-ethylene glycol (TEG)"
  modified_base (5)..(5): 5-methyl modified nucleotide
  modified_base (9)..(9): 5-methyl modified nucleotide
  modified_base (10)..(10): 5-methyl modified nucleotide
  modified_base (14)..(14): 5-methyl modified nucleotide
  modified_base (15)..(15): 5-methyl bicyclic nucleic acid
  source: /note="3' tri-ethylene glycol (TEG)"
aguucuguccaagcc

SEQ ID NO: 15514 - RNA, 14 nt, Artificial Sequence
  source: /note="Description of Artificial Sequence: Synthetic oligonucleotide"
  source: /note="RNA"
  source: /note="5' tri-ethylene glycol (TEG)"
  modified_base (5)..(5): 5-methyl modified nucleotide
  modified_base (9)..(9): 5-methyl modified nucleotide
  modified_base (10)..(10): 5-methyl modified nucleotide
  modified_base (14)..(14): 5-methyl bicyclic nucleic acid
  source: /note="3' tri-ethylene glycol (TEG)"
aguucuguccaagc

SEQ ID NO: 15515 - RNA, 13 nt, Artificial Sequence
  source: /note="Description of Artificial Sequence: Synthetic oligonucleotide"
  source: /note="RNA"
  source: /note="5' tri-ethylene glycol (TEG)"
  modified_base (5)..(5): 5-methyl modified nucleotide
  modified_base (9)..(9): 5-methyl modified nucleotide
  modified_base (10)..(10): 5-methyl modified nucleotide
  modified_base (13)..(13): bicyclic nucleic acid (BNA)
  source: /note="3' tri-ethylene glycol (TEG)"
aguucuguccaag

SEQ ID NO: 15516 - RNA, 12 nt, Artificial Sequence
  source: /note="Description of Artificial Sequence: Synthetic oligonucleotide"
  source: /note="RNA"
  source: /note="5' tri-ethylene glycol (TEG)"
  modified_base (5)..(5): 5-methyl modified nucleotide
  modified_base (9)..(9): 5-methyl modified nucleotide
  modified_base (10)..(10): 5-methyl modified nucleotide
  modified_base (12)..(12): bicyclic nucleic acid (BNA)
  source: /note="3' tri-ethylene glycol (TEG)"
aguucuguccaa

SEQ ID NO: 15517 - RNA, 11 nt, Artificial Sequence
  source: /note="Description of Artificial Sequence: Synthetic oligonucleotide"
  source: /note="RNA"
  source: /note="5' tri-ethylene glycol (TEG)"
  modified_base (5)..(5): 5-methyl modified nucleotide
  modified_base (9)..(9): 5-methyl modified nucleotide
  modified_base (10)..(10): 5-methyl modified nucleotide
  modified_base (11)..(11): bicyclic nucleic acid (BNA)
  source: /note="3' tri-ethylene glycol (TEG)"
aguucugucca

SEQ ID NO: 15518 - RNA, 10 nt, Artificial Sequence
  source: /note="Description of Artificial Sequence: Synthetic oligonucleotide"
  source: /note="RNA"
  source: /note="5' tri-ethylene glycol (TEG)"
  modified_base (5)..(5): 5-methyl modified nucleotide
  modified_base (9)..(9): 5-methyl modified nucleotide
  modified_base (10)..(10): 5-methyl bicyclic nucleic acid
  source: /note="3' tri-ethylene glycol (TEG)"
aguucugucc

SEQ ID NO: 15519 - RNA, 9 nt, Artificial Sequence
  source: /note="Description of Artificial Sequence: Synthetic oligonucleotide"
  source: /note="RNA"
  source: /note="5' tri-ethylene glycol (TEG)"
  modified_base (5)..(5): 5-methyl modified nucleotide
  modified_base (9)..(9): 5-methyl bicyclic nucleic acid
  source: /note="3' tri-ethylene glycol (TEG)"
aguucuguc

SEQ ID NO: 15520 - DNA, 8 bp, Artificial Sequence
  source: /note="Description of Artificial Sequence: Synthetic oligonucleotide"
  source: /note="Description of Combined DNA/RNA Molecule: Synthetic oligonucleotide"
  source: /note="DNA/RNA"
  source: /note="5' tri-ethylene glycol (TEG)"
  modified_base (5)..(5): 5-methyl modified nucleotide
  modified_base (8)..(8): bicyclic nucleic acid (BNA)
  source: /note="3' tri-ethylene glycol (TEG)"
aguucugt

SEQ ID NO: 15521 - DNA, 20 bp, Artificial Sequence
  source: /note="Description of Artificial Sequence: Synthetic oligonucleotide"
  source: /note="Description of Combined DNA/RNA Molecule: Synthetic oligonucleotide"
  source: /note="DNA/RNA"
  source: /note="5' tri-ethylene glycol (TEG)"
  modified_base (6)..(6): 5-methyl modified nucleotide
  modified_base (10)..(10): 5-methyl modified nucleotide
  modified_base (11)..(11): 5-methyl modified nucleotide
  modified_base (15)..(15): 5-methyl modified nucleotide
  modified_base (16)..(16): 5-methyl modified nucleotide
  modified_base (17)..(17): 5-methyl modified nucleotide
  modified_base (20)..(20): bicyclic nucleic acid (BNA)
  source: /note="3' tri-ethylene glycol (TEG)"
aaguucuguccaagcccggt

SEQ ID NO: 15522 - RNA, 19 nt, Artificial Sequence
  source: /note="Description of Artificial Sequence: Synthetic oligonucleotide"
  source: /note="RNA"
  source: /note="5' tri-ethylene glycol (TEG)"
  modified_base (6)..(6): 5-methyl modified nucleotide
  modified_base (10)..(10): 5-methyl modified nucleotide
  modified_base (11)..(11): 5-methyl modified nucleotide
  modified_base (15)..(15): 5-methyl modified nucleotide
  modified_base (16)..(16): 5-methyl modified nucleotide
  modified_base (17)..(17): 5-methyl modified nucleotide
  modified_base (19)..(19): bicyclic nucleic acid (BNA)
  source: /note="3' tri-ethylene glycol (TEG)"
aaguucuguccaagcccgg

SEQ ID NO: 15523 - RNA, 18 nt, Artificial Sequence
  source: /note="Description of Artificial Sequence: Synthetic oligonucleotide"
  source: /note="RNA"
  source: /note="5' tri-ethylene glycol (TEG)"
  modified_base (6)..(6): 5-methyl modified nucleotide
  modified_base (10)..(10): 5-methyl modified nucleotide
  modified_base (11)..(11): 5-methyl modified nucleotide
  modified_base (15)..(15): 5-methyl modified nucleotide
  modified_base (16)..(16): 5-methyl modified nucleotide
  modified_base (17)..(17): 5-methyl modified nucleotide
  modified_base (18)..(18): bicyclic nucleic acid (BNA)
  source: /note="3' tri-ethylene glycol (TEG)"
aaguucuguccaagcccg

SEQ ID NO: 15524 - RNA, 17 nt, Artificial Sequence
  source: /note="Description of Artificial Sequence: Synthetic oligonucleotide"
  source: /note="RNA"
  source: /note="5' tri-ethylene glycol (TEG)"
  modified_base (6)..(6): 5-methyl modified nucleotide
  modified_base (10)..(10): 5-methyl modified nucleotide
  modified_base (11)..(11): 5-methyl modified nucleotide
  modified_base (15)..(15): 5-methyl modified nucleotide
  modified_base (16)..(16): 5-methyl modified nucleotide
  modified_base (17)..(17): 5-methyl bicyclic nucleic acid
  source: /note="3' tri-ethylene glycol (TEG)"
aaguucuguccaagccc

SEQ ID NO: 15525 - RNA, 16 nt, Artificial Sequence
  source: /note="Description of Artificial Sequence: Synthetic oligonucleotide"
  source: /note="RNA"
  source: /note="5' tri-ethylene glycol (TEG)"
  modified_base (6)..(6): 5-methyl modified nucleotide
  modified_base (10)..(10): 5-methyl modified nucleotide
  modified_base (11)..(11): 5-methyl modified nucleotide
  modified_base (15)..(15): 5-methyl modified nucleotide
  modified_base (16)..(16): 5-methyl bicyclic nucleic acid
  source: /note="3' tri-ethylene glycol (TEG)"
aaguucuguccaagcc

SEQ ID NO: 15526 - RNA, 15 nt, Artificial Sequence
  source: /note="Description of Artificial Sequence: Synthetic oligonucleotide"
  source: /note="RNA"
  source: /note="5' tri-ethylene glycol (TEG)"
  modified_base (6)..(6): 5-methyl modified nucleotide
  modified_base (10)..(10): 5-methyl modified nucleotide
  modified_base (11)..(11): 5-methyl modified nucleotide
  modified_base (15)..(15): 5-methyl bicyclic nucleic acid
  source: /note="3' tri-ethylene glycol (TEG)"
aaguucuguccaagc

SEQ ID NO: 15527 - RNA, 14 nt, Artificial Sequence
  source: /note="Description of Artificial Sequence: Synthetic oligonucleotide"
  source: /note="RNA"
  source: /note="5' tri-ethylene glycol (TEG)"
  modified_base (6)..(6): 5-methyl modified nucleotide
  modified_base (10)..(10): 5-methyl modified nucleotide
  modified_base (11)..(11): 5-methyl modified nucleotide
  modified_base (14)..(14): bicyclic nucleic acid (BNA)
  source: /note="3' tri-ethylene glycol (TEG)"
aaguucuguccaag

SEQ ID NO: 15528 - RNA, 13 nt, Artificial Sequence
  source: /note="Description of Artificial Sequence: Synthetic oligonucleotide"
  source: /note="RNA"
  source: /note="5' tri-ethylene glycol (TEG)"
  modified_base (6)..(6): 5-methyl modified nucleotide
  modified_base (10)..(10): 5-methyl modified nucleotide
  modified_base (11)..(11): 5-methyl modified nucleotide
  modified_base (13)..(13): bicyclic nucleic acid (BNA)
  source: /note="3' tri-ethylene glycol (TEG)"
aaguucuguccaa

SEQ ID NO: 15529 - RNA, 12 nt, Artificial Sequence
  source: /note="Description of Artificial Sequence: Synthetic oligonucleotide"
  source: /note="RNA"
  source: /note="5' tri-ethylene glycol (TEG)"
  modified_base (6)..(6): 5-methyl modified nucleotide
  modified_base (10)..(10): 5-methyl modified nucleotide
  modified_base (11)..(11): 5-methyl modified nucleotide
  modified_base (12)..(12): bicyclic nucleic acid (BNA)
  source: /note="3' tri-ethylene glycol (TEG)"
aaguucugucca

SEQ ID NO: 15530 - RNA, 11 nt, Artificial Sequence
  source: /note="Description of Artificial Sequence: Synthetic oligonucleotide"
  source: /note="RNA"
  source: /note="5' tri-ethylene glycol (TEG)"
  modified_base (6)..(6): 5-methyl modified nucleotide
  modified_base (10)..(10): 5-methyl modified nucleotide
  modified_base (11)..(11): 5-methyl bicyclic nucleic acid
  source: /note="3' tri-ethylene glycol (TEG)"
aaguucugucc

SEQ ID NO: 15531 - RNA, 10 nt, Artificial Sequence
  source: /note="Description of Artificial Sequence: Synthetic oligonucleotide"
  source: /note="RNA"
  source: /note="5' tri-ethylene glycol (TEG)"
  modified_base (6)..(6): 5-methyl modified nucleotide
  modified_base (10)..(10): 5-methyl bicyclic nucleic acid
  source: /note="3' tri-ethylene glycol (TEG)"
aaguucuguc

SEQ ID NO: 15532 - DNA, 9 bp, Artificial Sequence
  source: /note="Description of Artificial Sequence: Synthetic oligonucleotide"
  source: /note="Description of Combined DNA/RNA Molecule: Synthetic oligonucleotide"
  source: /note="DNA/RNA"
  source: /note="5' tri-ethylene glycol (TEG)"
  modified_base (6)..(6): 5-methyl modified nucleotide
  modified_base (9)..(9): bicyclic nucleic acid (BNA)
  source: /note="3' tri-ethylene glycol (TEG)"
aaguucugt

SEQ ID NO: 15533 - RNA, 8 nt, Artificial Sequence
  source: /note="Description of Artificial Sequence: Synthetic oligonucleotide"
  source: /note="RNA"
  source: /note="5' tri-ethylene glycol (TEG)"
  modified_base (6)..(6): 5-methyl modified nucleotide
  modified_base (8)..(8): bicyclic nucleic acid (BNA)
  source: /note="3' tri-ethylene glycol (TEG)"
aaguucug

SEQ ID NO: 15534 - RNA, 20 nt, Artificial Sequence
  source: /note="Description of Artificial Sequence: Synthetic oligonucleotide"
  source: /note="RNA"
  source: /note="5' tri-ethylene glycol (TEG)"
  modified_base (7)..(7): 5-methyl modified nucleotide
  modified_base (11)..(11): 5-methyl modified nucleotide
  modified_base (12)..(12): 5-methyl modified nucleotide
  modified_base (16)..(16): 5-methyl modified nucleotide
  modified_base (17)..(17): 5-methyl modified nucleotide
  modified_base (18)..(18): 5-methyl modified nucleotide
  modified_base (20)..(20): bicyclic nucleic acid (BNA)
  source: /note="3' tri-ethylene glycol (TEG)"
uaaguucuguccaagcccgg

SEQ ID NO: 15535 - RNA, 19 nt, Artificial Sequence
  source: /note="Description of Artificial Sequence: Synthetic oligonucleotide"
  source: /note="RNA"
  source: /note="5' tri-ethylene glycol (TEG)"
  modified_base (7)..(7): 5-methyl modified nucleotide
  modified_base (11)..(11): 5-methyl modified nucleotide
  modified_base (12)..(12): 5-methyl modified nucleotide
  modified_base (16)..(16): 5-methyl modified nucleotide
  modified_base (17)..(17): 5-methyl modified nucleotide
  modified_base (18)..(18): 5-methyl modified nucleotide
  modified_base (19)..(19): bicyclic nucleic acid (BNA)
  source: /note="3' tri-ethylene glycol (TEG)"
uaaguucuguccaagcccg

SEQ ID NO: 15536 - RNA, 18 nt, Artificial Sequence
  source: /note="Description of Artificial Sequence: Synthetic oligonucleotide"
  source: /note="RNA"
  source: /note="5' tri-ethylene glycol (TEG)"
  modified_base (7)..(7): 5-methyl modified nucleotide
  modified_base (11)..(11): 5-methyl modified nucleotide
  modified_base (12)..(12): 5-methyl modified nucleotide
  modified_base (16)..(16): 5-methyl modified nucleotide
  modified_base (17)..(17): 5-methyl modified nucleotide
  modified_base (18)..(18): 5-methyl bicyclic nucleic acid
  source: /note="3' tri-ethylene glycol (TEG)"
uaaguucuguccaagccc

SEQ ID NO: 15537 - RNA, 17 nt, Artificial Sequence
  source: /note="Description of Artificial Sequence: Synthetic oligonucleotide"
  source: /note="RNA"
  source: /note="5' tri-ethylene glycol (TEG)"
  modified_base (7)..(7): 5-methyl modified nucleotide
  modified_base (11)..(11): 5-methyl modified nucleotide
  modified_base (12)..(12): 5-methyl modified nucleotide
  modified_base (16)..(16): 5-methyl modified nucleotide
  modified_base (17)..(17): 5-methyl bicyclic nucleic acid
  source: /note="3' tri-ethylene glycol (TEG)"
uaaguucuguccaagcc

SEQ ID NO: 15538 - RNA, 16 nt, Artificial Sequence
  source: /note="Description of Artificial Sequence: Synthetic oligonucleotide"
  source: /note="RNA"
  source: /note="5' tri-ethylene glycol (TEG)"
  modified_base (7)..(7): 5-methyl modified nucleotide
  modified_base (11)..(11): 5-methyl modified nucleotide
  modified_base (12)..(12): 5-methyl modified nucleotide
  modified_base (16)..(16): 5-methyl bicyclic nucleic acid
  source: /note="3' tri-ethylene glycol (TEG)"
uaaguucuguccaagc

SEQ ID NO: 15539 - RNA, 14 nt, Artificial Sequence
  source: /note="Description of Artificial Sequence: Synthetic oligonucleotide"
  source: /note="RNA"
  source: /note="5' tri-ethylene glycol (TEG)"
  modified_base (7)..(7): 5-methyl modified nucleotide
  modified_base (11)..(11): 5-methyl modified nucleotide
  modified_base (12)..(12): 5-methyl modified nucleotide
  modified_base (14)..(14): bicyclic nucleic acid (BNA)
  source: /note="3' tri-ethylene glycol (TEG)"
uaaguucuguccaa

SEQ ID NO: 15540 - RNA, 13 nt, Artificial Sequence
  source: /note="Description of Artificial Sequence: Synthetic oligonucleotide"
  source: /note="RNA"
  source: /note="5' tri-ethylene glycol (TEG)"
  modified_base (7)..(7): 5-methyl modified nucleotide
  modified_base (11)..(11): 5-methyl modified nucleotide
  modified_base (12)..(12): 5-methyl modified nucleotide
  modified_base (13)..(13): bicyclic nucleic acid (BNA)
  source: /note="3' tri-ethylene glycol (TEG)"
uaaguucugucca

SEQ ID NO: 15541 - RNA, 12 nt, Artificial Sequence
  source: /note="Description of Artificial Sequence: Synthetic oligonucleotide"
  source: /note="RNA"
  source: /note="5' tri-ethylene glycol (TEG)"
  modified_base (7)..(7): 5-methyl modified nucleotide
  modified_base (11)..(11): 5-methyl modified nucleotide
  modified_base (12)..(12): 5-methyl bicyclic nucleic acid
  source: /note="3' tri-ethylene glycol (TEG)"
uaaguucugucc

SEQ ID NO: 15542 - RNA, 11 nt, Artificial Sequence
  source: /note="Description of Artificial Sequence: Synthetic oligonucleotide"
  source: /note="RNA"
  source: /note="5' tri-ethylene glycol (TEG)"
  modified_base (7)..(7): 5-methyl modified nucleotide
  modified_base (11)..(11): 5-methyl bicyclic nucleic acid
  source: /note="3' tri-ethylene glycol (TEG)"
uaaguucuguc

SEQ ID NO: 15543 - DNA, 10 bp, Artificial Sequence
  source: /note="Description of Artificial Sequence: Synthetic oligonucleotide"
  source: /note="Description of Combined DNA/RNA Molecule: Synthetic oligonucleotide"
  source: /note="DNA/RNA"
  source: /note="5' tri-ethylene glycol (TEG)"
  modified_base (7)..(7): 5-methyl modified nucleotide
  modified_base (10)..(10): bicyclic nucleic acid (BNA)
  source: /note="3' tri-ethylene glycol (TEG)"
uaaguucugt

SEQ ID NO: 15544 - RNA, 9 nt, Artificial Sequence
  source: /note="Description of Artificial Sequence: Synthetic oligonucleotide"
  source: /note="RNA"
  source: /note="5' tri-ethylene glycol (TEG)"
  modified_base (7)..(7): 5-methyl modified nucleotide
  modified_base (9)..(9): bicyclic nucleic acid (BNA)
  source: /note="3' tri-ethylene glycol (TEG)"
uaaguucug

SEQ ID NO: 15545 - DNA, 8 bp, Artificial Sequence
  source: /note="Description of Artificial Sequence: Synthetic oligonucleotide"
  source: /note="Description of Combined DNA/RNA Molecule: Synthetic oligonucleotide"
  source: /note="DNA/RNA"
  source: /note="5' tri-ethylene glycol (TEG)"
  modified_base (7)..(7): 5-methyl modified nucleotide
  modified_base (8)..(8): bicyclic nucleic acid (BNA)
  source: /note="3' tri-ethylene glycol (TEG)"
uaaguuct

SEQ ID NO: 15546 - RNA, 20 nt, Artificial Sequence
  source: /note="Description of Artificial Sequence: Synthetic oligonucleotide"
  source: /note="RNA"
  source: /note="5' tri-ethylene glycol (TEG)"
  modified_base (8)..(8): 5-methyl modified nucleotide
  modified_base (12)..(12): 5-methyl modified nucleotide
  modified_base (13)..(13): 5-methyl modified nucleotide
  modified_base (17)..(17): 5-methyl modified nucleotide
  modified_base (18)..(18): 5-methyl modified nucleotide
  modified_base (19)..(19): 5-methyl modified nucleotide
  modified_base (20)..(20): bicyclic nucleic acid (BNA)
  source: /note="3' tri-ethylene glycol (TEG)"
guaaguucuguccaagcccg

SEQ ID NO: 15547 - RNA, 19 nt, Artificial Sequence
  source: /note="Description of Artificial Sequence: Synthetic oligonucleotide"
  source: /note="RNA"
  source: /note="5' tri-ethylene glycol (TEG)"
  modified_base (8)..(8): 5-methyl modified nucleotide
  modified_base (12)..(12): 5-methyl modified nucleotide
  modified_base (13)..(13): 5-methyl modified nucleotide
  modified_base (17)..(17): 5-methyl modified nucleotide
  modified_base (18)..(18): 5-methyl modified nucleotide
  modified_base (19)..(19): 5-methyl bicyclic nucleic acid
  source: /note="3' tri-ethylene glycol (TEG)"
guaaguucuguccaagccc

SEQ ID NO: 15548 - RNA, 17 nt, Artificial Sequence
  source: /note="Description of Artificial Sequence: Synthetic oligonucleotide"
  source: /note="RNA"
  source: /note="5' tri-ethylene glycol (TEG)"
  modified_base (8)..(8): 5-methyl modified nucleotide
  modified_base (12)..(12): 5-methyl modified nucleotide
  modified_base (13)..(13): 5-methyl modified nucleotide
  modified_base (17)..(17): 5-methyl bicyclic nucleic acid
  source: /note="3' tri-ethylene glycol (TEG)"
guaaguucuguccaagc

SEQ ID NO: 15549 - RNA, 16 nt, Artificial Sequence
  source: /note="Description of Artificial Sequence: Synthetic oligonucleotide"
  source: /note="RNA"
  source: /note="5' tri-ethylene glycol (TEG)"
  modified_base (8)..(8): 5-methyl modified nucleotide
  modified_base (12)..(12): 5-methyl modified nucleotide
  modified_base (13)..(13): 5-methyl modified nucleotide
  modified_base (16)..(16): bicyclic nucleic acid (BNA)
  source: /note="3' tri-ethylene glycol (TEG)"
guaaguucuguccaag

SEQ ID NO: 15550 - RNA, 15 nt, Artificial Sequence
  source: /note="Description of Artificial Sequence: Synthetic oligonucleotide"
  source: /note="RNA"
  source: /note="5' tri-ethylene glycol (TEG)"
  modified_base (8)..(8): 5-methyl modified nucleotide
  modified_base (12)..(12): 5-methyl modified nucleotide
  modified_base (13)..(13): 5-methyl modified nucleotide
  modified_base (15)..(15): bicyclic nucleic acid (BNA)
  source: /note="3' tri-ethylene glycol (TEG)"
guaaguucuguccaa

SEQ ID NO: 15551 - RNA, 14 nt, Artificial Sequence
  source: /note="Description of Artificial Sequence: Synthetic oligonucleotide"
  source: /note="RNA"
  source: /note="5' tri-ethylene glycol (TEG)"
  modified_base (8)..(8): 5-methyl modified nucleotide
  modified_base (12)..(12): 5-methyl modified nucleotide
  modified_base (13)..(13): 5-methyl modified nucleotide
  modified_base (14)..(14): bicyclic nucleic acid (BNA)
  source: /note="3' tri-ethylene glycol (TEG)"
guaaguucugucca

SEQ ID NO: 15552 - RNA, 13 nt, Artificial Sequence
  source: /note="Description of Artificial Sequence: Synthetic oligonucleotide"
  source: /note="RNA"
  source: /note="5' tri-ethylene glycol (TEG)"
  modified_base (8)..(8): 5-methyl modified nucleotide
  modified_base (12)..(12): 5-methyl modified nucleotide
  modified_base (13)..(13): 5-methyl bicyclic nucleic acid
  source: /note="3' tri-ethylene glycol (TEG)"
guaaguucugucc

SEQ ID NO: 15553 - RNA, 12 nt, Artificial Sequence
  source: /note="Description of Artificial Sequence: Synthetic oligonucleotide"
  source: /note="RNA"
  source: /note="5' tri-ethylene glycol (TEG)"
  modified_base (8)..(8): 5-methyl modified nucleotide
  modified_base (12)..(12): 5-methyl bicyclic nucleic acid
  source: /note="3' tri-ethylene glycol (TEG)"
guaaguucuguc

SEQ ID NO: 15554 - DNA, 11 bp, Artificial Sequence
  source: /note="Description of Artificial Sequence: Synthetic oligonucleotide"
  source: /note="Description of Combined DNA/RNA Molecule: Synthetic oligonucleotide"
  source: /note="DNA/RNA"
  source: /note="5' tri-ethylene glycol (TEG)"
  modified_base (8)..(8): 5-methyl modified nucleotide
  modified_base (11)..(11): bicyclic nucleic acid (BNA)
  source: /note="3' tri-ethylene glycol (TEG)"
guaaguucugt

SEQ ID NO: 15555 - RNA, 10 nt, Artificial Sequence
  source: /note="Description of Artificial Sequence: Synthetic oligonucleotide"
  source: /note="RNA"
  source: /note="5' tri-ethylene glycol (TEG)"
  modified_base (8)..(8): 5-methyl modified nucleotide
  modified_base (10)..(10): bicyclic nucleic acid (BNA)
  source: /note="3' tri-ethylene glycol (TEG)"
guaaguucug

SEQ ID NO: 15556 - DNA, 9 bp, Artificial Sequence
  source: /note="Description of Artificial Sequence: Synthetic oligonucleotide"
  source: /note="Description of Combined DNA/RNA Molecule: Synthetic oligonucleotide"
  source: /note="DNA/RNA"
  source: /note="5' tri-ethylene glycol (TEG)"
  modified_base (8)..(8): 5-methyl modified nucleotide
  modified_base (9)..(9): bicyclic nucleic acid (BNA)
  source: /note="3' tri-ethylene glycol (TEG)"
guaaguuct

SEQ ID NO: 15557 - RNA, 8 nt, Artificial Sequence
  source: /note="Description of Artificial Sequence: Synthetic oligonucleotide"
  source: /note="RNA"
  source: /note="5' tri-ethylene glycol (TEG)"
  modified_base (8)..(8): 5-methyl bicyclic nucleic acid
  source: /note="3' tri-ethylene glycol (TEG)"
guaaguuc

SEQ ID NO: 15558 - RNA, 20 nt, Artificial Sequence
  source: /note="Description of Artificial Sequence: Synthetic oligonucleotide"
  source: /note="RNA"
  source: /note="5' tri-ethylene glycol (TEG)"
  modified_base (9)..(9): 5-methyl modified nucleotide
  modified_base (13)..(13): 5-methyl modified nucleotide
  modified_base (14)..(14): 5-methyl modified nucleotide
  modified_base (18)..(18): 5-methyl modified nucleotide
  modified_base (19)..(19): 5-methyl modified nucleotide
  modified_base (20)..(20): 5-methyl bicyclic nucleic acid
  source: /note="3' tri-ethylene glycol (TEG)"
gguaaguucuguccaagccc

SEQ ID NO: 15559 - RNA, 19 nt, Artificial Sequence
  source: /note="Description of Artificial Sequence: Synthetic oligonucleotide"
  source: /note="RNA"
  source: /note="5' tri-ethylene glycol (TEG)"
  modified_base (9)..(9): 5-methyl modified nucleotide
  modified_base (13)..(13): 5-methyl modified nucleotide
  modified_base (14)..(14): 5-methyl modified nucleotide
  modified_base (18)..(18): 5-methyl modified nucleotide
  modified_base (19)..(19): 5-methyl bicyclic nucleic acid
  source: /note="3' tri-ethylene glycol (TEG)"
gguaaguucuguccaagcc

SEQ ID NO: 15560 - RNA, 17 nt, Artificial Sequence
  source: /note="Description of Artificial Sequence: Synthetic oligonucleotide"
  source: /note="RNA"
  source: /note="5' tri-ethylene glycol (TEG)"
  modified_base (9)..(9): 5-methyl modified nucleotide
  modified_base (13)..(13): 5-methyl modified nucleotide
  modified_base (14)..(14): 5-methyl modified nucleotide
  modified_base (17)..(17): bicyclic nucleic acid (BNA)
  source: /note="3' tri-ethylene glycol (TEG)"
gguaaguucuguccaag

SEQ ID NO: 15561 - RNA, 16 nt, Artificial Sequence
  source: /note="Description of Artificial Sequence: Synthetic oligonucleotide"
  source: /note="RNA"
  source: /note="5' tri-ethylene glycol (TEG)"
  modified_base (9)..(9): 5-methyl modified nucleotide
  modified_base (13)..(13): 5-methyl modified nucleotide
  modified_base (14)..(14): 5-methyl modified nucleotide
  modified_base (16)..(16): bicyclic nucleic acid (BNA)
  source: /note="3' tri-ethylene glycol (TEG)"
gguaaguucuguccaa

SEQ ID NO: 15562 - RNA, 15 nt, Artificial Sequence
  source: /note="Description of Artificial Sequence: Synthetic oligonucleotide"
  source: /note="RNA"
  source: /note="5' tri-ethylene glycol (TEG)"
  modified_base (9)..(9): 5-methyl modified nucleotide
  modified_base (13)..(13): 5-methyl modified nucleotide
  modified_base (14)..(14): 5-methyl modified nucleotide
  modified_base (15)..(15): bicyclic nucleic acid (BNA)
  source: /note="3' tri-ethylene glycol (TEG)"
gguaaguucugucca

SEQ ID NO: 15563 - RNA, 14 nt, Artificial Sequence
  source: /note="Description of Artificial Sequence: Synthetic oligonucleotide"
  source: /note="RNA"
  source: /note="5' tri-ethylene glycol (TEG)"
  modified_base (9)..(9): 5-methyl modified nucleotide
  modified_base (13)..(13): 5-methyl modified nucleotide
  modified_base (14)..(14): 5-methyl bicyclic nucleic acid
  source: /note="3' tri-ethylene glycol (TEG)"
gguaaguucugucc

SEQ ID NO: 15564 - RNA, 13 nt, Artificial Sequence
  source: /note="Description of Artificial Sequence: Synthetic oligonucleotide"
  source: /note="RNA"
  source: /note="5' tri-ethylene glycol (TEG)"
  modified_base (9)..(9): 5-methyl modified nucleotide
  modified_base (13)..(13): 5-methyl bicyclic nucleic acid
  source: /note="3' tri-ethylene glycol (TEG)"
gguaaguucuguc

SEQ ID NO: 15565 - DNA, 12 bp, Artificial Sequence
  source: /note="Description of Artificial Sequence: Synthetic oligonucleotide"
  source: /note="Description of Combined DNA/RNA Molecule: Synthetic oligonucleotide"
  source: /note="DNA/RNA"
  source: /note="5' tri-ethylene glycol (TEG)"
  modified_base (9)..(9): 5-methyl modified nucleotide
  modified_base (12)..(12): bicyclic nucleic acid (BNA)
  source: /note="3' tri-ethylene glycol (TEG)"
gguaaguucugt

SEQ ID NO: 15566 - RNA, 11 nt, Artificial Sequence
  source: /note="Description of Artificial Sequence: Synthetic oligonucleotide"
  source: /note="RNA"
  source: /note="5' tri-ethylene glycol (TEG)"
  modified_base (9)..(9): 5-methyl modified nucleotide
  modified_base (11)..(11): bicyclic nucleic acid (BNA)
  source: /note="3' tri-ethylene glycol (TEG)"
gguaaguucug

SEQ ID NO: 15567 - DNA, 10 bp, Artificial Sequence
  source: /note="Description of Artificial Sequence: Synthetic oligonucleotide"
  source: /note="Description of Combined DNA/RNA Molecule: Synthetic oligonucleotide"
  source: /note="DNA/RNA"
  source: /note="5' tri-ethylene glycol (TEG)"
  modified_base (9)..(9): 5-methyl modified nucleotide
  modified_base (10)..(10): bicyclic nucleic acid (BNA)
  source: /note="3' tri-ethylene glycol (TEG)"
gguaaguuct

SEQ ID NO: 15568 - RNA, 9 nt, Artificial Sequence
  source: /note="Description of Artificial Sequence: Synthetic oligonucleotide"
  source: /note="RNA"
  source: /note="5' tri-ethylene glycol (TEG)"
  modified_base (9)..(9): 5-methyl bicyclic nucleic acid
  source: /note="3' tri-ethylene glycol (TEG)"
gguaaguuc

SEQ ID NO: 15569 - DNA, 8 bp, Artificial Sequence
  source: /note="Description of Artificial Sequence: Synthetic oligonucleotide"
  source: /note="Description of Combined DNA/RNA Molecule: Synthetic oligonucleotide"
  source: /note="DNA/RNA"
  source: /note="5' tri-ethylene glycol (TEG)"
  modified_base (8)..(8): bicyclic nucleic acid (BNA)
  source: /note="3' tri-ethylene glycol (TEG)"
gguaagut

SEQ ID NO: 15570 - RNA, 20 nt, Artificial Sequence
  source: /note="Description of Artificial Sequence: Synthetic oligonucleotide"
  source: /note="RNA"
  source: /note="5' tri-ethylene glycol (TEG)"
  modified_base (1)..(1): 5-methyl modified nucleotide
  modified_base (10)..(10): 5-methyl modified nucleotide
  modified_base (14)..(14): 5-methyl modified nucleotide
  modified_base (15)..(15): 5-methyl modified nucleotide
  modified_base (19)..(19): 5-methyl modified nucleotide
  modified_base (20)..(20): 5-methyl bicyclic nucleic acid
  source: /note="3' tri-ethylene glycol (TEG)"
cgguaaguucuguccaagcc

SEQ ID NO: 15571 - RNA, 19 nt, Artificial Sequence
  source: /note="Description of Artificial Sequence: Synthetic oligonucleotide"
  source: /note="RNA"
  source: /note="5' tri-ethylene glycol (TEG)"
  modified_base (1)..(1): 5-methyl modified nucleotide
  modified_base (10)..(10): 5-methyl modified nucleotide
  modified_base (14)..(14): 5-methyl modified nucleotide
  modified_base (15)..(15): 5-methyl modified nucleotide
  modified_base (19)..(19): 5-methyl bicyclic nucleic acid
  source: /note="3' tri-ethylene glycol (TEG)"
cgguaaguucuguccaagc

SEQ ID NO: 15572 - RNA, 18 nt, Artificial Sequence
  source: /note="Description of Artificial Sequence: Synthetic oligonucleotide"
  source: /note="RNA"
  source: /note="5' tri-ethylene glycol (TEG)"
  modified_base (1)..(1): 5-methyl modified nucleotide
  modified_base (10)..(10): 5-methyl modified nucleotide
  modified_base (14)..(14): 5-methyl modified nucleotide
  modified_base (15)..(15): 5-methyl modified nucleotide
  modified_base (18)..(18): bicyclic nucleic acid (BNA)
  source: /note="3' tri-ethylene glycol (TEG)"
cgguaaguucuguccaag

SEQ ID NO: 15573 - RNA, 17 nt, Artificial Sequence
  source: /note="Description of Artificial Sequence: Synthetic oligonucleotide"
  source: /note="RNA"
  source: /note="5' tri-ethylene glycol (TEG)"
  modified_base (1)..(1): 5-methyl modified nucleotide
  modified_base (10)..(10): 5-methyl modified nucleotide
  modified_base (14)..(14): 5-methyl modified nucleotide
  modified_base (15)..(15): 5-methyl modified nucleotide
  modified_base (17)..(17): bicyclic nucleic acid (BNA)
  source: /note="3' tri-ethylene glycol (TEG)"
cgguaaguucuguccaa

SEQ ID NO: 15574 - RNA, 16 nt, Artificial Sequence
  source: /note="Description of Artificial Sequence: Synthetic oligonucleotide"
  source: /note="RNA"
  source: /note="5' tri-ethylene glycol (TEG)"
  modified_base (1)..(1): 5-methyl modified nucleotide
  modified_base (10)..(10): 5-methyl modified nucleotide
  modified_base (14)..(14): 5-methyl modified nucleotide
  modified_base (15)..(15): 5-methyl modified nucleotide
  modified_base (16)..(16): bicyclic nucleic acid (BNA)
  source: /note="3' tri-ethylene glycol (TEG)"
cgguaaguucugucca

SEQ ID NO: 15575 - RNA, 15 nt, Artificial Sequence
  source: /note="Description of Artificial Sequence: Synthetic oligonucleotide"
  source: /note="RNA"
  source: /note="5' tri-ethylene glycol (TEG)"
  modified_base (1)..(1): 5-methyl modified nucleotide
  modified_base (10)..(10): 5-methyl modified nucleotide
  modified_base (14)..(14): 5-methyl modified nucleotide
  modified_base (15)..(15): 5-methyl bicyclic nucleic acid
  source: /note="3' tri-ethylene glycol (TEG)"
cgguaaguucugucc

SEQ ID NO: 15576 - RNA, 14 nt, Artificial Sequence
  source: /note="Description of Artificial Sequence: Synthetic oligonucleotide"
  source: /note="RNA"
  source: /note="5' tri-ethylene glycol (TEG)"
  modified_base (1)..(1): 5-methyl modified nucleotide
  modified_base (10)..(10): 5-methyl modified nucleotide
  modified_base (14)..(14): 5-methyl bicyclic nucleic acid
  source: /note="3' tri-ethylene glycol (TEG)"
cgguaaguucuguc

SEQ ID NO: 15577 - DNA, 13 bp, Artificial Sequence
  source: /note="Description of Artificial Sequence: Synthetic oligonucleotide"
  source: /note="Description of Combined DNA/RNA Molecule: Synthetic oligonucleotide"
  source: /note="DNA/RNA"
  source: /note="5' tri-ethylene glycol (TEG)"
  modified_base (1)..(1): 5-methyl modified nucleotide
  modified_base (10)..(10): 5-methyl modified nucleotide
  modified_base (13)..(13): bicyclic nucleic acid (BNA)
  source: /note="3' tri-ethylene glycol (TEG)"
cgguaaguucugt

SEQ ID NO: 15578 - RNA, 12 nt, Artificial Sequence
  source: /note="Description of Artificial Sequence: Synthetic oligonucleotide"
  source: /note="RNA"
  source: /note="5' tri-ethylene glycol (TEG)"
  modified_base (1)..(1): 5-methyl modified nucleotide
  modified_base (10)..(10): 5-methyl modified nucleotide
  modified_base (12)..(12): bicyclic nucleic acid (BNA)
  source: /note="3' tri-ethylene glycol (TEG)"
cgguaaguucug

SEQ ID NO: 15579 - DNA, 11 bp, Artificial Sequence
  source: /note="Description of Artificial Sequence: Synthetic oligonucleotide"
  source: /note="Description of Combined DNA/RNA Molecule: Synthetic oligonucleotide"
  source: /note="DNA/RNA"
  source: /note="5' tri-ethylene glycol (TEG)"
  modified_base (1)..(1): 5-methyl modified nucleotide
  modified_base (10)..(10): 5-methyl modified nucleotide
  modified_base (11)..(11): bicyclic nucleic acid (BNA)
  source: /note="3' tri-ethylene glycol (TEG)"
cgguaaguuct

SEQ ID NO: 15580 - RNA, 10 nt, Artificial Sequence
  source: /note="Description of Artificial Sequence: Synthetic oligonucleotide"
  source: /note="RNA"
  source: /note="5' tri-ethylene glycol (TEG)"
  modified_base (1)..(1): 5-methyl modified nucleotide
  modified_base (10)..(10): 5-methyl bicyclic nucleic acid
  source: /note="3' tri-ethylene glycol (TEG)"
cgguaaguuc

SEQ ID NO: 15581 - DNA, 9 bp, Artificial Sequence
  source: /note="Description of Artificial Sequence: Synthetic oligonucleotide"
  source: /note="Description of Combined DNA/RNA Molecule: Synthetic oligonucleotide"
  source: /note="DNA/RNA"
  source: /note="5' tri-ethylene glycol (TEG)"
  modified_base (1)..(1): 5-methyl modified nucleotide
  modified_base (9)..(9): bicyclic nucleic acid (BNA)
  source: /note="3' tri-ethylene glycol (TEG)"
cgguaagut

SEQ ID NO: 15582 - DNA, 8 bp, Artificial Sequence
  source: /note="Description of Artificial Sequence: Synthetic oligonucleotide"
  source: /note="Description of Combined DNA/RNA Molecule: Synthetic oligonucleotide"
  source: /note="DNA/RNA"
  source: /note="5' tri-ethylene glycol (TEG)"
  modified_base (1)..(1): 5-methyl modified nucleotide
  modified_base (8)..(8): bicyclic nucleic acid (BNA)
  source: /note="3' tri-ethylene glycol (TEG)"
cgguaagt

SEQ ID NO: 15583 - RNA, 20 nt, Artificial Sequence
  source: /note="Description of Artificial Sequence: Synthetic oligonucleotide"
  source: /note="RNA"
  source: /note="5' tri-ethylene glycol (TEG)"
  modified_base (2)..(2): 5-methyl modified nucleotide
  modified_base (11)..(11): 5-methyl modified nucleotide
  modified_base (15)..(15): 5-methyl modified nucleotide
  modified_base (16)..(16): 5-methyl modified nucleotide
  modified_base (20)..(20): 5-methyl bicyclic nucleic acid
  source: /note="3' tri-ethylene glycol (TEG)"
ucgguaaguucuguccaagc

SEQ ID NO: 15584 - RNA, 19 nt, Artificial Sequence
  source: /note="Description of Artificial Sequence: Synthetic oligonucleotide"
  source: /note="RNA"
  source: /note="5' tri-ethylene glycol (TEG)"
  modified_base (2)..(2): 5-methyl modified nucleotide
  modified_base (11)..(11): 5-methyl modified nucleotide
  modified_base (15)..(15): 5-methyl modified nucleotide
  modified_base (16)..(16): 5-methyl modified nucleotide
  modified_base (19)..(19): bicyclic nucleic acid (BNA)
  source: /note="3' tri-ethylene glycol (TEG)"
ucgguaaguucuguccaag

SEQ ID NO: 15585 - RNA, 18 nt, Artificial Sequence
  source: /note="Description of Artificial Sequence: Synthetic oligonucleotide"
  source: /note="RNA"
  source: /note="5' tri-ethylene glycol (TEG)"
  modified_base (2)..(2): 5-methyl modified nucleotide
  modified_base (11)..(11): 5-methyl modified nucleotide
  modified_base (15)..(15): 5-methyl modified nucleotide
  modified_base (16)..(16): 5-methyl modified nucleotide
  modified_base (18)..(18): bicyclic nucleic acid (BNA)
  source: /note="3' tri-ethylene glycol (TEG)"
ucgguaaguucuguccaa

SEQ ID NO: 15586 - RNA, 17 nt, Artificial Sequence
  source: /note="Description of Artificial Sequence: Synthetic oligonucleotide"
  source: /note="RNA"
  source: /note="5' tri-ethylene glycol (TEG)"
  modified_base (2)..(2): 5-methyl modified nucleotide
  modified_base (11)..(11): 5-methyl modified nucleotide
  modified_base (15)..(15): 5-methyl modified nucleotide
  modified_base (16)..(16): 5-methyl modified nucleotide
  modified_base (17)..(17): bicyclic nucleic acid (BNA)
  source: /note="3' tri-ethylene glycol (TEG)"
ucgguaaguucugucca

SEQ ID NO: 15587 - RNA, 16 nt, Artificial Sequence
  source: /note="Description of Artificial Sequence: Synthetic oligonucleotide"
  source: /note="RNA"
  source: /note="5' tri-ethylene glycol (TEG)"
  modified_base (2)..(2): 5-methyl modified nucleotide
  modified_base (11)..(11): 5-methyl modified nucleotide
  modified_base (15)..(15): 5-methyl modified nucleotide
  modified_base (16)..(16): 5-methyl bicyclic nucleic acid
  source: /note="3' tri-ethylene glycol (TEG)"
ucgguaaguucugucc

SEQ ID NO: 15588 - RNA, 15 nt, Artificial Sequence
  source: /note="Description of Artificial Sequence: Synthetic oligonucleotide"
  source: /note="RNA"
  source: /note="5' tri-ethylene glycol (TEG)"
  modified_base (2)..(2): 5-methyl modified nucleotide
  modified_base (11)..(11): 5-methyl modified nucleotide
  modified_base (15)..(15): 5-methyl bicyclic nucleic acid
  source: /note="3' tri-ethylene glycol (TEG)"
ucgguaaguucuguc

SEQ ID NO: 15589 - DNA, 14 bp, Artificial Sequence
  source: /note="Description of Artificial Sequence: Synthetic oligonucleotide"
  source: /note="Description of Combined DNA/RNA Molecule: Synthetic oligonucleotide"
  source: /note="DNA/RNA"
  source: /note="5' tri-ethylene glycol (TEG)"
  modified_base (2)..(2): 5-methyl modified nucleotide
  modified_base (11)..(11): 5-methyl modified nucleotide
  modified_base (14)..(14): bicyclic nucleic acid (BNA)
  source: /note="3' tri-ethylene glycol (TEG)"
ucgguaaguucugt

SEQ ID NO: 15590 - RNA, 13 nt, Artificial Sequence
  source: /note="Description of Artificial Sequence: Synthetic oligonucleotide"
  source: /note="RNA"
  source: /note="5' tri-ethylene glycol (TEG)"
  modified_base (2)..(2): 5-methyl modified nucleotide
  modified_base (11)..(11): 5-methyl modified nucleotide
  modified_base (13)..(13): bicyclic nucleic acid (BNA)
  source: /note="3' tri-ethylene glycol (TEG)"
ucgguaaguucug

SEQ ID NO: 15591 - DNA, 12 bp, Artificial Sequence
  source: /note="Description of Artificial Sequence: Synthetic oligonucleotide"
  source: /note="Description of Combined DNA/RNA Molecule: Synthetic oligonucleotide"
  source: /note="DNA/RNA"
  source: /note="5' tri-ethylene glycol (TEG)"
  modified_base (2)..(2): 5-methyl modified nucleotide
  modified_base (11)..(11): 5-methyl modified nucleotide
  modified_base (12)..(12): bicyclic nucleic acid (BNA)
  source: /note="3' tri-ethylene glycol (TEG)"
ucgguaaguuct

SEQ ID NO: 15592 - RNA, 11 nt, Artificial Sequence
  source: /note="Description of Artificial Sequence: Synthetic oligonucleotide"
  source: /note="RNA"
  source: /note="5' tri-ethylene glycol (TEG)"
  modified_base (2)..(2): 5-methyl modified nucleotide
  modified_base (11)..(11): 5-methyl bicyclic nucleic acid
  source: /note="3' tri-ethylene glycol (TEG)"
ucgguaaguuc

SEQ ID NO: 15593 - DNA, 10 bp, Artificial Sequence
  source: /note="Description of Artificial Sequence: Synthetic oligonucleotide"
  source: /note="Description of Combined DNA/RNA Molecule: Synthetic oligonucleotide"
  source: /note="DNA/RNA"
  source: /note="5' tri-ethylene glycol (TEG)"
  modified_base (2)..(2): 5-methyl modified nucleotide
  modified_base (10)..(10): bicyclic nucleic acid (BNA)
  source: /note="3' tri-ethylene glycol (TEG)"
ucgguaagut

SEQ ID NO: 15594 - DNA, 9 bp, Artificial Sequence
  source: /note="Description of Artificial Sequence: Synthetic oligonucleotide"
  source: /note="Description of Combined DNA/RNA Molecule: Synthetic oligonucleotide"
  source: /note="DNA/RNA"
  source: /note="5' tri-ethylene glycol (TEG)"
  modified_base (2)..(2): 5-methyl modified nucleotide
  modified_base (9)..(9): bicyclic nucleic acid (BNA)
  source: /note="3' tri-ethylene glycol (TEG)"
ucgguaagt

SEQ ID NO: 15595 - RNA, 20 nt, Artificial Sequence
  source: /note="Description of Artificial Sequence: Synthetic oligonucleotide"
  source: /note="RNA"
  source: /note="5' tri-ethylene glycol (TEG)"
  modified_base (3)..(3): 5-methyl modified nucleotide
  modified_base (12)..(12): 5-methyl modified nucleotide
  modified_base (16)..(16): 5-methyl modified nucleotide
  modified_base (17)..(17): 5-methyl modified nucleotide
  modified_base (20)..(20): bicyclic nucleic acid (BNA)
  source: /note="3' tri-ethylene glycol (TEG)"
gucgguaaguucuguccaag

SEQ ID NO: 15596 - RNA, 19 nt, Artificial Sequence
  source: /note="Description of Artificial Sequence: Synthetic oligonucleotide"
  source: /note="RNA"
  source: /note="5' tri-ethylene glycol (TEG)"
  modified_base (3)..(3): 5-methyl modified nucleotide
  modified_base (12)..(12): 5-methyl modified nucleotide
  modified_base (16)..(16): 5-methyl modified nucleotide
  modified_base (17)..(17): 5-methyl modified nucleotide
  modified_base (19)..(19): bicyclic nucleic acid (BNA)
  source: /note="3' tri-ethylene glycol (TEG)"
gucgguaaguucuguccaa

SEQ ID NO: 15597 - RNA, 18 nt, Artificial Sequence
  source: /note="Description of Artificial Sequence: Synthetic oligonucleotide"
  source: /note="RNA"
  source: /note="5' tri-ethylene glycol (TEG)"
  modified_base (3)..(3): 5-methyl modified nucleotide
  modified_base (12)..(12): 5-methyl modified nucleotide
  modified_base (16)..(16): 5-methyl modified nucleotide
  modified_base (17)..(17): 5-methyl modified nucleotide
  modified_base (18)..(18): bicyclic nucleic acid (BNA)
  source: /note="3' tri-ethylene glycol (TEG)"
gucgguaaguucugucca

SEQ ID NO: 15598 - RNA, 17 nt, Artificial Sequence
  source: /note="Description of Artificial Sequence: Synthetic oligonucleotide"
  source: /note="RNA"
  source: /note="5' tri-ethylene glycol (TEG)"
  modified_base (3)..(3): 5-methyl modified nucleotide
  modified_base (12)..(12): 5-methyl modified nucleotide
  modified_base (16)..(16): 5-methyl modified nucleotide
  modified_base (17)..(17): 5-methyl bicyclic nucleic acid
  source: /note="3' tri-ethylene glycol (TEG)"
gucgguaaguucugucc

SEQ ID NO: 15599 - RNA, 16 nt, Artificial Sequence
  source: /note="Description of Artificial Sequence: Synthetic oligonucleotide"
  source: /note="RNA"
  source: /note="5' tri-ethylene glycol (TEG)"
  modified_base (3)..(3): 5-methyl modified nucleotide
  modified_base (12)..(12): 5-methyl modified nucleotide
  modified_base (16)..(16): 5-methyl bicyclic nucleic acid
  source: /note="3' tri-ethylene glycol (TEG)"
gucgguaaguucuguc

SEQ ID NO: 15600 - DNA, 15 bp, Artificial Sequence
  source: /note="Description of Artificial Sequence: Synthetic oligonucleotide"
  source: /note="Description of Combined DNA/RNA Molecule: Synthetic oligonucleotide"
  source: /note="DNA/RNA"
  source: /note="5' tri-ethylene glycol (TEG)"
  modified_base (3)..(3): 5-methyl modified nucleotide
  modified_base (12)..(12): 5-methyl modified nucleotide
  modified_base (15)..(15): bicyclic nucleic acid (BNA)
  source: /note="3' tri-ethylene glycol (TEG)"
gucgguaaguucugt

SEQ ID NO: 15601 - RNA, 14 nt, Artificial Sequence
  source: /note="Description of Artificial Sequence: Synthetic oligonucleotide"
  source: /note="RNA"
  source: /note="5' tri-ethylene glycol (TEG)"
  modified_base (3)..(3): 5-methyl modified nucleotide
  modified_base (12)..(12): 5-methyl modified nucleotide
  modified_base (14)..(14): bicyclic nucleic acid (BNA)
  source: /note="3' tri-ethylene glycol (TEG)"
gucgguaaguucug

SEQ ID NO: 15602 - DNA, 13 bp, Artificial Sequence
  source: /note="Description of Artificial Sequence: Synthetic oligonucleotide"
  source: /note="Description of Combined DNA/RNA Molecule: Synthetic oligonucleotide"
  source: /note="DNA/RNA"
  source: /note="5' tri-ethylene glycol (TEG)"
  modified_base (3)..(3): 5-methyl modified nucleotide
  modified_base (12)..(12): 5-methyl modified nucleotide
  modified_base (13)..(13): bicyclic nucleic acid (BNA)
  source: /note="3' tri-ethylene glycol (TEG)"
gucgguaaguuct

SEQ ID NO: 15603 - RNA, 12 nt, Artificial Sequence
  source: /note="Description of Artificial Sequence: Synthetic oligonucleotide"
  source: /note="RNA"
  source: /note="5' tri-ethylene glycol (TEG)"
  modified_base (3)..(3): 5-methyl modified nucleotide
  modified_base (12)..(12): 5-methyl bicyclic nucleic acid
  source: /note="3' tri-ethylene glycol (TEG)"
gucgguaaguuc

SEQ ID NO: 15604 - DNA, 11 bp, Artificial Sequence
  source: /note="Description of Artificial Sequence: Synthetic oligonucleotide"
  source: /note="Description of Combined DNA/RNA Molecule: Synthetic oligonucleotide"
  source: /note="DNA/RNA"
  source: /note="5' tri-ethylene glycol (TEG)"
  modified_base (3)..(3): 5-methyl modified nucleotide
  modified_base (11)..(11): bicyclic nucleic acid (BNA)
  source: /note="3' tri-ethylene glycol (TEG)"
gucgguaagut

SEQ ID NO: 15605 - DNA, 10 bp, Artificial Sequence
  source: /note="Description of Artificial Sequence: Synthetic oligonucleotide"
  source: /note="Description of Combined DNA/RNA Molecule: Synthetic oligonucleotide"
  source: /note="DNA/RNA"
  source: /note="5' tri-ethylene glycol (TEG)"
  modified_base (3)..(3): 5-methyl modified nucleotide
  modified_base (10)..(10): bicyclic nucleic acid (BNA)
  source: /note="3' tri-ethylene glycol (TEG)"
gucgguaagt

SEQ ID NO: 15606 - RNA, 20 nt, Artificial Sequence
  source: /note="Description of Artificial Sequence: Synthetic oligonucleotide"
  source: /note="RNA"
  source: /note="5' tri-ethylene glycol (TEG)"
  modified_base (4)..(4): 5-methyl modified nucleotide
  modified_base (13)..(13): 5-methyl modified nucleotide
  modified_base (17)..(17): 5-methyl modified nucleotide
  modified_base (18)..(18): 5-methyl modified nucleotide
  modified_base (20)..(20): bicyclic nucleic acid (BNA)
  source: /note="3' tri-ethylene glycol (TEG)"
agucgguaaguucuguccaa

SEQ ID NO: 15607 - RNA, 19 nt, Artificial Sequence
  source: /note="Description of Artificial Sequence: Synthetic oligonucleotide"
  source: /note="RNA"
  source: /note="5' tri-ethylene glycol (TEG)"
  modified_base (4)..(4): 5-methyl modified nucleotide
  modified_base (13)..(13): 5-methyl modified nucleotide
  modified_base (17)..(17): 5-methyl modified nucleotide
  modified_base (18)..(18): 5-methyl modified nucleotide
  modified_base (19)..(19): bicyclic nucleic acid (BNA)
  source: /note="3' tri-ethylene glycol (TEG)"
agucgguaaguucugucca

SEQ ID NO: 15608 - RNA, 17 nt, Artificial Sequence
  source: /note="Description of Artificial Sequence: Synthetic oligonucleotide"
  source: /note="RNA"
  source: /note="5' tri-ethylene glycol (TEG)"
  modified_base (4)..(4): 5-methyl modified nucleotide
  modified_base (13)..(13): 5-methyl modified nucleotide
  modified_base (17)..(17): 5-methyl bicyclic nucleic acid
  source: /note="3' tri-ethylene glycol (TEG)"
agucgguaaguucuguc

SEQ ID NO: 15609 - DNA, 16 bp, Artificial Sequence
  source: /note="Description of Artificial Sequence: Synthetic oligonucleotide"
  source: /note="Description of Combined DNA/RNA Molecule: Synthetic oligonucleotide"
  source: /note="DNA/RNA"
  source: /note="5' tri-ethylene glycol (TEG)"
  modified_base (4)..(4): 5-methyl modified nucleotide
  modified_base (13)..(13): 5-methyl modified nucleotide
  modified_base (16)..(16): bicyclic nucleic acid (BNA)
  source: /note="3' tri-ethylene glycol (TEG)"
agucgguaaguucugt

SEQ ID NO: 15610 - RNA, 15 nt, Artificial Sequence
  source: /note="Description of Artificial Sequence: Synthetic oligonucleotide"
  source: /note="RNA"
  source: /note="5' tri-ethylene glycol (TEG)"
  modified_base (4)..(4): 5-methyl modified nucleotide
  modified_base (13)..(13): 5-methyl modified nucleotide
  modified_base (15)..(15): bicyclic nucleic acid (BNA)
  source: /note="3' tri-ethylene glycol (TEG)"
agucgguaaguucug

SEQ ID NO: 15611 - DNA, 14 bp, Artificial Sequence
  source: /note="Description of Artificial Sequence: Synthetic oligonucleotide"
  source: /note="Description of Combined DNA/RNA Molecule: Synthetic oligonucleotide"
  source: /note="DNA/RNA"
  source: /note="5' tri-ethylene glycol (TEG)"
  modified_base (4)..(4): 5-methyl modified nucleotide
  modified_base (13)..(13): 5-methyl modified nucleotide
  modified_base (14)..(14): bicyclic nucleic acid (BNA)
  source: /note="3' tri-ethylene glycol (TEG)"
agucgguaaguuct

SEQ ID NO: 15612 - RNA, 13 nt, Artificial Sequence
  source: /note="Description of Artificial Sequence: Synthetic oligonucleotide"
  source: /note="RNA"
  source: /note="5' tri-ethylene glycol (TEG)"
  modified_base (4)..(4): 5-methyl modified nucleotide
  modified_base (13)..(13): 5-methyl bicyclic nucleic acid
  source: /note="3' tri-ethylene glycol (TEG)"
agucgguaaguuc

SEQ ID NO: 15613 - DNA, 12 bp, Artificial Sequence
  source: /note="Description of Artificial Sequence: Synthetic oligonucleotide"
  source: /note="Description of Combined DNA/RNA Molecule: Synthetic oligonucleotide"
  source: /note="DNA/RNA"
  source: /note="5' tri-ethylene glycol (TEG)"
  modified_base (4)..(4): 5-methyl modified nucleotide
  modified_base (12)..(12): bicyclic nucleic acid (BNA)
  source: /note="3' tri-ethylene glycol (TEG)"
agucgguaagut

SEQ ID NO: 15614 - DNA, 11 bp, Artificial Sequence
  source: /note="Description of Artificial Sequence: Synthetic oligonucleotide"
  source: /note="Description of Combined DNA/RNA Molecule: Synthetic oligonucleotide"
  source: /note="DNA/RNA"
  source: /note="5' tri-ethylene glycol (TEG)"
  modified_base (4)..(4): 5-methyl modified nucleotide
  modified_base (11)..(11): bicyclic nucleic acid (BNA)
  source: /note="3' tri-ethylene glycol (TEG)"
agucgguaagt

SEQ ID NO: 15615 - RNA, 20 nt, Artificial Sequence
  source: /note="Description of Artificial Sequence: Synthetic oligonucleotide"
  source: /note="RNA"
  source: /note="5' tri-ethylene glycol (TEG)"
  modified_base (1)..(1): 5-methyl modified nucleotide
  modified_base (5)..(5): 5-methyl modified nucleotide
  modified_base (14)..(14): 5-methyl modified nucleotide
  modified_base (18)..(18): 5-methyl modified nucleotide
  modified_base (19)..(19): 5-methyl modified nucleotide
  modified_base (20)..(20): bicyclic nucleic acid (BNA)
  source: /note="3' tri-ethylene glycol (TEG)"
cagucgguaaguucugucca

SEQ ID NO: 15616 - RNA, 19 nt, Artificial Sequence
  source: /note="Description of Artificial Sequence: Synthetic oligonucleotide"
  source: /note="RNA"
  source: /note="5' tri-ethylene glycol (TEG)"
  modified_base (1)..(1): 5-methyl modified nucleotide
  modified_base (5)..(5): 5-methyl modified nucleotide
  modified_base (14)..(14): 5-methyl modified nucleotide
  modified_base (18)..(18): 5-methyl modified nucleotide
  modified_base (19)..(19): 5-methyl bicyclic nucleic acid
  source: /note="3' tri-ethylene glycol (TEG)"
cagucgguaaguucugucc

SEQ ID NO: 15617 - RNA, 18 nt, Artificial Sequence
  source: /note="Description of Artificial Sequence: Synthetic oligonucleotide"
  source: /note="RNA"
  source: /note="5' tri-ethylene glycol (TEG)"
  modified_base (1)..(1): 5-methyl modified nucleotide
  modified_base (5)..(5): 5-methyl modified nucleotide
  modified_base (14)..(14): 5-methyl modified nucleotide
  modified_base (18)..(18): 5-methyl bicyclic nucleic acid
  source: /note="3' tri-ethylene glycol (TEG)"
cagucgguaaguucuguc

SEQ ID NO: 15618 - DNA, 17 bp, Artificial Sequence
  source: /note="Description of Artificial Sequence: Synthetic oligonucleotide"
  source: /note="Description of Combined DNA/RNA Molecule: Synthetic oligonucleotide"
  source: /note="DNA/RNA"
  source: /note="5' tri-ethylene glycol (TEG)"
  modified_base (1)..(1): 5-methyl modified nucleotide
  modified_base (5)..(5): 5-methyl modified nucleotide
  modified_base (14)..(14): 5-methyl modified nucleotide
  modified_base (17)..(17): bicyclic nucleic acid (BNA)
  source: /note="3' tri-ethylene glycol (TEG)"
cagucgguaaguucugt

SEQ ID NO: 15619 - RNA, 16 nt, Artificial Sequence
  source: /note="Description of Artificial Sequence: Synthetic oligonucleotide"
  source: /note="RNA"
  source: /note="5' tri-ethylene glycol (TEG)"
  modified_base (1)..(1): 5-methyl modified nucleotide
  modified_base (5)..(5): 5-methyl modified nucleotide
  modified_base (14)..(14): 5-methyl modified nucleotide
  modified_base (16)..(16): bicyclic nucleic acid (BNA)
  source: /note="3' tri-ethylene glycol (TEG)"
cagucgguaaguucug

SEQ ID NO: 15620 - DNA, 15 bp, Artificial Sequence
  source: /note="Description of Artificial Sequence: Synthetic oligonucleotide"
  source: /note="Description of Combined DNA/RNA Molecule: Synthetic oligonucleotide"
  source: /note="DNA/RNA"
  source: /note="5' tri-ethylene glycol (TEG)"
  modified_base (1)..(1): 5-methyl modified nucleotide
  modified_base (5)..(5): 5-methyl modified nucleotide
  modified_base (14)..(14): 5-methyl modified nucleotide
  modified_base (15)..(15): bicyclic nucleic acid (BNA)
  source: /note="3' tri-ethylene glycol (TEG)"
cagucgguaaguuct

SEQ ID NO: 15621 - RNA, 14 nt, Artificial Sequence
  source: /note="Description of Artificial Sequence: Synthetic oligonucleotide"
  source: /note="RNA"
  source: /note="5' tri-ethylene glycol (TEG)"
  modified_base (1)..(1): 5-methyl modified nucleotide
  modified_base (5)..(5): 5-methyl modified nucleotide
  modified_base (14)..(14): 5-methyl bicyclic nucleic acid
  source: /note="3' tri-ethylene glycol (TEG)"
cagucgguaaguuc

SEQ ID NO: 15622 - DNA, 13 bp, Artificial Sequence
  source: /note="Description of Artificial Sequence: Synthetic oligonucleotide"
  source: /note="Description of Combined DNA/RNA Molecule: Synthetic oligonucleotide"
  source: /note="DNA/RNA"
  source: /note="5' tri-ethylene glycol (TEG)"
  modified_base (1)..(1): 5-methyl modified nucleotide
  modified_base (5)..(5): 5-methyl modified nucleotide
  modified_base (13)..(13): bicyclic nucleic acid (BNA)
  source: /note="3' tri-ethylene glycol (TEG)"
cagucgguaagut

SEQ ID NO: 15623 - DNA, 12 bp, Artificial Sequence
  source: /note="Description of Artificial Sequence: Synthetic oligonucleotide"
  source: /note="Description of Combined DNA/RNA Molecule: Synthetic oligonucleotide"
  source: /note="DNA/RNA"
  source: /note="5' tri-ethylene glycol (TEG)"
  modified_base (1)..(1): 5-methyl modified nucleotide
  modified_base (5)..(5): 5-methyl modified nucleotide
  modified_base (12)..(12): bicyclic nucleic acid (BNA)
  source: /note="3' tri-ethylene glycol (TEG)"
cagucgguaagt

SEQ ID NO: 15624 - RNA, 20 nt, Artificial Sequence
  source: /note="Description of Artificial Sequence: Synthetic oligonucleotide"
  source: /note="RNA"
  source: /note="5' tri-ethylene glycol (TEG)"
  modified_base (1)..(1): 5-methyl modified nucleotide
  modified_base (2)..(2): 5-methyl modified nucleotide
  modified_base (6)..(6): 5-methyl modified nucleotide
  modified_base (15)..(15): 5-methyl modified nucleotide
  modified_base (19)..(19): 5-methyl modified nucleotide
  modified_base (20)..(20): 5-methyl bicyclic nucleic acid
  source: /note="3' tri-ethylene glycol (TEG)"
ccagucgguaaguucugucc

SEQ ID NO: 15625 - RNA, 19 nt, Artificial Sequence
  source: /note="Description of Artificial Sequence: Synthetic oligonucleotide"
  source: /note="RNA"
  source: /note="5' tri-ethylene glycol (TEG)"
  modified_base (1)..(1): 5-methyl modified nucleotide
  modified_base (2)..(2): 5-methyl modified nucleotide
  modified_base (6)..(6): 5-methyl modified nucleotide
  modified_base (15)..(15): 5-methyl modified nucleotide
  modified_base (19)..(19): 5-methyl bicyclic nucleic acid
  source: /note="3' tri-ethylene glycol (TEG)"
ccagucgguaaguucuguc

SEQ ID NO: 15626 - DNA, 18 bp, Artificial Sequence
  source: /note="Description of Artificial Sequence: Synthetic oligonucleotide"
  source: /note="Description of Combined DNA/RNA Molecule: Synthetic oligonucleotide"
  source: /note="DNA/RNA"
  source: /note="5' tri-ethylene glycol (TEG)"
  modified_base (1)..(1): 5-methyl modified nucleotide
  modified_base (2)..(2): 5-methyl modified nucleotide
  modified_base (6)..(6): 5-methyl modified nucleotide
  modified_base (15)..(15): 5-methyl modified nucleotide
  modified_base (18)..(18): bicyclic nucleic acid (BNA)
  source: /note="3' tri-ethylene glycol (TEG)"
ccagucgguaaguucugt

SEQ ID NO: 15627 - RNA, 17 nt, Artificial Sequence
  source: /note="Description of Artificial Sequence: Synthetic oligonucleotide"
  source: /note="RNA"
  source: /note="5' tri-ethylene glycol (TEG)"
  modified_base (1)..(1): 5-methyl modified nucleotide
  modified_base (2)..(2): 5-methyl modified nucleotide
  modified_base (6)..(6): 5-methyl modified nucleotide
  modified_base (15)..(15): 5-methyl modified nucleotide
  modified_base (17)..(17): bicyclic nucleic acid (BNA)
  source: /note="3' tri-ethylene glycol (TEG)"
ccagucgguaaguucug

SEQ ID NO: 15628 - DNA, 16 bp, Artificial Sequence
  source: /note="Description of Artificial Sequence: Synthetic oligonucleotide"
  source: /note="Description of Combined DNA/RNA Molecule: Synthetic oligonucleotide"
  source: /note="DNA/RNA"
  source: /note="5' tri-ethylene glycol (TEG)"
  modified_base (1)..(1): 5-methyl modified nucleotide
  modified_base (2)..(2): 5-methyl modified nucleotide
  modified_base (6)..(6): 5-methyl modified nucleotide
  modified_base (15)..(15): 5-methyl modified nucleotide
  modified_base (16)..(16): bicyclic nucleic acid (BNA)
  source: /note="3' tri-ethylene glycol (TEG)"
ccagucgguaaguuct

SEQ ID NO: 15629 - RNA, 15 nt, Artificial Sequence
  source: /note="Description of Artificial Sequence: Synthetic oligonucleotide"
  source: /note="RNA"
  source: /note="5' tri-ethylene glycol (TEG)"
  modified_base (1)..(1): 5-methyl modified nucleotide
  modified_base (2)..(2): 5-methyl modified nucleotide
  modified_base (6)..(6): 5-methyl modified nucleotide
  modified_base (15)..(15): 5-methyl bicyclic nucleic acid
  source: /note="3' tri-ethylene glycol (TEG)"
ccagucgguaaguuc

SEQ ID NO: 15630 - DNA, 14 bp, Artificial Sequence
  source: /note="Description of Artificial Sequence: Synthetic oligonucleotide"
  source: /note="Description of Combined DNA/RNA Molecule: Synthetic oligonucleotide"
  source: /note="DNA/RNA"
  source: /note="5' tri-ethylene glycol (TEG)"
  modified_base (1)..(1): 5-methyl modified nucleotide
  modified_base (2)..(2): 5-methyl modified nucleotide
  modified_base (6)..(6): 5-methyl modified nucleotide
  modified_base (14)..(14): bicyclic nucleic acid (BNA)
  source: /note="3' tri-ethylene glycol (TEG)"
ccagucgguaagut

SEQ ID NO: 15631 - DNA, 13 bp, Artificial Sequence
  source: /note="Description of Artificial Sequence: Synthetic oligonucleotide"
  source: /note="Description of Combined DNA/RNA Molecule: Synthetic oligonucleotide"
  source: /note="DNA/RNA"
  source: /note="5' tri-ethylene glycol (TEG)"
  modified_base (1)..(1): 5-methyl modified nucleotide
  modified_base (2)..(2): 5-methyl modified nucleotide
  modified_base (6)..(6): 5-methyl modified nucleotide
  modified_base (13)..(13): bicyclic nucleic acid (BNA)
  source: /note="3' tri-ethylene glycol (TEG)"
ccagucgguaagt

SEQ ID NO: 15632 - RNA, 20 nt, Artificial Sequence
  source: /note="Description of Artificial Sequence: Synthetic oligonucleotide"
  source: /note="RNA"
  source: /note="5' tri-ethylene glycol (TEG)"
  modified_base (2)..(2): 5-methyl modified nucleotide
  modified_base (3)..(3): 5-methyl modified nucleotide
  modified_base (7)..(7): 5-methyl modified nucleotide
  modified_base (16)..(16): 5-methyl modified nucleotide
  modified_base (20)..(20): 5-methyl bicyclic nucleic acid
  source: /note="3' tri-ethylene glycol (TEG)"
gccagucgguaaguucuguc

SEQ ID NO: 15633 - DNA, 19 bp, Artificial Sequence
  source: /note="Description of Artificial Sequence: Synthetic oligonucleotide"
  source: /note="Description of Combined DNA/RNA Molecule: Synthetic oligonucleotide"
  source: /note="DNA/RNA"
  source: /note="5' tri-ethylene glycol (TEG)"
  modified_base (2)..(2): 5-methyl modified nucleotide
  modified_base (3)..(3): 5-methyl modified nucleotide
  modified_base (7)..(7): 5-methyl modified nucleotide
  modified_base (16)..(16): 5-methyl modified nucleotide
  modified_base (19)..(19): bicyclic nucleic acid (BNA)
  source: /note="3' tri-ethylene glycol (TEG)"
gccagucgguaaguucugt

SEQ ID NO: 15634 - RNA, 18 nt, Artificial Sequence
  source: /note="Description of Artificial Sequence: Synthetic oligonucleotide"
  source: /note="RNA"
  source: /note="5' tri-ethylene glycol (TEG)"
  modified_base (2)..(2): 5-methyl modified nucleotide
  modified_base (3)..(3): 5-methyl modified nucleotide
  modified_base (7)..(7): 5-methyl modified nucleotide
  modified_base (16)..(16): 5-methyl modified nucleotide
  modified_base (18)..(18): bicyclic nucleic acid (BNA)
  source: /note="3' tri-ethylene glycol (TEG)"
gccagucgguaaguucug

SEQ ID NO: 15635 - DNA, 17 bp, Artificial Sequence
  source: /note="Description of Artificial Sequence: Synthetic oligonucleotide"
  source: /note="Description of Combined DNA/RNA Molecule: Synthetic oligonucleotide"
  source: /note="DNA/RNA"
  source: /note="5' tri-ethylene glycol (TEG)"
  modified_base (2)..(2): 5-methyl modified nucleotide
  modified_base (3)..(3): 5-methyl modified nucleotide
  modified_base (7)..(7): 5-methyl modified nucleotide
  modified_base (16)..(16): 5-methyl modified nucleotide
  modified_base (17)..(17): bicyclic nucleic acid (BNA)
  source: /note="3' tri-ethylene glycol (TEG)"
gccagucgguaaguuct

SEQ ID NO: 15636 - RNA, 16 nt, Artificial Sequence
  source: /note="Description of Artificial Sequence: Synthetic oligonucleotide"
  source: /note="RNA"
  source: /note="5' tri-ethylene glycol (TEG)"
  modified_base (2)..(2): 5-methyl modified nucleotide
  modified_base (3)..(3): 5-methyl modified nucleotide
  modified_base (7)..(7): 5-methyl modified nucleotide
  modified_base (16)..(16): 5-methyl bicyclic nucleic acid
  source: /note="3' tri-ethylene glycol (TEG)"
gccagucgguaaguuc

SEQ ID NO: 15637 - DNA, 15 bp, Artificial Sequence
  source: /note="Description of Artificial Sequence: Synthetic oligonucleotide"
  source: /note="Description of Combined DNA/RNA Molecule: Synthetic oligonucleotide"
  source: /note="DNA/RNA"
  source: /note="5' tri-ethylene glycol (TEG)"
  modified_base (2)..(2): 5-methyl modified nucleotide
  modified_base (3)..(3): 5-methyl modified nucleotide
  modified_base (7)..(7): 5-methyl modified nucleotide
  modified_base (15)..(15): bicyclic nucleic acid (BNA)
  source: /note="3' tri-ethylene glycol (TEG)"
gccagucgguaagut

SEQ ID NO: 15638 - DNA, 14 bp, Artificial Sequence
  source: /note="Description of Artificial Sequence: Synthetic oligonucleotide"
  source: /note="Description of Combined DNA/RNA Molecule: Synthetic oligonucleotide"
  source: /note="DNA/RNA"
  source: /note="5' tri-ethylene glycol (TEG)"
  modified_base (2)..(2): 5-methyl modified nucleotide
  modified_base (3)..(3): 5-methyl modified nucleotide
  modified_base (7)..(7): 5-methyl modified nucleotide
  modified_base (14)..(14): bicyclic nucleic acid (BNA)
  source: /note="3' tri-ethylene glycol (TEG)"
gccagucgguaagt

SEQ ID NO: 15639 - DNA, 20 bp, Artificial Sequence
  source: /note="Description of Artificial Sequence: Synthetic oligonucleotide"
  source: /note="Description of Combined DNA/RNA Molecule: Synthetic oligonucleotide"
  source: /note="DNA/RNA"
  source: /note="5' tri-ethylene glycol (TEG)"
  modified_base (2)..(2): 5-methyl modified nucleotide
  modified_base (14)..(14): 5-methyl modified nucleotide
  modified_base (19)..(19): 5-methyl modified nucleotide
  modified_base (20)..(20): bicyclic nucleic acid (BNA)
  source: /note="3' tri-ethylene glycol (TEG)"
ucaaggaagauggcauuuct

SEQ ID NO: 15640 - RNA, 22 nt, Artificial Sequence
  source: /note="Description of Artificial Sequence: Synthetic oligonucleotide"
  source: /note="RNA"
  source: /note="5' tri-ethylene glycol (TEG)"
  modified_base (2)..(2): 5-methyl modified nucleotide
  modified_base (14)..(14): 5-methyl modified nucleotide
  modified_base (19)..(19): 5-methyl modified nucleotide
  modified_base (22)..(22): bicyclic nucleic acid (BNA)
  source: /note="3' tri-ethylene glycol (TEG)"
ucaaggaagauggcauuucuag

SEQ ID NO: 15641 - DNA, 16 bp, Artificial Sequence
  source: /note="Description of Artificial Sequence: Synthetic oligonucleotide"
  source: /note="Description of Combined DNA/RNA Molecule: Synthetic oligonucleotide"
  source: /note="DNA/RNA"
  source: /note="5' tri-ethylene glycol (TEG)"
  modified_base (2)..(2): 5-methyl modified nucleotide
  modified_base (14)..(14): 5-methyl modified nucleotide
  modified_base (16)..(16): bicyclic nucleic acid (BNA)
  source: /note="3' tri-ethylene glycol (TEG)"
ucaaggaagauggcat

SEQ ID NO: 15642 - DNA, 15 bp, Artificial Sequence
  source: /note="Description of Artificial Sequence: Synthetic oligonucleotide"
  source: /note="Description of Combined DNA/RNA Molecule: Synthetic oligonucleotide"
  source: /note="DNA/RNA"
  source: /note="5' tri-ethylene glycol (TEG)"
  modified_base (9)..(9): 5-methyl modified nucleotide
  modified_base (14)..(14): 5-methyl modified nucleotide
  modified_base (15)..(15): bicyclic nucleic acid (BNA)
  source: /note="3' tri-ethylene glycol (TEG)"
gaagauggcauuuct

SEQ ID NO: 15643 - RNA, 21 nt, Artificial Sequence
  source: /note="Description of Artificial Sequence: Synthetic oligonucleotide"
  source: /note="RNA"
  source: /note="5' tri-ethylene glycol (TEG)"
  modified_base (2)..(2): 5-methyl modified nucleotide
  modified_base (14)..(14): 5-methyl modified nucleotide
  modified_base (19)..(19): 5-methyl modified nucleotide
  modified_base (21)..(21): bicyclic nucleic acid (BNA)
  source: /note="3' tri-ethylene glycol (TEG)"
ucaaggaagauggcauuucua

SEQ ID NO: 15644 - RNA, 19 nt, Artificial Sequence
  source: /note="Description of Artificial Sequence: Synthetic oligonucleotide"
  source: /note="RNA"
  source: /note="5' tri-ethylene glycol (TEG)"
  modified_base (2)..(2): 5-methyl modified nucleotide
  modified_base (14)..(14): 5-methyl modified nucleotide
  modified_base (19)..(19): 5-methyl bicyclic nucleic acid
  source: /note="3' tri-ethylene glycol (TEG)"
ucaaggaagauggcauuuc

SEQ ID NO: 15645 - DNA, 18 bp, Artificial Sequence
  source: /note="Description of Artificial Sequence: Synthetic oligonucleotide"
  source: /note="Description of Combined DNA/RNA Molecule: Synthetic oligonucleotide"
  source: /note="DNA/RNA"
  source: /note="5' tri-ethylene glycol (TEG)"
  modified_base (2)..(2): 5-methyl modified nucleotide
  modified_base (14)..(14): 5-methyl modified nucleotide
  modified_base (18)..(18): bicyclic nucleic acid (BNA)
  source: /note="3' tri-ethylene glycol (TEG)"
ucaaggaagauggcauut

SEQ ID NO: 15646 - DNA, 17 bp, Artificial Sequence
  source: /note="Description of Artificial Sequence: Synthetic oligonucleotide"
  source: /note="Description of Combined DNA/RNA Molecule: Synthetic oligonucleotide"
  source: /note="DNA/RNA"
  source: /note="5' tri-ethylene glycol (TEG)"
  modified_base (2)..(2): 5-methyl modified nucleotide
  modified_base (14)..(14): 5-methyl modified nucleotide
  modified_base (17)..(17): bicyclic nucleic acid (BNA)
  source: /note="3' tri-ethylene glycol (TEG)"
ucaaggaagauggcaut

SEQ ID NO: 15647 - RNA, 15 nt, Artificial Sequence
  source: /note="Description of Artificial Sequence: Synthetic oligonucleotide"
  source: /note="RNA"
  source: /note="5' tri-ethylene glycol (TEG)"
  modified_base (2)..(2): 5-methyl modified nucleotide
  modified_base (14)..(14): 5-methyl modified nucleotide
  modified_base (15)..(15): bicyclic nucleic acid (BNA)
  source: /note="3' tri-ethylene glycol (TEG)"
ucaaggaagauggca

SEQ ID NO: 15648 - RNA, 14 nt, Artificial Sequence
  source: /note="Description of Artificial Sequence: Synthetic oligonucleotide"
  source: /note="RNA"
  source: /note="5' tri-ethylene glycol (TEG)"
  modified_base (2)..(2): 5-methyl modified nucleotide
  modified_base (14)..(14): 5-methyl bicyclic nucleic acid
  source: /note="3' tri-ethylene glycol (TEG)"
ucaaggaagauggc

SEQ ID NO: 15649 - RNA, 13 nt, Artificial Sequence
  source: /note="Description of Artificial Sequence: Synthetic oligonucleotide"
  source: /note="RNA"
  source: /note="5' tri-ethylene glycol (TEG)"
  modified_base (2)..(2): 5-methyl modified nucleotide
  modified_base (13)..(13): bicyclic nucleic acid (BNA)
  source: /note="3' tri-ethylene glycol (TEG)"
ucaaggaagaugg

SEQ ID NO: 15650 - RNA, 12 nt, Artificial Sequence
  source: /note="Description of Artificial Sequence: Synthetic oligonucleotide"
  source: /note="RNA"
  source: /note="5' tri-ethylene glycol (TEG)"
  modified_base (2)..(2): 5-methyl modified nucleotide
  modified_base (12)..(12): bicyclic nucleic acid (BNA)
  source: /note="3' tri-ethylene glycol (TEG)"
ucaaggaagaug

SEQ ID NO: 15651 - DNA, 11 bp, Artificial Sequence
  source: /note="Description of Artificial Sequence: Synthetic oligonucleotide"
  source: /note="Description of Combined DNA/RNA Molecule: Synthetic oligonucleotide"
  source: /note="DNA/RNA"
  source: /note="5' tri-ethylene glycol (TEG)"
  modified_base (2)..(2): 5-methyl modified nucleotide
  modified_base (11)..(11): bicyclic nucleic acid (BNA)
  source: /note="3' tri-ethylene glycol (TEG)"
ucaaggaagat

SEQ ID NO: 15652 - RNA, 10 nt, Artificial Sequence
  source: /note="Description of Artificial Sequence: Synthetic oligonucleotide"
  source: /note="RNA"
  source: /note="5' tri-ethylene glycol (TEG)"
  modified_base (2)..(2): 5-methyl modified nucleotide
  modified_base (10)..(10): bicyclic nucleic acid (BNA)
  source: /note="3' tri-ethylene glycol (TEG)"
ucaaggaaga

SEQ ID NO: 15653 - RNA, 9 nt, Artificial Sequence
  source: /note="Description of Artificial Sequence: Synthetic oligonucleotide"
  source: /note="RNA"
  source: /note="5' tri-ethylene glycol (TEG)"
  modified_base (2)..(2): 5-methyl modified nucleotide
  modified_base (9)..(9): bicyclic nucleic acid (BNA)
  source: /note="3' tri-ethylene glycol (TEG)"
ucaaggaag

SEQ ID NO: 15654 - RNA, 21 nt, Artificial Sequence
  source: /note="Description of Artificial Sequence: Synthetic oligonucleotide"
  source: /note="RNA"
  source: /note="5' tri-ethylene glycol (TEG)"
  modified_base (1)..(1): 5-methyl modified nucleotide
  modified_base (13)..(13): 5-methyl modified nucleotide
  modified_base (18)..(18): 5-methyl modified nucleotide
  modified_base (21)..(21): bicyclic nucleic acid (BNA)
  source: /note="3' tri-ethylene glycol (TEG)"
caaggaagauggcauuucuag

SEQ ID NO: 15655 - RNA, 20 nt, Artificial Sequence
  source: /note="Description of Artificial Sequence: Synthetic oligonucleotide"
  source: /note="RNA"
  source: /note="5' tri-ethylene glycol (TEG)"
  modified_base (1)..(1): 5-methyl modified nucleotide
  modified_base (13)..(13): 5-methyl modified nucleotide
  modified_base (18)..(18): 5-methyl modified nucleotide
  modified_base (20)..(20): bicyclic nucleic acid (BNA)
  source: /note="3' tri-ethylene glycol (TEG)"
caaggaagauggcauuucua

SEQ ID NO: 15656 - DNA, 19 bp, Artificial Sequence
  source: /note="Description of Artificial Sequence: Synthetic oligonucleotide"
  source: /note="Description of Combined DNA/RNA Molecule: Synthetic oligonucleotide"
  source: /note="DNA/RNA"
  source: /note="5' tri-ethylene glycol (TEG)"
  modified_base (1)..(1): 5-methyl modified nucleotide
  modified_base (13)..(13): 5-methyl modified nucleotide
  modified_base (18)..(18): 5-methyl modified nucleotide
  modified_base (19)..(19): bicyclic nucleic acid (BNA)
  source: /note="3' tri-ethylene glycol (TEG)"
caaggaagauggcauuuct

SEQ ID NO: 15657 - RNA, 18 nt, Artificial Sequence
  source: /note="Description of Artificial Sequence: Synthetic oligonucleotide"
  source: /note="RNA"
  source: /note="5' tri-ethylene glycol (TEG)"
  modified_base (1)..(1): 5-methyl modified nucleotide
  modified_base (13)..(13): 5-methyl modified nucleotide
  modified_base (18)..(18): 5-methyl bicyclic nucleic acid
  source: /note="3' tri-ethylene glycol (TEG)"
caaggaagauggcauuuc

SEQ ID NO: 15658 - DNA, 17 bp, Artificial Sequence
  source: /note="Description of Artificial Sequence: Synthetic oligonucleotide"
  source: /note="Description of Combined DNA/RNA Molecule: Synthetic oligonucleotide"
  source: /note="DNA/RNA"
  source: /note="5' tri-ethylene glycol (TEG)"
  modified_base (1)..(1): 5-methyl modified nucleotide
  modified_base (13)..(13): 5-methyl modified nucleotide
  modified_base (17)..(17): bicyclic nucleic acid (BNA)
  source: /note="3' tri-ethylene glycol (TEG)"
caaggaagauggcauut

SEQ ID NO: 15659 - DNA, 16 bp, Artificial Sequence
  source: /note="Description of Artificial Sequence: Synthetic oligonucleotide"
  source: /note="Description of Combined DNA/RNA Molecule: Synthetic oligonucleotide"
  source: /note="DNA/RNA"
  source: /note="5' tri-ethylene glycol (TEG)"
  modified_base (1)..(1): 5-methyl modified nucleotide
  modified_base (13)..(13): 5-methyl modified nucleotide
  modified_base (16)..(16): bicyclic nucleic acid (BNA)
  source: /note="3' tri-ethylene glycol (TEG)"
caaggaagauggcaut

SEQ ID NO: 15660 - DNA, 15 bp, Artificial Sequence
  source: /note="Description of Artificial Sequence: Synthetic oligonucleotide"
  source: /note="Description of Combined DNA/RNA Molecule: Synthetic oligonucleotide"
  source: /note="DNA/RNA"
  source: /note="5' tri-ethylene glycol (TEG)"
  modified_base (1)..(1): 5-methyl modified nucleotide
  modified_base (13)..(13): 5-methyl modified nucleotide
  modified_base (15)..(15): bicyclic nucleic acid (BNA)
  source: /note="3' tri-ethylene glycol (TEG)"
caaggaagauggcat

SEQ ID NO: 15661 - RNA, 14 nt, Artificial Sequence
  source: /note="Description of Artificial Sequence: Synthetic oligonucleotide"
  source: /note="RNA"
  source: /note="5' tri-ethylene glycol (TEG)"
  modified_base (1)..(1): 5-methyl modified nucleotide
  modified_base (13)..(13): 5-methyl modified nucleotide
  modified_base (14)..(14): bicyclic nucleic acid (BNA)
  source: /note="3' tri-ethylene glycol (TEG)"
caaggaagauggca

SEQ ID NO: 15662 - RNA, 13 nt, Artificial Sequence
  source: /note="Description of Artificial Sequence: Synthetic oligonucleotide"
  source: /note="RNA"
  source: /note="5' tri-ethylene glycol (TEG)"
  modified_base (1)..(1): 5-methyl modified nucleotide
  modified_base (13)..(13): 5-methyl bicyclic nucleic acid
  source: /note="3' tri-ethylene glycol (TEG)"
caaggaagauggc

SEQ ID NO: 15663 - RNA, 12 nt, Artificial Sequence
  source: /note="Description of Artificial Sequence: Synthetic oligonucleotide"
  source: /note="RNA"
  source: /note="5' tri-ethylene glycol (TEG)"
  modified_base (1)..(1): 5-methyl modified nucleotide
  modified_base (12)..(12): bicyclic nucleic acid (BNA)
  source: /note="3' tri-ethylene glycol (TEG)"
caaggaagaugg

SEQ ID NO: 15664 - RNA, 11 nt, Artificial Sequence
  source: /note="Description of Artificial Sequence: Synthetic oligonucleotide"
  source: /note="RNA"
  source: /note="5' tri-ethylene glycol (TEG)"
  modified_base (1)..(1): 5-methyl modified nucleotide
  modified_base (11)..(11): bicyclic nucleic acid (BNA)
  source: /note="3' tri-ethylene glycol (TEG)"
caaggaagaug

SEQ ID NO: 15665 - DNA, 10 bp, Artificial Sequence
  source: /note="Description of Artificial Sequence: Synthetic oligonucleotide"
  source: /note="DNA/RNA"
  source: /note="5' tri-ethylene glycol (TEG)"
  modified_base (1)..(1): 5-methyl modified nucleotide
  modified_base (10)..(10): bicyclic nucleic acid (BNA)
  source: /note="3' tri-ethylene glycol (TEG)"
caaggaagat

SEQ ID NO: 15666 - RNA, 9 nt, Artificial Sequence
  source: /note="Description of Artificial Sequence: Synthetic oligonucleotide"
  source: /note="RNA/Antisense Oligonucleotide"
  source: /note="5' tri-ethylene glycol (TEG)"
  modified_base (1)..(1): 5-methyl modified nucleotide
  modified_base (9)..(9): bicyclic nucleic acid (BNA)
  source: /note="3' tri-ethylene glycol (TEG)"
caaggaaga

SEQ ID NO: 15667 - RNA, 8 nt, Artificial Sequence
  source: /note="Description of Artificial Sequence: Synthetic oligonucleotide"
  source: /note="RNA/Antisense Oligonucleotide"
  source: /note="5' tri-ethylene glycol (TEG)"
  modified_base (1)..(1): 5-methyl modified nucleotide
  modified_base (8)..(8): bicyclic nucleic acid (BNA)
  source: /note="3' tri-ethylene glycol (TEG)"
caaggaag

SEQ ID NO: 15668 - RNA, 20 nt, Artificial Sequence
  source: /note="Description of Artificial Sequence: Synthetic oligonucleotide"
  source: /note="RNA"
  source: /note="5' tri-ethylene glycol (TEG)"
  modified_base (12)..(12): 5-methyl modified nucleotide
  modified_base (17)..(17): 5-methyl modified nucleotide
  modified_base (20)..(20): bicyclic nucleic acid (BNA)
  source: /note="3' tri-ethylene glycol (TEG)"
aaggaagauggcauuucuag

SEQ ID NO: 15669 - RNA, 19 nt, Artificial Sequence
  source: /note="Description of Artificial Sequence: Synthetic oligonucleotide"
  source: /note="RNA"
  source: /note="5' tri-ethylene glycol (TEG)"
  modified_base (12)..(12): 5-methyl modified nucleotide
  modified_base (17)..(17): 5-methyl modified nucleotide
  modified_base (19)..(19): bicyclic nucleic acid (BNA)
  source: /note="3' tri-ethylene glycol (TEG)"
aaggaagauggcauuucua

SEQ ID NO: 15670 - DNA, 18 bp, Artificial Sequence
  source: /note="Description of Artificial Sequence: Synthetic oligonucleotide"
  source: /note="Description of Combined DNA/RNA Molecule: Synthetic oligonucleotide"
  source: /note="DNA/RNA"
  source: /note="5' tri-ethylene glycol (TEG)"
  modified_base (12)..(12): 5-methyl modified nucleotide
  modified_base (17)..(17): 5-methyl modified nucleotide
  modified_base (18)..(18): bicyclic nucleic acid (BNA)
  source: /note="3' tri-ethylene glycol (TEG)"
aaggaagauggcauuuct

SEQ ID NO: 15671 - RNA, 17 nt, Artificial Sequence
  source: /note="Description of Artificial Sequence: Synthetic oligonucleotide"
  source: /note="RNA"
  source: /note="5' tri-ethylene glycol (TEG)"
  modified_base (12)..(12): 5-methyl modified nucleotide
  modified_base (17)..(17): 5-methyl bicyclic nucleic acid
  source: /note="3' tri-ethylene glycol (TEG)"
aaggaagauggcauuuc

SEQ ID NO: 15672 - DNA, 16 bp, Artificial Sequence
  source: /note="Description of Artificial Sequence: Synthetic oligonucleotide"
  source: /note="Description of Combined DNA/RNA Molecule: Synthetic oligonucleotide"
  source: /note="DNA/RNA"
  source: /note="5' tri-ethylene glycol (TEG)"
  modified_base (12)..(12): 5-methyl modified nucleotide
  modified_base (16)..(16): bicyclic nucleic acid (BNA)
  source: /note="3' tri-ethylene glycol (TEG)"
aaggaagauggcauut

SEQ ID NO: 15673 - DNA, 15 bp, Artificial Sequence
  source: /note="Description of Artificial Sequence: Synthetic oligonucleotide"
  source: /note="Description of Combined DNA/RNA Molecule: Synthetic oligonucleotide"
  source: /note="DNA/RNA"
  source: /note="5' tri-ethylene glycol (TEG)"
  modified_base (12)..(12): 5-methyl modified nucleotide
  modified_base (15)..(15): bicyclic nucleic acid (BNA)
  source: /note="3' tri-ethylene glycol (TEG)"
aaggaagauggcaut

SEQ ID NO: 15674 - DNA, 14 bp, Artificial Sequence
  source: /note="Description of Artificial Sequence: Synthetic oligonucleotide"
  source: /note="Description of Combined DNA/RNA Molecule: Synthetic oligonucleotide"
  source: /note="DNA/RNA"
  source: /note="5' tri-ethylene glycol (TEG)"
  modified_base (12)..(12): 5-methyl modified nucleotide
  modified_base (14)..(14): bicyclic nucleic acid (BNA)
  source: /note="3' tri-ethylene glycol (TEG)"
aaggaagauggcat

SEQ ID NO: 15675 - RNA, 13 nt, Artificial Sequence
  source: /note="Description of Artificial Sequence: Synthetic oligonucleotide"
  source: /note="RNA"
  source: /note="5' tri-ethylene glycol (TEG)"
  modified_base (12)..(12): 5-methyl modified nucleotide
  modified_base (13)..(13): bicyclic nucleic acid (BNA)
  source: /note="3' tri-ethylene glycol (TEG)"
aaggaagauggca

SEQ ID NO: 15676 - RNA, 12 nt, Artificial Sequence
  source: /note="Description of Artificial Sequence: Synthetic oligonucleotide"
  source: /note="RNA"
  source: /note="5' tri-ethylene glycol (TEG)"
  modified_base (12)..(12): 5-methyl bicyclic nucleic acid
  source: /note="3' tri-ethylene glycol (TEG)"
aaggaagauggc

SEQ ID NO: 15677 - RNA, 11 nt, Artificial Sequence
  source: /note="Description of Artificial Sequence: Synthetic oligonucleotide"
  source: /note="RNA"
  source: /note="5' tri-ethylene glycol (TEG)"
  modified_base (11)..(11): bicyclic nucleic acid (BNA)
  source: /note="3' tri-ethylene glycol (TEG)"
aaggaagaugg

SEQ ID NO: 15678 - RNA, 10 nt, Artificial Sequence
  source: /note="Description of Artificial Sequence: Synthetic oligonucleotide"
  source: /note="RNA"
  source: /note="5' tri-ethylene glycol (TEG)"
  modified_base (10)..(10): bicyclic nucleic acid (BNA)
  source: /note="3' tri-ethylene glycol (TEG)"
aaggaagaug

SEQ ID NO: 15679 - DNA, 9 bp, Artificial Sequence
  source: /note="Description of Artificial Sequence: Synthetic oligonucleotide"
  source: /note="DNA/RNA"
  source: /note="5' tri-ethylene glycol (TEG)"
  modified_base (9)..(9): bicyclic nucleic acid (BNA)
  source: /note="3' tri-ethylene glycol (TEG)"
aaggaagat

SEQ ID NO: 15680 - RNA, 8 nt, Artificial Sequence
  source: /note="Description of Artificial Sequence: Synthetic oligonucleotide"
  source: /note="RNA/Antisense Oligonucleotide"
  source: /note="5' tri-ethylene glycol (TEG)"
  modified_base (8)..(8): bicyclic nucleic acid (BNA)
  source: /note="3' tri-ethylene glycol (TEG)"
aaggaaga

SEQ ID NO: 15681 - RNA, 19 nt, Artificial Sequence
  source: /note="Description of Artificial Sequence: Synthetic oligonucleotide"
  source: /note="RNA"
  source: /note="5' tri-ethylene glycol (TEG)"
  modified_base (11)..(11): 5-methyl modified nucleotide
  modified_base (16)..(16): 5-methyl modified nucleotide
  modified_base (19)..(19): bicyclic nucleic acid (BNA)
  source: /note="3' tri-ethylene glycol (TEG)"
aggaagauggcauuucuag

SEQ ID NO: 15682 - RNA, 18 nt, Artificial Sequence
  source: /note="Description of Artificial Sequence: Synthetic oligonucleotide"
  source: /note="RNA"
  source: /note="5' tri-ethylene glycol (TEG)"
  modified_base (11)..(11): 5-methyl modified nucleotide
  modified_base (16)..(16): 5-methyl modified nucleotide
  modified_base (18)..(18): bicyclic nucleic acid (BNA)
  source: /note="3' tri-ethylene glycol (TEG)"
aggaagauggcauuucua

SEQ ID NO: 15683 - DNA, 17 bp, Artificial Sequence
  source: /note="Description of Artificial Sequence: Synthetic oligonucleotide"
  source: /note="Description of Combined DNA/RNA Molecule: Synthetic oligonucleotide"
  source: /note="DNA/RNA"
  source: /note="5' tri-ethylene glycol (TEG)"
  modified_base (11)..(11): 5-methyl modified nucleotide
  modified_base (16)..(16): 5-methyl modified nucleotide
  modified_base (17)..(17): bicyclic nucleic acid (BNA)
  source: /note="3' tri-ethylene glycol (TEG)"
aggaagauggcauuuct

SEQ ID NO: 15684 - RNA, 16 nt, Artificial Sequence
  source: /note="Description of Artificial Sequence: Synthetic oligonucleotide"
  source: /note="RNA"
  source: /note="5' tri-ethylene glycol (TEG)"
  modified_base (11)..(11): 5-methyl modified nucleotide
  modified_base (16)..(16): 5-methyl bicyclic nucleic acid
  source: /note="3' tri-ethylene glycol (TEG)"
aggaagauggcauuuc

SEQ ID NO: 15685 - DNA, 15 bp, Artificial Sequence
  source: /note="Description of Artificial Sequence: Synthetic oligonucleotide"
  source: /note="Description of Combined DNA/RNA Molecule: Synthetic oligonucleotide"
  source: /note="DNA/RNA"
  source: /note="5' tri-ethylene glycol (TEG)"
  modified_base (11)..(11): 5-methyl modified nucleotide
  modified_base (15)..(15): bicyclic nucleic acid (BNA)
  source: /note="3' tri-ethylene glycol (TEG)"
aggaagauggcauut

SEQ ID NO: 15686 - DNA, 14 bp, Artificial Sequence
  source: /note="Description of Artificial Sequence: Synthetic oligonucleotide"
  source: /note="Description of Combined DNA/RNA Molecule: Synthetic oligonucleotide"
  source: /note="DNA/RNA"
  source: /note="5' tri-ethylene glycol (TEG)"
  modified_base (11)..(11): 5-methyl modified nucleotide
  modified_base (14)..(14): bicyclic nucleic acid (BNA)
  source: /note="3' tri-ethylene glycol (TEG)"
aggaagauggcaut

SEQ ID NO: 15687 - DNA, 13 bp, Artificial Sequence
  source: /note="Description of Artificial Sequence: Synthetic oligonucleotide"
  source: /note="Description of Combined DNA/RNA Molecule: Synthetic oligonucleotide"
  source: /note="DNA/RNA"
  source: /note="5' tri-ethylene glycol (TEG)"
  modified_base (11)..(11): 5-methyl modified nucleotide
  modified_base (13)..(13): bicyclic nucleic acid (BNA)
  source: /note="3' tri-ethylene glycol (TEG)"
aggaagauggcat

SEQ ID NO: 15688 - RNA, 12 nt, Artificial Sequence
  source: /note="Description of Artificial Sequence: Synthetic oligonucleotide"
  source: /note="RNA"
  source: /note="5' tri-ethylene glycol (TEG)"
  modified_base (11)..(11): 5-methyl modified nucleotide
  modified_base (12)..(12): bicyclic nucleic acid (BNA)
  source: /note="3' tri-ethylene glycol (TEG)"
aggaagauggca

SEQ ID NO: 15689 - RNA, 10 nt, Artificial Sequence
  source: /note="Description of Artificial Sequence: Synthetic oligonucleotide"
  source: /note="RNA"
  source: /note="5' tri-ethylene glycol (TEG)"
  modified_base (10)..(10): bicyclic nucleic acid (BNA)
  source: /note="3' tri-ethylene glycol (TEG)"
aggaagaugg

SEQ ID NO: 15690 - RNA, 9 nt, Artificial Sequence
  source: /note="Description of Artificial Sequence: Synthetic oligonucleotide"
  source: /note="RNA"
  source: /note="5' tri-ethylene glycol (TEG)"
  modified_base (9)..(9): bicyclic nucleic acid (BNA)
  source: /note="3' tri-ethylene glycol (TEG)"
aggaagaug

SEQ ID NO: 15691 - DNA, 8 bp, Artificial Sequence
  source: /note="Description of Artificial Sequence: Synthetic oligonucleotide"
  source: /note="DNA/RNA"
  source: /note="5' tri-ethylene glycol (TEG)"
  modified_base (8)..(8): bicyclic nucleic acid (BNA)
  source: /note="3' tri-ethylene glycol (TEG)"
aggaagat

SEQ ID NO: 15692 - RNA, 18 nt, Artificial Sequence
  source: /note="Description of Artificial Sequence: Synthetic oligonucleotide"
  source: /note="RNA"
  source: /note="5' tri-ethylene glycol (TEG)"
  modified_base (10)..(10): 5-methyl modified nucleotide
  modified_base (15)..(15): 5-methyl modified nucleotide
  modified_base (18)..(18): bicyclic nucleic acid (BNA)
  source: /note="3' tri-ethylene glycol (TEG)"
ggaagauggcauuucuag

SEQ ID NO: 15693 - RNA, 17 nt, Artificial Sequence
  source: /note="Description of Artificial Sequence: Synthetic oligonucleotide"
  source: /note="RNA"
  source: /note="5' tri-ethylene glycol (TEG)"
  modified_base (10)..(10): 5-methyl modified nucleotide
  modified_base (15)..(15): 5-methyl modified nucleotide
  modified_base (17)..(17): bicyclic nucleic acid (BNA)
  source: /note="3' tri-ethylene glycol (TEG)"
ggaagauggcauuucua

SEQ ID NO: 15694 - DNA, 16 bp, Artificial Sequence
  source: /note="Description of Artificial Sequence: Synthetic oligonucleotide"
  source: /note="Description of Combined DNA/RNA Molecule: Synthetic oligonucleotide"
  source: /note="DNA/RNA"
  source: /note="5' tri-ethylene glycol (TEG)"
  modified_base (10)..(10): 5-methyl modified nucleotide
  modified_base (15)..(15): 5-methyl modified nucleotide
  modified_base (16)..(16): bicyclic nucleic acid (BNA)
  source: /note="3' tri-ethylene glycol (TEG)"
ggaagauggcauuuct

SEQ ID NO: 15695 - RNA, 15 nt, Artificial Sequence
  source: /note="Description of Artificial Sequence: Synthetic oligonucleotide"
  source: /note="RNA"
  source: /note="5' tri-ethylene glycol (TEG)"
  modified_base (10)..(10): 5-methyl modified nucleotide
  modified_base (15)..(15): 5-methyl bicyclic nucleic acid
  source: /note="3' tri-ethylene glycol (TEG)"
ggaagauggcauuuc

SEQ ID NO: 15696 - DNA, 14 bp, Artificial Sequence
  source: /note="Description of Artificial Sequence: Synthetic oligonucleotide"
  source: /note="Description of Combined DNA/RNA Molecule: Synthetic oligonucleotide"
  source: /note="DNA/RNA"
  source: /note="5' tri-ethylene glycol (TEG)"
  modified_base (10)..(10): 5-methyl modified nucleotide
  modified_base (14)..(14): bicyclic nucleic acid (BNA)
  source: /note="3' tri-ethylene glycol (TEG)"
ggaagauggcauut

SEQ ID NO: 15697 - DNA, 13 bp, Artificial Sequence
  source: /note="Description of Artificial Sequence: Synthetic oligonucleotide"
  source: /note="Description of Combined DNA/RNA Molecule: Synthetic oligonucleotide"
  source: /note="DNA/RNA"
  source: /note="5' tri-ethylene glycol (TEG)"
  modified_base (10)..(10): 5-methyl modified nucleotide
  modified_base (13)..(13): bicyclic nucleic acid (BNA)
  source: /note="3' tri-ethylene glycol (TEG)"
ggaagauggcaut

SEQ ID NO: 15698 - DNA, 12 bp, Artificial Sequence
  source: /note="Description of Artificial Sequence: Synthetic oligonucleotide"
  source: /note="Description of Combined DNA/RNA Molecule: Synthetic oligonucleotide"
  source: /note="DNA/RNA"
  source: /note="5' tri-ethylene glycol (TEG)"
  modified_base (10)..(10): 5-methyl modified nucleotide
  modified_base (12)..(12): bicyclic nucleic acid (BNA)
  source: /note="3' tri-ethylene glycol (TEG)"
ggaagauggcat

SEQ ID NO: 15699 - RNA, 11 nt, Artificial Sequence
  source: /note="Description of Artificial Sequence: Synthetic oligonucleotide"
  source: /note="RNA"
  source: /note="5' tri-ethylene glycol (TEG)"
  modified_base (10)..(10): 5-methyl modified nucleotide
  modified_base (11)..(11): bicyclic nucleic acid (BNA)
  source: /note="3' tri-ethylene glycol (TEG)"
ggaagauggca

SEQ ID NO: 15700 - RNA, 10 nt, Artificial Sequence
  source: /note="Description of Artificial Sequence: Synthetic oligonucleotide"
  source: /note="RNA"
  source: /note="5' tri-ethylene glycol (TEG)"
  modified_base (10)..(10): 5-methyl bicyclic nucleic acid
  source: /note="3' tri-ethylene glycol (TEG)"
ggaagauggc

SEQ ID NO: 15701 - RNA, 8 nt, Artificial Sequence
  source: /note="Description of Artificial Sequence: Synthetic oligonucleotide"
  source: /note="RNA"
  source: /note="5' tri-ethylene glycol (TEG)"
  modified_base (8)..(8): bicyclic nucleic acid (BNA)
  source: /note="3' tri-ethylene glycol (TEG)"
ggaagaug

SEQ ID NO: 15702 - RNA, 17 nt, Artificial Sequence
  source: /note="Description of Artificial Sequence: Synthetic oligonucleotide"
  source: /note="RNA"
  source: /note="5' tri-ethylene glycol (TEG)"
  modified_base (9)..(9): 5-methyl modified nucleotide
  modified_base (14)..(14): 5-methyl modified nucleotide
  modified_base (17)..(17): bicyclic nucleic acid (BNA)
  source: /note="3' tri-ethylene glycol (TEG)"
gaagauggcauuucuag

SEQ ID NO: 15703 - RNA, 16 nt, Artificial Sequence
  source: /note="Description of Artificial Sequence: Synthetic oligonucleotide"
  source: /note="RNA"
  source: /note="5' tri-ethylene glycol (TEG)"
  modified_base (9)..(9): 5-methyl modified nucleotide
  modified_base (14)..(14): 5-methyl modified nucleotide
  modified_base (16)..(16): bicyclic nucleic acid (BNA)
  source: /note="3' tri-ethylene glycol (TEG)"
gaagauggcauuucua

SEQ ID NO: 15704 - RNA, 14 nt, Artificial Sequence
  source: /note="Description of Artificial Sequence: Synthetic oligonucleotide"
  source: /note="RNA"
  source: /note="5' tri-ethylene glycol (TEG)"
  modified_base (9)..(9): 5-methyl modified nucleotide
  modified_base (14)..(14): 5-methyl bicyclic nucleic acid
  source: /note="3' tri-ethylene glycol (TEG)"
gaagauggcauuuc

SEQ ID NO: 15705 - DNA, 13 bp, Artificial Sequence
  source: /note="Description of Artificial Sequence: Synthetic oligonucleotide"
  source: /note="Description of Combined DNA/RNA Molecule: Synthetic oligonucleotide"
  source: /note="DNA/RNA"
  source: /note="5' tri-ethylene glycol (TEG)"
  modified_base (9)..(9): 5-methyl modified nucleotide
  modified_base (13)..(13): bicyclic nucleic acid (BNA)
  source: /note="3' tri-ethylene glycol (TEG)"
gaagauggcauut

SEQ ID NO: 15706 - DNA, 12 bp, Artificial Sequence
  source: /note="Description of Artificial Sequence: Synthetic oligonucleotide"
  source: /note="Description of Combined DNA/RNA Molecule: Synthetic oligonucleotide"
  source: /note="DNA/RNA"
  source: /note="5' tri-ethylene glycol (TEG)"
  modified_base (9)..(9): 5-methyl modified nucleotide
  modified_base (12)..(12): bicyclic nucleic acid (BNA)
  source: /note="3' tri-ethylene glycol (TEG)"
gaagauggcaut

SEQ ID NO: 15707 - DNA, 11 bp, Artificial Sequence
  source: /note="Description of Artificial Sequence: Synthetic oligonucleotide"
  source: /note="Description of Combined DNA/RNA Molecule: Synthetic oligonucleotide"
  source: /note="DNA/RNA"
  source: /note="5' tri-ethylene glycol (TEG)"
  modified_base (9)..(9): 5-methyl modified nucleotide
  modified_base (11)..(11): bicyclic nucleic acid (BNA)
  source: /note="3' tri-ethylene glycol (TEG)"
gaagauggcat

SEQ ID NO: 15708 - RNA, 10 nt, Artificial Sequence
  source: /note="Description of Artificial Sequence: Synthetic oligonucleotide"
  source: /note="RNA"
  source: /note="5' tri-ethylene glycol (TEG)"
  modified_base (9)..(9): 5-methyl modified nucleotide
  modified_base (10)..(10): bicyclic nucleic acid (BNA)
  source: /note="3' tri-ethylene glycol (TEG)"
gaagauggca

SEQ ID NO: 15709 - RNA, 9 nt, Artificial Sequence
  source: /note="Description of Artificial Sequence: Synthetic oligonucleotide"
  source: /note="RNA"
  source: /note="5' tri-ethylene glycol (TEG)"
  modified_base (9)..(9): 5-methyl bicyclic nucleic acid
  source: /note="3' tri-ethylene glycol (TEG)"
gaagauggc

SEQ ID NO: 15710 - RNA, 8 nt, Artificial Sequence
  source: /note="Description of Artificial Sequence: Synthetic oligonucleotide"
  source: /note="RNA"
  source: /note="5' tri-ethylene glycol (TEG)"
  modified_base (8)..(8): bicyclic nucleic acid (BNA)
  source: /note="3' tri-ethylene glycol (TEG)"
gaagaugg

SEQ ID NO: 15711 - RNA, 16 nt, Artificial Sequence
  source: /note="Description of Artificial Sequence: Synthetic oligonucleotide"
  source: /note="RNA"
  source: /note="5' tri-ethylene glycol (TEG)"
  modified_base (8)..(8): 5-methyl modified nucleotide
  modified_base (13)..(13): 5-methyl modified nucleotide
  modified_base (16)..(16): bicyclic nucleic acid (BNA)
  source: /note="3' tri-ethylene glycol (TEG)"
aagauggcauuucuag

SEQ ID NO: 15712 - RNA, 15 nt, Artificial Sequence
  source: /note="Description of Artificial Sequence: Synthetic oligonucleotide"
  source: /note="RNA"
  source: /note="5' tri-ethylene glycol (TEG)"
  modified_base (8)..(8): 5-methyl modified nucleotide
  modified_base (13)..(13): 5-methyl modified nucleotide
  modified_base (15)..(15): bicyclic nucleic acid (BNA)
  source: /note="3' tri-ethylene glycol (TEG)"
aagauggcauuucua

SEQ ID NO: 15713 - DNA, 14 bp, Artificial Sequence
  source: /note="Description of Artificial Sequence: Synthetic oligonucleotide"
  source: /note="Description of Combined DNA/RNA Molecule: Synthetic oligonucleotide"
  source: /note="DNA/RNA"
  source: /note="5' tri-ethylene glycol (TEG)"
  modified_base (8)..(8): 5-methyl modified nucleotide
  modified_base (13)..(13): 5-methyl modified nucleotide
  modified_base (14)..(14): bicyclic nucleic acid (BNA)
  source: /note="3' tri-ethylene glycol (TEG)"
aagauggcauuuct

SEQ ID NO: 15714 - RNA, 13 nt, Artificial Sequence
  source: /note="Description of Artificial Sequence: Synthetic oligonucleotide"
  source: /note="RNA"
  source: /note="5' tri-ethylene glycol (TEG)"
  modified_base (8)..(8): 5-methyl modified nucleotide
  modified_base (13)..(13): 5-methyl bicyclic nucleic acid
  source: /note="3' tri-ethylene glycol (TEG)"
aagauggcauuuc

SEQ ID NO: 15715 - DNA, 12 bp, Artificial Sequence
  source: /note="Description of Artificial Sequence: Synthetic oligonucleotide"
  source: /note="Description of Combined DNA/RNA Molecule: Synthetic oligonucleotide"
  source: /note="DNA/RNA"
  source: /note="5' tri-ethylene glycol (TEG)"
  modified_base (8)..(8): 5-methyl modified nucleotide
  modified_base (12)..(12): bicyclic nucleic acid (BNA)
  source: /note="3' tri-ethylene glycol (TEG)"
aagauggcauut

SEQ ID NO: 15716 - DNA, 11 bp, Artificial Sequence
  source: /note="Description of Artificial Sequence: Synthetic oligonucleotide"
  source: /note="Description of Combined DNA/RNA Molecule: Synthetic oligonucleotide"
  source: /note="DNA/RNA"
  source: /note="5' tri-ethylene glycol (TEG)"
  modified_base (8)..(8): 5-methyl modified nucleotide
  modified_base (11)..(11): bicyclic nucleic acid (BNA)
  source: /note="3' tri-ethylene glycol (TEG)"
aagauggcaut

SEQ ID NO: 15717 - DNA, 10 bp, Artificial Sequence
  source: /note="Description of Artificial Sequence: Synthetic oligonucleotide"
  source: /note="Description of Combined DNA/RNA Molecule: Synthetic oligonucleotide"
  source: /note="DNA/RNA"
  source: /note="5' tri-ethylene glycol (TEG)"
  modified_base (8)..(8): 5-methyl modified nucleotide
  modified_base (10)..(10): bicyclic nucleic acid (BNA)
  source: /note="3' tri-ethylene glycol (TEG)"
aagauggcat

SEQ ID NO: 15718 - RNA, 9 nt, Artificial Sequence
  source: /note="Description of Artificial Sequence: Synthetic oligonucleotide"
  source: /note="RNA"
  source: /note="5' tri-ethylene glycol (TEG)"
  modified_base (8)..(8): 5-methyl modified nucleotide
  modified_base (9)..(9): bicyclic nucleic acid (BNA)
  source: /note="3' tri-ethylene glycol (TEG)"
aagauggca

SEQ ID NO: 15719 - RNA, 8 nt, Artificial Sequence
  source: /note="Description of Artificial Sequence: Synthetic oligonucleotide"
  source: /note="RNA"
  source: /note="5' tri-ethylene glycol (TEG)"
  modified_base (8)..(8): 5-methyl bicyclic nucleic acid
  source: /note="3' tri-ethylene glycol (TEG)"
aagauggc

SEQ ID NO: 15720 - RNA, 15 nt, Artificial Sequence
  source: /note="Description of Artificial Sequence: Synthetic oligonucleotide"
  source: /note="RNA"
  source: /note="5' tri-ethylene glycol (TEG)"
  modified_base (7)..(7): 5-methyl modified nucleotide
  modified_base (12)..(12): 5-methyl modified nucleotide
  modified_base (15)..(15): bicyclic nucleic acid (BNA)
  source: /note="3' tri-ethylene glycol (TEG)"
agauggcauuucuag

SEQ ID NO: 15721 - RNA, 14 nt, Artificial Sequence
  source: /note="Description of Artificial Sequence: Synthetic oligonucleotide"
  source: /note="RNA"
  source: /note="5' tri-ethylene glycol (TEG)"
  modified_base (7)..(7): 5-methyl modified nucleotide
  modified_base (12)..(12): 5-methyl modified nucleotide
  modified_base (14)..(14): bicyclic nucleic acid (BNA)
  source: /note="3' tri-ethylene glycol (TEG)"
agauggcauuucua

SEQ ID NO: 15722 - DNA, 13 bp, Artificial Sequence
  source: /note="Description of Artificial Sequence: Synthetic oligonucleotide"
  source: /note="Description of Combined DNA/RNA Molecule: Synthetic oligonucleotide"
  source: /note="DNA/RNA"
  source: /note="5' tri-ethylene glycol (TEG)"
  modified_base (7)..(7): 5-methyl modified nucleotide
  modified_base (12)..(12): 5-methyl modified nucleotide
  modified_base (13)..(13): bicyclic nucleic acid (BNA)
  source: /note="3' tri-ethylene glycol (TEG)"
agauggcauuuct

SEQ ID NO: 15723 - RNA, 12 nt, Artificial Sequence
  source: /note="Description of Artificial Sequence: Synthetic oligonucleotide"
  source: /note="RNA"
  source: /note="5' tri-ethylene glycol (TEG)"
  modified_base (7)..(7): 5-methyl modified nucleotide
  modified_base (12)..(12): 5-methyl bicyclic nucleic acid
  source: /note="3' tri-ethylene glycol (TEG)"
agauggcauuuc

SEQ ID NO: 15724 - DNA, 11 bp, Artificial Sequence
  source: /note="Description of Artificial Sequence: Synthetic oligonucleotide"
  source: /note="Description of Combined DNA/RNA Molecule: Synthetic oligonucleotide"
  source: /note="DNA/RNA"
  source: /note="5' tri-ethylene glycol (TEG)"
  modified_base (7)..(7): 5-methyl modified nucleotide
  modified_base (11)..(11): bicyclic nucleic acid (BNA)
  source: /note="3' tri-ethylene glycol (TEG)"
agauggcauut

SEQ ID NO: 15725 - DNA, 10 bp, Artificial Sequence
  source: /note="Description of Artificial Sequence: Synthetic oligonucleotide"
  source: /note="Description of Combined DNA/RNA Molecule: Synthetic oligonucleotide"
  source: /note="DNA/RNA"
  source: /note="5' tri-ethylene glycol (TEG)"
  modified_base (7)..(7): 5-methyl modified nucleotide
  modified_base (10)..(10): bicyclic nucleic acid (BNA)
  source: /note="3' tri-ethylene glycol (TEG)"
agauggcaut

SEQ ID NO: 15726 - DNA, 9 bp, Artificial Sequence
  source: /note="Description of Artificial Sequence: Synthetic oligonucleotide"
  source: /note="Description of Combined DNA/RNA Molecule: Synthetic oligonucleotide"
  source: /note="DNA/RNA"
  source: /note="5' tri-ethylene glycol (TEG)"
  modified_base (7)..(7): 5-methyl modified nucleotide
  modified_base (9)..(9): bicyclic nucleic acid (BNA)
  source: /note="3' tri-ethylene glycol (TEG)"
agauggcat

SEQ ID NO: 15727 - RNA, 8 nt, Artificial Sequence
  source: /note="Description of Artificial Sequence: Synthetic oligonucleotide"
  source: /note="RNA"
  source: /note="5' tri-ethylene glycol (TEG)"
  modified_base (7)..(7): 5-methyl modified nucleotide
  modified_base (8)..(8): bicyclic nucleic acid (BNA)
  source: /note="3' tri-ethylene glycol (TEG)"
agauggca

SEQ ID NO: 15728 - RNA, 30 nt, Artificial Sequence; identical to SEQ ID NO: 284
  source: /note="Description of Artificial Sequence: Synthetic oligonucleotide"
  source: /note="RNA"
  source: /note="5' tri-ethylene glycol (TEG)"
  modified_base (1)..(1): 5-methyl modified nucleotide
  modified_base (3)..(3): 5-methyl modified nucleotide
  modified_base (4)..(4): 5-methyl modified nucleotide
  modified_base (7)..(7): 5-methyl modified nucleotide
  modified_base (10)..(10): 5-methyl modified nucleotide
  modified_base (22)..(22): 5-methyl modified nucleotide
  modified_base (27)..(27): 5-methyl modified nucleotide
  modified_base (30)..(30): bicyclic nucleic acid (BNA)
  source: /note="3' tri-ethylene glycol (TEG)"

SEQ ID NO: 15729 - RNA, 29 nt, Artificial Sequence
  source: /note="Description of Artificial Sequence: Synthetic oligonucleotide"
  source: /note="RNA"
  source: /note="5' tri-ethylene glycol (TEG)"
  modified_base (1)..(1): 5-methyl modified nucleotide
  modified_base (3)..(3): 5-methyl modified nucleotide
  modified_base (4)..(4): 5-methyl modified nucleotide
  modified_base (7)..(7): 5-methyl modified nucleotide
  modified_base (10)..(10): 5-methyl modified nucleotide
  modified_base (22)..(22): 5-methyl modified nucleotide
  modified_base (27)..(27): 5-methyl modified nucleotide
  modified_base (29)..(29): bicyclic nucleic acid (BNA)
  source: /note="3' tri-ethylene glycol (TEG)"
cuccaacaucaaggaagauggcauuucua

SEQ ID NO: 15730 - DNA, 28 bp, Artificial Sequence
  source: /note="Description of Artificial Sequence: Synthetic oligonucleotide"
  source: /note="Description of Combined DNA/RNA Molecule: Synthetic oligonucleotide"
  source: /note="DNA/RNA"
  source: /note="5' tri-ethylene glycol (TEG)"
  modified_base (1)..(1): 5-methyl modified nucleotide
  modified_base (3)..(3): 5-methyl modified nucleotide
  modified_base (4)..(4): 5-methyl modified nucleotide
  modified_base (7)..(7): 5-methyl modified nucleotide
  modified_base (10)..(10): 5-methyl modified nucleotide
  modified_base (22)..(22): 5-methyl modified nucleotide
  modified_base (27)..(27): 5-methyl modified nucleotide
  modified_base (28)..(28): bicyclic nucleic acid (BNA)
  source: /note="3' tri-ethylene glycol (TEG)"
cuccaacaucaaggaagauggcauuuct

SEQ ID NO: 15731 - RNA, 27 nt, Artificial Sequence
  source: /note="Description of Artificial Sequence: Synthetic oligonucleotide"
  source: /note="RNA"
  source: /note="5' tri-ethylene glycol (TEG)"
  modified_base (1)..(1): 5-methyl modified nucleotide
  modified_base (3)..(3): 5-methyl modified nucleotide
  modified_base (4)..(4): 5-methyl modified nucleotide
  modified_base (7)..(7): 5-methyl modified nucleotide
  modified_base (10)..(10): 5-methyl modified nucleotide
  modified_base (22)..(22): 5-methyl modified nucleotide
  modified_base (27)..(27): 5-methyl bicyclic nucleic acid
  source: /note="3' tri-ethylene glycol (TEG)"
cuccaacaucaaggaagauggcauuuc

SEQ ID NO: 15732 - DNA, 26 bp, Artificial Sequence
  source: /note="Description of Artificial Sequence: Synthetic oligonucleotide"
  source: /note="Description of Combined DNA/RNA Molecule: Synthetic oligonucleotide"
  source: /note="DNA/RNA"
  source: /note="5' tri-ethylene glycol (TEG)"
  modified_base (1)..(1): 5-methyl modified nucleotide
  modified_base (3)..(3): 5-methyl modified nucleotide
  modified_base (4)..(4): 5-methyl modified nucleotide
  modified_base (7)..(7): 5-methyl modified nucleotide
  modified_base (10)..(10): 5-methyl modified nucleotide
  modified_base (22)..(22): 5-methyl modified nucleotide
  modified_base (26)..(26): bicyclic nucleic acid (BNA)
  source: /note="3' tri-ethylene glycol (TEG)"
cuccaacaucaaggaagauggcauut

SEQ ID NO: 15733 - DNA, 25 bp, Artificial Sequence
  source: /note="Description of Artificial Sequence: Synthetic oligonucleotide"
  source: /note="Description of Combined DNA/RNA Molecule: Synthetic oligonucleotide"
  source: /note="DNA/RNA"
  source: /note="5' tri-ethylene glycol (TEG)"
  modified_base (1)..(1): 5-methyl modified nucleotide
  modified_base (3)..(3): 5-methyl modified nucleotide
  modified_base (4)..(4): 5-methyl modified nucleotide
  modified_base (7)..(7): 5-methyl modified nucleotide
  modified_base (10)..(10): 5-methyl modified nucleotide
  modified_base (22)..(22): 5-methyl modified nucleotide
  modified_base (25)..(25): bicyclic nucleic acid (BNA)
  source: /note="3' tri-ethylene glycol (TEG)"
cuccaacaucaaggaagauggcaut

SEQ ID NO: 15734 - DNA, 24 bp, Artificial Sequence
  source: /note="Description of Artificial Sequence: Synthetic oligonucleotide"
  source: /note="Description of Combined DNA/RNA Molecule: Synthetic oligonucleotide"
  source: /note="DNA/RNA"
  source: /note="5' tri-ethylene glycol (TEG)"
  modified_base (1)..(1): 5-methyl modified nucleotide
  modified_base (3)..(3): 5-methyl modified nucleotide
  modified_base (4)..(4): 5-methyl modified nucleotide
  modified_base (7)..(7): 5-methyl modified nucleotide
  modified_base (10)..(10): 5-methyl modified nucleotide
  modified_base (22)..(22): 5-methyl modified nucleotide
  modified_base (24)..(24): bicyclic nucleic acid (BNA)
  source: /note="3' tri-ethylene glycol (TEG)"
cuccaacaucaaggaagauggcat

SEQ ID NO: 15735 - RNA, 23 nt, Artificial Sequence
  source: /note="Description of Artificial Sequence: Synthetic oligonucleotide"
  source: /note="RNA"
  source: /note="5' tri-ethylene glycol (TEG)"
  modified_base (1)..(1): 5-methyl modified nucleotide
  modified_base (3)..(3): 5-methyl modified nucleotide
  modified_base (4)..(4): 5-methyl modified nucleotide
  modified_base (7)..(7): 5-methyl modified nucleotide
  modified_base (10)..(10): 5-methyl modified nucleotide
  modified_base (22)..(22): 5-methyl modified nucleotide
  modified_base (23)..(23): bicyclic nucleic acid (BNA)
  source: /note="3' tri-ethylene glycol (TEG)"
cuccaacaucaaggaagauggca

SEQ ID NO: 15736 - RNA, 22 nt, Artificial Sequence
  source: /note="Description of Artificial Sequence: Synthetic oligonucleotide"
  source: /note="RNA"
  source: /note="5' tri-ethylene glycol (TEG)"
  modified_base (1)..(1): 5-methyl modified nucleotide
  modified_base (3)..(3): 5-methyl modified nucleotide
  modified_base (4)..(4): 5-methyl modified nucleotide
  modified_base (7)..(7): 5-methyl modified nucleotide
  modified_base (10)..(10): 5-methyl modified nucleotide
  modified_base (22)..(22): 5-methyl bicyclic nucleic acid
  source: /note="3' tri-ethylene glycol (TEG)"
cuccaacaucaaggaagauggc

SEQ ID NO: 15737 - RNA, 21 nt, Artificial Sequence
  source: /note="Description of Artificial Sequence: Synthetic oligonucleotide"
  source: /note="RNA"
  source: /note="5' tri-ethylene glycol (TEG)"
  modified_base (1)..(1): 5-methyl modified nucleotide
  modified_base (3)..(3): 5-methyl modified nucleotide
  modified_base (4)..(4): 5-methyl modified nucleotide
  modified_base (7)..(7): 5-methyl modified nucleotide
  modified_base (10)..(10): 5-methyl modified nucleotide
  modified_base (21)..(21): bicyclic nucleic acid (BNA)
  source: /note="3' tri-ethylene glycol (TEG)"
cuccaacaucaaggaagaugg

SEQ ID NO: 15738 - RNA, 20 nt, Artificial Sequence
  source: /note="Description of Artificial Sequence: Synthetic oligonucleotide"
  source: /note="RNA"
  source: /note="5' tri-ethylene glycol (TEG)"
  modified_base (1)..(1): 5-methyl modified nucleotide
  modified_base (3)..(3): 5-methyl modified nucleotide
  modified_base (4)..(4): 5-methyl modified nucleotide
  modified_base (7)..(7): 5-methyl modified nucleotide
  modified_base (10)..(10): 5-methyl modified nucleotide
  modified_base (20)..(20): bicyclic nucleic acid (BNA)
  source: /note="3' tri-ethylene glycol (TEG)"
cuccaacaucaaggaagaug

SEQ ID NO: 15739 - DNA, 19 bp, Artificial Sequence
  source: /note="Description of Artificial Sequence: Synthetic oligonucleotide"
  source: /note="Description of Combined DNA/RNA Molecule: Synthetic oligonucleotide"
  source: /note="DNA/RNA"
  source: /note="5' tri-ethylene glycol (TEG)"
  modified_base (1)..(1): 5-methyl modified nucleotide
  modified_base (3)..(3): 5-methyl modified nucleotide
  modified_base (4)..(4): 5-methyl modified nucleotide
  modified_base (7)..(7): 5-methyl modified nucleotide
  modified_base (10)..(10): 5-methyl modified nucleotide
  modified_base (19)..(19): bicyclic nucleic acid (BNA)
  source: /note="3' tri-ethylene glycol (TEG)"
cuccaacaucaaggaagat

SEQ ID NO: 15740 - RNA, 18 nt, Artificial Sequence
  source: /note="Description of Artificial Sequence: Synthetic oligonucleotide"
  source: /note="RNA"
  source: /note="5' tri-ethylene glycol (TEG)"
  modified_base (1)..(1): 5-methyl modified nucleotide
  modified_base (3)..(3): 5-methyl modified nucleotide
  modified_base (4)..(4): 5-methyl modified nucleotide
  modified_base (7)..(7): 5-methyl modified nucleotide
  modified_base (10)..(10): 5-methyl modified nucleotide
  modified_base (18)..(18): bicyclic nucleic acid (BNA)
  source: /note="3' tri-ethylene glycol (TEG)"
cuccaacaucaaggaaga

SEQ ID NO: 15741 - RNA, 17 nt, Artificial Sequence
  source: /note="Description of Artificial Sequence: Synthetic oligonucleotide"
  source: /note="RNA"
  source: /note="5' tri-ethylene glycol (TEG)"
  modified_base (1)..(1): 5-methyl modified nucleotide
  modified_base (3)..(3): 5-methyl modified nucleotide
  modified_base (4)..(4): 5-methyl modified nucleotide
  modified_base (7)..(7): 5-methyl modified nucleotide
  modified_base (10)..(10): 5-methyl modified nucleotide
  modified_base (17)..(17): bicyclic nucleic acid (BNA)
  source: /note="3' tri-ethylene glycol (TEG)"
cuccaacaucaaggaag

SEQ ID NO: 15742 - RNA, 29 nt, Artificial Sequence
  source: /note="Description of Artificial Sequence: Synthetic oligonucleotide"
  source: /note="RNA"
  source: /note="5' tri-ethylene glycol (TEG)"
  modified_base (2)..(2): 5-methyl modified nucleotide
  modified_base (3)..(3): 5-methyl modified nucleotide
  modified_base (6)..(6): 5-methyl modified nucleotide
  modified_base (9)..(9): 5-methyl modified nucleotide
  modified_base (21)..(21): 5-methyl modified nucleotide
  modified_base (26)..(26): 5-methyl modified nucleotide
  modified_base (29)..(29): bicyclic nucleic acid (BNA)
  source: /note="3' tri-ethylene glycol (TEG)"
uccaacaucaaggaagauggcauuucuag

SEQ ID NO: 15743 - RNA, 28 nt, Artificial Sequence
  source: /note="Description of Artificial Sequence: Synthetic oligonucleotide"
  source: /note="RNA"
  source: /note="5' tri-ethylene glycol (TEG)"
  modified_base (2)..(2): 5-methyl modified nucleotide
  modified_base (3)..(3): 5-methyl modified nucleotide
  modified_base (6)..(6): 5-methyl modified nucleotide
  modified_base (9)..(9): 5-methyl modified nucleotide
  modified_base (21)..(21): 5-methyl modified nucleotide
  modified_base (26)..(26): 5-methyl modified nucleotide
  modified_base (28)..(28): bicyclic nucleic acid (BNA)
  source: /note="3' tri-ethylene glycol (TEG)"
uccaacaucaaggaagauggcauuucua

SEQ ID NO: 15744 - DNA, 27 bp, Artificial Sequence
  source: /note="Description of Artificial Sequence: Synthetic oligonucleotide"
  source: /note="Description of Combined DNA/RNA Molecule: Synthetic oligonucleotide"
  source: /note="DNA/RNA"
  source: /note="5' tri-ethylene glycol (TEG)"
  modified_base (2)..(2): 5-methyl modified nucleotide
  modified_base (3)..(3): 5-methyl modified nucleotide
  modified_base (6)..(6): 5-methyl modified nucleotide
  modified_base (9)..(9): 5-methyl modified nucleotide
  modified_base (21)..(21): 5-methyl modified nucleotide
  modified_base (26)..(26): 5-methyl modified nucleotide
  modified_base (27)..(27): bicyclic nucleic acid (BNA)
  source: /note="3' tri-ethylene glycol (TEG)"
uccaacaucaaggaagauggcauuuct

SEQ ID NO: 15745 - RNA, 26 nt, Artificial Sequence
  source: /note="Description of Artificial Sequence: Synthetic oligonucleotide"
  source: /note="RNA"
  source: /note="5' tri-ethylene glycol (TEG)"
  modified_base (2)..(2): 5-methyl modified nucleotide
  modified_base (3)..(3): 5-methyl modified nucleotide
  modified_base (6)..(6): 5-methyl modified nucleotide
  modified_base (9)..(9): 5-methyl modified nucleotide
  modified_base (21)..(21): 5-methyl modified nucleotide
  modified_base (26)..(26): 5-methyl bicyclic nucleic acid
  source: /note="3' tri-ethylene glycol (TEG)"
uccaacaucaaggaagauggcauuuc

SEQ ID NO: 15746 - DNA, 25 bp, Artificial Sequence
  source: /note="Description of Artificial Sequence: Synthetic oligonucleotide"
  source: /note="Description of Combined DNA/RNA Molecule: Synthetic oligonucleotide"
  source: /note="DNA/RNA"
  source: /note="5' tri-ethylene glycol (TEG)"
  modified_base (2)..(2): 5-methyl modified nucleotide
  modified_base (3)..(3): 5-methyl modified nucleotide
  modified_base (6)..(6): 5-methyl modified nucleotide
  modified_base (9)..(9): 5-methyl modified nucleotide
  modified_base (21)..(21): 5-methyl modified nucleotide
  modified_base (25)..(25): bicyclic nucleic acid (BNA)
  source: /note="3' tri-ethylene glycol (TEG)"
uccaacaucaaggaagauggcauut

SEQ ID NO: 15747 - DNA, 24 bp, Artificial Sequence
  source: /note="Description of Artificial Sequence: Synthetic oligonucleotide"
  source: /note="Description of Combined DNA/RNA Molecule: Synthetic oligonucleotide"
  source: /note="DNA/RNA"
  source: /note="5' tri-ethylene glycol (TEG)"
  modified_base (2)..(2): 5-methyl modified nucleotide
  modified_base (3)..(3): 5-methyl modified nucleotide
  modified_base (6)..(6): 5-methyl modified nucleotide
  modified_base (9)..(9): 5-methyl modified nucleotide
  modified_base (21)..(21): 5-methyl modified nucleotide
  modified_base (24)..(24): bicyclic nucleic acid (BNA)
  source: /note="3' tri-ethylene glycol (TEG)"
uccaacaucaaggaagauggcaut

SEQ ID NO: 15748 - DNA, 23 bp, Artificial Sequence
  source: /note="Description of Artificial Sequence: Synthetic oligonucleotide"
  source: /note="Description of Combined DNA/RNA Molecule: Synthetic oligonucleotide"
  source: /note="DNA/RNA"
  source: /note="5' tri-ethylene glycol (TEG)"
  modified_base (2)..(2): 5-methyl modified nucleotide
  modified_base (3)..(3): 5-methyl modified nucleotide
  modified_base (6)..(6): 5-methyl modified nucleotide
  modified_base (9)..(9): 5-methyl modified nucleotide
  modified_base (21)..(21): 5-methyl modified nucleotide
  modified_base (23)..(23): bicyclic nucleic acid (BNA)
  source: /note="3' tri-ethylene glycol (TEG)"
uccaacaucaaggaagauggcat

SEQ ID NO: 15749 - RNA, 22 nt, Artificial Sequence
  source: /note="Description of Artificial Sequence: Synthetic oligonucleotide"
  source: /note="RNA"
  source: /note="5' tri-ethylene glycol (TEG)"
  modified_base (2)..(2): 5-methyl modified nucleotide
  modified_base (3)..(3): 5-methyl modified nucleotide
  modified_base (6)..(6): 5-methyl modified nucleotide
  modified_base (9)..(9): 5-methyl modified nucleotide
  modified_base (21)..(21): 5-methyl modified nucleotide
  modified_base (22)..(22): bicyclic nucleic acid (BNA)
  source: /note="3' tri-ethylene glycol (TEG)"
uccaacaucaaggaagauggca

SEQ ID NO: 15750 - RNA, 21 nt, Artificial Sequence
  source: /note="Description of Artificial Sequence: Synthetic oligonucleotide"
  source: /note="RNA"
  source: /note="5' tri-ethylene glycol (TEG)"
  modified_base (2)..(2): 5-methyl modified nucleotide
  modified_base (3)..(3): 5-methyl modified nucleotide
  modified_base (6)..(6): 5-methyl modified nucleotide
  modified_base (9)..(9): 5-methyl modified nucleotide
  modified_base (21)..(21): 5-methyl bicyclic nucleic acid
  source: /note="3' tri-ethylene glycol (TEG)"
uccaacaucaaggaagauggc

SEQ ID NO: 15751 - RNA, 20 nt, Artificial Sequence
  source: /note="Description of Artificial Sequence: Synthetic oligonucleotide"
  source: /note="RNA"
  source: /note="5' tri-ethylene glycol (TEG)"
  modified_base (2)..(2): 5-methyl modified nucleotide
  modified_base (3)..(3): 5-methyl modified nucleotide
  modified_base (6)..(6): 5-methyl modified nucleotide
  modified_base (9)..(9): 5-methyl modified nucleotide
  modified_base (20)..(20): bicyclic nucleic acid (BNA)
  source: /note="3' tri-ethylene glycol (TEG)"
uccaacaucaaggaagaugg

SEQ ID NO: 15752 - RNA, 19 nt, Artificial Sequence
  source: /note="Description of Artificial Sequence: Synthetic oligonucleotide"
  source: /note="RNA"
  source: /note="5' tri-ethylene glycol (TEG)"
  modified_base (2)..(2): 5-methyl modified nucleotide
  modified_base (3)..(3): 5-methyl modified nucleotide
  modified_base (6)..(6): 5-methyl modified nucleotide
  modified_base (9)..(9): 5-methyl modified nucleotide
  modified_base (19)..(19): bicyclic nucleic acid (BNA)
  source: /note="3' tri-ethylene glycol (TEG)"
uccaacaucaaggaagaug

SEQ ID NO: 15753 - DNA, 18 bp, Artificial Sequence
  source: /note="Description of Artificial Sequence: Synthetic oligonucleotide"
  source: /note="Description of Combined DNA/RNA Molecule: Synthetic oligonucleotide"
  source: /note="DNA/RNA"
  source: /note="5' tri-ethylene glycol (TEG)"
  modified_base (2)..(2): 5-methyl modified nucleotide
  modified_base (3)..(3): 5-methyl modified nucleotide
  modified_base (6)..(6): 5-methyl modified nucleotide
  modified_base (9)..(9): 5-methyl modified nucleotide
  modified_base (18)..(18): bicyclic nucleic acid (BNA)
  source: /note="3' tri-ethylene glycol (TEG)"
uccaacaucaaggaagat

SEQ ID NO: 15754 - RNA, 17 nt, Artificial Sequence
  source: /note="Description of Artificial Sequence: Synthetic oligonucleotide"
  source: /note="RNA"
  source: /note="5' tri-ethylene glycol (TEG)"
  modified_base (2)..(2): 5-methyl modified nucleotide
  modified_base (3)..(3): 5-methyl modified nucleotide
  modified_base (6)..(6): 5-methyl modified nucleotide
  modified_base (9)..(9): 5-methyl modified nucleotide
  modified_base (17)..(17): bicyclic nucleic acid (BNA)
  source: /note="3' tri-ethylene glycol (TEG)"
uccaacaucaaggaaga

SEQ ID NO: 15755 - RNA, 16 nt, Artificial Sequence
  source: /note="Description of Artificial Sequence: Synthetic oligonucleotide"
  source: /note="RNA"
  source: /note="5' tri-ethylene glycol (TEG)"
  modified_base (2)..(2): 5-methyl modified nucleotide
  modified_base (3)..(3): 5-methyl modified nucleotide
  modified_base (6)..(6): 5-methyl modified nucleotide
  modified_base (9)..(9): 5-methyl modified nucleotide
  modified_base (16)..(16): bicyclic nucleic acid (BNA)
  source: /note="3' tri-ethylene glycol (TEG)"
uccaacaucaaggaag

SEQ ID NO: 15756 - RNA, 28 nt, Artificial Sequence
  source: /note="Description of Artificial Sequence: Synthetic oligonucleotide"
  source: /note="RNA"
  source: /note="5' tri-ethylene glycol (TEG)"
  modified_base (1)..(1): 5-methyl modified nucleotide
  modified_base (2)..(2): 5-methyl modified nucleotide
  modified_base (5)..(5): 5-methyl modified nucleotide
  modified_base (8)..(8): 5-methyl modified nucleotide
  modified_base (20)..(20): 5-methyl modified nucleotide
  modified_base (25)..(25): 5-methyl modified nucleotide
  modified_base (28)..(28): bicyclic nucleic acid (BNA)
  source: /note="3' tri-ethylene glycol (TEG)"
ccaacaucaaggaagauggcauuucuag

SEQ ID NO: 15757 - RNA, 27 nt, Artificial Sequence
  source: /note="Description of Artificial Sequence: Synthetic oligonucleotide"
  source: /note="RNA"
  source: /note="5' tri-ethylene glycol (TEG)"
  modified_base (1)..(1): 5-methyl modified nucleotide
  modified_base (2)..(2): 5-methyl modified nucleotide
  modified_base (5)..(5): 5-methyl modified nucleotide
  modified_base (8)..(8): 5-methyl modified nucleotide
  modified_base (20)..(20): 5-methyl modified nucleotide
  modified_base (25)..(25): 5-methyl modified nucleotide
  modified_base (27)..(27): bicyclic nucleic acid (BNA)
  source: /note="3' tri-ethylene glycol (TEG)"
ccaacaucaaggaagauggcauuucua

SEQ ID NO: 15758 - DNA, 26 bp, Artificial Sequence
  source: /note="Description of Artificial Sequence: Synthetic oligonucleotide"
  source: /note="Description of Combined DNA/RNA Molecule: Synthetic oligonucleotide"
  source: /note="DNA/RNA"
  source: /note="5' tri-ethylene glycol (TEG)"
  modified_base (1)..(1): 5-methyl modified nucleotide
  modified_base (2)..(2): 5-methyl modified nucleotide
  modified_base (5)..(5): 5-methyl modified nucleotide
  modified_base (8)..(8): 5-methyl modified nucleotide
  modified_base (20)..(20): 5-methyl modified nucleotide
  modified_base (25)..(25): 5-methyl modified nucleotide
  modified_base (26)..(26): bicyclic nucleic acid (BNA)
  source: /note="3' tri-ethylene glycol (TEG)"
ccaacaucaaggaagauggcauuuct

SEQ ID NO: 15759 - RNA, 25 nt, Artificial Sequence
  source: /note="Description of Artificial Sequence: Synthetic oligonucleotide"
  source: /note="RNA"
  source: /note="5' tri-ethylene glycol (TEG)"
  modified_base (1)..(1): 5-methyl modified nucleotide
  modified_base (2)..(2): 5-methyl modified nucleotide
  modified_base (5)..(5): 5-methyl modified nucleotide
  modified_base (8)..(8): 5-methyl modified nucleotide
  modified_base (20)..(20): 5-methyl modified nucleotide
  modified_base (25)..(25): 5-methyl bicyclic nucleic acid
  source: /note="3' tri-ethylene glycol (TEG)"
ccaacaucaaggaagauggcauuuc

SEQ ID NO: 15760 - DNA, 24 bp, Artificial Sequence
  source: /note="Description of Artificial Sequence: Synthetic oligonucleotide"
  source: /note="Description of Combined DNA/RNA Molecule: Synthetic oligonucleotide"
  source: /note="DNA/RNA"
  source: /note="5' tri-ethylene glycol (TEG)"
  modified_base (1)..(1): 5-methyl modified nucleotide
  modified_base (2)..(2): 5-methyl modified nucleotide
  modified_base (5)..(5): 5-methyl modified nucleotide
  modified_base (8)..(8): 5-methyl modified nucleotide
  modified_base (20)..(20): 5-methyl modified nucleotide
  modified_base (24)..(24): bicyclic nucleic acid (BNA)
  source: /note="3' tri-ethylene glycol (TEG)"
ccaacaucaaggaagauggcauut

SEQ ID NO: 15761 - DNA, 23 bp, Artificial Sequence
  source: /note="Description of Artificial Sequence: Synthetic oligonucleotide"
  source: /note="Description of Combined DNA/RNA Molecule: Synthetic oligonucleotide"
  source: /note="DNA/RNA"
  source: /note="5' tri-ethylene glycol (TEG)"
  modified_base (1)..(1): 5-methyl modified nucleotide
  modified_base (2)..(2): 5-methyl modified nucleotide
  modified_base (5)..(5): 5-methyl modified nucleotide
  modified_base (8)..(8): 5-methyl modified nucleotide
  modified_base (20)..(20): 5-methyl modified nucleotide
  modified_base (23)..(23): bicyclic nucleic acid (BNA)
  source: /note="3' tri-ethylene glycol (TEG)"
ccaacaucaaggaagauggcaut

SEQ ID NO: 15762 - DNA, 22 bp, Artificial Sequence
  source: /note="Description of Artificial Sequence: Synthetic oligonucleotide"
  source: /note="Description of Combined DNA/RNA Molecule: Synthetic oligonucleotide"
  source: /note="DNA/RNA"
  source: /note="5' tri-ethylene glycol (TEG)"
  modified_base (1)..(1): 5-methyl modified nucleotide
  modified_base (2)..(2): 5-methyl modified nucleotide
  modified_base (5)..(5): 5-methyl modified nucleotide
  modified_base (8)..(8): 5-methyl modified nucleotide
  modified_base (20)..(20): 5-methyl modified nucleotide
  modified_base (22)..(22): bicyclic nucleic acid (BNA)
  source: /note="3' tri-ethylene glycol (TEG)"
ccaacaucaaggaagauggcat

SEQ ID NO: 15763 - RNA, 21 nt, Artificial Sequence
  source: /note="Description of Artificial Sequence: Synthetic oligonucleotide"
  source: /note="RNA"
  source: /note="5' tri-ethylene glycol (TEG)"
  modified_base (1)..(1): 5-methyl modified nucleotide
  modified_base (2)..(2): 5-methyl modified nucleotide
  modified_base (5)..(5): 5-methyl modified nucleotide
  modified_base (8)..(8): 5-methyl modified nucleotide
  modified_base (20)..(20): 5-methyl modified nucleotide
  modified_base (21)..(21): bicyclic nucleic acid (BNA)
  source: /note="3' tri-ethylene glycol (TEG)"
ccaacaucaaggaagauggca

SEQ ID NO: 15764 - RNA, 20 nt, Artificial Sequence
  source: /note="Description of Artificial Sequence: Synthetic oligonucleotide"
  source: /note="RNA"
  source: /note="5' tri-ethylene glycol (TEG)"
  modified_base (1)..(1): 5-methyl modified nucleotide
  modified_base (2)..(2): 5-methyl modified nucleotide
  modified_base (5)..(5): 5-methyl modified nucleotide
  modified_base (8)..(8): 5-methyl modified nucleotide
  modified_base (20)..(20): 5-methyl bicyclic nucleic acid
  source: /note="3' tri-ethylene glycol (TEG)"
ccaacaucaaggaagauggc

SEQ ID NO: 15765 - RNA, 19 nt, Artificial Sequence
  source: /note="Description of Artificial Sequence: Synthetic oligonucleotide"
  source: /note="RNA"
  source: /note="5' tri-ethylene glycol (TEG)"
  modified_base (1)..(1): 5-methyl modified nucleotide
  modified_base (2)..(2): 5-methyl modified nucleotide
  modified_base (5)..(5): 5-methyl modified nucleotide
  modified_base (8)..(8): 5-methyl modified nucleotide
  modified_base (19)..(19): bicyclic nucleic acid (BNA)
  source: /note="3' tri-ethylene glycol (TEG)"
ccaacaucaaggaagaugg

SEQ ID NO: 15766 - RNA, 18 nt, Artificial Sequence
  source: /note="Description of Artificial Sequence: Synthetic oligonucleotide"
  source: /note="RNA"
  source: /note="5' tri-ethylene glycol (TEG)"
  modified_base (1)..(1): 5-methyl modified nucleotide
  modified_base (2)..(2): 5-methyl modified nucleotide
  modified_base (5)..(5): 5-methyl modified nucleotide
  modified_base (8)..(8): 5-methyl modified nucleotide
  modified_base (18)..(18): bicyclic nucleic acid (BNA)
  source: /note="3' tri-ethylene glycol (TEG)"
ccaacaucaaggaagaug

SEQ ID NO: 15767 - DNA, 17 bp, Artificial Sequence
  source: /note="Description of Artificial Sequence: Synthetic oligonucleotide"
  source: /note="Description of Combined DNA/RNA Molecule: Synthetic oligonucleotide"
  source: /note="DNA/RNA"
  source: /note="5' tri-ethylene glycol (TEG)"
  modified_base (1)..(1): 5-methyl modified nucleotide
  modified_base (2)..(2): 5-methyl modified nucleotide
  modified_base (5)..(5): 5-methyl modified nucleotide
  modified_base (8)..(8): 5-methyl modified nucleotide
  modified_base (17)..(17): bicyclic nucleic acid (BNA)
  source: /note="3' tri-ethylene glycol (TEG)"
ccaacaucaaggaagat

SEQ ID NO: 15768 - RNA, 16 nt, Artificial Sequence
  source: /note="Description of Artificial Sequence: Synthetic oligonucleotide"
  source: /note="RNA"
  source: /note="5' tri-ethylene glycol (TEG)"
  modified_base (1)..(1): 5-methyl modified nucleotide
  modified_base (2)..(2): 5-methyl modified nucleotide
  modified_base (5)..(5): 5-methyl modified nucleotide
  modified_base (8)..(8): 5-methyl modified nucleotide
  modified_base (16)..(16): bicyclic nucleic acid (BNA)
  source: /note="3' tri-ethylene glycol (TEG)"
ccaacaucaaggaaga

SEQ ID NO: 15769 - RNA, 15 nt, Artificial Sequence
  source: /note="Description of Artificial Sequence: Synthetic oligonucleotide"
  source: /note="RNA"
  source: /note="5' tri-ethylene glycol (TEG)"
  modified_base (1)..(1): 5-methyl modified nucleotide
  modified_base (2)..(2): 5-methyl modified nucleotide
  modified_base (5)..(5): 5-methyl modified nucleotide
  modified_base (8)..(8): 5-methyl modified nucleotide
  modified_base (15)..(15): bicyclic nucleic acid (BNA)
  source: /note="3' tri-ethylene glycol (TEG)"
ccaacaucaaggaag

SEQ ID NO: 15770 - RNA, 27 nt, Artificial Sequence
  source: /note="Description of Artificial Sequence: Synthetic oligonucleotide"
  source: /note="RNA"
  source: /note="5' tri-ethylene glycol (TEG)"
  modified_base (1)..(1): 5-methyl modified nucleotide
  modified_base (4)..(4): 5-methyl modified nucleotide
  modified_base (7)..(7): 5-methyl modified nucleotide
  modified_base (19)..(19): 5-methyl modified nucleotide
  modified_base (24)..(24): 5-methyl modified nucleotide
  modified_base (27)..(27): bicyclic nucleic acid (BNA)
  source: /note="3' tri-ethylene glycol (TEG)"
caacaucaaggaagauggcauuucuag

SEQ ID NO: 15771 - RNA, 26 nt, Artificial Sequence
  source: /note="Description of Artificial Sequence: Synthetic oligonucleotide"
  source: /note="RNA"
  source: /note="5' tri-ethylene glycol (TEG)"
  modified_base (1)..(1): 5-methyl modified nucleotide
  modified_base (4)..(4): 5-methyl modified nucleotide
  modified_base (7)..(7): 5-methyl modified nucleotide
  modified_base (19)..(19): 5-methyl modified nucleotide
  modified_base (24)..(24): 5-methyl modified nucleotide
  modified_base (26)..(26): bicyclic nucleic acid (BNA)
  source: /note="3' tri-ethylene glycol (TEG)"
caacaucaaggaagauggcauuucua

SEQ ID NO: 15772 - DNA, 25 bp, Artificial Sequence
  source: /note="Description of Artificial Sequence: Synthetic oligonucleotide"
  source: /note="Description of Combined DNA/RNA Molecule: Synthetic oligonucleotide"
  source: /note="DNA/RNA"
  source: /note="5' tri-ethylene glycol (TEG)"
  modified_base (1)..(1): 5-methyl modified nucleotide
  modified_base (4)..(4): 5-methyl modified nucleotide
  modified_base (7)..(7): 5-methyl modified nucleotide
  modified_base (19)..(19): 5-methyl modified nucleotide
  modified_base (24)..(24): 5-methyl modified nucleotide
  modified_base (25)..(25): bicyclic nucleic acid (BNA)
  source: /note="3' tri-ethylene glycol (TEG)"
caacaucaaggaagauggcauuuct

SEQ ID NO: 15773 - RNA, 24 nt, Artificial Sequence
  source: /note="Description of Artificial Sequence: Synthetic oligonucleotide"
  source: /note="RNA"
  source: /note="5' tri-ethylene glycol (TEG)"
  modified_base (1)..(1): 5-methyl modified nucleotide
  modified_base (4)..(4): 5-methyl modified nucleotide
  modified_base (7)..(7): 5-methyl modified nucleotide
  modified_base (19)..(19): 5-methyl modified nucleotide
  modified_base (24)..(24): 5-methyl bicyclic nucleic acid
  source: /note="3' tri-ethylene glycol (TEG)"
caacaucaaggaagauggcauuuc

SEQ ID NO: 15774 - DNA, 23 bp, Artificial Sequence
  source: /note="Description of Artificial Sequence: Synthetic oligonucleotide"
  source: /note="Description of Combined DNA/RNA Molecule: Synthetic oligonucleotide"
  source: /note="DNA/RNA"
  source: /note="5' tri-ethylene glycol (TEG)"
  modified_base (1)..(1): 5-methyl modified nucleotide
  modified_base (4)..(4): 5-methyl modified nucleotide
  modified_base (7)..(7): 5-methyl modified nucleotide
  modified_base (19)..(19): 5-methyl modified nucleotide
  modified_base (23)..(23): bicyclic nucleic acid (BNA)
  source: /note="3' tri-ethylene glycol (TEG)"
caacaucaaggaagauggcauut

SEQ ID NO: 15775 - DNA, 22 bp, Artificial Sequence
  source: /note="Description of Artificial Sequence: Synthetic oligonucleotide"
  source: /note="Description of Combined DNA/RNA Molecule: Synthetic oligonucleotide"
  source: /note="DNA/RNA"
  source: /note="5' tri-ethylene glycol (TEG)"
  modified_base (1)..(1): 5-methyl modified nucleotide
  modified_base (4)..(4): 5-methyl modified nucleotide
  modified_base (7)..(7): 5-methyl modified nucleotide
  modified_base (19)..(19): 5-methyl modified nucleotide
  modified_base (22)..(22): bicyclic nucleic acid (BNA)
  source: /note="3' tri-ethylene glycol (TEG)"
caacaucaaggaagauggcaut

SEQ ID NO: 15776 - DNA, 21 bp, Artificial Sequence
  source: /note="Description of Artificial Sequence: Synthetic oligonucleotide"
  source: /note="Description of Combined DNA/RNA Molecule: Synthetic oligonucleotide"
  source: /note="DNA/RNA"
  source: /note="5' tri-ethylene glycol (TEG)"
  modified_base (1)..(1): 5-methyl modified nucleotide
  modified_base (4)..(4): 5-methyl modified nucleotide
  modified_base (7)..(7): 5-methyl modified nucleotide
  modified_base (19)..(19): 5-methyl modified nucleotide
  modified_base (21)..(21): bicyclic nucleic acid (BNA)
  source: /note="3' tri-ethylene glycol (TEG)"
caacaucaaggaagauggcat

SEQ ID NO: 15777 - RNA, 20 nt, Artificial Sequence
  source: /note="Description of Artificial Sequence: Synthetic oligonucleotide"
  source: /note="RNA"
  source: /note="5' tri-ethylene glycol (TEG)"
  modified_base (1)..(1): 5-methyl modified nucleotide
  modified_base (4)..(4): 5-methyl modified nucleotide
  modified_base (7)..(7): 5-methyl modified nucleotide
  modified_base (19)..(19): 5-methyl modified nucleotide
  modified_base (20)..(20): bicyclic nucleic acid (BNA)
  source: /note="3' tri-ethylene glycol (TEG)"
caacaucaaggaagauggca

SEQ ID NO: 15778 - RNA, 19 nt, Artificial Sequence
  source: /note="Description of Artificial Sequence: Synthetic oligonucleotide"
  source: /note="RNA"
  source: /note="5' tri-ethylene glycol (TEG)"
  modified_base (1)..(1): 5-methyl modified nucleotide
  modified_base (4)..(4): 5-methyl modified nucleotide
  modified_base (7)..(7): 5-methyl modified nucleotide
  modified_base (19)..(19): 5-methyl bicyclic nucleic acid
  source: /note="3' tri-ethylene glycol (TEG)"
caacaucaaggaagauggc

SEQ ID NO: 15779 - RNA, 18 nt, Artificial Sequence
  source: /note="Description of Artificial Sequence: Synthetic oligonucleotide"
  source: /note="RNA"
  source: /note="5' tri-ethylene glycol (TEG)"
  modified_base (1)..(1): 5-methyl modified nucleotide
  modified_base (4)..(4): 5-methyl modified nucleotide
  modified_base (7)..(7): 5-methyl modified nucleotide
  modified_base (18)..(18): bicyclic nucleic acid (BNA)
  source: /note="3' tri-ethylene glycol (TEG)"
caacaucaaggaagaugg

SEQ ID NO: 15780 - RNA, 17 nt, Artificial Sequence
  source: /note="Description of Artificial Sequence: Synthetic oligonucleotide"
  source: /note="RNA"
  source: /note="5' tri-ethylene glycol (TEG)"
  modified_base (1)..(1): 5-methyl modified nucleotide
  modified_base (4)..(4): 5-methyl modified nucleotide
  modified_base (7)..(7): 5-methyl modified nucleotide
  modified_base (17)..(17): bicyclic nucleic acid (BNA)
  source: /note="3' tri-ethylene glycol (TEG)"
caacaucaaggaagaug

SEQ ID NO: 15781 - DNA, 16 bp, Artificial Sequence
  source: /note="Description of Artificial Sequence: Synthetic oligonucleotide"
  source: /note="Description of Combined DNA/RNA Molecule: Synthetic oligonucleotide"
  source: /note="DNA/RNA"
  source: /note="5' tri-ethylene glycol (TEG)"
  modified_base (1)..(1): 5-methyl modified nucleotide
  modified_base (4)..(4): 5-methyl modified nucleotide
  modified_base (7)..(7): 5-methyl modified nucleotide
  modified_base (16)..(16): bicyclic nucleic acid (BNA)
  source: /note="3' tri-ethylene glycol (TEG)"
caacaucaaggaagat

SEQ ID NO: 15782 - RNA, 15 nt, Artificial Sequence
  source: /note="Description of Artificial Sequence: Synthetic oligonucleotide"
  source: /note="RNA"
  source: /note="5' tri-ethylene glycol (TEG)"
  modified_base (1)..(1): 5-methyl modified nucleotide
  modified_base (4)..(4): 5-methyl modified nucleotide
  modified_base (7)..(7): 5-methyl modified nucleotide
  modified_base (15)..(15): bicyclic nucleic acid (BNA)
  source: /note="3' tri-ethylene glycol (TEG)"
caacaucaaggaaga

SEQ ID NO: 15783 - RNA, 14 nt, Artificial Sequence
  source: /note="Description of Artificial Sequence: Synthetic oligonucleotide"
  source: /note="RNA"
  source: /note="5' tri-ethylene glycol (TEG)"
  modified_base (1)..(1): 5-methyl modified nucleotide
  modified_base (4)..(4): 5-methyl modified nucleotide
  modified_base (7)..(7): 5-methyl modified nucleotide
  modified_base (14)..(14): bicyclic nucleic acid (BNA)
  source: /note="3' tri-ethylene glycol (TEG)"
caacaucaaggaag

SEQ ID NO: 15784 - RNA, 26 nt, Artificial Sequence
  source: /note="Description of Artificial Sequence: Synthetic oligonucleotide"
  source: /note="RNA"
  source: /note="5' tri-ethylene glycol (TEG)"
  modified_base (3)..(3): 5-methyl modified nucleotide
  modified_base (6)..(6): 5-methyl modified nucleotide
  modified_base (18)..(18): 5-methyl modified nucleotide
  modified_base (23)..(23): 5-methyl modified nucleotide
  modified_base (26)..(26): bicyclic nucleic acid (BNA)
  source: /note="3' tri-ethylene glycol (TEG)"
aacaucaaggaagauggcauuucuag

SEQ ID NO: 15785 - RNA, 25 nt, Artificial Sequence
  source: /note="Description of Artificial Sequence: Synthetic oligonucleotide"
  source: /note="RNA"
  source: /note="5' tri-ethylene glycol (TEG)"
  modified_base (3)..(3): 5-methyl modified nucleotide
  modified_base (6)..(6): 5-methyl modified nucleotide
  modified_base (18)..(18): 5-methyl modified nucleotide
  modified_base (23)..(23): 5-methyl modified nucleotide
  modified_base (25)..(25): bicyclic nucleic acid (BNA)
  source: /note="3' tri-ethylene glycol (TEG)"
aacaucaaggaagauggcauuucua

SEQ ID NO: 15786 - DNA, 24 bp, Artificial Sequence
  source: /note="Description of Artificial Sequence: Synthetic oligonucleotide"
  source: /note="Description of Combined DNA/RNA Molecule: Synthetic oligonucleotide"
  source: /note="DNA/RNA"
  source: /note="5' tri-ethylene glycol (TEG)"
  modified_base (3)..(3): 5-methyl modified nucleotide
  modified_base (6)..(6): 5-methyl modified nucleotide
  modified_base (18)..(18): 5-methyl modified nucleotide
  modified_base (23)..(23): 5-methyl modified nucleotide
  modified_base (24)..(24): bicyclic nucleic acid (BNA)
  source: /note="3' tri-ethylene glycol (TEG)"
aacaucaaggaagauggcauuuct

SEQ ID NO: 15787 - RNA, 23 nt, Artificial Sequence
  source: /note="Description of Artificial Sequence: Synthetic oligonucleotide"
  source: /note="RNA"
  source: /note="5' tri-ethylene glycol (TEG)"
  modified_base (3)..(3): 5-methyl modified nucleotide
  modified_base (6)..(6): 5-methyl modified nucleotide
  modified_base (18)..(18): 5-methyl modified nucleotide
  modified_base (23)..(23): 5-methyl bicyclic nucleic acid
  source: /note="3' tri-ethylene glycol (TEG)"
aacaucaaggaagauggcauuuc

SEQ ID NO: 15788 - DNA, 22 bp, Artificial Sequence
  source: /note="Description of Artificial Sequence: Synthetic oligonucleotide"
  source: /note="Description of Combined DNA/RNA Molecule: Synthetic oligonucleotide"
  source: /note="DNA/RNA"
  source: /note="5' tri-ethylene glycol (TEG)"
  modified_base (3)..(3): 5-methyl modified nucleotide
  modified_base (6)..(6): 5-methyl modified nucleotide
  modified_base (18)..(18): 5-methyl modified nucleotide
  modified_base (22)..(22): bicyclic nucleic acid (BNA)
  source: /note="3' tri-ethylene glycol (TEG)"
aacaucaaggaagauggcauut

SEQ ID NO: 15789 - DNA, 21 bp, Artificial Sequence
  source: /note="Description of Artificial Sequence: Synthetic oligonucleotide"
  source: /note="Description of Combined DNA/RNA Molecule: Synthetic oligonucleotide"
  source: /note="DNA/RNA"
  source: /note="5' tri-ethylene glycol (TEG)"
  modified_base (3)..(3): 5-methyl modified nucleotide
  modified_base (6)..(6): 5-methyl modified nucleotide
  modified_base (18)..(18): 5-methyl modified nucleotide
  modified_base (21)..(21): bicyclic nucleic acid (BNA)
  source: /note="3' tri-ethylene glycol (TEG)"
aacaucaaggaagauggcaut

SEQ ID NO: 15790 - DNA, 20 bp, Artificial Sequence
  source: /note="Description of Artificial Sequence: Synthetic oligonucleotide"
  source: /note="Description of Combined DNA/RNA Molecule: Synthetic oligonucleotide"
  source: /note="DNA/RNA"
  source: /note="5' tri-ethylene glycol (TEG)"
  modified_base (3)..(3): 5-methyl modified nucleotide
  modified_base (6)..(6): 5-methyl modified nucleotide
  modified_base (18)..(18): 5-methyl modified nucleotide
  modified_base (20)..(20): bicyclic nucleic acid (BNA)
  source: /note="3' tri-ethylene glycol (TEG)"
aacaucaaggaagauggcat

SEQ ID NO: 15791 - RNA, 19 nt, Artificial Sequence
  source: /note="Description of Artificial Sequence: Synthetic oligonucleotide"
  source: /note="RNA"
  source: /note="5' tri-ethylene glycol (TEG)"
  modified_base (3)..(3): 5-methyl modified nucleotide
  modified_base (6)..(6): 5-methyl modified nucleotide
  modified_base (18)..(18): 5-methyl modified nucleotide
  modified_base (19)..(19): bicyclic nucleic acid (BNA)
  source: /note="3' tri-ethylene glycol (TEG)"
aacaucaaggaagauggca

SEQ ID NO: 15792 - RNA, 18 nt, Artificial Sequence
  source: /note="Description of Artificial Sequence: Synthetic oligonucleotide"
  source: /note="RNA"
  source: /note="5' tri-ethylene glycol (TEG)"
  modified_base (3)..(3): 5-methyl modified nucleotide
  modified_base (6)..(6): 5-methyl modified nucleotide
  modified_base (18)..(18): 5-methyl bicyclic nucleic acid
  source: /note="3' tri-ethylene glycol (TEG)"
aacaucaaggaagauggc

SEQ ID NO: 15793 - RNA, 17 nt, Artificial Sequence
  source: /note="Description of Artificial Sequence: Synthetic oligonucleotide"
  source: /note="RNA"
  source: /note="5' tri-ethylene glycol (TEG)"
  modified_base (3)..(3): 5-methyl modified nucleotide
  modified_base (6)..(6): 5-methyl modified nucleotide
  modified_base (17)..(17): bicyclic nucleic acid (BNA)
  source: /note="3' tri-ethylene glycol (TEG)"
aacaucaaggaagaugg

SEQ ID NO: 15794 - RNA, 16 nt, Artificial Sequence
  source: /note="Description of Artificial Sequence: Synthetic oligonucleotide"
  source: /note="RNA"
  source: /note="5' tri-ethylene glycol (TEG)"
  modified_base (3)..(3): 5-methyl modified nucleotide
  modified_base (6)..(6): 5-methyl modified nucleotide
  modified_base (16)..(16): bicyclic nucleic acid (BNA)
  source: /note="3' tri-ethylene glycol (TEG)"
aacaucaaggaagaug

SEQ ID NO: 15795 - DNA, 15 bp, Artificial Sequence
  source: /note="Description of Artificial Sequence: Synthetic oligonucleotide"
  source: /note="Description of Combined DNA/RNA Molecule: Synthetic oligonucleotide"
  source: /note="DNA/RNA"
  source: /note="5' tri-ethylene glycol (TEG)"
  modified_base (3)..(3): 5-methyl modified nucleotide
  modified_base (6)..(6): 5-methyl modified nucleotide
  modified_base (15)..(15): bicyclic nucleic acid (BNA)
  source: /note="3' tri-ethylene glycol (TEG)"
aacaucaaggaagat

SEQ ID NO: 15796 - RNA, 14 nt, Artificial Sequence
  source: /note="Description of Artificial Sequence: Synthetic oligonucleotide"
  source: /note="RNA"
  source: /note="5' tri-ethylene glycol (TEG)"
  modified_base (3)..(3): 5-methyl modified nucleotide
  modified_base (6)..(6): 5-methyl modified nucleotide
  modified_base (14)..(14): bicyclic nucleic acid (BNA)
  source: /note="3' tri-ethylene glycol (TEG)"
aacaucaaggaaga

SEQ ID NO: 15797 - RNA, 13 nt, Artificial Sequence
  source: /note="Description of Artificial Sequence: Synthetic oligonucleotide"
  source: /note="RNA"
  source: /note="5' tri-ethylene glycol (TEG)"
  modified_base (3)..(3): 5-methyl modified nucleotide
  modified_base (6)..(6): 5-methyl modified nucleotide
  modified_base (13)..(13): bicyclic nucleic acid (BNA)
  source: /note="3' tri-ethylene glycol (TEG)"
aacaucaaggaag

SEQ ID NO: 15798 - RNA, 25 nt, Artificial Sequence
  source: /note="Description of Artificial Sequence: Synthetic oligonucleotide"
  source: /note="RNA"
  source: /note="5' tri-ethylene glycol (TEG)"
  modified_base (2)..(2): 5-methyl modified nucleotide
  modified_base (5)..(5): 5-methyl modified nucleotide
  modified_base (17)..(17): 5-methyl modified nucleotide
  modified_base (22)..(22): 5-methyl modified nucleotide
  modified_base (25)..(25): bicyclic nucleic acid (BNA)
  source: /note="3' tri-ethylene glycol (TEG)"
acaucaaggaagauggcauuucuag

SEQ ID NO: 15799 - RNA, 24 nt, Artificial Sequence
  source: /note="Description of Artificial Sequence: Synthetic oligonucleotide"
  source: /note="RNA"
  source: /note="5' tri-ethylene glycol (TEG)"
  modified_base (2)..(2): 5-methyl modified nucleotide
  modified_base (5)..(5): 5-methyl modified nucleotide
  modified_base (17)..(17): 5-methyl modified nucleotide
  modified_base (22)..(22): 5-methyl modified nucleotide
  modified_base (24)..(24): bicyclic nucleic acid (BNA)
  source: /note="3' tri-ethylene glycol (TEG)"
acaucaaggaagauggcauuucua

SEQ ID NO: 15800 - DNA, 23 bp, Artificial Sequence
  source: /note="Description of Artificial Sequence: Synthetic oligonucleotide"
  source: /note="Description of Combined DNA/RNA Molecule: Synthetic oligonucleotide"
  source: /note="DNA/RNA"
  source: /note="5' tri-ethylene glycol (TEG)"
  modified_base (2)..(2): 5-methyl modified nucleotide
  modified_base (5)..(5): 5-methyl modified nucleotide
  modified_base (17)..(17): 5-methyl modified nucleotide
  modified_base (22)..(22): 5-methyl modified nucleotide
  modified_base (23)..(23): bicyclic nucleic acid (BNA)
  source: /note="3' tri-ethylene glycol (TEG)"
acaucaaggaagauggcauuuct

SEQ ID NO: 15801 - RNA, 22 nt, Artificial Sequence
  source: /note="Description of Artificial Sequence: Synthetic oligonucleotide"
  source: /note="RNA"
  source: /note="5' tri-ethylene glycol (TEG)"
  modified_base (2)..(2): 5-methyl modified nucleotide
  modified_base (5)..(5): 5-methyl modified nucleotide
  modified_base (17)..(17): 5-methyl modified nucleotide
  modified_base (22)..(22): 5-methyl bicyclic nucleic acid
  source: /note="3' tri-ethylene glycol (TEG)"
acaucaaggaagauggcauuuc

SEQ ID NO: 15802 - DNA, 21 bp, Artificial Sequence
  source: /note="Description of Artificial Sequence: Synthetic oligonucleotide"
  source: /note="Description of Combined DNA/RNA Molecule: Synthetic oligonucleotide"
  source: /note="DNA/RNA"
  source: /note="5' tri-ethylene glycol (TEG)"
  modified_base (2)..(2): 5-methyl modified nucleotide
  modified_base (5)..(5): 5-methyl modified nucleotide
  modified_base (17)..(17): 5-methyl modified nucleotide
  modified_base (21)..(21): bicyclic nucleic acid (BNA)
  source: /note="3' tri-ethylene glycol (TEG)"
acaucaaggaagauggcauut

SEQ ID NO: 15803 - DNA, 20 bp, Artificial Sequence
  source: /note="Description of Artificial Sequence: Synthetic oligonucleotide"
  source: /note="Description of Combined DNA/RNA Molecule: Synthetic oligonucleotide"
  source: /note="DNA/RNA"
  source: /note="5' tri-ethylene glycol (TEG)"
  modified_base (2)..(2): 5-methyl modified nucleotide
  modified_base (5)..(5): 5-methyl modified nucleotide
  modified_base (17)..(17): 5-methyl modified nucleotide
  modified_base (20)..(20): bicyclic nucleic acid (BNA)
  source: /note="3' tri-ethylene glycol (TEG)"
acaucaaggaagauggcaut

SEQ ID NO: 15804 - DNA, 19 bp, Artificial Sequence
  source: /note="Description of Artificial Sequence: Synthetic oligonucleotide"
  source: /note="Description of Combined DNA/RNA Molecule: Synthetic oligonucleotide"
  source: /note="DNA/RNA"
  source: /note="5' tri-ethylene glycol (TEG)"
  modified_base (2)..(2): 5-methyl modified nucleotide
  modified_base (5)..(5): 5-methyl modified nucleotide
  modified_base (17)..(17): 5-methyl modified nucleotide
  modified_base (19)..(19): bicyclic nucleic acid (BNA)
  source: /note="3' tri-ethylene glycol (TEG)"
acaucaaggaagauggcat

SEQ ID NO: 15805 - RNA, 18 nt, Artificial Sequence
  source: /note="Description of Artificial Sequence: Synthetic oligonucleotide"
  source: /note="RNA"
  source: /note="5' tri-ethylene glycol (TEG)"
  modified_base (2)..(2): 5-methyl modified nucleotide
  modified_base (5)..(5): 5-methyl modified nucleotide
  modified_base (17)..(17): 5-methyl modified nucleotide
  modified_base (18)..(18): bicyclic nucleic acid (BNA)
  source: /note="3' tri-ethylene glycol (TEG)"
acaucaaggaagauggca

SEQ ID NO: 15806 - RNA, 17 nt, Artificial Sequence
  source: /note="Description of Artificial Sequence: Synthetic oligonucleotide"
  source: /note="RNA"
  source: /note="5' tri-ethylene glycol (TEG)"
  modified_base (2)..(2): 5-methyl modified nucleotide
  modified_base (5)..(5): 5-methyl modified nucleotide
  modified_base (17)..(17): 5-methyl bicyclic nucleic acid
  source: /note="3' tri-ethylene glycol (TEG)"
acaucaaggaagauggc

SEQ ID NO: 15807 - RNA, 16 nt, Artificial Sequence
  source: /note="Description of Artificial Sequence: Synthetic oligonucleotide"
  source: /note="RNA"
  source: /note="5' tri-ethylene glycol (TEG)"
  modified_base (2)..(2): 5-methyl modified nucleotide
  modified_base (5)..(5): 5-methyl modified nucleotide
  modified_base (16)..(16): bicyclic nucleic acid (BNA)
  source: /note="3' tri-ethylene glycol (TEG)"
acaucaaggaagaugg

SEQ ID NO: 15808 - RNA, 15 nt, Artificial Sequence
  source: /note="Description of Artificial Sequence: Synthetic oligonucleotide"
  source: /note="RNA"
  source: /note="5' tri-ethylene glycol (TEG)"
  modified_base (2)..(2): 5-methyl modified nucleotide
  modified_base (5)..(5): 5-methyl modified nucleotide
  modified_base (15)..(15): bicyclic nucleic acid (BNA)
  source: /note="3' tri-ethylene glycol (TEG)"
acaucaaggaagaug

SEQ ID NO: 15809 - DNA, 14 bp, Artificial Sequence
  source: /note="Description of Artificial Sequence: Synthetic oligonucleotide"
  source: /note="Description of Combined DNA/RNA Molecule: Synthetic oligonucleotide"
  source: /note="DNA/RNA"
  source: /note="5' tri-ethylene glycol (TEG)"
  modified_base (2)..(2): 5-methyl modified nucleotide
  modified_base (5)..(5): 5-methyl modified nucleotide
  modified_base (14)..(14): bicyclic nucleic acid (BNA)
  source: /note="3' tri-ethylene glycol (TEG)"
acaucaaggaagat

SEQ ID NO: 15810 - RNA, 13 nt, Artificial Sequence
  source: /note="Description of Artificial Sequence: Synthetic oligonucleotide"
  source: /note="RNA"
  source: /note="5' tri-ethylene glycol (TEG)"
  modified_base (2)..(2): 5-methyl modified nucleotide
  modified_base (5)..(5): 5-methyl modified nucleotide
  modified_base (13)..(13): bicyclic nucleic acid (BNA)
  source: /note="3' tri-ethylene glycol (TEG)"
acaucaaggaaga

SEQ ID NO: 15811 - RNA, 12 nt, Artificial Sequence
  source: /note="Description of Artificial Sequence: Synthetic oligonucleotide"
  source: /note="RNA"
  source: /note="5' tri-ethylene glycol (TEG)"
  modified_base (2)..(2): 5-methyl modified nucleotide
  modified_base (5)..(5): 5-methyl modified nucleotide
  modified_base (12)..(12): bicyclic nucleic acid (BNA)
  source: /note="3' tri-ethylene glycol (TEG)"
acaucaaggaag

SEQ ID NO: 15812 - RNA, 24 nt, Artificial Sequence
  source: /note="Description of Artificial Sequence: Synthetic oligonucleotide"
  source: /note="RNA"
  source: /note="5' tri-ethylene glycol (TEG)"
  modified_base (1)..(1): 5-methyl modified nucleotide
  modified_base (4)..(4): 5-methyl modified nucleotide
  modified_base (16)..(16): 5-methyl modified nucleotide
  modified_base (21)..(21): 5-methyl modified nucleotide
  modified_base (24)..(24): bicyclic nucleic acid (BNA)
  source: /note="3' tri-ethylene glycol (TEG)"
caucaaggaagauggcauuucuag

SEQ ID NO: 15813 - RNA, 23 nt, Artificial Sequence
  source: /note="Description of Artificial Sequence: Synthetic oligonucleotide"
  source: /note="RNA"
  source: /note="5' tri-ethylene glycol (TEG)"
  modified_base (1)..(1): 5-methyl modified nucleotide
  modified_base (4)..(4): 5-methyl modified nucleotide
  modified_base (16)..(16): 5-methyl modified nucleotide
  modified_base (21)..(21): 5-methyl modified nucleotide
  modified_base (23)..(23): bicyclic nucleic acid (BNA)
  source: /note="3' tri-ethylene glycol (TEG)"
caucaaggaagauggcauuucua

SEQ ID NO: 15814 - DNA, 22 bp, Artificial Sequence
  source: /note="Description of Artificial Sequence: Synthetic oligonucleotide"
  source: /note="Description of Combined DNA/RNA Molecule: Synthetic oligonucleotide"
  source: /note="DNA/RNA"
  source: /note="5' tri-ethylene glycol (TEG)"
  modified_base (1)..(1): 5-methyl modified nucleotide
  modified_base (4)..(4): 5-methyl modified nucleotide
  modified_base (16)..(16): 5-methyl modified nucleotide
  modified_base (21)..(21): 5-methyl modified nucleotide
  modified_base (22)..(22): bicyclic nucleic acid (BNA)
  source: /note="3' tri-ethylene glycol (TEG)"
caucaaggaagauggcauuuct

SEQ ID NO: 15815 - RNA, 21 nt, Artificial Sequence
  source: /note="Description of Artificial Sequence: Synthetic oligonucleotide"
  source: /note="RNA"
  source: /note="5' tri-ethylene glycol (TEG)"
  modified_base (1)..(1): 5-methyl modified nucleotide
  modified_base (4)..(4): 5-methyl modified nucleotide
  modified_base (16)..(16): 5-methyl modified nucleotide
  modified_base (21)..(21): 5-methyl bicyclic nucleic acid
  source: /note="3' tri-ethylene glycol (TEG)"
caucaaggaagauggcauuuc

SEQ ID NO: 15816 - DNA, 20 bp, Artificial Sequence
  source: /note="Description of Artificial Sequence: Synthetic oligonucleotide"
  source: /note="Description of Combined DNA/RNA Molecule: Synthetic oligonucleotide"
  source: /note="DNA/RNA"
  source: /note="5' tri-ethylene glycol (TEG)"
  modified_base (1)..(1): 5-methyl modified nucleotide
  modified_base (4)..(4): 5-methyl modified nucleotide
  modified_base (16)..(16): 5-methyl modified nucleotide
  modified_base (20)..(20): bicyclic nucleic acid (BNA)
  source: /note="3' tri-ethylene glycol (TEG)"
caucaaggaagauggcauut

SEQ ID NO: 15817 - DNA, 19 bp, Artificial Sequence
  source: /note="Description of Artificial Sequence: Synthetic oligonucleotide"
  source: /note="Description of Combined DNA/RNA Molecule: Synthetic oligonucleotide"
  source: /note="DNA/RNA"
  source: /note="5' tri-ethylene glycol (TEG)"
  modified_base (1)..(1): 5-methyl modified nucleotide
  modified_base (4)..(4): 5-methyl modified nucleotide
  modified_base (16)..(16): 5-methyl modified nucleotide
  modified_base (19)..(19): bicyclic nucleic acid (BNA)
  source: /note="3' tri-ethylene glycol (TEG)"
caucaaggaagauggcaut

SEQ ID NO: 15818 - DNA, 18 bp, Artificial Sequence
  source: /note="Description of Artificial Sequence: Synthetic oligonucleotide"
  source: /note="Description of Combined DNA/RNA Molecule: Synthetic oligonucleotide"
  source: /note="DNA/RNA"
  source: /note="5' tri-ethylene glycol (TEG)"
  modified_base (1)..(1): 5-methyl modified nucleotide
  modified_base (4)..(4): 5-methyl modified nucleotide
  modified_base (16)..(16): 5-methyl modified nucleotide
  modified_base (18)..(18): bicyclic nucleic acid (BNA)
  source: /note="3' tri-ethylene glycol (TEG)"
caucaaggaagauggcat

SEQ ID NO: 15819 - RNA, 17 nt, Artificial Sequence
  source: /note="Description of Artificial Sequence: Synthetic oligonucleotide"
  source: /note="RNA"
  source: /note="5' tri-ethylene glycol (TEG)"
  modified_base (1)..(1): 5-methyl modified nucleotide
  modified_base (4)..(4): 5-methyl modified nucleotide
  modified_base (16)..(16): 5-methyl modified nucleotide
  modified_base (17)..(17): bicyclic nucleic acid (BNA)
  source: /note="3' tri-ethylene glycol (TEG)"
caucaaggaagauggca

SEQ ID NO: 15820 - RNA, 16 nt, Artificial Sequence
  source: /note="Description of Artificial Sequence: Synthetic oligonucleotide"
  source: /note="RNA"
  source: /note="5' tri-ethylene glycol (TEG)"
  modified_base (1)..(1): 5-methyl modified nucleotide
  modified_base (4)..(4): 5-methyl modified nucleotide
  modified_base (16)..(16): 5-methyl bicyclic nucleic acid
  source: /note="3' tri-ethylene glycol (TEG)"
caucaaggaagauggc

SEQ ID NO: 15821 - RNA, 15 nt, Artificial Sequence
  source: /note="Description of Artificial Sequence: Synthetic oligonucleotide"
  source: /note="RNA"
  source: /note="5' tri-ethylene glycol (TEG)"
  modified_base (1)..(1): 5-methyl modified nucleotide
  modified_base (4)..(4): 5-methyl modified nucleotide
  modified_base (15)..(15): bicyclic nucleic acid (BNA)
  source: /note="3' tri-ethylene glycol (TEG)"
caucaaggaagaugg

SEQ ID NO: 15822 - RNA, 14 nt, Artificial Sequence
  source: /note="Description of Artificial Sequence: Synthetic oligonucleotide"
  source: /note="RNA"
  source: /note="5' tri-ethylene glycol (TEG)"
  modified_base (1)..(1): 5-methyl modified nucleotide
  modified_base (4)..(4): 5-methyl modified nucleotide
  modified_base (14)..(14): bicyclic nucleic acid (BNA)
  source: /note="3' tri-ethylene glycol (TEG)"
caucaaggaagaug

SEQ ID NO: 15823 - DNA, 13 bp, Artificial Sequence
  source: /note="Description of Artificial Sequence: Synthetic oligonucleotide"
  source: /note="Description of Combined DNA/RNA Molecule: Synthetic oligonucleotide"
  source: /note="DNA/RNA"
  source: /note="5' tri-ethylene glycol (TEG)"
  modified_base (1)..(1): 5-methyl modified nucleotide
  modified_base (4)..(4): 5-methyl modified nucleotide
  modified_base (13)..(13): bicyclic nucleic acid (BNA)
  source: /note="3' tri-ethylene glycol (TEG)"
caucaaggaagat

SEQ ID NO: 15824 - RNA, 12 nt, Artificial Sequence
  source: /note="Description of Artificial Sequence: Synthetic oligonucleotide"
  source: /note="RNA"
  source: /note="5' tri-ethylene glycol (TEG)"
  modified_base (1)..(1): 5-methyl modified nucleotide
  modified_base (4)..(4): 5-methyl modified nucleotide
  modified_base (12)..(12): bicyclic nucleic acid (BNA)
  source: /note="3' tri-ethylene glycol (TEG)"
caucaaggaaga

SEQ ID NO: 15825 - RNA, 11 nt, Artificial Sequence
  source: /note="Description of Artificial Sequence: Synthetic oligonucleotide"
  source: /note="RNA"
  source: /note="5' tri-ethylene glycol (TEG)"
  modified_base (1)..(1): 5-methyl modified nucleotide
  modified_base (4)..(4): 5-methyl modified nucleotide
  modified_base (11)..(11): bicyclic nucleic acid (BNA)
  source: /note="3' tri-ethylene glycol (TEG)"
caucaaggaag

SEQ ID NO: 15826 - RNA, 23 nt, Artificial Sequence
  source: /note="Description of Artificial Sequence: Synthetic oligonucleotide"
  source: /note="RNA"
  source: /note="5' tri-ethylene glycol (TEG)"
  modified_base (3)..(3): 5-methyl modified nucleotide
  modified_base (15)..(15): 5-methyl modified nucleotide
  modified_base (20)..(20): 5-methyl modified nucleotide
  modified_base (23)..(23): bicyclic nucleic acid (BNA)
  source: /note="3' tri-ethylene glycol (TEG)"
aucaaggaagauggcauuucuag

SEQ ID NO: 15827 - RNA, 22 nt, Artificial Sequence
  source: /note="Description of Artificial Sequence: Synthetic oligonucleotide"
  source: /note="RNA"
  source: /note="5' tri-ethylene glycol (TEG)"
  modified_base (3)..(3): 5-methyl modified nucleotide
  modified_base (15)..(15): 5-methyl modified nucleotide
  modified_base (20)..(20): 5-methyl modified nucleotide
  modified_base (22)..(22): bicyclic nucleic acid (BNA)
  source: /note="3' tri-ethylene glycol (TEG)"
aucaaggaagauggcauuucua

SEQ ID NO: 15828 - DNA, 21 bp, Artificial Sequence
  source: /note="Description of Artificial Sequence: Synthetic oligonucleotide"
  source: /note="Description of Combined DNA/RNA Molecule: Synthetic oligonucleotide"
  source: /note="DNA/RNA"
  source: /note="5' tri-ethylene glycol (TEG)"
  modified_base (3)..(3): 5-methyl modified nucleotide
  modified_base (15)..(15): 5-methyl modified nucleotide
  modified_base (20)..(20): 5-methyl modified nucleotide
  modified_base (21)..(21): bicyclic nucleic acid (BNA)
  source: /note="3' tri-ethylene glycol (TEG)"
aucaaggaagauggcauuuct

SEQ ID NO: 15829 - RNA, 20 nt, Artificial Sequence
  source: /note="Description of Artificial Sequence: Synthetic oligonucleotide"
  source: /note="RNA"
  source: /note="5' tri-ethylene glycol (TEG)"
  modified_base (3)..(3): 5-methyl modified nucleotide
  modified_base (15)..(15): 5-methyl modified nucleotide
  modified_base (20)..(20): 5-methyl bicyclic nucleic acid
  source: /note="3' tri-ethylene glycol (TEG)"
aucaaggaagauggcauuuc

SEQ ID NO: 15830 - DNA, 19 bp, Artificial Sequence
  source: /note="Description of Artificial Sequence: Synthetic oligonucleotide"
  source: /note="Description of Combined DNA/RNA Molecule: Synthetic oligonucleotide"
  source: /note="DNA/RNA"
  source: /note="5' tri-ethylene glycol (TEG)"
  modified_base (3)..(3): 5-methyl modified nucleotide
  modified_base (15)..(15): 5-methyl modified nucleotide
  modified_base (19)..(19): bicyclic nucleic acid (BNA)
  source: /note="3' tri-ethylene glycol (TEG)"
aucaaggaagauggcauut

SEQ ID NO: 15831 - DNA, 18 bp, Artificial Sequence
  source: /note="Description of Artificial Sequence: Synthetic oligonucleotide"
  source: /note="Description of Combined DNA/RNA Molecule: Synthetic oligonucleotide"
  source: /note="DNA/RNA"
  source: /note="5' tri-ethylene glycol (TEG)"
  modified_base (3)..(3): 5-methyl modified nucleotide
  modified_base (15)..(15): 5-methyl modified nucleotide
  modified_base (18)..(18): bicyclic nucleic acid (BNA)
  source: /note="3' tri-ethylene glycol (TEG)"
aucaaggaagauggcaut

SEQ ID NO: 15832 - DNA, 17 bp, Artificial Sequence
  source: /note="Description of Artificial Sequence: Synthetic oligonucleotide"
  source: /note="Description of Combined DNA/RNA Molecule: Synthetic oligonucleotide"
  source: /note="DNA/RNA"
  source: /note="5' tri-ethylene glycol (TEG)"
  modified_base (3)..(3): 5-methyl modified nucleotide
  modified_base (15)..(15): 5-methyl modified nucleotide
  modified_base (17)..(17): bicyclic nucleic acid (BNA)
  source: /note="3' tri-ethylene glycol (TEG)"
aucaaggaagauggcat

SEQ ID NO: 15833 - RNA, 16 nt, Artificial Sequence
  source: /note="Description of Artificial Sequence: Synthetic oligonucleotide"
  source: /note="RNA"
  source: /note="5' tri-ethylene glycol (TEG)"
  modified_base (3)..(3): 5-methyl modified nucleotide
  modified_base (15)..(15): 5-methyl modified nucleotide
  modified_base (16)..(16): bicyclic nucleic acid (BNA)
  source: /note="3' tri-ethylene glycol (TEG)"
aucaaggaagauggca

SEQ ID NO: 15834 - RNA, 15 nt, Artificial Sequence
  source: /note="Description of Artificial Sequence: Synthetic oligonucleotide"
  source: /note="RNA"
  source: /note="5' tri-ethylene glycol (TEG)"
  modified_base (3)..(3): 5-methyl modified nucleotide
  modified_base (15)..(15): 5-methyl bicyclic nucleic acid
  source: /note="3' tri-ethylene glycol (TEG)"
aucaaggaagauggc

SEQ ID NO: 15835 - RNA, 14 nt, Artificial Sequence
  source: /note="Description of Artificial Sequence: Synthetic oligonucleotide"
  source: /note="RNA"
  source: /note="5' tri-ethylene glycol (TEG)"
  modified_base (3)..(3): 5-methyl modified nucleotide
  modified_base (14)..(14): bicyclic nucleic acid (BNA)
  source: /note="3' tri-ethylene glycol (TEG)"
aucaaggaagaugg

SEQ ID NO: 15836 - RNA, 13 nt, Artificial Sequence
  source: /note="Description of Artificial Sequence: Synthetic oligonucleotide"
  source: /note="RNA"
  source: /note="5' tri-ethylene glycol (TEG)"
  modified_base (3)..(3): 5-methyl modified nucleotide
  modified_base (13)..(13): bicyclic nucleic acid (BNA)
  source: /note="3' tri-ethylene glycol (TEG)"
aucaaggaagaug

SEQ ID NO: 15837 - DNA, 12 bp, Artificial Sequence
  source: /note="Description of Artificial Sequence: Synthetic oligonucleotide"
  source: /note="Description of Combined DNA/RNA Molecule: Synthetic oligonucleotide"
  source: /note="DNA/RNA"
  source: /note="5' tri-ethylene glycol (TEG)"
  modified_base (3)..(3): 5-methyl modified nucleotide
  modified_base (12)..(12): bicyclic nucleic acid (BNA)
  source: /note="3' tri-ethylene glycol (TEG)"
aucaaggaagat

SEQ ID NO: 15838 - RNA, 11 nt, Artificial Sequence
  source: /note="Description of Artificial Sequence: Synthetic oligonucleotide"
  source: /note="RNA"
  source: /note="5' tri-ethylene glycol (TEG)"
  modified_base (3)..(3): 5-methyl modified nucleotide
  modified_base (11)..(11): bicyclic nucleic acid (BNA)
  source: /note="3' tri-ethylene glycol (TEG)"
aucaaggaaga

SEQ ID NO: 15839 - RNA, 10 nt, Artificial Sequence
  source: /note="Description of Artificial Sequence: Synthetic oligonucleotide"
  source: /note="RNA"
  source: /note="5' tri-ethylene glycol (TEG)"
  modified_base (3)..(3): 5-methyl modified nucleotide
  modified_base (10)..(10): bicyclic nucleic acid (BNA)
  source: /note="3' tri-ethylene glycol (TEG)"
aucaaggaag

SEQ ID NO: 15840 - RNA, 23 nt, Artificial Sequence
  source: /note="Description of Artificial Sequence: Synthetic oligonucleotide"
  source: /note="RNA"
  source: /note="5' tri-ethylene glycol (TEG)"
  modified_base (1)..(1): 5-methyl modified nucleotide
  modified_base (2)..(2): 5-methyl modified nucleotide
  modified_base (7)..(7): 5-methyl modified nucleotide
  modified_base (13)..(13): 5-methyl modified nucleotide
  modified_base (14)..(14): 5-methyl modified nucleotide
  modified_base (16)..(16): 5-methyl modified nucleotide
  modified_base (17)..(17): 5-methyl modified nucleotide
  modified_base (20)..(20): 5-methyl modified nucleotide
  modified_base (23)..(23): 5-methyl bicyclic nucleic acid
  source: /note="3' tri-ethylene glycol (TEG)"
ccagagcagguaccuccaacauc

SEQ ID NO: 15841 - RNA, 18 nt, Artificial Sequence
  source: /note="Description of Artificial Sequence: Synthetic oligonucleotide"
  source: /note="RNA"
  source: /note="5' tri-ethylene glycol (TEG)"
  modified_base (1)..(1): 5-methyl modified nucleotide
  modified_base (2)..(2): 5-methyl modified nucleotide
  modified_base (7)..(7): 5-methyl modified nucleotide
  modified_base (13)..(13): 5-methyl modified nucleotide
  modified_base (14)..(14): 5-methyl modified nucleotide
  modified_base (16)..(16): 5-methyl modified nucleotide
  modified_base (17)..(17): 5-methyl modified nucleotide
  modified_base (18)..(18): bicyclic nucleic acid (BNA)
  source: /note="3' tri-ethylene glycol (TEG)"
ccagagcagguaccucca

SEQ ID NO: 15842 - DNA, 23 bp, Artificial Sequence
  source: /note="Description of Artificial Sequence: Synthetic oligonucleotide"
  source: /note="Description of Combined DNA/RNA Molecule: Synthetic oligonucleotide"
  source: /note="DNA/RNA"
  source: /note="5' tri-ethylene glycol (TEG)"
  modified_base (1)..(1): 5-methyl modified nucleotide
  modified_base (2)..(2): 5-methyl modified nucleotide
  modified_base (4)..(4): 5-methyl modified nucleotide
  modified_base (18)..(18): 5-methyl modified nucleotide
  modified_base (23)..(23): bicyclic nucleic acid (BNA)
  source: /note="3' tri-ethylene glycol (TEG)"
ccucugugauuuuauaacuugat

SEQ ID NO: 15843 - DNA, 17 bp, Artificial Sequence
  source: /note="Description of Artificial Sequence: Synthetic oligonucleotide"
  source: /note="Description of Combined DNA/RNA Molecule: Synthetic oligonucleotide"
  source: /note="DNA/RNA"
  source: /note="5' tri-ethylene glycol (TEG)"
  modified_base (2)..(2): 5-methyl modified nucleotide
  modified_base (4)..(4): 5-methyl modified nucleotide
  modified_base (5)..(5): 5-methyl modified nucleotide
  modified_base (6)..(6): 5-methyl modified nucleotide
  modified_base (8)..(8): 5-methyl modified nucleotide
  modified_base (9)..(9): 5-methyl modified nucleotide
  modified_base (12)..(12): 5-methyl modified nucleotide
  modified_base (14)..(14): 5-methyl modified nucleotide
  modified_base (15)..(15): 5-methyl modified nucleotide
  modified_base (16)..(16): 5-methyl modified nucleotide
  modified_base (17)..(17): bicyclic nucleic acid (BNA)
  source: /note="3' tri-ethylene glycol (TEG)"
ucacccaccaucaccct

SEQ ID NO: 15844 - RNA, 20 nt, Artificial Sequence
  source: /note="Description of Artificial Sequence: Synthetic oligonucleotide"
  source: /note="RNA"
  source: /note="5' tri-ethylene glycol (TEG)"
  modified_base (7)..(7): 5-methyl modified nucleotide
  modified_base (8)..(8): 5-methyl modified nucleotide
  modified_base (10)..(10): 5-methyl modified nucleotide
  modified_base (16)..(16): 5-methyl modified nucleotide
  modified_base (18)..(18): 5-methyl modified nucleotide
  modified_base (19)..(19): 5-methyl modified nucleotide
  modified_base (20)..(20): 5-methyl bicyclic nucleic acid
  source: /note="3' tri-ethylene glycol (TEG)"
ugauauccucaaggucaccc

SEQ ID NO: 15845 - RNA, 22 nt, Artificial Sequence
  source: /note="Description of Artificial Sequence: Synthetic oligonucleotide"
  source: /note="RNA"
  source: /note="5' tri-ethylene glycol (TEG)"
  modified_base (1)..(1): 5-methyl modified nucleotide
  modified_base (4)..(4): 5-methyl modified nucleotide
  modified_base (13)..(13): 5-methyl modified nucleotide
  modified_base (16)..(16): 5-methyl modified nucleotide
  modified_base (18)..(18): 5-methyl modified nucleotide
  modified_base (22)..(22): bicyclic nucleic acid (BNA)
  source: /note="3' tri-ethylene glycol (TEG)"
cugcuugaugaucaucucguug

SEQ ID NO: 15846 - RNA, 18 nt, Artificial Sequence
  source: /note="Description of Artificial Sequence: Synthetic oligonucleotide"
  source: /note="RNA"
  source: /note="5' tri-ethylene glycol (TEG)"
  modified_base (1)..(1): 5-methyl modified nucleotide
  modified_base (4)..(4): 5-methyl modified nucleotide
  modified_base (13)..(13): 5-methyl modified nucleotide
  modified_base (16)..(16): 5-methyl modified nucleotide
  modified_base (18)..(18): 5-methyl bicyclic nucleic acid
  source: /note="3' tri-ethylene glycol (TEG)"
cugcuugaugaucaucuc

SEQ ID NO: 15847 - RNA, 19 nt, Artificial Sequence
  source: /note="Description of Artificial Sequence: Synthetic oligonucleotide"
  source: /note="RNA"
  source: /note="5' tri-ethylene glycol (TEG)"
  modified_base (5)..(5): 5-methyl modified nucleotide
  modified_base (6)..(6): 5-methyl modified nucleotide
  modified_base (14)..(14): 5-methyl modified nucleotide
  modified_base (15)..(15): 5-methyl modified nucleotide
  modified_base (17)..(17): 5-methyl modified nucleotide
  modified_base (19)..(19): bicyclic nucleic acid (BNA)
  source: /note="3' tri-ethylene glycol (TEG)"
guuuccuuaguaaccacag

SEQ ID NO: 15848 - RNA, 17 nt, Artificial Sequence
  source: /note="Description of Artificial Sequence: Synthetic oligonucleotide"
  source: /note="RNA"
  source: /note="5' tri-ethylene glycol (TEG)"
  modified_base (5)..(5): 5-methyl modified nucleotide
  modified_base (6)..(6): 5-methyl modified nucleotide
  modified_base (14)..(14): 5-methyl modified nucleotide
  modified_base (15)..(15): 5-methyl modified nucleotide
  modified_base (17)..(17): 5-methyl bicyclic nucleic acid
  source: /note="3' tri-ethylene glycol (TEG)"
guuuccuuaguaaccac

SEQ ID NO: 15849 - DNA, 20 bp, Artificial Sequence
  source: /note="Description of Artificial Sequence: Synthetic oligonucleotide"
  source: /note="Description of Combined DNA/RNA Molecule: Synthetic oligonucleotide"
  source: /note="DNA/RNA"
  modified_base (1)..(1): bicyclic nucleic acid (BNA)
  modified_base (2)..(2): 5-methyl modified nucleotide
  modified_base (14)..(14): 5-methyl modified nucleotide
  modified_base (19)..(19): 5-methyl modified nucleotide
  modified_base (20)..(20): bicyclic nucleic acid (BNA)
tcaaggaagauggcauuuct

SEQ ID NO: 15850 - DNA, 22 bp, Artificial Sequence
  source: /note="Description of Artificial Sequence: Synthetic oligonucleotide"
  source: /note="Description of Combined DNA/RNA Molecule: Synthetic oligonucleotide"
  source: /note="DNA/RNA"
  modified_base (1)..(1): bicyclic nucleic acid (BNA)
  modified_base (2)..(2): 5-methyl modified nucleotide
  modified_base (14)..(14): 5-methyl modified nucleotide
  modified_base (19)..(19): 5-methyl modified nucleotide
  modified_base (22)..(22): bicyclic nucleic acid (BNA)
tcaaggaagauggcauuucuag

SEQ ID NO: 15851 - RNA, 18 nt, Artificial Sequence
  source: /note="Description of Artificial Sequence: Synthetic oligonucleotide"
  source: /note="RNA"
  modified_base (1)..(1): bicyclic nucleic acid (BNA)
  modified_base (9)..(9): 5-methyl modified nucleotide
  modified_base (13)..(13): 5-methyl modified nucleotide
  modified_base (14)..(14): 5-methyl modified nucleotide
  modified_base (18)..(18): 5-methyl bicyclic nucleic acid
gguaaguucuguccaagc

SEQ ID NO: 15852 - RNA, 18 nt, Artificial Sequence
  source: /note="Description of Artificial Sequence: Synthetic oligonucleotide"
  source: /note="RNA"
  modified_base (1)..(1): bicyclic nucleic acid (BNA)
  modified_base (8)..(8): 5-methyl modified nucleotide
  modified_base (12)..(12): 5-methyl modified nucleotide
  modified_base (13)..(13): 5-methyl modified nucleotide
  modified_base (17)..(17): 5-methyl modified nucleotide
  modified_base (18)..(18): 5-methyl bicyclic nucleic acid
guaaguucuguccaagcc

SEQ ID NO: 15853 - RNA, 18 nt, Artificial Sequence
  source: /note="Description of Artificial Sequence: Synthetic oligonucleotide"
  source: /note="RNA"
  modified_base (1)..(1): bicyclic nucleic acid (BNA)
  modified_base (4)..(4): 5-methyl modified nucleotide
  modified_base (13)..(13): 5-methyl modified nucleotide
  modified_base (17)..(17): 5-methyl modified nucleotide
  modified_base (18)..(18): 5-methyl bicyclic nucleic acid
agucgguaaguucugucc

SEQ ID NO: 15854 - RNA, 18 nt, Artificial Sequence
  source: /note="Description of Artificial Sequence: Synthetic oligonucleotide"
  source: /note="RNA"
  modified_base (1)..(1): 5-methyl bicyclic nucleic acid
  modified_base (5)..(5): 5-methyl modified nucleotide
  modified_base (6)..(6): 5-methyl modified nucleotide
  modified_base (10)..(10): 5-methyl modified nucleotide
  modified_base (11)..(11): 5-methyl modified nucleotide
  modified_base (12)..(12): 5-methyl modified nucleotide
  modified_base (18)..(18): bicyclic nucleic acid (BNA)
cuguccaagcccgguuga

SEQ ID NO: 15855 - DNA, 15 bp, Artificial Sequence
  source: /note="Description of Artificial Sequence: Synthetic oligonucleotide"
  source: /note="Description of Combined DNA/RNA Molecule: Synthetic oligonucleotide"
  source: /note="DNA/RNA"
  modified_base (1)..(1): bicyclic nucleic acid (BNA)
  modified_base (7)..(7): 5-methyl modified nucleotide
  modified_base (11)..(11): 5-methyl modified nucleotide
  modified_base (12)..(12): 5-methyl modified nucleotide
  modified_base (15)..(15): bicyclic nucleic acid (BNA)
taaguucuguccaag

SEQ ID NO: 15856 - DNA, 20 bp, Artificial Sequence
  source: /note="Description of Artificial Sequence: Synthetic oligonucleotide"
  source: /note="Description of Combined DNA/RNA Molecule: Synthetic oligonucleotide"
  source: /note="DNA/RNA"
  modified_base (1)..(1): bicyclic nucleic acid (BNA)
  modified_base (3)..(3): 5-methyl modified nucleotide
  modified_base (7)..(7): 5-methyl modified nucleotide
  modified_base (8)..(8): 5-methyl modified nucleotide
  modified_base (12)..(12): 5-methyl modified nucleotide
  modified_base (13)..(13): 5-methyl modified nucleotide
  modified_base (14)..(14): 5-methyl modified nucleotide
  modified_base (20)..(20): bicyclic nucleic acid (BNA)
tucuguccaagcccgguuga

SEQ ID NO: 15857 - DNA, 19 bp, Artificial Sequence
  source: /note="Description of Artificial Sequence: Synthetic oligonucleotide"
  source: /note="Description of Combined DNA/RNA Molecule: Synthetic oligonucleotide"
  source: /note="DNA/RNA"
  modified_base (1)..(1): bicyclic nucleic acid (BNA)
  modified_base (3)..(3): 5-methyl modified nucleotide
  modified_base (7)..(7): 5-methyl modified nucleotide
  modified_base (8)..(8): 5-methyl modified nucleotide
  modified_base (12)..(12): 5-methyl modified nucleotide
  modified_base (13)..(13): 5-methyl modified nucleotide
  modified_base (14)..(14): 5-methyl modified nucleotide
  modified_base (19)..(19): bicyclic nucleic acid (BNA)
tucuguccaagcccgguug

SEQ ID NO: 15858 - DNA, 18 bp, Artificial Sequence
  source: /note="Description of Artificial Sequence: Synthetic oligonucleotide"
  source: /note="Description of Combined DNA/RNA Molecule: Synthetic oligonucleotide"
  source: /note="DNA/RNA"
  modified_base (1)..(1): bicyclic nucleic acid (BNA)
  modified_base (3)..(3): 5-methyl modified nucleotide
  modified_base (7)..(7): 5-methyl modified nucleotide
  modified_base (8)..(8): 5-methyl modified nucleotide
  modified_base (12)..(12): 5-methyl modified nucleotide
  modified_base (13)..(13): 5-methyl modified nucleotide
  modified_base (14)..(14): 5-methyl modified nucleotide
  modified_base (18)..(18): bicyclic nucleic acid (BNA)
tucuguccaagcccggut

SEQ ID NO: 15859 - DNA, 17 bp, Artificial Sequence
  source: /note="Description of Artificial Sequence: Synthetic oligonucleotide"
  source: /note="Description of Combined DNA/RNA Molecule: Synthetic oligonucleotide"
  source: /note="DNA/RNA"
  modified_base (1)..(1): bicyclic nucleic acid (BNA)
  modified_base (3)..(3): 5-methyl modified nucleotide
  modified_base (7)..(7): 5-methyl modified nucleotide
  modified_base (8)..(8): 5-methyl modified nucleotide
  modified_base (12)..(12): 5-methyl modified nucleotide
  modified_base (13)..(13): 5-methyl modified nucleotide
  modified_base (14)..(14): 5-methyl modified nucleotide
  modified_base (17)..(17): bicyclic nucleic acid (BNA)
tucuguccaagcccggt

SEQ ID NO: 15860 - DNA, 16 bp, Artificial Sequence
  source: /note="Description of Artificial Sequence: Synthetic oligonucleotide"
  source: /note="Description of Combined DNA/RNA Molecule: Synthetic oligonucleotide"
  source: /note="DNA/RNA"
  modified_base (1)..(1): bicyclic nucleic acid (BNA)
  modified_base (3)..(3): 5-methyl modified nucleotide
  modified_base (7)..(7): 5-methyl modified nucleotide
  modified_base (8)..(8): 5-methyl modified nucleotide
  modified_base (12)..(12): 5-methyl modified nucleotide
  modified_base (13)..(13): 5-methyl modified nucleotide
  modified_base (14)..(14): 5-methyl modified nucleotide
  modified_base (16)..(16): bicyclic nucleic acid (BNA)
tucuguccaagcccgg

SEQ ID NO: 15861 - DNA, 15 bp, Artificial Sequence
  source: /note="Description of Artificial Sequence: Synthetic oligonucleotide"
  source: /note="Description of Combined DNA/RNA Molecule: Synthetic oligonucleotide"
  source: /note="DNA/RNA"
  modified_base (1)..(1): bicyclic nucleic acid (BNA)
  modified_base (3)..(3): 5-methyl modified nucleotide
  modified_base (7)..(7): 5-methyl modified nucleotide
  modified_base (8)..(8): 5-methyl modified nucleotide
  modified_base (12)..(12): 5-methyl modified nucleotide
  modified_base (13)..(13): 5-methyl modified nucleotide
  modified_base (14)..(14): 5-methyl modified nucleotide
  modified_base (15)..(15): bicyclic nucleic acid (BNA)
tucuguccaagcccg

SEQ ID NO: 15862 - DNA, 14 bp, Artificial Sequence
  source: /note="Description of Artificial Sequence: Synthetic oligonucleotide"
  source: /note="Description of Combined DNA/RNA Molecule: Synthetic oligonucleotide"
  source: /note="DNA/RNA"
  modified_base (1)..(1): bicyclic nucleic acid (BNA)
  modified_base (3)..(3): 5-methyl modified nucleotide
  modified_base (7)..(7): 5-methyl modified nucleotide
  modified_base (8)..(8): 5-methyl modified nucleotide
  modified_base (12)..(12): 5-methyl modified nucleotide
  modified_base (13)..(13): 5-methyl modified nucleotide
  modified_base (14)..(14): 5-methyl bicyclic nucleic acid
tucuguccaagccc

SEQ ID NO: 15863 - DNA, 13 bp, Artificial Sequence
  source: /note="Description of Artificial Sequence: Synthetic oligonucleotide"
  source: /note="Description of Combined DNA/RNA Molecule: Synthetic oligonucleotide"
  source: /note="DNA/RNA"
  modified_base (1)..(1): bicyclic nucleic acid (BNA)
  modified_base (3)..(3): 5-methyl modified nucleotide
  modified_base (7)..(7): 5-methyl modified nucleotide
  modified_base (8)..(8): 5-methyl modified nucleotide
  modified_base (12)..(12): 5-methyl modified nucleotide
  modified_base (13)..(13): 5-methyl bicyclic nucleic acid
tucuguccaagcc

SEQ ID NO: 15864 - DNA, 12 bp, Artificial Sequence
  source: /note="Description of Artificial Sequence: Synthetic oligonucleotide"
  source: /note="Description of Combined DNA/RNA Molecule: Synthetic oligonucleotide"
  source: /note="DNA/RNA"
  modified_base (1)..(1): bicyclic nucleic acid (BNA)
  modified_base (3)..(3): 5-methyl modified nucleotide
  modified_base (7)..(7): 5-methyl modified nucleotide
  modified_base (8)..(8): 5-methyl modified nucleotide
  modified_base (12)..(12): 5-methyl bicyclic nucleic acid
tucuguccaagc

SEQ ID NO: 15865 - DNA, 11 bp, Artificial Sequence
  source: /note="Description of Artificial Sequence: Synthetic oligonucleotide"
  source: /note="Description of Combined DNA/RNA Molecule: Synthetic oligonucleotide"
  source: /note="DNA/RNA"
  modified_base (1)..(1): bicyclic nucleic acid (BNA)
  modified_base (3)..(3): 5-methyl modified nucleotide
  modified_base (7)..(7): 5-methyl modified nucleotide
  modified_base (8)..(8): 5-methyl modified nucleotide
  modified_base (11)..(11): bicyclic nucleic acid (BNA)
tucuguccaag

SEQ ID NO: 15866 - DNA, 10 bp, Artificial Sequence
  source: /note="Description of Artificial Sequence: Synthetic oligonucleotide"
  source: /note="Description of Combined DNA/RNA Molecule: Synthetic oligonucleotide"
  source: /note="DNA/RNA"
  modified_base (1)..(1): bicyclic nucleic acid (BNA)
  modified_base (3)..(3): 5-methyl modified nucleotide
  modified_base (7)..(7): 5-methyl modified nucleotide
  modified_base (8)..(8): 5-methyl modified nucleotide
  modified_base (10)..(10): bicyclic nucleic acid (BNA)
tucuguccaa

SEQ ID NO: 15867 - DNA, 9 bp, Artificial Sequence
  source: /note="Description of Artificial Sequence: Synthetic oligonucleotide"
  source: /note="Description of Combined DNA/RNA Molecule: Synthetic oligonucleotide"
  source: /note="DNA/RNA"
  modified_base (1)..(1): bicyclic nucleic acid (BNA)
  modified_base (3)..(3): 5-methyl modified nucleotide
  modified_base (7)..(7): 5-methyl modified nucleotide
  modified_base (8)..(8): 5-methyl modified nucleotide
  modified_base (9)..(9): bicyclic nucleic acid (BNA)
tucugucca

SEQ ID NO: 15868 - DNA, 8 bp, Artificial Sequence
  source: /note="Description of Artificial Sequence: Synthetic oligonucleotide"
  source: /note="Description of Combined DNA/RNA Molecule: Synthetic oligonucleotide"
  source: /note="DNA/RNA"
  modified_base (1)..(1): bicyclic nucleic acid (BNA)
  modified_base (3)..(3): 5-methyl modified nucleotide
  modified_base (7)..(7): 5-methyl modified nucleotide
  modified_base (8)..(8): 5-methyl bicyclic nucleic acid
tucugucc

SEQ ID NO: 15869 - DNA, 19 bp, Artificial Sequence
  source: /note="Description of Artificial Sequence: Synthetic oligonucleotide"
  source: /note="Description of Combined DNA/RNA Molecule: Synthetic oligonucleotide"
  source: /note="DNA/RNA"
  modified_base (1)..(1): bicyclic nucleic acid (BNA)
  modified_base (2)..(2): 5-methyl modified nucleotide
  modified_base (6)..(6): 5-methyl modified nucleotide
  modified_base (7)..(7): 5-methyl modified nucleotide
  modified_base (11)..(11): 5-methyl modified nucleotide
  modified_base (12)..(12): 5-methyl modified nucleotide
  modified_base (13)..(13): 5-methyl modified nucleotide
  modified_base (19)..(19): bicyclic nucleic acid (BNA)
tcuguccaagcccgguuga

SEQ ID NO: 15870 - DNA, 18 bp, Artificial Sequence
  source: /note="Description of Artificial Sequence: Synthetic oligonucleotide"
  source: /note="Description of Combined DNA/RNA Molecule: Synthetic oligonucleotide"
  source: /note="DNA/RNA"
  modified_base (1)..(1): bicyclic nucleic acid (BNA)
  modified_base (2)..(2): 5-methyl modified nucleotide
  modified_base (6)..(6): 5-methyl modified nucleotide
  modified_base (7)..(7): 5-methyl modified nucleotide
  modified_base (11)..(11): 5-methyl modified nucleotide
  modified_base (12)..(12): 5-methyl modified nucleotide
  modified_base (13)..(13): 5-methyl modified nucleotide
  modified_base (18)..(18): bicyclic nucleic acid (BNA)
tcuguccaagcccgguug

SEQ ID NO: 15871 - DNA, 17 bp, Artificial Sequence
  source: /note="Description of Artificial Sequence: Synthetic oligonucleotide"
  source: /note="Description of Combined DNA/RNA Molecule: Synthetic oligonucleotide"
  source: /note="DNA/RNA"
  modified_base (1)..(1): bicyclic nucleic acid (BNA)
  modified_base (2)..(2): 5-methyl modified nucleotide
  modified_base (6)..(6): 5-methyl modified nucleotide
  modified_base (7)..(7): 5-methyl modified nucleotide
  modified_base (11)..(11): 5-methyl modified nucleotide
  modified_base (12)..(12): 5-methyl modified nucleotide
  modified_base (13)..(13): 5-methyl modified nucleotide
  modified_base (17)..(17): bicyclic nucleic acid (BNA)
tcuguccaagcccggut

SEQ ID NO: 15872 - DNA, 16 bp, Artificial Sequence
  source: /note="Description of Artificial Sequence: Synthetic oligonucleotide"
  source: /note="Description of Combined DNA/RNA Molecule: Synthetic oligonucleotide"
  source: /note="DNA/RNA"
  modified_base (1)..(1): bicyclic nucleic acid (BNA)
  modified_base (2)..(2): 5-methyl modified nucleotide
  modified_base (6)..(6): 5-methyl modified nucleotide
  modified_base (7)..(7): 5-methyl modified nucleotide
  modified_base (11)..(11): 5-methyl modified nucleotide
  modified_base (12)..(12): 5-methyl modified nucleotide
  modified_base (13)..(13): 5-methyl modified nucleotide
  modified_base (16)..(16): bicyclic nucleic acid (BNA)
tcuguccaagcccggt

SEQ ID NO: 15873 - DNA, 15 bp, Artificial Sequence
  source: /note="Description of Artificial Sequence: Synthetic oligonucleotide"
  source: /note="Description of Combined DNA/RNA Molecule: Synthetic oligonucleotide"
  source: /note="DNA/RNA"
  modified_base (1)..(1): bicyclic nucleic acid (BNA)
  modified_base (2)..(2): 5-methyl modified nucleotide
  modified_base (6)..(6): 5-methyl modified nucleotide
  modified_base (7)..(7): 5-methyl modified nucleotide
  modified_base (11)..(11): 5-methyl modified nucleotide
  modified_base (12)..(12): 5-methyl modified nucleotide
  modified_base (13)..(13): 5-methyl modified nucleotide
  modified_base (15)..(15): bicyclic nucleic acid (BNA)
tcuguccaagcccgg

SEQ ID NO: 15874 - DNA, 14 bp, Artificial Sequence
  source: /note="Description of Artificial Sequence: Synthetic oligonucleotide"
  source: /note="Description of Combined DNA/RNA Molecule: Synthetic oligonucleotide"
  source: /note="DNA/RNA"
  modified_base (1)..(1): bicyclic nucleic acid (BNA)
  modified_base (2)..(2): 5-methyl modified nucleotide
  modified_base (6)..(6): 5-methyl modified nucleotide
  modified_base (7)..(7): 5-methyl modified nucleotide
  modified_base (11)..(11): 5-methyl modified nucleotide
  modified_base (12)..(12): 5-methyl modified nucleotide
  modified_base (13)..(13): 5-methyl modified nucleotide
  modified_base (14)..(14): bicyclic nucleic acid (BNA)
tcuguccaagcccg

SEQ ID NO: 15875 - DNA, 13 bp, Artificial Sequence
  source: /note="Description of Artificial Sequence: Synthetic oligonucleotide"
  source: /note="Description of Combined DNA/RNA Molecule: Synthetic oligonucleotide"
  source: /note="DNA/RNA"
  modified_base (1)..(1): bicyclic nucleic acid (BNA)
  modified_base (2)..(2): 5-methyl modified nucleotide
  modified_base (6)..(6): 5-methyl modified nucleotide
  modified_base (7)..(7): 5-methyl modified nucleotide
  modified_base (11)..(11): 5-methyl modified nucleotide
  modified_base (12)..(12): 5-methyl modified nucleotide
  modified_base (13)..(13): 5-methyl bicyclic nucleic acid
tcuguccaagccc

SEQ ID NO: 15876 - DNA, 12 bp, Artificial Sequence
  source: /note="Description of Artificial Sequence: Synthetic oligonucleotide"
  source: /note="Description of Combined DNA/RNA Molecule: Synthetic oligonucleotide"
  source: /note="DNA/RNA"
  modified_base (1)..(1): bicyclic nucleic acid (BNA)
  modified_base (2)..(2): 5-methyl modified nucleotide
  modified_base (6)..(6): 5-methyl modified nucleotide
  modified_base (7)..(7): 5-methyl modified nucleotide
  modified_base (11)..(11): 5-methyl modified nucleotide
  modified_base (12)..(12): 5-methyl bicyclic nucleic acid
tcuguccaagcc

SEQ ID NO: 15877 - DNA, 11 bp, Artificial Sequence
  source: /note="Description of Artificial Sequence: Synthetic oligonucleotide"
  source: /note="Description of Combined DNA/RNA Molecule: Synthetic oligonucleotide"
  source: /note="DNA/RNA"
  modified_base (1)..(1): bicyclic nucleic acid (BNA)
  modified_base (2)..(2): 5-methyl modified nucleotide
  modified_base (6)..(6): 5-methyl modified nucleotide
  modified_base (7)..(7): 5-methyl modified nucleotide
  modified_base (11)..(11): 5-methyl bicyclic nucleic acid
tcuguccaagc

SEQ ID NO: 15878 - DNA, 10 bp, Artificial Sequence
  source: /note="Description of Artificial Sequence: Synthetic oligonucleotide"
  source: /note="Description of Combined DNA/RNA Molecule: Synthetic oligonucleotide"
  source: /note="DNA/RNA"
  modified_base (1)..(1): bicyclic nucleic acid (BNA)
  modified_base (2)..(2): 5-methyl modified nucleotide
  modified_base (6)..(6): 5-methyl modified nucleotide
  modified_base (7)..(7): 5-methyl modified nucleotide
  modified_base (10)..(10): bicyclic nucleic acid (BNA)
tcuguccaag

SEQ ID NO: 15879 - DNA, 9 bp, Artificial Sequence
  source: /note="Description of Artificial Sequence: Synthetic oligonucleotide"
  source: /note="Description of Combined DNA/RNA Molecule: Synthetic oligonucleotide"
  source: /note="DNA/RNA"
  modified_base (1)..(1): bicyclic nucleic acid (BNA)
  modified_base (2)..(2): 5-methyl modified nucleotide
  modified_base (6)..(6): 5-methyl modified nucleotide
  modified_base (7)..(7): 5-methyl modified nucleotide
  modified_base (9)..(9): bicyclic nucleic acid (BNA)
tcuguccaa

SEQ ID NO: 15880 - DNA, 8 bp, Artificial Sequence
  source: /note="Description of Artificial Sequence: Synthetic oligonucleotide"
  source: /note="Description of Combined DNA/RNA Molecule: Synthetic oligonucleotide"
  source: /note="DNA/RNA"
  modified_base (1)..(1): bicyclic nucleic acid (BNA)
  modified_base (2)..(2): 5-methyl modified nucleotide
  modified_base (6)..(6): 5-methyl modified nucleotide
  modified_base (7)..(7): 5-methyl modified nucleotide
  modified_base (8)..(8): bicyclic nucleic acid (BNA)
tcugucca

SEQ ID NO: 15881 - RNA, 17 nt, Artificial Sequence
  source: /note="Description of Artificial Sequence: Synthetic oligonucleotide"
  source: /note="RNA"
  modified_base (1)..(1): 5-methyl bicyclic nucleic acid
  modified_base (5)..(5): 5-methyl modified nucleotide
  modified_base (6)..(6): 5-methyl modified nucleotide
  modified_base (10)..(10): 5-methyl modified nucleotide
  modified_base (11)..(11): 5-methyl modified nucleotide
  modified_base (12)..(12): 5-methyl modified nucleotide
  modified_base (17)..(17): bicyclic nucleic acid (BNA)
cuguccaagcccgguug

SEQ ID NO: 15882 - DNA, 16 bp, Artificial Sequence
  source: /note="Description of Artificial Sequence: Synthetic oligonucleotide"
  source: /note="Description of Combined DNA/RNA Molecule: Synthetic oligonucleotide"
  source: /note="DNA/RNA"
  modified_base (1)..(1): 5-methyl bicyclic nucleic acid
  modified_base (5)..(5): 5-methyl modified nucleotide
  modified_base (6)..(6): 5-methyl modified nucleotide
  modified_base (10)..(10): 5-methyl modified nucleotide
  modified_base (11)..(11): 5-methyl modified nucleotide
  modified_base (12)..(12): 5-methyl modified nucleotide
  modified_base (16)..(16): bicyclic nucleic acid (BNA)
cuguccaagcccggut

SEQ ID NO: 15883 - DNA, 15 bp, Artificial Sequence
  source: /note="Description of Artificial Sequence: Synthetic oligonucleotide"
  source: /note="Description of Combined DNA/RNA Molecule: Synthetic oligonucleotide"
  source: /note="DNA/RNA"
  modified_base (1)..(1): 5-methyl bicyclic nucleic acid
  modified_base (5)..(5): 5-methyl modified nucleotide
  modified_base (6)..(6): 5-methyl modified nucleotide
  modified_base (10)..(10): 5-methyl modified nucleotide
  modified_base (11)..(11): 5-methyl modified nucleotide
  modified_base (12)..(12): 5-methyl modified nucleotide
  modified_base (15)..(15): bicyclic nucleic acid (BNA)
cuguccaagcccggt

SEQ ID NO: 15884 - RNA, 14 nt, Artificial Sequence
  source: /note="Description of Artificial Sequence: Synthetic oligonucleotide"
  source: /note="RNA"
  modified_base (1)..(1): 5-methyl bicyclic nucleic acid
  modified_base (5)..(5): 5-methyl modified nucleotide
  modified_base (6)..(6): 5-methyl modified nucleotide
  modified_base (10)..(10): 5-methyl modified nucleotide
  modified_base (11)..(11): 5-methyl modified nucleotide
  modified_base (12)..(12): 5-methyl modified nucleotide
  modified_base (14)..(14): bicyclic nucleic acid (BNA)
cuguccaagcccgg

SEQ ID NO: 15885 - RNA, 13 nt, Artificial Sequence
  source: /note="Description of Artificial Sequence: Synthetic oligonucleotide"
  source: /note="RNA"
  modified_base (1)..(1): 5-methyl bicyclic nucleic acid
  modified_base (5)..(5): 5-methyl modified nucleotide
  modified_base (6)..(6): 5-methyl modified nucleotide
  modified_base (10)..(10): 5-methyl modified nucleotide
  modified_base (11)..(11): 5-methyl modified nucleotide
  modified_base (12)..(12): 5-methyl modified nucleotide
  modified_base (13)..(13): bicyclic nucleic acid (BNA)
cuguccaagcccg

SEQ ID NO: 15886 - RNA, 12 nt, Artificial Sequence
  source: /note="Description of Artificial Sequence: Synthetic oligonucleotide"
  source: /note="RNA"
  modified_base (1)..(1): 5-methyl bicyclic nucleic acid
  modified_base (5)..(5): 5-methyl modified nucleotide
  modified_base (6)..(6): 5-methyl modified nucleotide
  modified_base (10)..(10): 5-methyl modified nucleotide
  modified_base (11)..(11): 5-methyl modified nucleotide
  modified_base (12)..(12): 5-methyl bicyclic nucleic acid
cuguccaagccc

SEQ ID NO: 15887 - RNA, 11 nt, Artificial Sequence
  source: /note="Description of Artificial Sequence: Synthetic oligonucleotide"
  source: /note="RNA"
  modified_base (1)..(1): 5-methyl bicyclic nucleic acid
  modified_base (5)..(5): 5-methyl modified nucleotide
  modified_base (6)..(6): 5-methyl modified nucleotide
  modified_base (10)..(10): 5-methyl modified nucleotide
  modified_base (11)..(11): 5-methyl bicyclic nucleic acid
cuguccaagcc

SEQ ID NO: 15888 - RNA, 10 nt, Artificial Sequence
  source: /note="Description of Artificial Sequence: Synthetic oligonucleotide"
  source: /note="RNA"
  modified_base (1)..(1): 5-methyl bicyclic nucleic acid
  modified_base (5)..(5): 5-methyl modified nucleotide
  modified_base (6)..(6): 5-methyl modified nucleotide
  modified_base (10)..(10): 5-methyl bicyclic nucleic acid
cuguccaagc

SEQ ID NO: 15889 - RNA, 9 nt, Artificial Sequence
  source: /note="Description of Artificial Sequence: Synthetic oligonucleotide"
  source: /note="RNA"
  modified_base (1)..(1): 5-methyl bicyclic nucleic acid
  modified_base (5)..(5): 5-methyl modified nucleotide
  modified_base (6)..(6): 5-methyl modified nucleotide
  modified_base (9)..(9): bicyclic nucleic acid (BNA)
cuguccaag

SEQ ID NO: 15890 - RNA, 8 nt, Artificial Sequence
  source: /note="Description of Artificial Sequence: Synthetic oligonucleotide"
  source: /note="RNA"
  modified_base (1)..(1): 5-methyl bicyclic nucleic acid
  modified_base (5)..(5): 5-methyl modified nucleotide
  modified_base (6)..(6): 5-methyl modified nucleotide
  modified_base (8)..(8): bicyclic nucleic acid (BNA)
cuguccaa

SEQ ID NO: 15891 - RNA, 20 nt, Artificial Sequence
  source: /note="Description of Artificial Sequence: Synthetic oligonucleotide"
  source: /note="RNA"
  modified_base (1)..(1): bicyclic nucleic acid (BNA)
  modified_base (4)..(4): 5-methyl modified nucleotide
  modified_base (8)..(8): 5-methyl modified nucleotide
  modified_base (9)..(9): 5-methyl modified nucleotide
  modified_base (13)..(13): 5-methyl modified nucleotide
  modified_base (14)..(14): 5-methyl modified nucleotide
  modified_base (15)..(15): 5-methyl modified nucleotide
  modified_base (20)..(20): bicyclic nucleic acid (BNA)
guucuguccaagcccgguug

SEQ ID NO: 15892 - DNA, 19 bp, Artificial Sequence
  source: /note="Description of Artificial Sequence: Synthetic oligonucleotide"
  source: /note="Description of Combined DNA/RNA Molecule: Synthetic oligonucleotide"
  source: /note="DNA/RNA"
  modified_base (1)..(1): bicyclic nucleic acid (BNA)
  modified_base (4)..(4): 5-methyl modified nucleotide
  modified_base (8)..(8): 5-methyl modified nucleotide
  modified_base (9)..(9): 5-methyl modified nucleotide
  modified_base (13)..(13): 5-methyl modified nucleotide
  modified_base (14)..(14): 5-methyl modified nucleotide
  modified_base (15)..(15): 5-methyl modified nucleotide
  modified_base (19)..(19): bicyclic nucleic acid (BNA)
guucuguccaagcccggut

SEQ ID NO: 15893 - DNA, 18 bp, Artificial Sequence
  source: /note="Description of Artificial Sequence: Synthetic oligonucleotide"
  source: /note="Description of Combined DNA/RNA Molecule: Synthetic oligonucleotide"
  source: /note="DNA/RNA"
  modified_base (1)..(1): bicyclic nucleic acid (BNA)
  modified_base (4)..(4): 5-methyl modified nucleotide
  modified_base (8)..(8): 5-methyl modified nucleotide
  modified_base (9)..(9): 5-methyl modified nucleotide
  modified_base (13)..(13): 5-methyl modified nucleotide
  modified_base (14)..(14): 5-methyl modified nucleotide
  modified_base (15)..(15): 5-methyl modified nucleotide
  modified_base (18)..(18): bicyclic nucleic acid (BNA)
guucuguccaagcccggt

SEQ ID NO: 15894 - RNA, 17 nt, Artificial Sequence
  source: /note="Description of Artificial Sequence: Synthetic oligonucleotide"
  source: /note="RNA"
  modified_base (1)..(1): bicyclic nucleic acid (BNA)
  modified_base (4)..(4): 5-methyl modified nucleotide
  modified_base (8)..(8): 5-methyl modified nucleotide
  modified_base (9)..(9): 5-methyl modified nucleotide
  modified_base (13)..(13): 5-methyl modified nucleotide
  modified_base (14)..(14): 5-methyl modified nucleotide
  modified_base (15)..(15): 5-methyl modified nucleotide
  modified_base (17)..(17): bicyclic nucleic acid (BNA)
guucuguccaagcccgg

SEQ ID NO: 15895 - RNA, 16 nt, Artificial Sequence
  source: /note="Description of Artificial Sequence: Synthetic oligonucleotide"
  source: /note="RNA"
  modified_base (1)..(1): bicyclic nucleic acid (BNA)
  modified_base (4)..(4): 5-methyl modified nucleotide
  modified_base (8)..(8): 5-methyl modified nucleotide
  modified_base (9)..(9): 5-methyl modified nucleotide
  modified_base (13)..(13): 5-methyl modified nucleotide
  modified_base (14)..(14): 5-methyl modified nucleotide
  modified_base (15)..(15): 5-methyl modified nucleotide
  modified_base (16)..(16): bicyclic nucleic acid (BNA)
guucuguccaagcccg

SEQ ID NO: 15896 - RNA, 15 nt, Artificial Sequence
  source: /note="Description of Artificial Sequence: Synthetic oligonucleotide"
  source: /note="RNA"
  modified_base (1)..(1): bicyclic nucleic acid (BNA)
  modified_base (4)..(4): 5-methyl modified nucleotide
  modified_base (8)..(8): 5-methyl modified nucleotide
  modified_base (9)..(9): 5-methyl modified nucleotide
  modified_base (13)..(13): 5-methyl modified nucleotide
  modified_base (14)..(14): 5-methyl modified nucleotide
  modified_base (15)..(15): 5-methyl bicyclic nucleic acid
guucuguccaagccc

SEQ ID NO: 15897 - RNA, 14 nt, Artificial Sequence
  source: /note="Description of Artificial Sequence: Synthetic oligonucleotide"
  source: /note="RNA"
  modified_base (1)..(1): bicyclic nucleic acid (BNA)
  modified_base (4)..(4): 5-methyl modified nucleotide
  modified_base (8)..(8): 5-methyl modified nucleotide
  modified_base (9)..(9): 5-methyl modified nucleotide
  modified_base (13)..(13): 5-methyl modified nucleotide
  modified_base (14)..(14): 5-methyl bicyclic nucleic acid
guucuguccaagcc

SEQ ID NO: 15898 - RNA, 13 nt, Artificial Sequence
  source: /note="Description of Artificial Sequence: Synthetic oligonucleotide"
  source: /note="RNA"
  modified_base (1)..(1): bicyclic nucleic acid (BNA)
  modified_base (4)..(4): 5-methyl modified nucleotide
  modified_base (8)..(8): 5-methyl modified nucleotide
  modified_base (9)..(9): 5-methyl modified nucleotide
  modified_base (13)..(13): 5-methyl bicyclic nucleic acid
guucuguccaagc

SEQ ID NO: 15899 - RNA, 12 nt, Artificial Sequence
  source: /note="Description of Artificial Sequence: Synthetic oligonucleotide"
  source: /note="RNA"
  modified_base (1)..(1): bicyclic nucleic acid (BNA)
  modified_base (4)..(4): 5-methyl modified nucleotide
  modified_base (8)..(8): 5-methyl modified nucleotide
  modified_base (9)..(9): 5-methyl modified nucleotide
  modified_base (12)..(12): bicyclic nucleic acid (BNA)
guucuguccaag

SEQ ID NO: 15900 - RNA, 11 nt, Artificial Sequence
  source: /note="Description of Artificial Sequence: Synthetic oligonucleotide"
  source: /note="RNA"
  modified_base (1)..(1): bicyclic nucleic acid (BNA)
  modified_base (4)..(4): 5-methyl modified nucleotide
  modified_base (8)..(8): 5-methyl modified nucleotide
  modified_base (9)..(9): 5-methyl modified nucleotide
  modified_base (11)..(11): bicyclic nucleic acid (BNA)
guucuguccaa

SEQ ID NO: 15901 - RNA, 10 nt, Artificial Sequence
  source: /note="Description of Artificial Sequence: Synthetic oligonucleotide"
  source: /note="RNA"
  modified_base (1)..(1): bicyclic nucleic acid (BNA)
  modified_base (4)..(4): 5-methyl modified nucleotide
  modified_base (8)..(8): 5-methyl modified nucleotide
  modified_base (9)..(9): 5-methyl modified nucleotide
  modified_base (10)..(10): bicyclic nucleic acid (BNA)
guucugucca

SEQ ID NO: 15902 - RNA, 9 nt, Artificial Sequence
  source: /note="Description of Artificial Sequence: Synthetic oligonucleotide"
  source: /note="RNA"
  modified_base (1)..(1): bicyclic nucleic acid (BNA)
  modified_base (4)..(4): 5-methyl modified nucleotide
  modified_base (8)..(8): 5-methyl modified nucleotide
  modified_base (9)..(9): 5-methyl bicyclic nucleic acid
guucugucc

SEQ ID NO: 15903 - RNA, 8 nt, Artificial Sequence
  source: /note="Description of Artificial Sequence: Synthetic oligonucleotide"
  source: /note="RNA"
  modified_base (1)..(1): bicyclic nucleic acid (BNA)
  modified_base (4)..(4): 5-methyl modified nucleotide
  modified_base (8)..(8): 5-methyl bicyclic nucleic acid
guucuguc

SEQ ID NO: 15904 - DNA, 20 bp, Artificial Sequence
  source: /note="Description of Artificial Sequence: Synthetic oligonucleotide"
  source: /note="Description of Combined DNA/RNA Molecule: Synthetic oligonucleotide"
  source: /note="DNA/RNA"
  modified_base (1)..(1): bicyclic nucleic acid (BNA)
  modified_base (5)..(5): 5-methyl modified nucleotide
  modified_base (9)..(9): 5-methyl modified nucleotide
  modified_base (10)..(10): 5-methyl modified nucleotide
  modified_base (14)..(14): 5-methyl modified nucleotide
  modified_base (15)..(15): 5-methyl modified nucleotide
  modified_base (16)..(16): 5-methyl modified nucleotide
  modified_base (20)..(20): bicyclic nucleic acid (BNA)
aguucuguccaagcccggut

SEQ ID NO: 15905 - DNA, 19 bp, Artificial Sequence
  source: /note="Description of Artificial Sequence: Synthetic oligonucleotide"
  source: /note="Description of Combined DNA/RNA Molecule: Synthetic oligonucleotide"
  source: /note="DNA/RNA"
  modified_base (1)..(1): bicyclic nucleic acid (BNA)
  modified_base (5)..(5): 5-methyl modified nucleotide
  modified_base (9)..(9): 5-methyl modified nucleotide
  modified_base (10)..(10): 5-methyl modified nucleotide
  modified_base (14)..(14): 5-methyl modified nucleotide
  modified_base (15)..(15): 5-methyl modified nucleotide
  modified_base (16)..(16): 5-methyl modified nucleotide
  modified_base (19)..(19): bicyclic nucleic acid (BNA)
aguucuguccaagcccggt

SEQ ID NO: 15906 - RNA, 18 nt, Artificial Sequence
  source: /note="Description of Artificial Sequence: Synthetic oligonucleotide"
  source: /note="RNA"
  modified_base (1)..(1): bicyclic nucleic acid (BNA)
  modified_base (5)..(5): 5-methyl modified nucleotide
  modified_base (9)..(9): 5-methyl modified nucleotide
  modified_base (10)..(10): 5-methyl modified nucleotide
  modified_base (14)..(14): 5-methyl modified nucleotide
  modified_base (15)..(15): 5-methyl modified nucleotide
  modified_base (16)..(16): 5-methyl modified nucleotide
  modified_base (18)..(18): bicyclic nucleic acid (BNA)
aguucuguccaagcccgg

SEQ ID NO: 15907 - RNA, 17 nt, Artificial Sequence
  source: /note="Description of Artificial Sequence: Synthetic oligonucleotide"
  source: /note="RNA"
  modified_base (1)..(1): bicyclic nucleic acid (BNA)
  modified_base (5)..(5): 5-methyl modified nucleotide
  modified_base (9)..(9): 5-methyl modified nucleotide
  modified_base (10)..(10): 5-methyl modified nucleotide
  modified_base (14)..(14): 5-methyl modified nucleotide
  modified_base (15)..(15): 5-methyl modified nucleotide
  modified_base (16)..(16): 5-methyl modified nucleotide
  modified_base (17)..(17): bicyclic nucleic acid (BNA)
aguucuguccaagcccg

SEQ ID NO: 15908 - RNA, 16 nt, Artificial Sequence
  source: /note="Description of Artificial Sequence: Synthetic oligonucleotide"
  source: /note="RNA"
  modified_base (1)..(1): bicyclic nucleic acid (BNA)
  modified_base (5)..(5): 5-methyl modified nucleotide
  modified_base (9)..(9): 5-methyl modified nucleotide
  modified_base (10)..(10): 5-methyl modified nucleotide
  modified_base (14)..(14): 5-methyl modified nucleotide
  modified_base (15)..(15): 5-methyl modified nucleotide
  modified_base (16)..(16): 5-methyl bicyclic nucleic acid
aguucuguccaagccc

SEQ ID NO: 15909 - RNA, 15 nt, Artificial Sequence
  source: /note="Description of Artificial Sequence: Synthetic oligonucleotide"
  source: /note="RNA"
  modified_base (1)..(1): bicyclic nucleic acid (BNA)
  modified_base (5)..(5): 5-methyl modified nucleotide
  modified_base (9)..(9): 5-methyl modified nucleotide
  modified_base (10)..(10): 5-methyl modified nucleotide
  modified_base (14)..(14): 5-methyl modified nucleotide
  modified_base (15)..(15): 5-methyl bicyclic nucleic acid
aguucuguccaagcc

SEQ ID NO: 15910 - RNA, 14 nt, Artificial Sequence
  source: /note="Description of Artificial Sequence: Synthetic oligonucleotide"
  source: /note="RNA"
  modified_base (1)..(1): bicyclic nucleic acid (BNA)
  modified_base (5)..(5): 5-methyl modified nucleotide
  modified_base (9)..(9): 5-methyl modified nucleotide
  modified_base (10)..(10): 5-methyl modified nucleotide
  modified_base (14)..(14): 5-methyl bicyclic nucleic acid
aguucuguccaagc

SEQ ID NO: 15911 - RNA, 13 nt, Artificial Sequence
  source: /note="Description of Artificial Sequence: Synthetic oligonucleotide"
  source: /note="RNA"
  modified_base (1)..(1): bicyclic nucleic acid (BNA)
  modified_base (5)..(5): 5-methyl modified nucleotide
  modified_base (9)..(9): 5-methyl modified nucleotide
  modified_base (10)..(10): 5-methyl modified nucleotide
  modified_base (13)..(13): bicyclic nucleic acid (BNA)
aguucuguccaag

SEQ ID NO: 15912 - RNA, 12 nt, Artificial Sequence
  source: /note="Description of Artificial Sequence: Synthetic oligonucleotide"
  source: /note="RNA"
  modified_base (1)..(1): bicyclic nucleic acid (BNA)
  modified_base (5)..(5): 5-methyl modified nucleotide
  modified_base (9)..(9): 5-methyl modified nucleotide
  modified_base (10)..(10): 5-methyl modified nucleotide
  modified_base (12)..(12): bicyclic nucleic acid (BNA)
aguucuguccaa

SEQ ID NO: 15913 - RNA, 11 nt, Artificial Sequence
  source: /note="Description of Artificial Sequence: Synthetic oligonucleotide"
  source: /note="RNA"
  modified_base (1)..(1): bicyclic nucleic acid (BNA)
  modified_base (5)..(5): 5-methyl modified nucleotide
  modified_base (9)..(9): 5-methyl modified nucleotide
  modified_base (10)..(10): 5-methyl modified nucleotide
  modified_base (11)..(11): bicyclic nucleic acid (BNA)
aguucugucca

SEQ ID NO: 15914 - RNA, 10 nt, Artificial Sequence
  source: /note="Description of Artificial Sequence: Synthetic oligonucleotide"
  source: /note="RNA"
  modified_base (1)..(1): bicyclic nucleic acid (BNA)
  modified_base (5)..(5): 5-methyl modified nucleotide
  modified_base (9)..(9): 5-methyl modified nucleotide
  modified_base (10)..(10): 5-methyl bicyclic nucleic acid
aguucugucc

SEQ ID NO: 15915 - RNA, 9 nt, Artificial Sequence
  source: /note="Description of Artificial Sequence: Synthetic oligonucleotide"
  source: /note="RNA"
  modified_base (1)..(1): bicyclic nucleic acid (BNA)
  modified_base (5)..(5): 5-methyl modified nucleotide
  modified_base (9)..(9): 5-methyl bicyclic nucleic acid
aguucuguc

SEQ ID NO: 15916 - DNA, 8 bp, Artificial Sequence
  source: /note="Description of Artificial Sequence: Synthetic oligonucleotide"
  source: /note="Description of Combined DNA/RNA Molecule: Synthetic oligonucleotide"
  source: /note="DNA/RNA"
  modified_base (1)..(1): bicyclic nucleic acid (BNA)
  modified_base (5)..(5): 5-methyl modified nucleotide
  modified_base (8)..(8): bicyclic nucleic acid (BNA)
aguucugt

SEQ ID NO: 15917 - DNA, 20 bp, Artificial Sequence
  source: /note="Description of Artificial Sequence: Synthetic oligonucleotide"
  source: /note="Description of Combined DNA/RNA Molecule: Synthetic oligonucleotide"
  source: /note="DNA/RNA"
  modified_base (1)..(1): bicyclic nucleic acid (BNA)
  modified_base (6)..(6): 5-methyl modified nucleotide
  modified_base (10)..(10): 5-methyl modified nucleotide
  modified_base (11)..(11): 5-methyl modified nucleotide
  modified_base (15)..(15): 5-methyl modified nucleotide
  modified_base (16)..(16): 5-methyl modified nucleotide
  modified_base (17)..(17): 5-methyl modified nucleotide
  modified_base (20)..(20): bicyclic nucleic acid (BNA)
aaguucuguccaagcccggt

SEQ ID NO: 15918 - RNA, 19 nt, Artificial Sequence
  source: /note="Description of Artificial Sequence: Synthetic oligonucleotide"
  source: /note="RNA"
  modified_base (1)..(1): bicyclic nucleic acid (BNA)
  modified_base (6)..(6): 5-methyl modified nucleotide
  modified_base (10)..(10): 5-methyl modified nucleotide
  modified_base (11)..(11): 5-methyl modified nucleotide
  modified_base (15)..(15): 5-methyl modified nucleotide
  modified_base (16)..(16): 5-methyl modified nucleotide
  modified_base (17)..(17): 5-methyl modified nucleotide
  modified_base (19)..(19): bicyclic nucleic acid (BNA)
aaguucuguccaagcccgg

SEQ ID NO: 15919 - RNA, 18 nt, Artificial Sequence
  source: /note="Description of Artificial Sequence: Synthetic oligonucleotide"
  source: /note="RNA"
  modified_base (1)..(1): bicyclic nucleic acid (BNA)
  modified_base (6)..(6): 5-methyl modified nucleotide
  modified_base (10)..(10): 5-methyl modified nucleotide
  modified_base (11)..(11): 5-methyl modified nucleotide
  modified_base (15)..(15): 5-methyl modified nucleotide
  modified_base (16)..(16): 5-methyl modified nucleotide
  modified_base (17)..(17): 5-methyl modified nucleotide
  modified_base (18)..(18): bicyclic nucleic acid (BNA)
aaguucuguccaagcccg

SEQ ID NO: 15920 - RNA, 17 nt, Artificial Sequence
  source: /note="Description of Artificial Sequence: Synthetic oligonucleotide"
  source: /note="RNA"
  modified_base (1)..(1): bicyclic nucleic acid (BNA)
  modified_base (6)..(6): 5-methyl modified nucleotide
  modified_base (10)..(10): 5-methyl modified nucleotide
  modified_base (11)..(11): 5-methyl modified nucleotide
  modified_base (15)..(15): 5-methyl modified nucleotide
  modified_base (16)..(16): 5-methyl modified nucleotide
  modified_base (17)..(17): 5-methyl bicyclic nucleic acid
aaguucuguccaagccc

SEQ ID NO: 15921 - RNA, 16 nt, Artificial Sequence
  source: /note="Description of Artificial Sequence: Synthetic oligonucleotide"
  source: /note="RNA"
  modified_base (1)..(1): bicyclic nucleic acid (BNA)
  modified_base (6)..(6): 5-methyl modified nucleotide
  modified_base (10)..(10): 5-methyl modified nucleotide
  modified_base (11)..(11): 5-methyl modified nucleotide
  modified_base (15)..(15): 5-methyl modified nucleotide
  modified_base (16)..(16): 5-methyl bicyclic nucleic acid
aaguucuguccaagcc

SEQ ID NO: 15922 - RNA, 15 nt, Artificial Sequence
  source: /note="Description of Artificial Sequence: Synthetic oligonucleotide"
  source: /note="RNA"
  modified_base (1)..(1): bicyclic nucleic acid (BNA)
  modified_base (6)..(6): 5-methyl modified nucleotide
  modified_base (10)..(10): 5-methyl modified nucleotide
  modified_base (11)..(11): 5-methyl modified nucleotide
  modified_base (15)..(15): 5-methyl bicyclic nucleic acid
aaguucuguccaagc

SEQ ID NO: 15923 - RNA, 14 nt, Artificial Sequence
  source: /note="Description of Artificial Sequence: Synthetic oligonucleotide"
  source: /note="RNA"
  modified_base (1)..(1): bicyclic nucleic acid (BNA)
  modified_base (6)..(6): 5-methyl modified nucleotide
  modified_base (10)..(10): 5-methyl modified nucleotide
  modified_base (11)..(11): 5-methyl modified nucleotide
  modified_base (14)..(14): bicyclic nucleic acid (BNA)
aaguucuguccaag

SEQ ID NO: 15924 - RNA, 13 nt, Artificial Sequence
  source: /note="Description of Artificial Sequence: Synthetic oligonucleotide"
  source: /note="RNA"
  modified_base (1)..(1): bicyclic nucleic acid (BNA)
  modified_base (6)..(6): 5-methyl modified nucleotide
  modified_base (10)..(10): 5-methyl modified nucleotide
  modified_base (11)..(11): 5-methyl modified nucleotide
  modified_base (13)..(13): bicyclic nucleic acid (BNA)
aaguucuguccaa

SEQ ID NO: 15925 - RNA, 12 nt, Artificial Sequence
  source: /note="Description of Artificial Sequence: Synthetic oligonucleotide"
  source: /note="RNA"
  modified_base (1)..(1): bicyclic nucleic acid (BNA)
  modified_base (6)..(6): 5-methyl modified nucleotide
  modified_base (10)..(10): 5-methyl modified nucleotide
  modified_base (11)..(11): 5-methyl modified nucleotide
  modified_base (12)..(12): bicyclic nucleic acid (BNA)
aaguucugucca

SEQ ID NO: 15926 - RNA, 11 nt, Artificial Sequence
  source: /note="Description of Artificial Sequence: Synthetic oligonucleotide"
  source: /note="RNA"
  modified_base (1)..(1): bicyclic nucleic acid (BNA)
  modified_base (6)..(6): 5-methyl modified nucleotide
  modified_base (10)..(10): 5-methyl modified nucleotide
  modified_base (11)..(11): 5-methyl bicyclic nucleic acid
aaguucugucc

SEQ ID NO: 15927 - RNA, 10 nt, Artificial Sequence
  source: /note="Description of Artificial Sequence: Synthetic oligonucleotide"
  source: /note="RNA"
  modified_base (1)..(1): bicyclic nucleic acid (BNA)
  modified_base (6)..(6): 5-methyl modified nucleotide
  modified_base (10)..(10): 5-methyl bicyclic nucleic acid
aaguucuguc

SEQ ID NO: 15928 - DNA, 9 bp, Artificial Sequence
  source: /note="Description of Artificial Sequence: Synthetic oligonucleotide"
  source: /note="Description of Combined DNA/RNA Molecule: Synthetic oligonucleotide"
  source: /note="DNA/RNA"
  modified_base (1)..(1): bicyclic nucleic acid (BNA)
  modified_base (6)..(6): 5-methyl modified nucleotide
  modified_base (9)..(9): bicyclic nucleic acid (BNA)
aaguucugt

SEQ ID NO: 15929 - RNA, 8 nt, Artificial Sequence
  source: /note="Description of Artificial Sequence: Synthetic oligonucleotide"
  source: /note="RNA"
  modified_base (1)..(1): bicyclic nucleic acid (BNA)
  modified_base (6)..(6): 5-methyl modified nucleotide
  modified_base (8)..(8): bicyclic nucleic acid (BNA)
aaguucug

SEQ ID NO: 15930 - DNA, 20 bp, Artificial Sequence
  source: /note="Description of Artificial Sequence: Synthetic oligonucleotide"
  source: /note="Description of Combined DNA/RNA Molecule: Synthetic oligonucleotide"
  source: /note="DNA/RNA"
  modified_base (1)..(1): bicyclic nucleic acid (BNA)
  modified_base (7)..(7): 5-methyl modified nucleotide
  modified_base (11)..(11): 5-methyl modified nucleotide
  modified_base (12)..(12): 5-methyl modified nucleotide
  modified_base (16)..(16): 5-methyl modified nucleotide
  modified_base (17)..(17): 5-methyl modified nucleotide
  modified_base (18)..(18): 5-methyl modified nucleotide
  modified_base (20)..(20): bicyclic nucleic acid (BNA)
taaguucuguccaagcccgg

SEQ ID NO: 15931 - DNA, 19 bp, Artificial Sequence
  source: /note="Description of Artificial Sequence: Synthetic oligonucleotide"
  source: /note="Description of Combined DNA/RNA Molecule: Synthetic oligonucleotide"
  source: /note="DNA/RNA"
  modified_base (1)..(1): bicyclic nucleic acid (BNA)
  modified_base (7)..(7): 5-methyl modified nucleotide
  modified_base (11)..(11): 5-methyl modified nucleotide
  modified_base (12)..(12): 5-methyl modified nucleotide
  modified_base (16)..(16): 5-methyl modified nucleotide
  modified_base (17)..(17): 5-methyl modified nucleotide
  modified_base (18)..(18): 5-methyl modified nucleotide
  modified_base (19)..(19): bicyclic nucleic acid (BNA)
taaguucuguccaagcccg

SEQ ID NO: 15932 - DNA, 18 bp, Artificial Sequence
  source: /note="Description of Artificial Sequence: Synthetic oligonucleotide"
  source: /note="Description of Combined DNA/RNA Molecule: Synthetic oligonucleotide"
  source: /note="DNA/RNA"
  modified_base (1)..(1): bicyclic nucleic acid (BNA)
  modified_base (7)..(7): 5-methyl modified nucleotide
  modified_base (11)..(11): 5-methyl modified nucleotide
  modified_base (12)..(12): 5-methyl modified nucleotide
  modified_base (16)..(16): 5-methyl modified nucleotide
  modified_base (17)..(17): 5-methyl modified nucleotide
  modified_base (18)..(18): 5-methyl bicyclic nucleic acid
taaguucuguccaagccc

SEQ ID NO: 15933 - DNA, 17 bp, Artificial Sequence
  source: /note="Description of Artificial Sequence: Synthetic oligonucleotide"
  source: /note="Description of Combined DNA/RNA Molecule: Synthetic oligonucleotide"
  source: /note="DNA/RNA"
  modified_base (1)..(1): bicyclic nucleic acid (BNA)
  modified_base (7)..(7): 5-methyl modified nucleotide
  modified_base (11)..(11): 5-methyl modified nucleotide
  modified_base (12)..(12): 5-methyl modified nucleotide
  modified_base (16)..(16): 5-methyl modified nucleotide
  modified_base (17)..(17): 5-methyl bicyclic nucleic acid
taaguucuguccaagcc

SEQ ID NO: 15934 - DNA, 16 bp, Artificial Sequence
  source: /note="Description of Artificial Sequence: Synthetic oligonucleotide"
  source: /note="Description of Combined DNA/RNA Molecule: Synthetic oligonucleotide"
  source: /note="DNA/RNA"
  modified_base (1)..(1): bicyclic nucleic acid (BNA)
  modified_base (7)..(7): 5-methyl modified nucleotide
  modified_base (11)..(11): 5-methyl modified nucleotide
  modified_base (12)..(12): 5-methyl modified nucleotide
  modified_base (16)..(16): 5-methyl bicyclic nucleic acid
taaguucuguccaagc

SEQ ID NO: 15935 - DNA, 14 bp, Artificial Sequence
  source: /note="Description of Artificial Sequence: Synthetic oligonucleotide"
  source: /note="Description of Combined DNA/RNA Molecule: Synthetic oligonucleotide"
  source: /note="DNA/RNA"
  modified_base (1)..(1): bicyclic nucleic acid (BNA)
  modified_base (7)..(7): 5-methyl modified nucleotide
  modified_base (11)..(11): 5-methyl modified nucleotide
  modified_base (12)..(12): 5-methyl modified nucleotide
  modified_base (14)..(14): bicyclic nucleic acid (BNA)
taaguucuguccaa

SEQ ID NO: 15936 - DNA, 13 bp, Artificial Sequence
  source: /note="Description of Artificial Sequence: Synthetic oligonucleotide"
  source: /note="Description of Combined DNA/RNA Molecule: Synthetic oligonucleotide"
  source: /note="DNA/RNA"
  modified_base (1)..(1): bicyclic nucleic acid (BNA)
  modified_base (7)..(7): 5-methyl modified nucleotide
  modified_base (11)..(11): 5-methyl modified nucleotide
  modified_base (12)..(12): 5-methyl modified nucleotide
  modified_base (13)..(13): bicyclic nucleic acid (BNA)
taaguucugucca

SEQ ID NO: 15937 - DNA, 12 bp, Artificial Sequence
  source: /note="Description of Artificial Sequence: Synthetic oligonucleotide"
  source: /note="Description of Combined DNA/RNA Molecule: Synthetic oligonucleotide"
  source: /note="DNA/RNA"
  modified_base (1)..(1): bicyclic nucleic acid (BNA)
  modified_base (7)..(7): 5-methyl modified nucleotide
  modified_base (11)..(11): 5-methyl modified nucleotide
  modified_base (12)..(12): 5-methyl bicyclic nucleic acid
taaguucugucc

SEQ ID NO: 15938 - DNA, 11 bp, Artificial Sequence
  source: /note="Description of Artificial Sequence: Synthetic oligonucleotide"
  source: /note="Description of Combined DNA/RNA Molecule: Synthetic oligonucleotide"
  source: /note="DNA/RNA"
  modified_base (1)..(1): bicyclic nucleic acid (BNA)
  modified_base (7)..(7): 5-methyl modified nucleotide
  modified_base (11)..(11): 5-methyl bicyclic nucleic acid
taaguucuguc

SEQ ID NO: 15939 - DNA, 10 bp, Artificial Sequence
  source: /note="Description of Artificial Sequence: Synthetic oligonucleotide"
  source: /note="Description of Combined DNA/RNA Molecule: Synthetic oligonucleotide"
  source: /note="DNA/RNA"
  modified_base (1)..(1): bicyclic nucleic acid (BNA)
  modified_base (7)..(7): 5-methyl modified nucleotide
  modified_base (10)..(10): bicyclic nucleic acid (BNA)
taaguucugt

SEQ ID NO: 15940 - DNA, 9 bp, Artificial Sequence
  source: /note="Description of Artificial Sequence: Synthetic oligonucleotide"
  source: /note="Description of Combined DNA/RNA Molecule: Synthetic oligonucleotide"
  source: /note="DNA/RNA"
  modified_base (1)..(1): bicyclic nucleic acid (BNA)
  modified_base (7)..(7): 5-methyl modified nucleotide
  modified_base (9)..(9): bicyclic nucleic acid (BNA)
taaguucug

SEQ ID NO: 15941 - DNA, 8 bp, Artificial Sequence
  source: /note="Description of Artificial Sequence: Synthetic oligonucleotide"
  source: /note="Description of Combined DNA/RNA Molecule: Synthetic oligonucleotide"
  source: /note="DNA/RNA"
  modified_base (1)..(1): bicyclic nucleic acid (BNA)
  modified_base (7)..(7): 5-methyl modified nucleotide
  modified_base (8)..(8): bicyclic nucleic acid (BNA)
taaguuct

SEQ ID NO: 15942 - RNA, 20 nt, Artificial Sequence
  source: /note="Description of Artificial Sequence: Synthetic oligonucleotide"
  source: /note="RNA"
  modified_base (1)..(1): bicyclic nucleic acid (BNA)
  modified_base (8)..(8): 5-methyl modified nucleotide
  modified_base (12)..(12): 5-methyl modified nucleotide
  modified_base (13)..(13): 5-methyl modified nucleotide
  modified_base (17)..(17): 5-methyl modified nucleotide
  modified_base (18)..(18): 5-methyl modified nucleotide
  modified_base (19)..(19): 5-methyl modified nucleotide
  modified_base (20)..(20): bicyclic nucleic acid (BNA)
guaaguucuguccaagcccg

SEQ ID NO: 15943 - RNA, 19 nt, Artificial Sequence
  source: /note="Description of Artificial Sequence: Synthetic oligonucleotide"
  source: /note="RNA"
  modified_base (1)..(1): bicyclic nucleic acid (BNA)
  modified_base (8)..(8): 5-methyl modified nucleotide
  modified_base (12)..(12): 5-methyl modified nucleotide
  modified_base (13)..(13): 5-methyl modified nucleotide
  modified_base (17)..(17): 5-methyl modified nucleotide
  modified_base (18)..(18): 5-methyl modified nucleotide
  modified_base (19)..(19): 5-methyl bicyclic nucleic acid
guaaguucuguccaagccc

SEQ ID NO: 15944 - RNA, 17 nt, Artificial Sequence
  source: /note="Description of Artificial Sequence: Synthetic oligonucleotide"
  source: /note="RNA"
  modified_base (1)..(1): bicyclic nucleic acid (BNA)
  modified_base (8)..(8): 5-methyl modified nucleotide
  modified_base (12)..(12): 5-methyl modified nucleotide
  modified_base (13)..(13): 5-methyl modified nucleotide
  modified_base (17)..(17): 5-methyl bicyclic nucleic acid
guaaguucuguccaagc

SEQ ID NO: 15945 - RNA, 16 nt, Artificial Sequence
  source: /note="Description of Artificial Sequence: Synthetic oligonucleotide"
  source: /note="RNA"
  modified_base (1)..(1): bicyclic nucleic acid (BNA)
  modified_base (8)..(8): 5-methyl modified nucleotide
  modified_base (12)..(12): 5-methyl modified nucleotide
  modified_base (13)..(13): 5-methyl modified nucleotide
  modified_base (16)..(16): bicyclic nucleic acid (BNA)
guaaguucuguccaag

SEQ ID NO: 15946 - RNA, 15 nt, Artificial Sequence
  source: /note="Description of Artificial Sequence: Synthetic oligonucleotide"
  source: /note="RNA"
  modified_base (1)..(1): bicyclic nucleic acid (BNA)
  modified_base (8)..(8): 5-methyl modified nucleotide
  modified_base (12)..(12): 5-methyl modified nucleotide
  modified_base (13)..(13): 5-methyl modified nucleotide
  modified_base (15)..(15): bicyclic nucleic acid (BNA)
guaaguucuguccaa

SEQ ID NO: 15947 - RNA, 14 nt, Artificial Sequence
  source: /note="Description of Artificial Sequence: Synthetic oligonucleotide"
  source: /note="RNA"
  modified_base (1)..(1): bicyclic nucleic acid (BNA)
  modified_base (8)..(8): 5-methyl modified nucleotide
  modified_base (12)..(12): 5-methyl modified nucleotide
  modified_base (13)..(13): 5-methyl modified nucleotide
  modified_base (14)..(14): bicyclic nucleic acid (BNA)
guaaguucugucca

SEQ ID NO: 15948 - RNA, 13 nt, Artificial Sequence
  source: /note="Description of Artificial Sequence: Synthetic oligonucleotide"
  source: /note="RNA"
  modified_base (1)..(1): bicyclic nucleic acid (BNA)
  modified_base (8)..(8): 5-methyl modified nucleotide
  modified_base (12)..(12): 5-methyl modified nucleotide
  modified_base (13)..(13): 5-methyl bicyclic nucleic acid
guaaguucugucc

SEQ ID NO: 15949 - RNA, 12 nt, Artificial Sequence
  source: /note="Description of Artificial Sequence: Synthetic oligonucleotide"
  source: /note="RNA"
  modified_base (1)..(1): bicyclic nucleic acid (BNA)
  modified_base (8)..(8): 5-methyl modified nucleotide
  modified_base (12)..(12): 5-methyl bicyclic nucleic acid
guaaguucuguc

SEQ ID NO: 15950 - DNA, 11 bp, Artificial Sequence
  source: /note="Description of Artificial Sequence: Synthetic oligonucleotide"
  source: /note="Description of Combined DNA/RNA Molecule: Synthetic oligonucleotide"
  source: /note="DNA/RNA"
  modified_base (1)..(1): bicyclic nucleic acid (BNA)
  modified_base (8)..(8): 5-methyl modified nucleotide
  modified_base (11)..(11): bicyclic nucleic acid (BNA)
guaaguucugt

SEQ ID NO: 15951 - RNA, 10 nt, Artificial Sequence
  source: /note="Description of Artificial Sequence: Synthetic oligonucleotide"
  source: /note="RNA"
  modified_base (1)..(1): bicyclic nucleic acid (BNA)
  modified_base (8)..(8): 5-methyl modified nucleotide
  modified_base (10)..(10): bicyclic nucleic acid (BNA)
guaaguucug

SEQ ID NO: 15952 - DNA, 9 bp, Artificial Sequence
  source: /note="Description of Artificial Sequence: Synthetic oligonucleotide"
  source: /note="Description of Combined DNA/RNA Molecule: Synthetic oligonucleotide"
  source: /note="DNA/RNA"
  modified_base (1)..(1): bicyclic nucleic acid (BNA)
  modified_base (8)..(8): 5-methyl modified nucleotide
  modified_base (9)..(9): bicyclic nucleic acid (BNA)
guaaguuct

SEQ ID NO: 15953 - RNA, 8 nt, Artificial Sequence
  source: /note="Description of Artificial Sequence: Synthetic oligonucleotide"
  source: /note="RNA"
  modified_base (1)..(1): bicyclic nucleic acid (BNA)
  modified_base (8)..(8): 5-methyl bicyclic nucleic acid
guaaguuc

SEQ ID NO: 15954 - RNA, 20 nt, Artificial Sequence
  source: /note="Description of Artificial Sequence: Synthetic oligonucleotide"
  source: /note="RNA"
  modified_base (1)..(1): bicyclic nucleic acid (BNA)
  modified_base (9)..(9): 5-methyl modified nucleotide
  modified_base (13)..(13): 5-methyl modified nucleotide
  modified_base (14)..(14): 5-methyl modified nucleotide
  modified_base (18)..(18): 5-methyl modified nucleotide
  modified_base (19)..(19): 5-methyl modified nucleotide
  modified_base (20)..(20): 5-methyl bicyclic nucleic acid
gguaaguucuguccaagccc

SEQ ID NO: 15955 - RNA, 19 nt, Artificial Sequence
  source: /note="Description of Artificial Sequence: Synthetic oligonucleotide"
  source: /note="RNA"
  modified_base (1)..(1): bicyclic nucleic acid (BNA)
  modified_base (9)..(9): 5-methyl modified nucleotide
  modified_base (13)..(13): 5-methyl modified nucleotide
  modified_base (14)..(14): 5-methyl modified nucleotide
  modified_base (18)..(18): 5-methyl modified nucleotide
  modified_base (19)..(19): 5-methyl bicyclic nucleic acid
gguaaguucuguccaagcc

SEQ ID NO: 15956 - RNA, 17 nt, Artificial Sequence
  source: /note="Description of Artificial Sequence: Synthetic oligonucleotide"
  source: /note="RNA"
  modified_base (1)..(1): bicyclic nucleic acid (BNA)
  modified_base (9)..(9): 5-methyl modified nucleotide
  modified_base (13)..(13): 5-methyl modified nucleotide
  modified_base (14)..(14): 5-methyl modified nucleotide
  modified_base (17)..(17): bicyclic nucleic acid (BNA)
gguaaguucuguccaag

SEQ ID NO: 15957 - RNA, 16 nt, Artificial Sequence
  source: /note="Description of Artificial Sequence: Synthetic oligonucleotide"
  source: /note="RNA"
  modified_base (1)..(1): bicyclic nucleic acid (BNA)
  modified_base (9)..(9): 5-methyl modified nucleotide
  modified_base (13)..(13): 5-methyl modified nucleotide
  modified_base (14)..(14): 5-methyl modified nucleotide
  modified_base (16)..(16): bicyclic nucleic acid (BNA)
gguaaguucuguccaa

SEQ ID NO: 15958 - RNA, 15 nt, Artificial Sequence
  source: /note="Description of Artificial Sequence: Synthetic oligonucleotide"
  source: /note="RNA"
  modified_base (1)..(1): bicyclic nucleic acid (BNA)
  modified_base (9)..(9): 5-methyl modified nucleotide
  modified_base (13)..(13): 5-methyl modified nucleotide
  modified_base (14)..(14): 5-methyl modified nucleotide
  modified_base (15)..(15): bicyclic nucleic acid (BNA)
gguaaguucugucca

SEQ ID NO: 15959 - RNA, 14 nt, Artificial Sequence
  source: /note="Description of Artificial Sequence: Synthetic oligonucleotide"
  source: /note="RNA"
  modified_base (1)..(1): bicyclic nucleic acid (BNA)
  modified_base (9)..(9): 5-methyl modified nucleotide
  modified_base (13)..(13): 5-methyl modified nucleotide
  modified_base (14)..(14): 5-methyl bicyclic nucleic acid
gguaaguucugucc

SEQ ID NO: 15960 - RNA, 13 nt, Artificial Sequence
  source: /note="Description of Artificial Sequence: Synthetic oligonucleotide"
  source: /note="RNA"
  modified_base (1)..(1): bicyclic nucleic acid (BNA)
  modified_base (9)..(9): 5-methyl modified nucleotide
  modified_base (13)..(13): 5-methyl bicyclic nucleic acid
gguaaguucuguc

SEQ ID NO: 15961 - DNA, 12 bp, Artificial Sequence
  source: /note="Description of Artificial Sequence: Synthetic oligonucleotide"
  source: /note="Description of Combined DNA/RNA Molecule: Synthetic oligonucleotide"
  source: /note="DNA/RNA"
  modified_base (1)..(1): bicyclic nucleic acid (BNA)
  modified_base (9)..(9): 5-methyl modified nucleotide
  modified_base (12)..(12): bicyclic nucleic acid (BNA)
gguaaguucugt

SEQ ID NO: 15962 - RNA, 11 nt, Artificial Sequence
  source: /note="Description of Artificial Sequence: Synthetic oligonucleotide"
  source: /note="RNA"
  modified_base (1)..(1): bicyclic nucleic acid (BNA)
  modified_base (9)..(9): 5-methyl modified nucleotide
  modified_base (11)..(11): bicyclic nucleic acid (BNA)
gguaaguucug

SEQ ID NO: 15963 - DNA, 10 bp, Artificial Sequence
  source: /note="Description of Artificial Sequence: Synthetic oligonucleotide"
  source: /note="Description of Combined DNA/RNA Molecule: Synthetic oligonucleotide"
  source: /note="DNA/RNA"
  modified_base (1)..(1): bicyclic nucleic acid (BNA)
  modified_base (9)..(9): 5-methyl modified nucleotide
  modified_base (10)..(10): bicyclic nucleic acid (BNA)
gguaaguuct

SEQ ID NO: 15964 - RNA, 9 nt, Artificial Sequence
  source: /note="Description of Artificial Sequence: Synthetic oligonucleotide"
  source: /note="RNA"
  modified_base (1)..(1): bicyclic nucleic acid (BNA)
  modified_base (9)..(9): 5-methyl bicyclic nucleic acid
gguaaguuc

SEQ ID NO: 15965 - DNA, 8 bp, Artificial Sequence
  source: /note="Description of Artificial Sequence: Synthetic oligonucleotide"
  source: /note="Description of Combined DNA/RNA Molecule: Synthetic oligonucleotide"
  source: /note="DNA/RNA"
  modified_base (1)..(1): bicyclic nucleic acid (BNA)
  modified_base (8)..(8): bicyclic nucleic acid (BNA)
gguaagut

SEQ ID NO: 15966 - RNA, 20 nt, Artificial Sequence
  source: /note="Description of Artificial Sequence: Synthetic oligonucleotide"
  source: /note="RNA"
  modified_base (1)..(1): 5-methyl bicyclic nucleic acid
  modified_base (10)..(10): 5-methyl modified nucleotide
  modified_base (14)..(14): 5-methyl modified nucleotide
  modified_base (15)..(15): 5-methyl modified nucleotide
  modified_base (19)..(19): 5-methyl modified nucleotide
  modified_base (20)..(20): 5-methyl bicyclic nucleic acid
cgguaaguucuguccaagcc

SEQ ID NO: 15967 - RNA, 19 nt, Artificial Sequence
  source: /note="Description of Artificial Sequence: Synthetic oligonucleotide"
  source: /note="RNA"
  modified_base (1)..(1): 5-methyl bicyclic nucleic acid
  modified_base (10)..(10): 5-methyl modified nucleotide
  modified_base (14)..(14): 5-methyl modified nucleotide
  modified_base (15)..(15): 5-methyl modified nucleotide
  modified_base (19)..(19): 5-methyl bicyclic nucleic acid
cgguaaguucuguccaagc

SEQ ID NO: 15968 - RNA, 18 nt, Artificial Sequence
  source: /note="Description of Artificial Sequence: Synthetic oligonucleotide"
  source: /note="RNA"
  modified_base (1)..(1): 5-methyl bicyclic nucleic acid
  modified_base (10)..(10): 5-methyl modified nucleotide
  modified_base (14)..(14): 5-methyl modified nucleotide
  modified_base (15)..(15): 5-methyl modified nucleotide
  modified_base (18)..(18): bicyclic nucleic acid (BNA)
cgguaaguucuguccaag

SEQ ID NO: 15969 - RNA, 17 nt, Artificial Sequence
  source: /note="Description of Artificial Sequence: Synthetic oligonucleotide"
  source: /note="RNA"
  modified_base (1)..(1): 5-methyl bicyclic nucleic acid
  modified_base (10)..(10): 5-methyl modified nucleotide
  modified_base (14)..(14): 5-methyl modified nucleotide
  modified_base (15)..(15): 5-methyl modified nucleotide
  modified_base (17)..(17): bicyclic nucleic acid (BNA)
cgguaaguucuguccaa

SEQ ID NO: 15970 - RNA, 16 nt, Artificial Sequence
  source: /note="Description of Artificial Sequence: Synthetic oligonucleotide"
  source: /note="RNA"
  modified_base (1)..(1): 5-methyl bicyclic nucleic acid
  modified_base (10)..(10): 5-methyl modified nucleotide
  modified_base (14)..(14): 5-methyl modified nucleotide
  modified_base (15)..(15): 5-methyl modified nucleotide
  modified_base (16)..(16): bicyclic nucleic acid (BNA)
cgguaaguucugucca

SEQ ID NO: 15971 - RNA, 15 nt, Artificial Sequence
  source: /note="Description of Artificial Sequence: Synthetic oligonucleotide"
  source: /note="RNA"
  modified_base (1)..(1): 5-methyl bicyclic nucleic acid
  modified_base (10)..(10): 5-methyl modified nucleotide
  modified_base (14)..(14): 5-methyl modified nucleotide
  modified_base (15)..(15): 5-methyl bicyclic nucleic acid
cgguaaguucugucc

SEQ ID NO: 15972 - RNA, 14 nt, Artificial Sequence
  source: /note="Description of Artificial Sequence: Synthetic oligonucleotide"
  source: /note="RNA"
  modified_base (1)..(1): 5-methyl bicyclic nucleic acid
  modified_base (10)..(10): 5-methyl modified nucleotide
  modified_base (14)..(14): 5-methyl bicyclic nucleic acid
cgguaaguucuguc

SEQ ID NO: 15973 - DNA, 13 bp, Artificial Sequence
  source: /note="Description of Artificial Sequence: Synthetic oligonucleotide"
  source: /note="Description of Combined DNA/RNA Molecule: Synthetic oligonucleotide"
  source: /note="DNA/RNA"
  modified_base (1)..(1): 5-methyl bicyclic nucleic acid
  modified_base (10)..(10): 5-methyl modified nucleotide
  modified_base (13)..(13): bicyclic nucleic acid (BNA)
cgguaaguucugt

SEQ ID NO: 15974 - RNA, 12 nt, Artificial Sequence
  source: /note="Description of Artificial Sequence: Synthetic oligonucleotide"
  source: /note="RNA"
  modified_base (1)..(1): 5-methyl bicyclic nucleic acid
  modified_base (10)..(10): 5-methyl modified nucleotide
  modified_base (12)..(12): bicyclic nucleic acid (BNA)
cgguaaguucug

SEQ ID NO: 15975 - DNA, 11 bp, Artificial Sequence
  source: /note="Description of Artificial Sequence: Synthetic oligonucleotide"
  source: /note="Description of Combined DNA/RNA Molecule: Synthetic oligonucleotide"
  source: /note="DNA/RNA"
  modified_base (1)..(1): 5-methyl bicyclic nucleic acid
  modified_base (10)..(10): 5-methyl modified nucleotide
  modified_base (11)..(11): bicyclic nucleic acid (BNA)
cgguaaguuct

SEQ ID NO: 15976 - RNA, 10 nt, Artificial Sequence
  source: /note="Description of Artificial Sequence: Synthetic oligonucleotide"
  source: /note="RNA"
  modified_base (1)..(1): 5-methyl bicyclic nucleic acid
  modified_base (10)..(10): 5-methyl bicyclic nucleic acid
cgguaaguuc

SEQ ID NO: 15977 - DNA, 9 bp, Artificial Sequence
  source: /note="Description of Artificial Sequence: Synthetic oligonucleotide"
  source: /note="Description of Combined DNA/RNA Molecule: Synthetic oligonucleotide"
  source: /note="DNA/RNA"
  modified_base (1)..(1): 5-methyl bicyclic nucleic acid
  modified_base (9)..(9): bicyclic nucleic acid (BNA)
cgguaagut

SEQ ID NO: 15978 - DNA, 8 bp, Artificial Sequence
  source: /note="Description of Artificial Sequence: Synthetic oligonucleotide"
  source: /note="Description of Combined DNA/RNA Molecule: Synthetic oligonucleotide"
  source: /note="DNA/RNA"
  modified_base (1)..(1): 5-methyl bicyclic nucleic acid
  modified_base (8)..(8): bicyclic nucleic acid (BNA)
cgguaagt

SEQ ID NO: 15979 - DNA, 20 bp, Artificial Sequence
  source: /note="Description of Artificial Sequence: Synthetic oligonucleotide"
  source: /note="Description of Combined DNA/RNA Molecule: Synthetic oligonucleotide"
  source: /note="DNA/RNA"
  modified_base (1)..(1): bicyclic nucleic acid (BNA)
  modified_base (2)..(2): 5-methyl modified nucleotide
  modified_base (11)..(11): 5-methyl modified nucleotide
  modified_base (15)..(15): 5-methyl modified nucleotide
  modified_base (16)..(16): 5-methyl modified nucleotide
  modified_base (20)..(20): 5-methyl bicyclic nucleic acid
tcgguaaguucuguccaagc

SEQ ID NO: 15980 - DNA, 19 bp, Artificial Sequence
  source: /note="Description of Artificial Sequence: Synthetic oligonucleotide"
  source: /note="Description of Combined DNA/RNA Molecule: Synthetic oligonucleotide"
  source: /note="DNA/RNA"
  modified_base (1)..(1): bicyclic nucleic acid (BNA)
  modified_base (2)..(2): 5-methyl modified nucleotide
  modified_base (11)..(11): 5-methyl modified nucleotide
  modified_base (15)..(15): 5-methyl modified nucleotide
  modified_base (16)..(16): 5-methyl modified nucleotide
  modified_base (19)..(19): bicyclic nucleic acid (BNA)
tcgguaaguucuguccaag

SEQ ID NO: 15981 - DNA, 18 bp, Artificial Sequence
  source: /note="Description of Artificial Sequence: Synthetic oligonucleotide"
  source: /note="Description of Combined DNA/RNA Molecule: Synthetic oligonucleotide"
  source: /note="DNA/RNA"
  modified_base (1)..(1): bicyclic nucleic acid (BNA)
  modified_base (2)..(2): 5-methyl modified nucleotide
  modified_base (11)..(11): 5-methyl modified nucleotide
  modified_base (15)..(15): 5-methyl modified nucleotide
  modified_base (16)..(16): 5-methyl modified nucleotide
  modified_base (18)..(18): bicyclic nucleic acid (BNA)
tcgguaaguucuguccaa

SEQ ID NO: 15982 - DNA, 17 bp, Artificial Sequence
  source: /note="Description of Artificial Sequence: Synthetic oligonucleotide"
  source: /note="Description of Combined DNA/RNA Molecule: Synthetic oligonucleotide"
  source: /note="DNA/RNA"
  modified_base (1)..(1): bicyclic nucleic acid (BNA)
  modified_base (2)..(2): 5-methyl modified nucleotide
  modified_base (11)..(11): 5-methyl modified nucleotide
  modified_base (15)..(15): 5-methyl modified nucleotide
  modified_base (16)..(16): 5-methyl modified nucleotide
  modified_base (17)..(17): bicyclic nucleic acid (BNA)
tcgguaaguucugucca

SEQ ID NO: 15983 - DNA, 16 bp, Artificial Sequence
  source: /note="Description of Artificial Sequence: Synthetic oligonucleotide"
  source: /note="Description of Combined DNA/RNA Molecule: Synthetic oligonucleotide"
  source: /note="DNA/RNA"
  modified_base (1)..(1): bicyclic nucleic acid (BNA)
  modified_base (2)..(2): 5-methyl modified nucleotide
  modified_base (11)..(11): 5-methyl modified nucleotide
  modified_base (15)..(15): 5-methyl modified nucleotide
  modified_base (16)..(16): 5-methyl bicyclic nucleic acid
tcgguaaguucugucc

SEQ ID NO: 15984 - DNA, 15 bp, Artificial Sequence
  source: /note="Description of Artificial Sequence: Synthetic oligonucleotide"
  source: /note="Description of Combined DNA/RNA Molecule: Synthetic oligonucleotide"
  source: /note="DNA/RNA"
  modified_base (1)..(1): bicyclic nucleic acid (BNA)
  modified_base (2)..(2): 5-methyl modified nucleotide
  modified_base (11)..(11): 5-methyl modified nucleotide
  modified_base (15)..(15): 5-methyl bicyclic nucleic acid
tcgguaaguucuguc

SEQ ID NO: 15985 - DNA, 14 bp, Artificial Sequence
  source: /note="Description of Artificial Sequence: Synthetic oligonucleotide"
  source: /note="Description of Combined DNA/RNA Molecule: Synthetic oligonucleotide"
  source: /note="DNA/RNA"
  modified_base (1)..(1): bicyclic nucleic acid (BNA)
  modified_base (2)..(2): 5-methyl modified nucleotide
  modified_base (11)..(11): 5-methyl modified nucleotide
  modified_base (14)..(14): bicyclic nucleic acid (BNA)
tcgguaaguucugt

SEQ ID NO: 15986 - DNA, 13 bp, Artificial Sequence
  source: /note="Description of Artificial Sequence: Synthetic oligonucleotide"
  source: /note="Description of Combined DNA/RNA Molecule: Synthetic oligonucleotide"
  source: /note="DNA/RNA"
  modified_base (1)..(1): bicyclic nucleic acid (BNA)
  modified_base (2)..(2): 5-methyl modified nucleotide
  modified_base (11)..(11): 5-methyl modified nucleotide
  modified_base (13)..(13): bicyclic nucleic acid (BNA)
tcgguaaguucug

SEQ ID NO: 15987 - DNA, 12 bp, Artificial Sequence
  source: /note="Description of Artificial Sequence: Synthetic oligonucleotide"
  source: /note="Description of Combined DNA/RNA Molecule: Synthetic oligonucleotide"
  source: /note="DNA/RNA"
  modified_base (1)..(1): bicyclic nucleic acid (BNA)
  modified_base (2)..(2): 5-methyl modified nucleotide
  modified_base (11)..(11): 5-methyl modified nucleotide
  modified_base (12)..(12): bicyclic nucleic acid (BNA)
tcgguaaguuct

SEQ ID NO: 15988 - DNA, 11 bp, Artificial Sequence
  source: /note="Description of Artificial Sequence: Synthetic oligonucleotide"
  source: /note="Description of Combined DNA/RNA Molecule: Synthetic oligonucleotide"
  source: /note="DNA/RNA"
  modified_base (1)..(1): bicyclic nucleic acid (BNA)
  modified_base (2)..(2): 5-methyl modified nucleotide
  modified_base (11)..(11): 5-methyl bicyclic nucleic acid
tcgguaaguuc

SEQ ID NO: 15989 - DNA, 10 bp, Artificial Sequence
  source: /note="Description of Artificial Sequence: Synthetic oligonucleotide"
  source: /note="Description of Combined DNA/RNA Molecule: Synthetic oligonucleotide"
  source: /note="DNA/RNA"
  modified_base (1)..(1): bicyclic nucleic acid (BNA)
  modified_base (2)..(2): 5-methyl modified nucleotide
  modified_base (10)..(10): bicyclic nucleic acid (BNA)
tcgguaagut

SEQ ID NO: 15990 - DNA, 9 bp, Artificial Sequence
  source: /note="Description of Artificial Sequence: Synthetic oligonucleotide"
  source: /note="Description of Combined DNA/RNA Molecule: Synthetic oligonucleotide"
  source: /note="DNA/RNA"
  modified_base (1)..(1): bicyclic nucleic acid (BNA)
  modified_base (2)..(2): 5-methyl modified nucleotide
  modified_base (9)..(9): bicyclic nucleic acid (BNA)
tcgguaagt

SEQ ID NO: 15991 - RNA, 20 nt, Artificial Sequence
  source: /note="Description of Artificial Sequence: Synthetic oligonucleotide"
  source: /note="RNA"
  modified_base (1)..(1): bicyclic nucleic acid (BNA)
  modified_base (3)..(3): 5-methyl modified nucleotide
  modified_base (12)..(12): 5-methyl modified nucleotide
  modified_base (16)..(16): 5-methyl modified nucleotide
  modified_base (17)..(17): 5-methyl modified nucleotide
  modified_base (20)..(20): bicyclic nucleic acid (BNA)
gucgguaaguucuguccaag

SEQ ID NO: 15992 - RNA, 19 nt, Artificial Sequence
  source: /note="Description of Artificial Sequence: Synthetic oligonucleotide"
  source: /note="RNA"
  modified_base (1)..(1): bicyclic nucleic acid (BNA)
  modified_base (3)..(3): 5-methyl modified nucleotide
  modified_base (12)..(12): 5-methyl modified nucleotide
  modified_base (16)..(16): 5-methyl modified nucleotide
  modified_base (17)..(17): 5-methyl modified nucleotide
  modified_base (19)..(19): bicyclic nucleic acid (BNA)
gucgguaaguucuguccaa

SEQ ID NO: 15993 - RNA, 18 nt, Artificial Sequence
  source: /note="Description of Artificial Sequence: Synthetic oligonucleotide"
  source: /note="RNA"
  modified_base (1)..(1): bicyclic nucleic acid (BNA)
  modified_base (3)..(3): 5-methyl modified nucleotide
  modified_base (12)..(12): 5-methyl modified nucleotide
  modified_base (16)..(16): 5-methyl modified nucleotide
  modified_base (17)..(17): 5-methyl modified nucleotide
  modified_base (18)..(18): bicyclic nucleic acid (BNA)
gucgguaaguucugucca

SEQ ID NO: 15994 - RNA, 17 nt, Artificial Sequence
  source: /note="Description of Artificial Sequence: Synthetic oligonucleotide"
  source: /note="RNA"
  modified_base (1)..(1): bicyclic nucleic acid (BNA)
  modified_base (3)..(3): 5-methyl modified nucleotide
  modified_base (12)..(12): 5-methyl modified nucleotide
  modified_base (16)..(16): 5-methyl modified nucleotide
  modified_base (17)..(17): 5-methyl bicyclic nucleic acid
gucgguaaguucugucc

SEQ ID NO: 15995 - RNA, 16 nt, Artificial Sequence
  source: /note="Description of Artificial Sequence: Synthetic oligonucleotide"
  source: /note="RNA"
  modified_base (1)..(1): bicyclic nucleic acid (BNA)
  modified_base (3)..(3): 5-methyl modified nucleotide
  modified_base (12)..(12): 5-methyl modified nucleotide
  modified_base (16)..(16): 5-methyl bicyclic nucleic acid
gucgguaaguucuguc

SEQ ID NO: 15996 - DNA, 15 bp, Artificial Sequence
  source: /note="Description of Artificial Sequence: Synthetic oligonucleotide"
  source: /note="Description of Combined DNA/RNA Molecule: Synthetic oligonucleotide"
  source: /note="DNA/RNA"
  modified_base (1)..(1): bicyclic nucleic acid (BNA)
  modified_base (3)..(3): 5-methyl modified nucleotide
  modified_base (12)..(12): 5-methyl modified nucleotide
  modified_base (15)..(15): bicyclic nucleic acid (BNA)
gucgguaaguucugt

SEQ ID NO: 15997 - RNA, 14 nt, Artificial Sequence
  source: /note="Description of Artificial Sequence: Synthetic oligonucleotide"
  source: /note="RNA"
  modified_base (1)..(1): bicyclic nucleic acid (BNA)
  modified_base (3)..(3): 5-methyl modified nucleotide
  modified_base (12)..(12): 5-methyl modified nucleotide
  modified_base (14)..(14): bicyclic nucleic acid (BNA)
gucgguaaguucug

SEQ ID NO: 15998 - DNA, 13 bp, Artificial Sequence
  source: /note="Description of Artificial Sequence: Synthetic oligonucleotide"
  source: /note="Description of Combined DNA/RNA Molecule: Synthetic oligonucleotide"
  source: /note="DNA/RNA"
  modified_base (1)..(1): bicyclic nucleic acid (BNA)
  modified_base (3)..(3): 5-methyl modified nucleotide
  modified_base (12)..(12): 5-methyl modified nucleotide
  modified_base (13)..(13): bicyclic nucleic acid (BNA)
gucgguaaguuct

SEQ ID NO: 15999 - RNA, 12 nt, Artificial Sequence
  source: /note="Description of Artificial Sequence: Synthetic oligonucleotide"
  source: /note="RNA"
  modified_base (1)..(1): bicyclic nucleic acid (BNA)
  modified_base (3)..(3): 5-methyl modified nucleotide
  modified_base (12)..(12): 5-methyl bicyclic nucleic acid
gucgguaaguuc

SEQ ID NO: 16000 - DNA, 11 bp, Artificial Sequence
  source: /note="Description of Artificial Sequence: Synthetic oligonucleotide"
  source: /note="Description of Combined DNA/RNA Molecule: Synthetic oligonucleotide"
  source: /note="DNA/RNA"
  modified_base (1)..(1): bicyclic nucleic acid (BNA)
  modified_base (3)..(3): 5-methyl modified nucleotide
  modified_base (11)..(11): bicyclic nucleic acid (BNA)
gucgguaagut

SEQ ID NO: 16001 - DNA, 10 bp, Artificial Sequence
  source: /note="Description of Artificial Sequence: Synthetic oligonucleotide"
  source: /note="Description of Combined DNA/RNA Molecule: Synthetic oligonucleotide"
  source: /note="DNA/RNA"
  modified_base (1)..(1): bicyclic nucleic acid (BNA)
  modified_base (3)..(3): 5-methyl modified nucleotide
  modified_base (10)..(10): bicyclic nucleic acid (BNA)
gucgguaagt

SEQ ID NO: 16002 - RNA, 20 nt, Artificial Sequence
  source: /note="Description of Artificial Sequence: Synthetic oligonucleotide"
  source: /note="RNA"
  modified_base (1)..(1): bicyclic nucleic acid (BNA)
  modified_base (4)..(4): 5-methyl modified nucleotide
  modified_base (13)..(13): 5-methyl modified nucleotide
  modified_base (17)..(17): 5-methyl modified nucleotide
  modified_base (18)..(18): 5-methyl modified nucleotide
  modified_base (20)..(20): bicyclic nucleic acid (BNA)
agucgguaaguucuguccaa

SEQ ID NO: 16003 - RNA, 19 nt, Artificial Sequence
  source: /note="Description of Artificial Sequence: Synthetic oligonucleotide"
  source: /note="RNA"
  modified_base (1)..(1): bicyclic nucleic acid (BNA)
  modified_base (4)..(4): 5-methyl modified nucleotide
  modified_base (13)..(13): 5-methyl modified nucleotide
  modified_base (17)..(17): 5-methyl modified nucleotide
  modified_base (18)..(18): 5-methyl modified nucleotide
  modified_base (19)..(19): bicyclic nucleic acid (BNA)
agucgguaaguucugucca

SEQ ID NO: 16004 - RNA, 17 nt, Artificial Sequence
  source: /note="Description of Artificial Sequence: Synthetic oligonucleotide"
  source: /note="RNA"
  modified_base (1)..(1): bicyclic nucleic acid (BNA)
  modified_base (4)..(4): 5-methyl modified nucleotide
  modified_base (13)..(13): 5-methyl modified nucleotide
  modified_base (17)..(17): 5-methyl bicyclic nucleic acid
agucgguaaguucuguc

SEQ ID NO: 16005 - DNA, 16 bp, Artificial Sequence
  source: /note="Description of Artificial Sequence: Synthetic oligonucleotide"
  source: /note="Description of Combined DNA/RNA Molecule: Synthetic oligonucleotide"
  source: /note="DNA/RNA"
  modified_base (1)..(1): bicyclic nucleic acid (BNA)
  modified_base (4)..(4): 5-methyl modified nucleotide
  modified_base (13)..(13): 5-methyl modified nucleotide
  modified_base (16)..(16): bicyclic nucleic acid (BNA)
agucgguaaguucugt

SEQ ID NO: 16006 - RNA, 15 nt, Artificial Sequence
  source: /note="Description of Artificial Sequence: Synthetic oligonucleotide"
  source: /note="RNA"
  modified_base (1)..(1): bicyclic nucleic acid (BNA)
  modified_base (4)..(4): 5-methyl modified nucleotide
  modified_base (13)..(13): 5-methyl modified nucleotide
  modified_base (15)..(15): bicyclic nucleic acid (BNA)
agucgguaaguucug

SEQ ID NO: 16007 - DNA, 14 bp, Artificial Sequence
  source: /note="Description of Artificial Sequence: Synthetic oligonucleotide"
  source: /note="Description of Combined DNA/RNA Molecule: Synthetic oligonucleotide"
  source: /note="DNA/RNA"
  modified_base (1)..(1): bicyclic nucleic acid (BNA)
  modified_base (4)..(4): 5-methyl modified nucleotide
  modified_base (13)..(13): 5-methyl modified nucleotide
  modified_base (14)..(14): bicyclic nucleic acid (BNA)
agucgguaaguuct

SEQ ID NO: 16008 - RNA, 13 nt, Artificial Sequence
  source: /note="Description of Artificial Sequence: Synthetic oligonucleotide"
  source: /note="RNA"
  modified_base (1)..(1): bicyclic nucleic acid (BNA)
  modified_base (4)..(4): 5-methyl modified nucleotide
  modified_base (13)..(13): 5-methyl bicyclic nucleic acid
agucgguaaguuc

SEQ ID NO: 16009 - DNA, 12 bp, Artificial Sequence
  source: /note="Description of Artificial Sequence: Synthetic oligonucleotide"
  source: /note="Description of Combined DNA/RNA Molecule: Synthetic oligonucleotide"
  source: /note="DNA/RNA"
  modified_base (1)..(1): bicyclic nucleic acid (BNA)
  modified_base (4)..(4): 5-methyl modified nucleotide
  modified_base (12)..(12): bicyclic nucleic acid (BNA)
agucgguaagut

SEQ ID NO: 16010 - DNA, 11 bp, Artificial Sequence
  source: /note="Description of Artificial Sequence: Synthetic oligonucleotide"
  source: /note="Description of Combined DNA/RNA Molecule: Synthetic oligonucleotide"
  source: /note="DNA/RNA"
  modified_base (1)..(1): bicyclic nucleic acid (BNA)
  modified_base (4)..(4): 5-methyl modified nucleotide
  modified_base (11)..(11): bicyclic nucleic acid (BNA)
agucgguaagt

SEQ ID NO: 16011 - RNA, 20 nt, Artificial Sequence
  source: /note="Description of Artificial Sequence: Synthetic oligonucleotide"
  source: /note="RNA"
  modified_base (1)..(1): 5-methyl bicyclic nucleic acid
  modified_base (5)..(5): 5-methyl modified nucleotide
  modified_base (14)..(14): 5-methyl modified nucleotide
  modified_base (18)..(18): 5-methyl modified nucleotide
  modified_base (19)..(19): 5-methyl modified nucleotide
  modified_base (20)..(20): bicyclic nucleic acid (BNA)
cagucgguaaguucugucca

SEQ ID NO: 16012 - RNA, 19 nt, Artificial Sequence
  source: /note="Description of Artificial Sequence: Synthetic oligonucleotide"
  source: /note="RNA"
  modified_base (1)..(1): 5-methyl bicyclic nucleic acid
  modified_base (5)..(5): 5-methyl modified nucleotide
  modified_base (14)..(14): 5-methyl modified nucleotide
  modified_base (18)..(18): 5-methyl modified nucleotide
  modified_base (19)..(19): 5-methyl bicyclic nucleic acid
cagucgguaaguucugucc

SEQ ID NO: 16013 - RNA, 18 nt, Artificial Sequence
  source: /note="Description of Artificial Sequence: Synthetic oligonucleotide"
  source: /note="RNA"
  modified_base (1)..(1): 5-methyl bicyclic nucleic acid
  modified_base (5)..(5): 5-methyl modified nucleotide
  modified_base (14)..(14): 5-methyl modified nucleotide
  modified_base (18)..(18): 5-methyl bicyclic nucleic acid
cagucgguaaguucuguc

SEQ ID NO: 16014 - DNA, 17 bp, Artificial Sequence
  source: /note="Description of Artificial Sequence: Synthetic oligonucleotide"
  source: /note="Description of Combined DNA/RNA Molecule: Synthetic oligonucleotide"
  source: /note="DNA/RNA"
  modified_base (1)..(1): 5-methyl bicyclic nucleic acid
  modified_base (5)..(5): 5-methyl modified nucleotide
  modified_base (14)..(14): 5-methyl modified nucleotide
  modified_base (17)..(17): bicyclic nucleic acid (BNA)
cagucgguaaguucugt

SEQ ID NO: 16015 - RNA, 16 nt, Artificial Sequence
  source: /note="Description of Artificial Sequence: Synthetic oligonucleotide"
  source: /note="RNA"
  modified_base (1)..(1): 5-methyl bicyclic nucleic acid
  modified_base (5)..(5): 5-methyl modified nucleotide
  modified_base (14)..(14): 5-methyl modified nucleotide
  modified_base (16)..(16): bicyclic nucleic acid (BNA)
cagucgguaaguucug

SEQ ID NO: 16016 - DNA, 15 bp, Artificial Sequence
  source: /note="Description of Artificial Sequence: Synthetic oligonucleotide"
  source: /note="Description of Combined DNA/RNA Molecule: Synthetic oligonucleotide"
  source: /note="DNA/RNA"
  modified_base (1)..(1): 5-methyl bicyclic nucleic acid
  modified_base (5)..(5): 5-methyl modified nucleotide
  modified_base (14)..(14): 5-methyl modified nucleotide
  modified_base (15)..(15): bicyclic nucleic acid (BNA)
cagucgguaaguuct

SEQ ID NO: 16017 - RNA, 14 nt, Artificial Sequence
  source: /note="Description of Artificial Sequence: Synthetic oligonucleotide"
  source: /note="RNA"
  modified_base (1)..(1): 5-methyl bicyclic nucleic acid
  modified_base (5)..(5): 5-methyl modified nucleotide
  modified_base (14)..(14): 5-methyl bicyclic nucleic acid
cagucgguaaguuc

SEQ ID NO: 16018 - DNA, 13 bp, Artificial Sequence
  source: /note="Description of Artificial Sequence: Synthetic oligonucleotide"
  source: /note="Description of Combined DNA/RNA Molecule: Synthetic oligonucleotide"
  source: /note="DNA/RNA"
  modified_base (1)..(1): 5-methyl bicyclic nucleic acid
  modified_base (5)..(5): 5-methyl modified nucleotide
  modified_base (13)..(13): bicyclic nucleic acid (BNA)
cagucgguaagut

SEQ ID NO: 16019 - DNA, 12 bp, Artificial Sequence
  source: /note="Description of Artificial Sequence: Synthetic oligonucleotide"
  source: /note="Description of Combined DNA/RNA Molecule: Synthetic oligonucleotide"
  source: /note="DNA/RNA"
  modified_base (1)..(1): 5-methyl bicyclic nucleic acid
  modified_base (5)..(5): 5-methyl modified nucleotide
  modified_base (12)..(12): bicyclic nucleic acid (BNA)
cagucgguaagt

SEQ ID NO: 16020 - RNA, 20 nt, Artificial Sequence
  source: /note="Description of Artificial Sequence: Synthetic oligonucleotide"
  source: /note="RNA"
  modified_base (1)..(1): 5-methyl bicyclic nucleic acid
  modified_base (2)..(2): 5-methyl modified nucleotide
  modified_base (6)..(6): 5-methyl modified nucleotide
  modified_base (15)..(15): 5-methyl modified nucleotide
  modified_base (19)..(19): 5-methyl modified nucleotide
  modified_base (20)..(20): 5-methyl bicyclic nucleic acid
ccagucgguaaguucugucc

SEQ ID NO: 16021 - RNA, 19 nt, Artificial Sequence
  source: /note="Description of Artificial Sequence: Synthetic oligonucleotide"
  source: /note="RNA"
  modified_base (1)..(1): 5-methyl bicyclic nucleic acid
  modified_base (2)..(2): 5-methyl modified nucleotide
  modified_base (6)..(6): 5-methyl modified nucleotide
  modified_base (15)..(15): 5-methyl modified nucleotide
  modified_base (19)..(19): 5-methyl bicyclic nucleic acid
ccagucgguaaguucuguc

SEQ ID NO: 16022 - DNA, 18 bp, Artificial Sequence
  source: /note="Description of Artificial Sequence: Synthetic oligonucleotide"
  source: /note="Description of Combined DNA/RNA Molecule: Synthetic oligonucleotide"
  source: /note="DNA/RNA"
  modified_base (1)..(1): 5-methyl bicyclic nucleic acid
  modified_base (2)..(2): 5-methyl modified nucleotide
  modified_base (6)..(6): 5-methyl modified nucleotide
  modified_base (15)..(15): 5-methyl modified nucleotide
  modified_base (18)..(18): bicyclic nucleic acid (BNA)
ccagucgguaaguucugt

SEQ ID NO: 16023 - RNA, 17 nt, Artificial Sequence
  source: /note="Description of Artificial Sequence: Synthetic oligonucleotide"
  source: /note="RNA"
  modified_base (1)..(1): 5-methyl bicyclic nucleic acid
  modified_base (2)..(2): 5-methyl modified nucleotide
  modified_base (6)..(6): 5-methyl modified nucleotide
  modified_base (15)..(15): 5-methyl modified nucleotide
  modified_base (17)..(17): bicyclic nucleic acid (BNA)
ccagucgguaaguucug

SEQ ID NO: 16024 - DNA, 16 bp, Artificial Sequence
  source: /note="Description of Artificial Sequence: Synthetic oligonucleotide"
  source: /note="Description of Combined DNA/RNA Molecule: Synthetic oligonucleotide"
  source: /note="DNA/RNA"
  modified_base (1)..(1): 5-methyl bicyclic nucleic acid
  modified_base (2)..(2): 5-methyl modified nucleotide
  modified_base (6)..(6): 5-methyl modified nucleotide
  modified_base (15)..(15): 5-methyl modified nucleotide
  modified_base (16)..(16): bicyclic nucleic acid (BNA)
ccagucgguaaguuct

SEQ ID NO: 16025 - RNA, 15 nt, Artificial Sequence
  source: /note="Description of Artificial Sequence: Synthetic oligonucleotide"
  source: /note="RNA"
  modified_base (1)..(1): 5-methyl bicyclic nucleic acid
  modified_base (2)..(2): 5-methyl modified nucleotide
  modified_base (6)..(6): 5-methyl modified nucleotide
  modified_base (15)..(15): 5-methyl bicyclic nucleic acid
ccagucgguaaguuc

SEQ ID NO: 16026 - DNA, 14 bp, Artificial Sequence
  source: /note="Description of Artificial Sequence: Synthetic oligonucleotide"
  source: /note="Description of Combined DNA/RNA Molecule: Synthetic oligonucleotide"
  source: /note="DNA/RNA"
  modified_base (1)..(1): 5-methyl bicyclic nucleic acid
  modified_base (2)..(2): 5-methyl modified nucleotide
  modified_base (6)..(6): 5-methyl modified nucleotide
  modified_base (14)..(14): bicyclic nucleic acid (BNA)
ccagucgguaagut

SEQ ID NO: 16027 - DNA, 13 bp, Artificial Sequence
  source: /note="Description of Artificial Sequence: Synthetic oligonucleotide"
  source: /note="Description of Combined DNA/RNA Molecule: Synthetic oligonucleotide"
  source: /note="DNA/RNA"
  modified_base (1)..(1): 5-methyl bicyclic nucleic acid
  modified_base (2)..(2): 5-methyl modified nucleotide
  modified_base (6)..(6): 5-methyl modified nucleotide
  modified_base (13)..(13): bicyclic nucleic acid (BNA)
ccagucgguaagt

SEQ ID NO: 16028 - RNA, 20 nt, Artificial Sequence
  source: /note="Description of Artificial Sequence: Synthetic oligonucleotide"
  source: /note="RNA"
  modified_base (1)..(1): bicyclic nucleic acid (BNA)
  modified_base (2)..(2): 5-methyl modified nucleotide
  modified_base (3)..(3): 5-methyl modified nucleotide
  modified_base (7)..(7): 5-methyl modified nucleotide
  modified_base (16)..(16): 5-methyl modified nucleotide
  modified_base (20)..(20): 5-methyl bicyclic nucleic acid
gccagucgguaaguucuguc

SEQ ID NO: 16029 - DNA, 19 bp, Artificial Sequence
  source: /note="Description of Artificial Sequence: Synthetic oligonucleotide"
  source: /note="Description of Combined DNA/RNA Molecule: Synthetic oligonucleotide"
  source: /note="DNA/RNA"
  modified_base (1)..(1): bicyclic nucleic acid (BNA)
  modified_base (2)..(2): 5-methyl modified nucleotide
  modified_base (3)..(3): 5-methyl modified nucleotide
  modified_base (7)..(7): 5-methyl modified nucleotide
  modified_base (16)..(16): 5-methyl modified nucleotide
  modified_base (19)..(19): bicyclic nucleic acid (BNA)
gccagucgguaaguucugt

SEQ ID NO: 16030 - RNA, 18 nt, Artificial Sequence
  source: /note="Description of Artificial Sequence: Synthetic oligonucleotide"
  source: /note="RNA"
  modified_base (1)..(1): bicyclic nucleic acid (BNA)
  modified_base (2)..(2): 5-methyl modified nucleotide
  modified_base (3)..(3): 5-methyl modified nucleotide
  modified_base (7)..(7): 5-methyl modified nucleotide
  modified_base (16)..(16): 5-methyl modified nucleotide
  modified_base (18)..(18): bicyclic nucleic acid (BNA)
gccagucgguaaguucug

SEQ ID NO: 16031 - DNA, 17 bp, Artificial Sequence
  source: /note="Description of Artificial Sequence: Synthetic oligonucleotide"
  source: /note="Description of Combined DNA/RNA Molecule: Synthetic oligonucleotide"
  source: /note="DNA/RNA"
  modified_base (1)..(1): bicyclic nucleic acid (BNA)
  modified_base (2)..(2): 5-methyl modified nucleotide
  modified_base (3)..(3): 5-methyl modified nucleotide
  modified_base (7)..(7): 5-methyl modified nucleotide
  modified_base (16)..(16): 5-methyl modified nucleotide
  modified_base (17)..(17): bicyclic nucleic acid (BNA)
gccagucgguaaguuct

SEQ ID NO: 16032 - RNA, 16 nt, Artificial Sequence
  source: /note="Description of Artificial Sequence: Synthetic oligonucleotide"
  source: /note="RNA"
  modified_base (1)..(1): bicyclic nucleic acid (BNA)
  modified_base (2)..(2): 5-methyl modified nucleotide
  modified_base (3)..(3): 5-methyl modified nucleotide
  modified_base (7)..(7): 5-methyl modified nucleotide
  modified_base (16)..(16): 5-methyl bicyclic nucleic acid
gccagucgguaaguuc

SEQ ID NO: 16033 - DNA, 15 bp, Artificial Sequence
  source: /note="Description of Artificial Sequence: Synthetic oligonucleotide"
  source: /note="Description of Combined DNA/RNA Molecule: Synthetic oligonucleotide"
  source: /note="DNA/RNA"
  modified_base (1)..(1): bicyclic nucleic acid (BNA)
  modified_base (2)..(2): 5-methyl modified nucleotide
  modified_base (3)..(3): 5-methyl modified nucleotide
  modified_base (7)..(7): 5-methyl modified nucleotide
  modified_base (15)..(15): bicyclic nucleic acid (BNA)
gccagucgguaagut

SEQ ID NO: 16034 - DNA, 14 bp, Artificial Sequence
  source: /note="Description of Artificial Sequence: Synthetic oligonucleotide"
  source: /note="Description of Combined DNA/RNA Molecule: Synthetic oligonucleotide"
  source: /note="DNA/RNA"
  modified_base (1)..(1): bicyclic nucleic acid (BNA)
  modified_base (2)..(2): 5-methyl modified nucleotide
  modified_base (3)..(3): 5-methyl modified nucleotide
  modified_base (7)..(7): 5-methyl modified nucleotide
  modified_base (14)..(14): bicyclic nucleic acid (BNA)
gccagucgguaagt

SEQ ID NO: 16035 - DNA, 20 bp, Artificial Sequence
  source: /note="Description of Artificial Sequence: Synthetic oligonucleotide"
  source: /note="Description of Combined DNA/RNA Molecule: Synthetic oligonucleotide"
  source: /note="DNA/RNA"
  modified_base (1)..(1): bicyclic nucleic acid (BNA)
  modified_base (2)..(2): 5-methyl modified nucleotide
  modified_base (14)..(14): 5-methyl modified nucleotide
  modified_base (19)..(19): 5-methyl modified nucleotide
  modified_base (20)..(20): bicyclic nucleic acid (BNA)
tcaaggaagauggcauuuct

SEQ ID NO: 16036 - DNA, 22 bp, Artificial Sequence
  source: /note="Description of Artificial Sequence: Synthetic oligonucleotide"
  source: /note="Description of Combined DNA/RNA Molecule: Synthetic oligonucleotide"
  source: /note="DNA/RNA"
  modified_base (1)..(1): bicyclic nucleic acid (BNA)
  modified_base (2)..(2): 5-methyl modified nucleotide
  modified_base (14)..(14): 5-methyl modified nucleotide
  modified_base (19)..(19): 5-methyl modified nucleotide
  modified_base (22)..(22): bicyclic nucleic acid (BNA)
tcaaggaagauggcauuucuag

SEQ ID NO: 16037 - DNA, 16 bp, Artificial Sequence
  source: /note="Description of Artificial Sequence: Synthetic oligonucleotide"
  source: /note="Description of Combined DNA/RNA Molecule: Synthetic oligonucleotide"
  source: /note="DNA/RNA"
  modified_base (1)..(1): bicyclic nucleic acid (BNA)
  modified_base (2)..(2): 5-methyl modified nucleotide
  modified_base (14)..(14): 5-methyl modified nucleotide
  modified_base (16)..(16): bicyclic nucleic acid (BNA)
tcaaggaagauggcat

SEQ ID NO: 16038 - DNA, 15 bp, Artificial Sequence
  source: /note="Description of Artificial Sequence: Synthetic oligonucleotide"
  source: /note="Description of Combined DNA/RNA Molecule: Synthetic oligonucleotide"
  source: /note="DNA/RNA"
  modified_base (1)..(1): bicyclic nucleic acid (BNA)
  modified_base (9)..(9): 5-methyl modified nucleotide
  modified_base (14)..(14): 5-methyl modified nucleotide
  modified_base (15)..(15): bicyclic nucleic acid (BNA)
gaagauggcauuuct

SEQ ID NO: 16039 - DNA, 21 bp, Artificial Sequence
  source: /note="Description of Artificial Sequence: Synthetic oligonucleotide"
  source: /note="Description of Combined DNA/RNA Molecule: Synthetic oligonucleotide"
  source: /note="DNA/RNA"
  modified_base (1)..(1): bicyclic nucleic acid (BNA)
  modified_base (2)..(2): 5-methyl modified nucleotide
  modified_base (14)..(14): 5-methyl modified nucleotide
  modified_base (19)..(19): 5-methyl modified nucleotide
  modified_base (21)..(21): bicyclic nucleic acid (BNA)
tcaaggaagauggcauuucua

SEQ ID NO: 16040 - DNA, 19 bp, Artificial Sequence
  source: /note="Description of Artificial Sequence: Synthetic oligonucleotide"
  source: /note="Description of Combined DNA/RNA Molecule: Synthetic oligonucleotide"
  source: /note="DNA/RNA"
  modified_base (1)..(1): bicyclic nucleic acid (BNA)
  modified_base (2)..(2): 5-methyl modified nucleotide
  modified_base (14)..(14): 5-methyl modified nucleotide
  modified_base (19)..(19): 5-methyl bicyclic nucleic acid
tcaaggaagauggcauuuc

SEQ ID NO: 16041 - DNA, 18 bp, Artificial Sequence
  source: /note="Description of Artificial Sequence: Synthetic oligonucleotide"
  source: /note="Description of Combined DNA/RNA Molecule: Synthetic oligonucleotide"
  source: /note="DNA/RNA"
  modified_base (1)..(1): bicyclic nucleic acid (BNA)
  modified_base (2)..(2): 5-methyl modified nucleotide
  modified_base (14)..(14): 5-methyl modified nucleotide
  modified_base (18)..(18): bicyclic nucleic acid (BNA)
tcaaggaagauggcauut

SEQ ID NO: 16042 - DNA, 17 bp, Artificial Sequence
  source: /note="Description of Artificial Sequence: Synthetic oligonucleotide"
  source: /note="Description of Combined DNA/RNA Molecule: Synthetic oligonucleotide"
  source: /note="DNA/RNA"
  modified_base (1)..(1): bicyclic nucleic acid (BNA)
  modified_base (2)..(2): 5-methyl modified nucleotide
  modified_base (14)..(14): 5-methyl modified nucleotide
  modified_base (17)..(17): bicyclic nucleic acid (BNA)
tcaaggaagauggcaut

SEQ ID NO: 16043 - DNA, 15 bp, Artificial Sequence
  source: /note="Description of Artificial Sequence: Synthetic oligonucleotide"
  source: /note="Description of Combined DNA/RNA Molecule: Synthetic oligonucleotide"
  source: /note="DNA/RNA"
  modified_base (1)..(1): bicyclic nucleic acid (BNA)
  modified_base (2)..(2): 5-methyl modified nucleotide
  modified_base (14)..(14): 5-methyl modified nucleotide
  modified_base (15)..(15): bicyclic nucleic acid (BNA)
tcaaggaagauggca

SEQ ID NO: 16044 - DNA, 14 bp, Artificial Sequence
  source: /note="Description of Artificial Sequence: Synthetic oligonucleotide"
  source: /note="Description of Combined DNA/RNA Molecule: Synthetic oligonucleotide"
  source: /note="DNA/RNA"
  modified_base (1)..(1): bicyclic nucleic acid (BNA)
  modified_base (2)..(2): 5-methyl modified nucleotide
  modified_base (14)..(14): 5-methyl bicyclic nucleic acid
tcaaggaagauggc

SEQ ID NO: 16045 - DNA, 13 bp, Artificial Sequence
  source: /note="Description of Artificial Sequence: Synthetic oligonucleotide"
  source: /note="Description of Combined DNA/RNA Molecule: Synthetic oligonucleotide"
  source: /note="DNA/RNA"
  modified_base (1)..(1): bicyclic nucleic acid (BNA)
  modified_base (2)..(2): 5-methyl modified nucleotide
  modified_base (13)..(13): bicyclic nucleic acid (BNA)
tcaaggaagaugg

SEQ ID NO: 16046 - DNA, 12 bp, Artificial Sequence
  source: /note="Description of Artificial Sequence: Synthetic oligonucleotide"
  source: /note="Description of Combined DNA/RNA Molecule: Synthetic oligonucleotide"
  source: /note="DNA/RNA"
  modified_base (1)..(1): bicyclic nucleic acid (BNA)
  modified_base (2)..(2): 5-methyl modified nucleotide
  modified_base (12)..(12): bicyclic nucleic acid (BNA)
tcaaggaagaug

SEQ ID NO: 16047 - DNA, 11 bp, Artificial Sequence
  source: /note="Description of Artificial Sequence: Synthetic oligonucleotide"
  source: /note="DNA/RNA"
  modified_base (1)..(1): bicyclic nucleic acid (BNA)
  modified_base (2)..(2): 5-methyl modified nucleotide
  modified_base (11)..(11): bicyclic nucleic acid (BNA)
tcaaggaagat

SEQ ID NO: 16048 - DNA, 10 bp, Artificial Sequence
  source: /note="Description of Artificial Sequence: Synthetic oligonucleotide"
  source: /note="DNA/RNA"
  modified_base (1)..(1): bicyclic nucleic acid (BNA)
  modified_base (2)..(2): 5-methyl modified nucleotide
  modified_base (10)..(10): bicyclic nucleic acid (BNA)
tcaaggaaga

SEQ ID NO: 16049 - DNA, 9 bp, Artificial Sequence
  source: /note="Description of Artificial Sequence: Synthetic oligonucleotide"
  source: /note="DNA/RNA"
  modified_base (1)..(1): bicyclic nucleic acid (BNA)
  modified_base (2)..(2): 5-methyl modified nucleotide
  modified_base (9)..(9): bicyclic nucleic acid (BNA)
tcaaggaag

SEQ ID NO: 16050 - RNA, 21 nt, Artificial Sequence
  source: /note="Description of Artificial Sequence: Synthetic oligonucleotide"
  source: /note="RNA"
  modified_base (1)..(1): 5-methyl bicyclic nucleic acid
  modified_base (13)..(13): 5-methyl modified nucleotide
  modified_base (18)..(18): 5-methyl modified nucleotide
  modified_base (21)..(21): bicyclic nucleic acid (BNA)
caaggaagauggcauuucuag

SEQ ID NO: 16051 - RNA, 20 nt, Artificial Sequence
  source: /note="Description of Artificial Sequence: Synthetic oligonucleotide"
  source: /note="RNA"
  modified_base (1)..(1): 5-methyl bicyclic nucleic acid
  modified_base (13)..(13): 5-methyl modified nucleotide
  modified_base (18)..(18): 5-methyl modified nucleotide
  modified_base (20)..(20): bicyclic nucleic acid (BNA)
caaggaagauggcauuucua

SEQ ID NO: 16052 - DNA, 19 bp, Artificial Sequence
  source: /note="Description of Artificial Sequence: Synthetic oligonucleotide"
  source: /note="Description of Combined DNA/RNA Molecule: Synthetic oligonucleotide"
  source: /note="DNA/RNA"
  modified_base (1)..(1): 5-methyl bicyclic nucleic acid
  modified_base (13)..(13): 5-methyl modified nucleotide
  modified_base (18)..(18): 5-methyl modified nucleotide
  modified_base (19)..(19): bicyclic nucleic acid (BNA)
caaggaagauggcauuuct

SEQ ID NO: 16053 - RNA, 18 nt, Artificial Sequence
  source: /note="Description of Artificial Sequence: Synthetic oligonucleotide"
  source: /note="RNA"
  modified_base (1)..(1): 5-methyl bicyclic nucleic acid
  modified_base (13)..(13): 5-methyl modified nucleotide
  modified_base (18)..(18): 5-methyl bicyclic nucleic acid
caaggaagauggcauuuc

SEQ ID NO: 16054 - DNA, 17 bp, Artificial Sequence
  source: /note="Description of Artificial Sequence: Synthetic oligonucleotide"
  source: /note="Description of Combined DNA/RNA Molecule: Synthetic oligonucleotide"
  source: /note="DNA/RNA"
  modified_base (1)..(1): 5-methyl bicyclic nucleic acid
  modified_base (13)..(13): 5-methyl modified nucleotide
  modified_base (17)..(17): bicyclic nucleic acid (BNA)
caaggaagauggcauut

SEQ ID NO: 16055 - DNA, 16 bp, Artificial Sequence
  source: /note="Description of Artificial Sequence: Synthetic oligonucleotide"
  source: /note="Description of Combined DNA/RNA Molecule: Synthetic oligonucleotide"
  source: /note="DNA/RNA"
  modified_base (1)..(1): 5-methyl bicyclic nucleic acid
  modified_base (13)..(13): 5-methyl modified nucleotide
  modified_base (16)..(16): bicyclic nucleic acid (BNA)
caaggaagauggcaut

SEQ ID NO: 16056 - DNA, 15 bp, Artificial Sequence
  source: /note="Description of Artificial Sequence: Synthetic oligonucleotide"
  source: /note="Description of Combined DNA/RNA Molecule: Synthetic oligonucleotide"
  source: /note="DNA/RNA"
  modified_base (1)..(1): 5-methyl bicyclic nucleic acid
  modified_base (13)..(13): 5-methyl modified nucleotide
  modified_base (15)..(15): bicyclic nucleic acid (BNA)
caaggaagauggcat

SEQ ID NO: 16057 - RNA, 14 nt, Artificial Sequence
  source: /note="Description of Artificial Sequence: Synthetic oligonucleotide"
  source: /note="RNA"
  modified_base (1)..(1): 5-methyl bicyclic nucleic acid
  modified_base (13)..(13): 5-methyl modified nucleotide
  modified_base (14)..(14): bicyclic nucleic acid (BNA)
caaggaagauggca

SEQ ID NO: 16058 - RNA, 13 nt, Artificial Sequence
  source: /note="Description of Artificial Sequence: Synthetic oligonucleotide"
  source: /note="RNA"
  modified_base (1)..(1): 5-methyl bicyclic nucleic acid
  modified_base (13)..(13): 5-methyl bicyclic nucleic acid
caaggaagauggc

SEQ ID NO: 16059 - RNA, 12 nt, Artificial Sequence
  source: /note="Description of Artificial Sequence: Synthetic oligonucleotide"
  source: /note="RNA"
  modified_base (1)..(1): 5-methyl bicyclic nucleic acid
  modified_base (12)..(12): bicyclic nucleic acid (BNA)
caaggaagaugg

SEQ ID NO: 16060 - RNA, 11 nt, Artificial Sequence
  source: /note="Description of Artificial Sequence: Synthetic oligonucleotide"
  source: /note="RNA"
  modified_base (1)..(1): 5-methyl bicyclic nucleic acid
  modified_base (11)..(11): bicyclic nucleic acid (BNA)
caaggaagaug

SEQ ID NO: 16061 - DNA, 10 bp, Artificial Sequence
  source: /note="Description of Artificial Sequence: Synthetic oligonucleotide"
  source: /note="DNA/RNA"
  modified_base (1)..(1): 5-methyl bicyclic nucleic acid
  modified_base (10)..(10): bicyclic nucleic acid (BNA)
caaggaagat

SEQ ID NO: 16062 - RNA, 9 nt, Artificial Sequence
  source: /note="Description of Artificial Sequence: Synthetic oligonucleotide"
  source: /note="RNA/Antisense Oligonucleotide"
  modified_base (1)..(1): 5-methyl bicyclic nucleic acid
  modified_base (9)..(9): bicyclic nucleic acid (BNA)
caaggaaga

SEQ ID NO: 16063 - RNA, 8 nt, Artificial Sequence
  source: /note="Description of Artificial Sequence: Synthetic oligonucleotide"
  source: /note="RNA/Antisense Oligonucleotide"
  modified_base (1)..(1): 5-methyl bicyclic nucleic acid
  modified_base (8)..(8): bicyclic nucleic acid (BNA)
caaggaag

SEQ ID NO: 16064 - RNA, 20 nt, Artificial Sequence
  source: /note="Description of Artificial Sequence: Synthetic oligonucleotide"
  source: /note="RNA"
  modified_base (1)..(1): bicyclic nucleic acid (BNA)
  modified_base (12)..(12): 5-methyl modified nucleotide
  modified_base (17)..(17): 5-methyl modified nucleotide
  modified_base (20)..(20): bicyclic nucleic acid (BNA)
aaggaagauggcauuucuag

SEQ ID NO: 16065 - RNA, 19 nt, Artificial Sequence
  source: /note="Description of Artificial Sequence: Synthetic oligonucleotide"
  source: /note="RNA"
  modified_base (1)..(1): bicyclic nucleic acid (BNA)
  modified_base (12)..(12): 5-methyl modified nucleotide
  modified_base (17)..(17): 5-methyl modified nucleotide
  modified_base (19)..(19): bicyclic nucleic acid (BNA)
aaggaagauggcauuucua

SEQ ID NO: 16066 - DNA, 18 bp, Artificial Sequence
  source: /note="Description of Artificial Sequence: Synthetic oligonucleotide"
  source: /note="Description of Combined DNA/RNA Molecule: Synthetic oligonucleotide"
  source: /note="DNA/RNA"
  modified_base (1)..(1): bicyclic nucleic acid (BNA)
  modified_base (12)..(12): 5-methyl modified nucleotide
  modified_base (17)..(17): 5-methyl modified nucleotide
  modified_base (18)..(18): bicyclic nucleic acid (BNA)
aaggaagauggcauuuct

SEQ ID NO: 16067 - RNA, 17 nt, Artificial Sequence
  source: /note="Description of Artificial Sequence: Synthetic oligonucleotide"
  source: /note="RNA"
  modified_base (1)..(1): bicyclic nucleic acid (BNA)
  modified_base (12)..(12): 5-methyl modified nucleotide
  modified_base (17)..(17): 5-methyl bicyclic nucleic acid
aaggaagauggcauuuc

SEQ ID NO: 16068 - DNA, 16 bp, Artificial Sequence
  source: /note="Description of Artificial Sequence: Synthetic oligonucleotide"
  source: /note="Description of Combined DNA/RNA Molecule: Synthetic oligonucleotide"
  source: /note="DNA/RNA"
  modified_base (1)..(1): bicyclic nucleic acid (BNA)
  modified_base (12)..(12): 5-methyl modified nucleotide
  modified_base (16)..(16): bicyclic nucleic acid (BNA)
aaggaagauggcauut

SEQ ID NO: 16069 - DNA, 15 bp, Artificial Sequence
  source: /note="Description of Artificial Sequence: Synthetic oligonucleotide"
  source: /note="Description of Combined DNA/RNA Molecule: Synthetic oligonucleotide"
  source: /note="DNA/RNA"
  modified_base (1)..(1): bicyclic nucleic acid (BNA)
  modified_base (12)..(12): 5-methyl modified nucleotide
  modified_base (15)..(15): bicyclic nucleic acid (BNA)
aaggaagauggcaut

SEQ ID NO: 16070 - DNA, 14 bp, Artificial Sequence
  source: /note="Description of Artificial Sequence: Synthetic oligonucleotide"
  source: /note="Description of Combined DNA/RNA Molecule: Synthetic oligonucleotide"
  source: /note="DNA/RNA"
  modified_base (1)..(1): bicyclic nucleic acid (BNA)
  modified_base (12)..(12): 5-methyl modified nucleotide
  modified_base (14)..(14): bicyclic nucleic acid (BNA)
aaggaagauggcat

SEQ ID NO: 16071 - RNA, 13 nt, Artificial Sequence
  source: /note="Description of Artificial Sequence: Synthetic oligonucleotide"
  source: /note="RNA"
  modified_base (1)..(1): bicyclic nucleic acid (BNA)
  modified_base (12)..(12): 5-methyl modified nucleotide
  modified_base (13)..(13): bicyclic nucleic acid (BNA)
aaggaagauggca

SEQ ID NO: 16072 - RNA, 12 nt, Artificial Sequence
  source: /note="Description of Artificial Sequence: Synthetic oligonucleotide"
  source: /note="RNA"
  modified_base (1)..(1): bicyclic nucleic acid (BNA)
  modified_base (12)..(12): 5-methyl bicyclic nucleic acid
aaggaagauggc

SEQ ID NO: 16073 - RNA, 11 nt, Artificial Sequence
  source: /note="Description of Artificial Sequence: Synthetic oligonucleotide"
  source: /note="RNA"
  modified_base (1)..(1): bicyclic nucleic acid (BNA)
  modified_base (11)..(11): bicyclic nucleic acid (BNA)
aaggaagaugg

SEQ ID NO: 16074 - RNA, 10 nt, Artificial Sequence
  source: /note="Description of Artificial Sequence: Synthetic oligonucleotide"
  source: /note="RNA"
  modified_base (1)..(1): bicyclic nucleic acid (BNA)
  modified_base (10)..(10): bicyclic nucleic acid (BNA)
aaggaagaug

SEQ ID NO: 16075 - DNA, 9 bp, Artificial Sequence
  source: /note="Description of Artificial Sequence: Synthetic oligonucleotide"
  source: /note="DNA/RNA"
  modified_base (1)..(1): bicyclic nucleic acid (BNA)
  modified_base (9)..(9): bicyclic nucleic acid (BNA)
aaggaagat

SEQ ID NO: 16076 - RNA, 8 nt, Artificial Sequence
  source: /note="Description of Artificial Sequence: Synthetic oligonucleotide"
  source: /note="RNA/Antisense Oligonucleotide"
  modified_base (1)..(1): bicyclic nucleic acid (BNA)
  modified_base (8)..(8): bicyclic nucleic acid (BNA)
aaggaaga

SEQ ID NO: 16077 - RNA, 19 nt, Artificial Sequence
  source: /note="Description of Artificial Sequence: Synthetic oligonucleotide"
  source: /note="RNA"
  modified_base (1)..(1): bicyclic nucleic acid (BNA)
  modified_base (11)..(11): 5-methyl modified nucleotide
  modified_base (16)..(16): 5-methyl modified nucleotide
  modified_base (19)..(19): bicyclic nucleic acid (BNA)
aggaagauggcauuucuag

SEQ ID NO: 16078 - RNA, 18 nt, Artificial Sequence
  source: /note="Description of Artificial Sequence: Synthetic oligonucleotide"
  source: /note="RNA"
  modified_base (1)..(1): bicyclic nucleic acid (BNA)
  modified_base (11)..(11): 5-methyl modified nucleotide
  modified_base (16)..(16): 5-methyl modified nucleotide
  modified_base (18)..(18): bicyclic nucleic acid (BNA)
aggaagauggcauuucua

SEQ ID NO: 16079 - DNA, 17 bp, Artificial Sequence
  source: /note="Description of Artificial Sequence: Synthetic oligonucleotide"
  source: /note="Description of Combined DNA/RNA Molecule: Synthetic oligonucleotide"
  source: /note="DNA/RNA"
  modified_base (1)..(1): bicyclic nucleic acid (BNA)
  modified_base (11)..(11): 5-methyl modified nucleotide
  modified_base (16)..(16): 5-methyl modified nucleotide
  modified_base (17)..(17): bicyclic nucleic acid (BNA)
aggaagauggcauuuct

SEQ ID NO: 16080 - RNA, 16 nt, Artificial Sequence
  source: /note="Description of Artificial Sequence: Synthetic oligonucleotide"
  source: /note="RNA"
  modified_base (1)..(1): bicyclic nucleic acid (BNA)
  modified_base (11)..(11): 5-methyl modified nucleotide
  modified_base (16)..(16): 5-methyl bicyclic nucleic acid
aggaagauggcauuuc

SEQ ID NO: 16081 - DNA, 15 bp, Artificial Sequence
  source: /note="Description of Artificial Sequence: Synthetic oligonucleotide"
  source: /note="Description of Combined DNA/RNA Molecule: Synthetic oligonucleotide"
  source: /note="DNA/RNA"
  modified_base (1)..(1): bicyclic nucleic acid (BNA)
  modified_base (11)..(11): 5-methyl modified nucleotide
  modified_base (15)..(15): bicyclic nucleic acid (BNA)
aggaagauggcauut

SEQ ID NO: 16082 - DNA, 14 bp, Artificial Sequence
  source: /note="Description of Artificial Sequence: Synthetic oligonucleotide"
  source: /note="Description of Combined DNA/RNA Molecule: Synthetic oligonucleotide"
  source: /note="DNA/RNA"
  modified_base (1)..(1): bicyclic nucleic acid (BNA)
  modified_base (11)..(11): 5-methyl modified nucleotide
  modified_base (14)..(14): bicyclic nucleic acid (BNA)
aggaagauggcaut

SEQ ID NO: 16083 - DNA, 13 bp, Artificial Sequence
  source: /note="Description of Artificial Sequence: Synthetic oligonucleotide"
  source: /note="Description of Combined DNA/RNA Molecule: Synthetic oligonucleotide"
  source: /note="DNA/RNA"
  modified_base (1)..(1): bicyclic nucleic acid (BNA)
  modified_base (11)..(11): 5-methyl modified nucleotide
  modified_base (13)..(13): bicyclic nucleic acid (BNA)
aggaagauggcat

SEQ ID NO: 16084 - RNA, 12 nt, Artificial Sequence
  source: /note="Description of Artificial Sequence: Synthetic oligonucleotide"
  source: /note="RNA"
  modified_base (1)..(1): bicyclic nucleic acid (BNA)
  modified_base (11)..(11): 5-methyl modified nucleotide
  modified_base (12)..(12): bicyclic nucleic acid (BNA)
aggaagauggca

SEQ ID NO: 16085 - RNA, 10 nt, Artificial Sequence
  source: /note="Description of Artificial Sequence: Synthetic oligonucleotide"
  source: /note="RNA"
  modified_base (1)..(1): bicyclic nucleic acid (BNA)
  modified_base (10)..(10): bicyclic nucleic acid (BNA)
aggaagaugg

SEQ ID NO: 16086 - RNA, 9 nt, Artificial Sequence
  source: /note="Description of Artificial Sequence: Synthetic oligonucleotide"
  source: /note="RNA"
  modified_base (1)..(1): bicyclic nucleic acid (BNA)
  modified_base (9)..(9): bicyclic nucleic acid (BNA)
aggaagaug

SEQ ID NO: 16087 - DNA, 8 bp, Artificial Sequence
  source: /note="Description of Artificial Sequence: Synthetic oligonucleotide"
  source: /note="DNA/RNA"
  modified_base (1)..(1): bicyclic nucleic acid (BNA)
  modified_base (8)..(8): bicyclic nucleic acid (BNA)
aggaagat

SEQ ID NO: 16088 - RNA, 18 nt, Artificial Sequence
  source: /note="Description of Artificial Sequence: Synthetic oligonucleotide"
  source: /note="RNA"
  modified_base (1)..(1): bicyclic nucleic acid (BNA)
  modified_base (10)..(10): 5-methyl modified nucleotide
  modified_base (15)..(15): 5-methyl modified nucleotide
  modified_base (18)..(18): bicyclic nucleic acid (BNA)
ggaagauggcauuucuag

SEQ ID NO: 16089 - RNA, 17 nt, Artificial Sequence
  source: /note="Description of Artificial Sequence: Synthetic oligonucleotide"
  source: /note="RNA"
  modified_base (1)..(1): bicyclic nucleic acid (BNA)
  modified_base (10)..(10): 5-methyl modified nucleotide
  modified_base (15)..(15): 5-methyl modified nucleotide
  modified_base (17)..(17): bicyclic nucleic acid (BNA)
ggaagauggcauuucua

SEQ ID NO: 16090 - DNA, 16 bp, Artificial Sequence
  source: /note="Description of Artificial Sequence: Synthetic oligonucleotide"
  source: /note="Description of Combined DNA/RNA Molecule: Synthetic oligonucleotide"
  source: /note="DNA/RNA"
  modified_base (1)..(1): bicyclic nucleic acid (BNA)
  modified_base (10)..(10): 5-methyl modified nucleotide
  modified_base (15)..(15): 5-methyl modified nucleotide
  modified_base (16)..(16): bicyclic nucleic acid (BNA)
ggaagauggcauuuct

SEQ ID NO: 16091 - RNA, 15 nt, Artificial Sequence
  source: /note="Description of Artificial Sequence: Synthetic oligonucleotide"
  source: /note="RNA"
  modified_base (1)..(1): bicyclic nucleic acid (BNA)
  modified_base (10)..(10): 5-methyl modified nucleotide
  modified_base (15)..(15): 5-methyl bicyclic nucleic acid
ggaagauggcauuuc

SEQ ID NO: 16092 - DNA, 14 bp, Artificial Sequence
  source: /note="Description of Artificial Sequence: Synthetic oligonucleotide"
  source: /note="Description of Combined DNA/RNA Molecule: Synthetic oligonucleotide"
  source: /note="DNA/RNA"
  modified_base (1)..(1): bicyclic nucleic acid (BNA)
  modified_base (10)..(10): 5-methyl modified nucleotide
  modified_base (14)..(14): bicyclic nucleic acid (BNA)
ggaagauggcauut

SEQ ID NO: 16093 - DNA, 13 bp, Artificial Sequence
  source: /note="Description of Artificial Sequence: Synthetic oligonucleotide"
  source: /note="Description of Combined DNA/RNA Molecule: Synthetic oligonucleotide"
  source: /note="DNA/RNA"
  modified_base (1)..(1): bicyclic nucleic acid (BNA)
  modified_base (10)..(10): 5-methyl modified nucleotide
  modified_base (13)..(13): bicyclic nucleic acid (BNA)
ggaagauggcaut

SEQ ID NO: 16094 - DNA, 12 bp, Artificial Sequence
  source: /note="Description of Artificial Sequence: Synthetic oligonucleotide"
  source: /note="Description of Combined DNA/RNA Molecule: Synthetic oligonucleotide"
  source: /note="DNA/RNA"
  modified_base (1)..(1): bicyclic nucleic acid (BNA)
  modified_base (10)..(10): 5-methyl modified nucleotide
  modified_base (12)..(12): bicyclic nucleic acid (BNA)
ggaagauggcat

SEQ ID NO: 16095 - RNA, 11 nt, Artificial Sequence
  source: /note="Description of Artificial Sequence: Synthetic oligonucleotide"
  source: /note="RNA"
  modified_base (1)..(1): bicyclic nucleic acid (BNA)
  modified_base (10)..(10): 5-methyl modified nucleotide
  modified_base (11)..(11): bicyclic nucleic acid (BNA)
ggaagauggca

SEQ ID NO: 16096 - RNA, 10 nt, Artificial Sequence
  source: /note="Description of Artificial Sequence: Synthetic oligonucleotide"
  source: /note="RNA"
  modified_base (1)..(1): bicyclic nucleic acid (BNA)
  modified_base (10)..(10): 5-methyl bicyclic nucleic acid
ggaagauggc

SEQ ID NO: 16097 - RNA, 8 nt, Artificial Sequence
  source: /note="Description of Artificial Sequence: Synthetic oligonucleotide"
  source: /note="RNA"
  modified_base (1)..(1): bicyclic nucleic acid (BNA)
  modified_base (8)..(8): bicyclic nucleic acid (BNA)
ggaagaug

SEQ ID NO: 16098 - RNA, 17 nt, Artificial Sequence
  source: /note="Description of Artificial Sequence: Synthetic oligonucleotide"
  source: /note="RNA"
  modified_base (1)..(1): bicyclic nucleic acid (BNA)
  modified_base (9)..(9): 5-methyl modified nucleotide
  modified_base (14)..(14): 5-methyl modified nucleotide
  modified_base (17)..(17): bicyclic nucleic acid (BNA)
gaagauggcauuucuag

SEQ ID NO: 16099 - RNA, 16 nt, Artificial Sequence
  source: /note="Description of Artificial Sequence: Synthetic oligonucleotide"
  source: /note="RNA"
  modified_base (1)..(1): bicyclic nucleic acid (BNA)
  modified_base (9)..(9): 5-methyl modified nucleotide
  modified_base (14)..(14): 5-methyl modified nucleotide
  modified_base (16)..(16): bicyclic nucleic acid (BNA)
gaagauggcauuucua

SEQ ID NO: 16100 - RNA, 14 nt, Artificial Sequence
  source: /note="Description of Artificial Sequence: Synthetic oligonucleotide"
  source: /note="RNA"
  modified_base (1)..(1): bicyclic nucleic acid (BNA)
  modified_base (9)..(9): 5-methyl modified nucleotide
  modified_base (14)..(14): 5-methyl bicyclic nucleic acid
gaagauggcauuuc

SEQ ID NO: 16101 - DNA, 13 bp, Artificial Sequence
  source: /note="Description of Artificial Sequence: Synthetic oligonucleotide"
  source: /note="Description of Combined DNA/RNA Molecule: Synthetic oligonucleotide"
  source: /note="DNA/RNA"
  modified_base (1)..(1): bicyclic nucleic acid (BNA)
  modified_base (9)..(9): 5-methyl modified nucleotide
  modified_base (13)..(13): bicyclic nucleic acid (BNA)
gaagauggcauut

SEQ ID NO: 16102 - DNA, 12 bp, Artificial Sequence
  source: /note="Description of Artificial Sequence: Synthetic oligonucleotide"
  source: /note="Description of Combined DNA/RNA Molecule: Synthetic oligonucleotide"
  source: /note="DNA/RNA"
  modified_base (1)..(1): bicyclic nucleic acid (BNA)
  modified_base (9)..(9): 5-methyl modified nucleotide
  modified_base (12)..(12): bicyclic nucleic acid (BNA)
gaagauggcaut

SEQ ID NO: 16103 - DNA, 11 bp, Artificial Sequence
  source: /note="Description of Artificial Sequence: Synthetic oligonucleotide"
  source: /note="Description of Combined DNA/RNA Molecule: Synthetic oligonucleotide"
  source: /note="DNA/RNA"
  modified_base (1)..(1): bicyclic nucleic acid (BNA)
  modified_base (9)..(9): 5-methyl modified nucleotide
  modified_base (11)..(11): bicyclic nucleic acid (BNA)
gaagauggcat

SEQ ID NO: 16104 - RNA, 10 nt, Artificial Sequence
  source: /note="Description of Artificial Sequence: Synthetic oligonucleotide"
  source: /note="RNA"
  modified_base (1)..(1): bicyclic nucleic acid (BNA)
  modified_base (9)..(9): 5-methyl modified nucleotide
  modified_base (10)..(10): bicyclic nucleic acid (BNA)
gaagauggca

SEQ ID NO: 16105 - RNA, 9 nt, Artificial Sequence
  source: /note="Description of Artificial Sequence: Synthetic oligonucleotide"
  source: /note="RNA"
  modified_base (1)..(1): bicyclic nucleic acid (BNA)
  modified_base (9)..(9): 5-methyl bicyclic nucleic acid
gaagauggc

SEQ ID NO: 16106 - RNA, 8 nt, Artificial Sequence
  source: /note="Description of Artificial Sequence: Synthetic oligonucleotide"
  source: /note="RNA"
  modified_base (1)..(1): bicyclic nucleic acid (BNA)
  modified_base (8)..(8): bicyclic nucleic acid (BNA)
gaagaugg

SEQ ID NO: 16107 - RNA, 16 nt, Artificial Sequence
  source: /note="Description of Artificial Sequence: Synthetic oligonucleotide"
  source: /note="RNA"
  modified_base (1)..(1): bicyclic nucleic acid (BNA)
  modified_base (8)..(8): 5-methyl modified nucleotide
  modified_base (13)..(13): 5-methyl modified nucleotide
  modified_base (16)..(16): bicyclic nucleic acid (BNA)
aagauggcauuucuag

SEQ ID NO: 16108 - RNA, 15 nt, Artificial Sequence
  source: /note="Description of Artificial Sequence: Synthetic oligonucleotide"
  source: /note="RNA"
  modified_base (1)..(1): bicyclic nucleic acid (BNA)
  modified_base (8)..(8): 5-methyl modified nucleotide
  modified_base (13)..(13): 5-methyl modified nucleotide
  modified_base (15)..(15): bicyclic nucleic acid (BNA)
aagauggcauuucua

SEQ ID NO: 16109 - DNA, 14 bp, Artificial Sequence
  source: /note="Description of Artificial Sequence: Synthetic oligonucleotide"
  source: /note="Description of Combined DNA/RNA Molecule: Synthetic oligonucleotide"
  source: /note="DNA/RNA"
  modified_base (1)..(1): bicyclic nucleic acid (BNA)
  modified_base (8)..(8): 5-methyl modified nucleotide
  modified_base (13)..(13): 5-methyl modified nucleotide
  modified_base (14)..(14): bicyclic nucleic acid (BNA)
aagauggcauuuct

SEQ ID NO: 16110 - RNA, 13 nt, Artificial Sequence
  source: /note="Description of Artificial Sequence: Synthetic oligonucleotide"
  source: /note="RNA"
  modified_base (1)..(1): bicyclic nucleic acid (BNA)
  modified_base (8)..(8): 5-methyl modified nucleotide
  modified_base (13)..(13): 5-methyl bicyclic nucleic acid
aagauggcauuuc

SEQ ID NO: 16111 - DNA, 12 bp, Artificial Sequence
  source: /note="Description of Artificial Sequence: Synthetic oligonucleotide"
  source: /note="Description of Combined DNA/RNA Molecule: Synthetic oligonucleotide"
  source: /note="DNA/RNA"
  modified_base (1)..(1): bicyclic nucleic acid (BNA)
  modified_base (8)..(8): 5-methyl modified nucleotide
  modified_base (12)..(12): bicyclic nucleic acid (BNA)
aagauggcauut

SEQ ID NO: 16112 - DNA, 11 bp, Artificial Sequence
  source: /note="Description of Artificial Sequence: Synthetic oligonucleotide"
  source: /note="Description of Combined DNA/RNA Molecule: Synthetic oligonucleotide"
  source: /note="DNA/RNA"
  modified_base (1)..(1): bicyclic nucleic acid (BNA)
  modified_base (8)..(8): 5-methyl modified nucleotide
  modified_base (11)..(11): bicyclic nucleic acid (BNA)
aagauggcaut

SEQ ID NO: 16113 - DNA, 10 bp, Artificial Sequence
  source: /note="Description of Artificial Sequence: Synthetic oligonucleotide"
  source: /note="Description of Combined DNA/RNA Molecule: Synthetic oligonucleotide"
  source: /note="DNA/RNA"
  modified_base (1)..(1): bicyclic nucleic acid (BNA)
  modified_base (8)..(8): 5-methyl modified nucleotide
  modified_base (10)..(10): bicyclic nucleic acid (BNA)
aagauggcat

SEQ ID NO: 16114 - RNA, 9 nt, Artificial Sequence
  source: /note="Description of Artificial Sequence: Synthetic oligonucleotide"
  source: /note="RNA"
  modified_base (1)..(1): bicyclic nucleic acid (BNA)
  modified_base (8)..(8): 5-methyl modified nucleotide
  modified_base (9)..(9): bicyclic nucleic acid (BNA)
aagauggca

SEQ ID NO: 16115 - RNA, 8 nt, Artificial Sequence
  source: /note="Description of Artificial Sequence: Synthetic oligonucleotide"
  source: /note="RNA"
  modified_base (1)..(1): bicyclic nucleic acid (BNA)
  modified_base (8)..(8): 5-methyl bicyclic nucleic acid
aagauggc

SEQ ID NO: 16116 - RNA, 15 nt, Artificial Sequence
  source: /note="Description of Artificial Sequence: Synthetic oligonucleotide"
  source: /note="RNA"
  modified_base (1)..(1): bicyclic nucleic acid (BNA)
  modified_base (7)..(7): 5-methyl modified nucleotide
  modified_base (12)..(12): 5-methyl modified nucleotide
  modified_base (15)..(15): bicyclic nucleic acid (BNA)
agauggcauuucuag

SEQ ID NO: 16117 - RNA, 14 nt, Artificial Sequence
  source: /note="Description of Artificial Sequence: Synthetic oligonucleotide"
  source: /note="RNA"
  modified_base (1)..(1): bicyclic nucleic acid (BNA)
  modified_base (7)..(7): 5-methyl modified nucleotide
  modified_base (12)..(12): 5-methyl modified nucleotide
  modified_base (14)..(14): bicyclic nucleic acid (BNA)
agauggcauuucua

SEQ ID NO: 16118 - DNA, 13 bp, Artificial Sequence
  source: /note="Description of Artificial Sequence: Synthetic oligonucleotide"
  source: /note="Description of Combined DNA/RNA Molecule: Synthetic oligonucleotide"
  source: /note="DNA/RNA"
  modified_base (1)..(1): bicyclic nucleic acid (BNA)
  modified_base (7)..(7): 5-methyl modified nucleotide
  modified_base (12)..(12): 5-methyl modified nucleotide
  modified_base (13)..(13): bicyclic nucleic acid (BNA)
agauggcauuuct

SEQ ID NO: 16119 - RNA, 12 nt, Artificial Sequence
  source: /note="Description of Artificial Sequence: Synthetic oligonucleotide"
  source: /note="RNA"
  modified_base (1)..(1): bicyclic nucleic acid (BNA)
  modified_base (7)..(7): 5-methyl modified nucleotide
  modified_base (12)..(12): 5-methyl bicyclic nucleic acid
agauggcauuuc

SEQ ID NO: 16120 - DNA, 11 bp, Artificial Sequence
  source: /note="Description of Artificial Sequence: Synthetic oligonucleotide"
  source: /note="Description of Combined DNA/RNA Molecule: Synthetic oligonucleotide"
  source: /note="DNA/RNA"
  modified_base (1)..(1): bicyclic nucleic acid (BNA)
  modified_base (7)..(7): 5-methyl modified nucleotide
  modified_base (11)..(11): bicyclic nucleic acid (BNA)
agauggcauut

SEQ ID NO: 16121 - DNA, 10 bp, Artificial Sequence
  source: /note="Description of Artificial Sequence: Synthetic oligonucleotide"
  source: /note="Description of Combined DNA/RNA Molecule: Synthetic oligonucleotide"
  source: /note="DNA/RNA"
  modified_base (1)..(1): bicyclic nucleic acid (BNA)
  modified_base (7)..(7): 5-methyl modified nucleotide
  modified_base (10)..(10): bicyclic nucleic acid (BNA)
agauggcaut

SEQ ID NO: 16122 - DNA, 9 bp, Artificial Sequence
  source: /note="Description of Artificial Sequence: Synthetic oligonucleotide"
  source: /note="Description of Combined DNA/RNA Molecule: Synthetic oligonucleotide"
  source: /note="DNA/RNA"
  modified_base (1)..(1): bicyclic nucleic acid (BNA)
  modified_base (7)..(7): 5-methyl modified nucleotide
  modified_base (9)..(9): bicyclic nucleic acid (BNA)
agauggcat

SEQ ID NO: 16123 - RNA, 8 nt, Artificial Sequence
  source: /note="Description of Artificial Sequence: Synthetic oligonucleotide"
  source: /note="RNA"
  modified_base (1)..(1): bicyclic nucleic acid (BNA)
  modified_base (7)..(7): 5-methyl modified nucleotide
  modified_base (8)..(8): bicyclic nucleic acid (BNA)
agauggca

SEQ ID NO: 16124 - RNA, 30 nt, Artificial Sequence; identical to SEQ ID NO: 284
  source: /note="Description of Artificial Sequence: Synthetic oligonucleotide"
  source: /note="RNA"
  modified_base (1)..(1): 5-methyl bicyclic nucleic acid
  modified_base (3)..(3): 5-methyl modified nucleotide
  modified_base (4)..(4): 5-methyl modified nucleotide
  modified_base (7)..(7): 5-methyl modified nucleotide
  modified_base (10)..(10): 5-methyl modified nucleotide
  modified_base (22)..(22): 5-methyl modified nucleotide
  modified_base (27)..(27): 5-methyl modified nucleotide
  modified_base (30)..(30): bicyclic nucleic acid (BNA)

SEQ ID NO: 16125 - RNA, 29 nt, Artificial Sequence
  source: /note="Description of Artificial Sequence: Synthetic oligonucleotide"
  source: /note="RNA"
  modified_base (1)..(1): 5-methyl bicyclic nucleic acid
  modified_base (3)..(3): 5-methyl modified nucleotide
  modified_base (4)..(4): 5-methyl modified nucleotide
  modified_base (7)..(7): 5-methyl modified nucleotide
  modified_base (10)..(10): 5-methyl modified nucleotide
  modified_base (22)..(22): 5-methyl modified nucleotide
  modified_base (27)..(27): 5-methyl modified nucleotide
  modified_base (29)..(29): bicyclic nucleic acid (BNA)
cuccaacaucaaggaagauggcauuucua

SEQ ID NO: 16126 - DNA, 28 bp, Artificial Sequence
  source: /note="Description of Artificial Sequence: Synthetic oligonucleotide"
  source: /note="Description of Combined DNA/RNA Molecule: Synthetic oligonucleotide"
  source: /note="DNA/RNA"
  modified_base (1)..(1): 5-methyl bicyclic nucleic acid
  modified_base (3)..(3): 5-methyl modified nucleotide
  modified_base (4)..(4): 5-methyl modified nucleotide
  modified_base (7)..(7): 5-methyl modified nucleotide
  modified_base (10)..(10): 5-methyl modified nucleotide
  modified_base (22)..(22): 5-methyl modified nucleotide
  modified_base (27)..(27): 5-methyl modified nucleotide
  modified_base (28)..(28): bicyclic nucleic acid (BNA)
cuccaacaucaaggaagauggcauuuct

SEQ ID NO: 16127 - RNA, 27 nt, Artificial Sequence
  source: /note="Description of Artificial Sequence: Synthetic oligonucleotide"
  source: /note="RNA"
  modified_base (1)..(1): 5-methyl bicyclic nucleic acid
  modified_base (3)..(3): 5-methyl modified nucleotide
  modified_base (4)..(4): 5-methyl modified nucleotide
  modified_base (7)..(7): 5-methyl modified nucleotide
  modified_base (10)..(10): 5-methyl modified nucleotide
  modified_base (22)..(22): 5-methyl modified nucleotide
  modified_base (27)..(27): 5-methyl bicyclic nucleic acid
cuccaacaucaaggaagauggcauuuc

SEQ ID NO: 16128 - DNA, 26 bp, Artificial Sequence
  source: /note="Description of Artificial Sequence: Synthetic oligonucleotide"
  source: /note="Description of Combined DNA/RNA Molecule: Synthetic oligonucleotide"
  source: /note="DNA/RNA"
  modified_base (1)..(1): 5-methyl bicyclic nucleic acid
  modified_base (3)..(3): 5-methyl modified nucleotide
  modified_base (4)..(4): 5-methyl modified nucleotide
  modified_base (7)..(7): 5-methyl modified nucleotide
  modified_base (10)..(10): 5-methyl modified nucleotide
  modified_base (22)..(22): 5-methyl modified nucleotide
  modified_base (26)..(26): bicyclic nucleic acid (BNA)
cuccaacaucaaggaagauggcauut

SEQ ID NO: 16129 - DNA, 25 bp, Artificial Sequence
  source: /note="Description of Artificial Sequence: Synthetic oligonucleotide"
  source: /note="Description of Combined DNA/RNA Molecule: Synthetic oligonucleotide"
  source: /note="DNA/RNA"
  modified_base (1)..(1): 5-methyl bicyclic nucleic acid
  modified_base (3)..(3): 5-methyl modified nucleotide
  modified_base (4)..(4): 5-methyl modified nucleotide
  modified_base (7)..(7): 5-methyl modified nucleotide
  modified_base (10)..(10): 5-methyl modified nucleotide
  modified_base (22)..(22): 5-methyl modified nucleotide
  modified_base (25)..(25): bicyclic nucleic acid (BNA)
cuccaacaucaaggaagauggcaut

SEQ ID NO: 16130 - DNA, 24 bp, Artificial Sequence
  source: /note="Description of Artificial Sequence: Synthetic oligonucleotide"
  source: /note="Description of Combined DNA/RNA Molecule: Synthetic oligonucleotide"
  source: /note="DNA/RNA"
  modified_base (1)..(1): 5-methyl bicyclic nucleic acid
  modified_base (3)..(3): 5-methyl modified nucleotide
  modified_base (4)..(4): 5-methyl modified nucleotide
  modified_base (7)..(7): 5-methyl modified nucleotide
  modified_base (10)..(10): 5-methyl modified nucleotide
  modified_base (22)..(22): 5-methyl modified nucleotide
  modified_base (24)..(24): bicyclic nucleic acid (BNA)
cuccaacaucaaggaagauggcat

SEQ ID NO: 16131 - RNA, 23 nt, Artificial Sequence
  source: /note="Description of Artificial Sequence: Synthetic oligonucleotide"
  source: /note="RNA"
  modified_base (1)..(1): 5-methyl bicyclic nucleic acid
  modified_base (3)..(3): 5-methyl modified nucleotide
  modified_base (4)..(4): 5-methyl modified nucleotide
  modified_base (7)..(7): 5-methyl modified nucleotide
  modified_base (10)..(10): 5-methyl modified nucleotide
  modified_base (22)..(22): 5-methyl modified nucleotide
  modified_base (23)..(23): bicyclic nucleic acid (BNA)
cuccaacaucaaggaagauggca

SEQ ID NO: 16132 - RNA, 22 nt, Artificial Sequence
  source: /note="Description of Artificial Sequence: Synthetic oligonucleotide"
  source: /note="RNA"
  modified_base (1)..(1): 5-methyl bicyclic nucleic acid
  modified_base (3)..(3): 5-methyl modified nucleotide
  modified_base (4)..(4): 5-methyl modified nucleotide
  modified_base (7)..(7): 5-methyl modified nucleotide
  modified_base (10)..(10): 5-methyl modified nucleotide
  modified_base (22)..(22): 5-methyl bicyclic nucleic acid
cuccaacaucaaggaagauggc

SEQ ID NO: 16133 - RNA, 21 nt, Artificial Sequence
  source: /note="Description of Artificial Sequence: Synthetic oligonucleotide"
  source: /note="RNA"
  modified_base (1)..(1): 5-methyl bicyclic nucleic acid
  modified_base (3)..(3): 5-methyl modified nucleotide
  modified_base (4)..(4): 5-methyl modified nucleotide
  modified_base (7)..(7): 5-methyl modified nucleotide
  modified_base (10)..(10): 5-methyl modified nucleotide
  modified_base (21)..(21): bicyclic nucleic acid (BNA)
cuccaacaucaaggaagaugg

SEQ ID NO: 16134 - RNA, 20 nt, Artificial Sequence
  source: /note="Description of Artificial Sequence: Synthetic oligonucleotide"
  source: /note="RNA"
  modified_base (1)..(1): 5-methyl bicyclic nucleic acid
  modified_base (3)..(3): 5-methyl modified nucleotide
  modified_base (4)..(4): 5-methyl modified nucleotide
  modified_base (7)..(7): 5-methyl modified nucleotide
  modified_base (10)..(10): 5-methyl modified nucleotide
  modified_base (20)..(20): bicyclic nucleic acid (BNA)
cuccaacaucaaggaagaug

SEQ ID NO: 16135 - DNA, 19 bp, Artificial Sequence
  source: /note="Description of Artificial Sequence: Synthetic oligonucleotide"
  source: /note="Description of Combined DNA/RNA Molecule: Synthetic oligonucleotide"
  source: /note="DNA/RNA"
  modified_base (1)..(1): 5-methyl bicyclic nucleic acid
  modified_base (3)..(3): 5-methyl modified nucleotide
  modified_base (4)..(4): 5-methyl modified nucleotide
  modified_base (7)..(7): 5-methyl modified nucleotide
  modified_base (10)..(10): 5-methyl modified nucleotide
  modified_base (19)..(19): bicyclic nucleic acid (BNA)
cuccaacaucaaggaagat

SEQ ID NO: 16136 - RNA, 18 nt, Artificial Sequence
  source: /note="Description of Artificial Sequence: Synthetic oligonucleotide"
  source: /note="RNA"
  modified_base (1)..(1): 5-methyl bicyclic nucleic acid
  modified_base (3)..(3): 5-methyl modified nucleotide
  modified_base (4)..(4): 5-methyl modified nucleotide
  modified_base (7)..(7): 5-methyl modified nucleotide
  modified_base (10)..(10): 5-methyl modified nucleotide
  modified_base (18)..(18): bicyclic nucleic acid (BNA)
cuccaacaucaaggaaga

SEQ ID NO: 16137 - RNA, 17 nt, Artificial Sequence
  source: /note="Description of Artificial Sequence: Synthetic oligonucleotide"
  source: /note="RNA"
  modified_base (1)..(1): 5-methyl bicyclic nucleic acid
  modified_base (3)..(3): 5-methyl modified nucleotide
  modified_base (4)..(4): 5-methyl modified nucleotide
  modified_base (7)..(7): 5-methyl modified nucleotide
  modified_base (10)..(10): 5-methyl modified nucleotide
  modified_base (17)..(17): bicyclic nucleic acid (BNA)
cuccaacaucaaggaag

SEQ ID NO: 16138 - DNA, 29 bp, Artificial Sequence
  source: /note="Description of Artificial Sequence: Synthetic oligonucleotide"
  source: /note="Description of Combined DNA/RNA Molecule: Synthetic oligonucleotide"
  source: /note="DNA/RNA"
  modified_base (1)..(1): bicyclic nucleic acid (BNA)
  modified_base (2)..(2): 5-methyl modified nucleotide
  modified_base (3)..(3): 5-methyl modified nucleotide
  modified_base (6)..(6): 5-methyl modified nucleotide
  modified_base (9)..(9): 5-methyl modified nucleotide
  modified_base (21)..(21): 5-methyl modified nucleotide
  modified_base (26)..(26): 5-methyl modified nucleotide
  modified_base (29)..(29): bicyclic nucleic acid (BNA)
tccaacaucaaggaagauggcauuucuag

SEQ ID NO: 16139 - DNA, 28 bp, Artificial Sequence
  source: /note="Description of Artificial Sequence: Synthetic oligonucleotide"
  source: /note="Description of Combined DNA/RNA Molecule: Synthetic oligonucleotide"
  source: /note="DNA/RNA"
  modified_base (1)..(1): bicyclic nucleic acid (BNA)
  modified_base (2)..(2): 5-methyl modified nucleotide
  modified_base (3)..(3): 5-methyl modified nucleotide
  modified_base (6)..(6): 5-methyl modified nucleotide
  modified_base (9)..(9): 5-methyl modified nucleotide
  modified_base (21)..(21): 5-methyl modified nucleotide
  modified_base (26)..(26): 5-methyl modified nucleotide
  modified_base (28)..(28): bicyclic nucleic acid (BNA)
tccaacaucaaggaagauggcauuucua

SEQ ID NO: 16140 - DNA, 27 bp, Artificial Sequence
  source: /note="Description of Artificial Sequence: Synthetic oligonucleotide"
  source: /note="Description of Combined DNA/RNA Molecule: Synthetic oligonucleotide"
  source: /note="DNA/RNA"
  modified_base (1)..(1): bicyclic nucleic acid (BNA)
  modified_base (2)..(2): 5-methyl modified nucleotide
  modified_base (3)..(3): 5-methyl modified nucleotide
  modified_base (6)..(6): 5-methyl modified nucleotide
  modified_base (9)..(9): 5-methyl modified nucleotide
  modified_base (21)..(21): 5-methyl modified nucleotide
  modified_base (26)..(26): 5-methyl modified nucleotide
  modified_base (27)..(27): bicyclic nucleic acid (BNA)
tccaacaucaaggaagauggcauuuct

SEQ ID NO: 16141 - DNA, 26 bp, Artificial Sequence
  source: /note="Description of Artificial Sequence: Synthetic oligonucleotide"
  source: /note="Description of Combined DNA/RNA Molecule: Synthetic oligonucleotide"
  source: /note="DNA/RNA"
  modified_base (1)..(1): bicyclic nucleic acid (BNA)
  modified_base (2)..(2): 5-methyl modified nucleotide
  modified_base (3)..(3): 5-methyl modified nucleotide
  modified_base (6)..(6): 5-methyl modified nucleotide
  modified_base (9)..(9): 5-methyl modified nucleotide
  modified_base (21)..(21): 5-methyl modified nucleotide
  modified_base (26)..(26): 5-methyl bicyclic nucleic acid
tccaacaucaaggaagauggcauuuc

SEQ ID NO: 16142 - DNA, 25 bp, Artificial Sequence
  source: /note="Description of Artificial Sequence: Synthetic oligonucleotide"
  source: /note="Description of Combined DNA/RNA Molecule: Synthetic oligonucleotide"
  source: /note="DNA/RNA"
  modified_base (1)..(1): bicyclic nucleic acid (BNA)
  modified_base (2)..(2): 5-methyl modified nucleotide
  modified_base (3)..(3): 5-methyl modified nucleotide
  modified_base (6)..(6): 5-methyl modified nucleotide
  modified_base (9)..(9): 5-methyl modified nucleotide
  modified_base (21)..(21): 5-methyl modified nucleotide
  modified_base (25)..(25): bicyclic nucleic acid (BNA)
tccaacaucaaggaagauggcauut

SEQ ID NO: 16143 - DNA, 24 bp, Artificial Sequence
  source: /note="Description of Artificial Sequence: Synthetic oligonucleotide"
  source: /note="Description of Combined DNA/RNA Molecule: Synthetic oligonucleotide"
  source: /note="DNA/RNA"
  modified_base (1)..(1): bicyclic nucleic acid (BNA)
  modified_base (2)..(2): 5-methyl modified nucleotide
  modified_base (3)..(3): 5-methyl modified nucleotide
  modified_base (6)..(6): 5-methyl modified nucleotide
  modified_base (9)..(9): 5-methyl modified nucleotide
  modified_base (21)..(21): 5-methyl modified nucleotide
  modified_base (24)..(24): bicyclic nucleic acid (BNA)
tccaacaucaaggaagauggcaut

SEQ ID NO: 16144 - DNA, 23 bp, Artificial Sequence
  source: /note="Description of Artificial Sequence: Synthetic oligonucleotide"
  source: /note="Description of Combined DNA/RNA Molecule: Synthetic oligonucleotide"
  source: /note="DNA/RNA"
  modified_base (1)..(1): bicyclic nucleic acid (BNA)
  modified_base (2)..(2): 5-methyl modified nucleotide
  modified_base (3)..(3): 5-methyl modified nucleotide
  modified_base (6)..(6): 5-methyl modified nucleotide
  modified_base (9)..(9): 5-methyl modified nucleotide
  modified_base (21)..(21): 5-methyl modified nucleotide
  modified_base (23)..(23): bicyclic nucleic acid (BNA)
tccaacaucaaggaagauggcat

SEQ ID NO: 16145 - DNA, 22 bp, Artificial Sequence
  source: /note="Description of Artificial Sequence: Synthetic oligonucleotide"
  source: /note="Description of Combined DNA/RNA Molecule: Synthetic oligonucleotide"
  source: /note="DNA/RNA"
  modified_base (1)..(1): bicyclic nucleic acid (BNA)
  modified_base (2)..(2): 5-methyl modified nucleotide
  modified_base (3)..(3): 5-methyl modified nucleotide
  modified_base (6)..(6): 5-methyl modified nucleotide
  modified_base (9)..(9): 5-methyl modified nucleotide
  modified_base (21)..(21): 5-methyl modified nucleotide
  modified_base (22)..(22): bicyclic nucleic acid (BNA)
tccaacaucaaggaagauggca

SEQ ID NO: 16146 - DNA, 21 bp, Artificial Sequence
  source: /note="Description of Artificial Sequence: Synthetic oligonucleotide"
  source: /note="Description of Combined DNA/RNA Molecule: Synthetic oligonucleotide"
  source: /note="DNA/RNA"
  modified_base (1)..(1): bicyclic nucleic acid (BNA)
  modified_base (2)..(2): 5-methyl modified nucleotide
  modified_base (3)..(3): 5-methyl modified nucleotide
  modified_base (6)..(6): 5-methyl modified nucleotide
  modified_base (9)..(9): 5-methyl modified nucleotide
  modified_base (21)..(21): 5-methyl bicyclic nucleic acid
tccaacaucaaggaagauggc

SEQ ID NO: 16147 - DNA, 20 bp, Artificial Sequence
  source: /note="Description of Artificial Sequence: Synthetic oligonucleotide"
  source: /note="Description of Combined DNA/RNA Molecule: Synthetic oligonucleotide"
  source: /note="DNA/RNA"
  modified_base (1)..(1): bicyclic nucleic acid (BNA)
  modified_base (2)..(2): 5-methyl modified nucleotide
  modified_base (3)..(3): 5-methyl modified nucleotide
  modified_base (6)..(6): 5-methyl modified nucleotide
  modified_base (9)..(9): 5-methyl modified nucleotide
  modified_base (20)..(20): bicyclic nucleic acid (BNA)
tccaacaucaaggaagaugg

SEQ ID NO: 16148 - DNA, 19 bp, Artificial Sequence
  source: /note="Description of Artificial Sequence: Synthetic oligonucleotide"
  source: /note="Description of Combined DNA/RNA Molecule: Synthetic oligonucleotide"
  source: /note="DNA/RNA"
  modified_base (1)..(1): bicyclic nucleic acid (BNA)
  modified_base (2)..(2): 5-methyl modified nucleotide
  modified_base (3)..(3): 5-methyl modified nucleotide
  modified_base (6)..(6): 5-methyl modified nucleotide
  modified_base (9)..(9): 5-methyl modified nucleotide
  modified_base (19)..(19): bicyclic nucleic acid (BNA)
tccaacaucaaggaagaug

SEQ ID NO: 16149 - DNA, 18 bp, Artificial Sequence
  source: /note="Description of Artificial Sequence: Synthetic oligonucleotide"
  source: /note="Description of Combined DNA/RNA Molecule: Synthetic oligonucleotide"
  source: /note="DNA/RNA"
  modified_base (1)..(1): bicyclic nucleic acid (BNA)
  modified_base (2)..(2): 5-methyl modified nucleotide
  modified_base (3)..(3): 5-methyl modified nucleotide
  modified_base (6)..(6): 5-methyl modified nucleotide
  modified_base (9)..(9): 5-methyl modified nucleotide
  modified_base (18)..(18): bicyclic nucleic acid (BNA)
tccaacaucaaggaagat

SEQ ID NO: 16150 - DNA, 17 bp, Artificial Sequence
  source: /note="Description of Artificial Sequence: Synthetic oligonucleotide"
  source: /note="Description of Combined DNA/RNA Molecule: Synthetic oligonucleotide"
  source: /note="DNA/RNA"
  modified_base (1)..(1): bicyclic nucleic acid (BNA)
  modified_base (2)..(2): 5-methyl modified nucleotide
  modified_base (3)..(3): 5-methyl modified nucleotide
  modified_base (6)..(6): 5-methyl modified nucleotide
  modified_base (9)..(9): 5-methyl modified nucleotide
  modified_base (17)..(17): bicyclic nucleic acid (BNA)
tccaacaucaaggaaga

SEQ ID NO: 16151 - DNA, 16 bp, Artificial Sequence
  source: /note="Description of Artificial Sequence: Synthetic oligonucleotide"
  source: /note="Description of Combined DNA/RNA Molecule: Synthetic oligonucleotide"
  source: /note="DNA/RNA"
  modified_base (1)..(1): bicyclic nucleic acid (BNA)
  modified_base (2)..(2): 5-methyl modified nucleotide
  modified_base (3)..(3): 5-methyl modified nucleotide
  modified_base (6)..(6): 5-methyl modified nucleotide
  modified_base (9)..(9): 5-methyl modified nucleotide
  modified_base (16)..(16): bicyclic nucleic acid (BNA)
tccaacaucaaggaag

SEQ ID NO: 16152 - RNA, 28 nt, Artificial Sequence
  source: /note="Description of Artificial Sequence: Synthetic oligonucleotide"
  source: /note="RNA"
  modified_base (1)..(1): 5-methyl bicyclic nucleic acid
  modified_base (2)..(2): 5-methyl modified nucleotide
  modified_base (5)..(5): 5-methyl modified nucleotide
  modified_base (8)..(8): 5-methyl modified nucleotide
  modified_base (20)..(20): 5-methyl modified nucleotide
  modified_base (25)..(25): 5-methyl modified nucleotide
  modified_base (28)..(28): bicyclic nucleic acid (BNA)
ccaacaucaaggaagauggcauuucuag

SEQ ID NO: 16153 - RNA, 27 nt, Artificial Sequence
  source: /note="Description of Artificial Sequence: Synthetic oligonucleotide"
  source: /note="RNA"
  modified_base (1)..(1): 5-methyl bicyclic nucleic acid
  modified_base (2)..(2): 5-methyl modified nucleotide
  modified_base (5)..(5): 5-methyl modified nucleotide
  modified_base (8)..(8): 5-methyl modified nucleotide
  modified_base (20)..(20): 5-methyl modified nucleotide
  modified_base (25)..(25): 5-methyl modified nucleotide
  modified_base (27)..(27): bicyclic nucleic acid (BNA)
ccaacaucaaggaagauggcauuucua

SEQ ID NO: 16154 - DNA, 26 bp, Artificial Sequence
  source: /note="Description of Artificial Sequence: Synthetic oligonucleotide"
  source: /note="Description of Combined DNA/RNA Molecule: Synthetic oligonucleotide"
  source: /note="DNA/RNA"
  modified_base (1)..(1): 5-methyl bicyclic nucleic acid
  modified_base (2)..(2): 5-methyl modified nucleotide
  modified_base (5)..(5): 5-methyl modified nucleotide
  modified_base (8)..(8): 5-methyl modified nucleotide
  modified_base (20)..(20): 5-methyl modified nucleotide
  modified_base (25)..(25): 5-methyl modified nucleotide
  modified_base (26)..(26): bicyclic nucleic acid (BNA)
ccaacaucaaggaagauggcauuuct

SEQ ID NO: 16155 - RNA, 25 nt, Artificial Sequence
  source: /note="Description of Artificial Sequence: Synthetic oligonucleotide"
  source: /note="RNA"
  modified_base (1)..(1): 5-methyl bicyclic nucleic acid
  modified_base (2)..(2): 5-methyl modified nucleotide
  modified_base (5)..(5): 5-methyl modified nucleotide
  modified_base (8)..(8): 5-methyl modified nucleotide
  modified_base (20)..(20): 5-methyl modified nucleotide
  modified_base (25)..(25): 5-methyl bicyclic nucleic acid
ccaacaucaaggaagauggcauuuc

SEQ ID NO: 16156 - DNA, 24 bp, Artificial Sequence
  source: /note="Description of Artificial Sequence: Synthetic oligonucleotide"
  source: /note="Description of Combined DNA/RNA Molecule: Synthetic oligonucleotide"
  source: /note="DNA/RNA"
  modified_base (1)..(1): 5-methyl bicyclic nucleic acid
  modified_base (2)..(2): 5-methyl modified nucleotide
  modified_base (5)..(5): 5-methyl modified nucleotide
  modified_base (8)..(8): 5-methyl modified nucleotide
  modified_base (20)..(20): 5-methyl modified nucleotide
  modified_base (24)..(24): bicyclic nucleic acid (BNA)
ccaacaucaaggaagauggcauut

SEQ ID NO: 16157 - DNA, 23 bp, Artificial Sequence
  source: /note="Description of Artificial Sequence: Synthetic oligonucleotide"
  source: /note="Description of Combined DNA/RNA Molecule: Synthetic oligonucleotide"
  source: /note="DNA/RNA"
  modified_base (1)..(1): 5-methyl bicyclic nucleic acid
  modified_base (2)..(2): 5-methyl modified nucleotide
  modified_base (5)..(5): 5-methyl modified nucleotide
  modified_base (8)..(8): 5-methyl modified nucleotide
  modified_base (20)..(20): 5-methyl modified nucleotide
  modified_base (23)..(23): bicyclic nucleic acid (BNA)
ccaacaucaaggaagauggcaut

SEQ ID NO: 16158 - DNA, 22 bp, Artificial Sequence
  source: /note="Description of Artificial Sequence: Synthetic oligonucleotide"
  source: /note="Description of Combined DNA/RNA Molecule: Synthetic oligonucleotide"
  source: /note="DNA/RNA"
  modified_base (1)..(1): 5-methyl bicyclic nucleic acid
  modified_base (2)..(2): 5-methyl modified nucleotide
  modified_base (5)..(5): 5-methyl modified nucleotide
  modified_base (8)..(8): 5-methyl modified nucleotide
  modified_base (20)..(20): 5-methyl modified nucleotide
  modified_base (22)..(22): bicyclic nucleic acid (BNA)
ccaacaucaaggaagauggcat

SEQ ID NO: 16159 - RNA, 21 nt, Artificial Sequence
  source: /note="Description of Artificial Sequence: Synthetic oligonucleotide"
  source: /note="RNA"
  modified_base (1)..(1): 5-methyl bicyclic nucleic acid
  modified_base (2)..(2): 5-methyl modified nucleotide
  modified_base (5)..(5): 5-methyl modified nucleotide
  modified_base (8)..(8): 5-methyl modified nucleotide
  modified_base (20)..(20): 5-methyl modified nucleotide
  modified_base (21)..(21): bicyclic nucleic acid (BNA)
ccaacaucaaggaagauggca

SEQ ID NO: 16160 - RNA, 20 nt, Artificial Sequence
  source: /note="Description of Artificial Sequence: Synthetic oligonucleotide"
  source: /note="RNA"
  modified_base (1)..(1): 5-methyl bicyclic nucleic acid
  modified_base (2)..(2): 5-methyl modified nucleotide
  modified_base (5)..(5): 5-methyl modified nucleotide
  modified_base (8)..(8): 5-methyl modified nucleotide
  modified_base (20)..(20): 5-methyl bicyclic nucleic acid
ccaacaucaaggaagauggc

SEQ ID NO: 16161 - RNA, 19 nt, Artificial Sequence
  source: /note="Description of Artificial Sequence: Synthetic oligonucleotide"
  source: /note="RNA"
  modified_base (1)..(1): 5-methyl bicyclic nucleic acid
  modified_base (2)..(2): 5-methyl modified nucleotide
  modified_base (5)..(5): 5-methyl modified nucleotide
  modified_base (8)..(8): 5-methyl modified nucleotide
  modified_base (19)..(19): bicyclic nucleic acid (BNA)
ccaacaucaaggaagaugg

SEQ ID NO: 16162 - RNA, 18 nt, Artificial Sequence
  source: /note="Description of Artificial Sequence: Synthetic oligonucleotide"
  source: /note="RNA"
  modified_base (1)..(1): 5-methyl bicyclic nucleic acid
  modified_base (2)..(2): 5-methyl modified nucleotide
  modified_base (5)..(5): 5-methyl modified nucleotide
  modified_base (8)..(8): 5-methyl modified nucleotide
  modified_base (18)..(18): bicyclic nucleic acid (BNA)
ccaacaucaaggaagaug

SEQ ID NO: 16163 - DNA, 17 bp, Artificial Sequence
  source: /note="Description of Artificial Sequence: Synthetic oligonucleotide"
  source: /note="Description of Combined DNA/RNA Molecule: Synthetic oligonucleotide"
  source: /note="DNA/RNA"
  modified_base (1)..(1): 5-methyl bicyclic nucleic acid
  modified_base (2)..(2): 5-methyl modified nucleotide
  modified_base (5)..(5): 5-methyl modified nucleotide
  modified_base (8)..(8): 5-methyl modified nucleotide
  modified_base (17)..(17): bicyclic nucleic acid (BNA)
ccaacaucaaggaagat

SEQ ID NO: 16164 - RNA, 16 nt, Artificial Sequence
  source: /note="Description of Artificial Sequence: Synthetic oligonucleotide"
  source: /note="RNA"
  modified_base (1)..(1): 5-methyl bicyclic nucleic acid
  modified_base (2)..(2): 5-methyl modified nucleotide
  modified_base (5)..(5): 5-methyl modified nucleotide
  modified_base (8)..(8): 5-methyl modified nucleotide
  modified_base (16)..(16): bicyclic nucleic acid (BNA)
ccaacaucaaggaaga

SEQ ID NO: 16165 - RNA, 15 nt, Artificial Sequence
  source: /note="Description of Artificial Sequence: Synthetic oligonucleotide"
  source: /note="RNA"
  modified_base (1)..(1): 5-methyl bicyclic nucleic acid
  modified_base (2)..(2): 5-methyl modified nucleotide
  modified_base (5)..(5): 5-methyl modified nucleotide
  modified_base (8)..(8): 5-methyl modified nucleotide
  modified_base (15)..(15): bicyclic nucleic acid (BNA)
ccaacaucaaggaag

SEQ ID NO: 16166 - RNA, 27 nt, Artificial Sequence
  source: /note="Description of Artificial Sequence: Synthetic oligonucleotide"
  source: /note="RNA"
  modified_base (1)..(1): 5-methyl bicyclic nucleic acid
  modified_base (4)..(4): 5-methyl modified nucleotide
  modified_base (7)..(7): 5-methyl modified nucleotide
  modified_base (19)..(19): 5-methyl modified nucleotide
  modified_base (24)..(24): 5-methyl modified nucleotide
  modified_base (27)..(27): bicyclic nucleic acid (BNA)
caacaucaaggaagauggcauuucuag

SEQ ID NO: 16167 - RNA, 26 nt, Artificial Sequence
  source: /note="Description of Artificial Sequence: Synthetic oligonucleotide"
  source: /note="RNA"
  modified_base (1)..(1): 5-methyl bicyclic nucleic acid
  modified_base (4)..(4): 5-methyl modified nucleotide
  modified_base (7)..(7): 5-methyl modified nucleotide
  modified_base (19)..(19): 5-methyl modified nucleotide
  modified_base (24)..(24): 5-methyl modified nucleotide
  modified_base (26)..(26): bicyclic nucleic acid (BNA)
caacaucaaggaagauggcauuucua

SEQ ID NO: 16168 - DNA, 25 bp, Artificial Sequence
  source: /note="Description of Artificial Sequence: Synthetic oligonucleotide"
  source: /note="Description of Combined DNA/RNA Molecule: Synthetic oligonucleotide"
  source: /note="DNA/RNA"
  modified_base (1)..(1): 5-methyl bicyclic nucleic acid
  modified_base (4)..(4): 5-methyl modified nucleotide
  modified_base (7)..(7): 5-methyl modified nucleotide
  modified_base (19)..(19): 5-methyl modified nucleotide
  modified_base (24)..(24): 5-methyl modified nucleotide
  modified_base (25)..(25): bicyclic nucleic acid (BNA)
caacaucaaggaagauggcauuuct

SEQ ID NO: 16169 - RNA, 24 nt, Artificial Sequence
  source: /note="Description of Artificial Sequence: Synthetic oligonucleotide"
  source: /note="RNA"
  modified_base (1)..(1): 5-methyl bicyclic nucleic acid
  modified_base (4)..(4): 5-methyl modified nucleotide
  modified_base (7)..(7): 5-methyl modified nucleotide
  modified_base (19)..(19): 5-methyl modified nucleotide
  modified_base (24)..(24): 5-methyl bicyclic nucleic acid
caacaucaaggaagauggcauuuc

SEQ ID NO: 16170 - DNA, 23 bp, Artificial Sequence
  source: /note="Description of Artificial Sequence: Synthetic oligonucleotide"
  source: /note="Description of Combined DNA/RNA Molecule: Synthetic oligonucleotide"
  source: /note="DNA/RNA"
  modified_base (1)..(1): 5-methyl bicyclic nucleic acid
  modified_base (4)..(4): 5-methyl modified nucleotide
  modified_base (7)..(7): 5-methyl modified nucleotide
  modified_base (19)..(19): 5-methyl modified nucleotide
  modified_base (23)..(23): bicyclic nucleic acid (BNA)
caacaucaaggaagauggcauut

SEQ ID NO: 16171 - DNA, 22 bp, Artificial Sequence
  source: /note="Description of Artificial Sequence: Synthetic oligonucleotide"
  source: /note="Description of Combined DNA/RNA Molecule: Synthetic oligonucleotide"
  source: /note="DNA/RNA"
  modified_base (1)..(1): 5-methyl bicyclic nucleic acid
  modified_base (4)..(4): 5-methyl modified nucleotide
  modified_base (7)..(7): 5-methyl modified nucleotide
  modified_base (19)..(19): 5-methyl modified nucleotide
  modified_base (22)..(22): bicyclic nucleic acid (BNA)
caacaucaaggaagauggcaut

SEQ ID NO: 16172 - DNA, 21 bp, Artificial Sequence
  source: /note="Description of Artificial Sequence: Synthetic oligonucleotide"
  source: /note="Description of Combined DNA/RNA Molecule: Synthetic oligonucleotide"
  source: /note="DNA/RNA"
  modified_base (1)..(1): 5-methyl bicyclic nucleic acid
  modified_base (4)..(4): 5-methyl modified nucleotide
  modified_base (7)..(7): 5-methyl modified nucleotide
  modified_base (19)..(19): 5-methyl modified nucleotide
  modified_base (21)..(21): bicyclic nucleic acid (BNA)
caacaucaaggaagauggcat

SEQ ID NO: 16173 - RNA, 20 nt, Artificial Sequence
  source: /note="Description of Artificial Sequence: Synthetic oligonucleotide"
  source: /note="RNA"
  modified_base (1)..(1): 5-methyl bicyclic nucleic acid
  modified_base (4)..(4): 5-methyl modified nucleotide
  modified_base (7)..(7): 5-methyl modified nucleotide
  modified_base (19)..(19): 5-methyl modified nucleotide
  modified_base (20)..(20): bicyclic nucleic acid (BNA)
caacaucaaggaagauggca

SEQ ID NO: 16174 - RNA, 19 nt, Artificial Sequence
  source: /note="Description of Artificial Sequence: Synthetic oligonucleotide"
  source: /note="RNA"
  modified_base (1)..(1): 5-methyl bicyclic nucleic acid
  modified_base (4)..(4): 5-methyl modified nucleotide
  modified_base (7)..(7): 5-methyl modified nucleotide
  modified_base (19)..(19): 5-methyl bicyclic nucleic acid
caacaucaaggaagauggc

SEQ ID NO: 16175 - RNA, 18 nt, Artificial Sequence
  source: /note="Description of Artificial Sequence: Synthetic oligonucleotide"
  source: /note="RNA"
  modified_base (1)..(1): 5-methyl bicyclic nucleic acid
  modified_base (4)..(4): 5-methyl modified nucleotide
  modified_base (7)..(7): 5-methyl modified nucleotide
  modified_base (18)..(18): bicyclic nucleic acid (BNA)
caacaucaaggaagaugg

SEQ ID NO: 16176 - RNA, 17 nt, Artificial Sequence
  source: /note="Description of Artificial Sequence: Synthetic oligonucleotide"
  source: /note="RNA"
  modified_base (1)..(1): 5-methyl bicyclic nucleic acid
  modified_base (4)..(4): 5-methyl modified nucleotide
  modified_base (7)..(7): 5-methyl modified nucleotide
  modified_base (17)..(17): bicyclic nucleic acid (BNA)
caacaucaaggaagaug

SEQ ID NO: 16177 - DNA, 16 bp, Artificial Sequence
  source: /note="Description of Artificial Sequence: Synthetic oligonucleotide"
  source: /note="Description of Combined DNA/RNA Molecule: Synthetic oligonucleotide"
  source: /note="DNA/RNA"
  modified_base (1)..(1): 5-methyl bicyclic nucleic acid
  modified_base (4)..(4): 5-methyl modified nucleotide
  modified_base (7)..(7): 5-methyl modified nucleotide
  modified_base (16)..(16): bicyclic nucleic acid (BNA)
caacaucaaggaagat

SEQ ID NO: 16178 - RNA, 15 nt, Artificial Sequence
  source: /note="Description of Artificial Sequence: Synthetic oligonucleotide"
  source: /note="RNA"
  modified_base (1)..(1): 5-methyl bicyclic nucleic acid
  modified_base (4)..(4): 5-methyl modified nucleotide
  modified_base (7)..(7): 5-methyl modified nucleotide
  modified_base (15)..(15): bicyclic nucleic acid (BNA)
caacaucaaggaaga

SEQ ID NO: 16179 - RNA, 14 nt, Artificial Sequence
  source: /note="Description of Artificial Sequence: Synthetic oligonucleotide"
  source: /note="RNA"
  modified_base (1)..(1): 5-methyl bicyclic nucleic acid
  modified_base (4)..(4): 5-methyl modified nucleotide
  modified_base (7)..(7): 5-methyl modified nucleotide
  modified_base (14)..(14): bicyclic nucleic acid (BNA)
caacaucaaggaag

SEQ ID NO: 16180 - RNA, 26 nt, Artificial Sequence
  source: /note="Description of Artificial Sequence: Synthetic oligonucleotide"
  source: /note="RNA"
  modified_base (1)..(1): bicyclic nucleic acid (BNA)
  modified_base (3)..(3): 5-methyl modified nucleotide
  modified_base (6)..(6): 5-methyl modified nucleotide
  modified_base (18)..(18): 5-methyl modified nucleotide
  modified_base (23)..(23): 5-methyl modified nucleotide
  modified_base (26)..(26): bicyclic nucleic acid (BNA)
aacaucaaggaagauggcauuucuag

SEQ ID NO: 16181 - RNA, 25 nt, Artificial Sequence
  source: /note="Description of Artificial Sequence: Synthetic oligonucleotide"
  source: /note="RNA"
  modified_base (1)..(1): bicyclic nucleic acid (BNA)
  modified_base (3)..(3): 5-methyl modified nucleotide
  modified_base (6)..(6): 5-methyl modified nucleotide
  modified_base (18)..(18): 5-methyl modified nucleotide
  modified_base (23)..(23): 5-methyl modified nucleotide
  modified_base (25)..(25): bicyclic nucleic acid (BNA)
aacaucaaggaagauggcauuucua

SEQ ID NO: 16182 - DNA, 24 bp, Artificial Sequence
  source: /note="Description of Artificial Sequence: Synthetic oligonucleotide"
  source: /note="Description of Combined DNA/RNA Molecule: Synthetic oligonucleotide"
  source: /note="DNA/RNA"
  modified_base (1)..(1): bicyclic nucleic acid (BNA)
  modified_base (3)..(3): 5-methyl modified nucleotide
  modified_base (6)..(6): 5-methyl modified nucleotide
  modified_base (18)..(18): 5-methyl modified nucleotide
  modified_base (23)..(23): 5-methyl modified nucleotide
  modified_base (24)..(24): bicyclic nucleic acid (BNA)
aacaucaaggaagauggcauuuct

SEQ ID NO: 16183 - RNA, 23 nt, Artificial Sequence
  source: /note="Description of Artificial Sequence: Synthetic oligonucleotide"
  source: /note="RNA"
  modified_base (1)..(1): bicyclic nucleic acid (BNA)
  modified_base (3)..(3): 5-methyl modified nucleotide
  modified_base (6)..(6): 5-methyl modified nucleotide
  modified_base (18)..(18): 5-methyl modified nucleotide
  modified_base (23)..(23): 5-methyl bicyclic nucleic acid
aacaucaaggaagauggcauuuc

SEQ ID NO: 16184 - DNA, 22 bp, Artificial Sequence
  source: /note="Description of Artificial Sequence: Synthetic oligonucleotide"
  source: /note="Description of Combined DNA/RNA Molecule: Synthetic oligonucleotide"
  source: /note="DNA/RNA"
  modified_base (1)..(1): bicyclic nucleic acid (BNA)
  modified_base (3)..(3): 5-methyl modified nucleotide
  modified_base (6)..(6): 5-methyl modified nucleotide
  modified_base (18)..(18): 5-methyl modified nucleotide
  modified_base (22)..(22): bicyclic nucleic acid (BNA)
aacaucaaggaagauggcauut

SEQ ID NO: 16185 - DNA, 21 bp, Artificial Sequence
  source: /note="Description of Artificial Sequence: Synthetic oligonucleotide"
  source: /note="Description of Combined DNA/RNA Molecule: Synthetic oligonucleotide"
  source: /note="DNA/RNA"
  modified_base (1)..(1): bicyclic nucleic acid (BNA)
  modified_base (3)..(3): 5-methyl modified nucleotide
  modified_base (6)..(6): 5-methyl modified nucleotide
  modified_base (18)..(18): 5-methyl modified nucleotide
  modified_base (21)..(21): bicyclic nucleic acid (BNA)
aacaucaaggaagauggcaut

SEQ ID NO: 16186 - DNA, 20 bp, Artificial Sequence
  source: /note="Description of Artificial Sequence: Synthetic oligonucleotide"
  source: /note="Description of Combined DNA/RNA Molecule: Synthetic oligonucleotide"
  source: /note="DNA/RNA"
  modified_base (1)..(1): bicyclic nucleic acid (BNA)
  modified_base (3)..(3): 5-methyl modified nucleotide
  modified_base (6)..(6): 5-methyl modified nucleotide
  modified_base (18)..(18): 5-methyl modified nucleotide
  modified_base (20)..(20): bicyclic nucleic acid (BNA)
aacaucaaggaagauggcat

SEQ ID NO: 16187 - RNA, 19 nt, Artificial Sequence
  source: /note="Description of Artificial Sequence: Synthetic oligonucleotide"
  source: /note="RNA"
  modified_base (1)..(1): bicyclic nucleic acid (BNA)
  modified_base (3)..(3): 5-methyl modified nucleotide
  modified_base (6)..(6): 5-methyl modified nucleotide
  modified_base (18)..(18): 5-methyl modified nucleotide
  modified_base (19)..(19): bicyclic nucleic acid (BNA)
aacaucaaggaagauggca

SEQ ID NO: 16188 - RNA, 18 nt, Artificial Sequence
  source: /note="Description of Artificial Sequence: Synthetic oligonucleotide"
  source: /note="RNA"
  modified_base (1)..(1): bicyclic nucleic acid (BNA)
  modified_base (3)..(3): 5-methyl modified nucleotide
  modified_base (6)..(6): 5-methyl modified nucleotide
  modified_base (18)..(18): 5-methyl bicyclic nucleic acid
aacaucaaggaagauggc

SEQ ID NO: 16189 - RNA, 17 nt, Artificial Sequence
  source: /note="Description of Artificial Sequence: Synthetic oligonucleotide"
  source: /note="RNA"
  modified_base (1)..(1): bicyclic nucleic acid (BNA)
  modified_base (3)..(3): 5-methyl modified nucleotide
  modified_base (6)..(6): 5-methyl modified nucleotide
  modified_base (17)..(17): bicyclic nucleic acid (BNA)
aacaucaaggaagaugg

SEQ ID NO: 16190 - RNA, 16 nt, Artificial Sequence
  source: /note="Description of Artificial Sequence: Synthetic oligonucleotide"
  source: /note="RNA"
  modified_base (1)..(1): bicyclic nucleic acid (BNA)
  modified_base (3)..(3): 5-methyl modified nucleotide
  modified_base (6)..(6): 5-methyl modified nucleotide
  modified_base (16)..(16): bicyclic nucleic acid (BNA)
aacaucaaggaagaug

SEQ ID NO: 16191 - DNA, 15 bp, Artificial Sequence
  source: /note="Description of Artificial Sequence: Synthetic oligonucleotide"
  source: /note="Description of Combined DNA/RNA Molecule: Synthetic oligonucleotide"
  source: /note="DNA/RNA"
  modified_base (1)..(1): bicyclic nucleic acid (BNA)
  modified_base (3)..(3): 5-methyl modified nucleotide
  modified_base (6)..(6): 5-methyl modified nucleotide
  modified_base (15)..(15): bicyclic nucleic acid (BNA)
aacaucaaggaagat

SEQ ID NO: 16192 - RNA, 14 nt, Artificial Sequence
  source: /note="Description of Artificial Sequence: Synthetic oligonucleotide"
  source: /note="RNA"
  modified_base (1)..(1): bicyclic nucleic acid (BNA)
  modified_base (3)..(3): 5-methyl modified nucleotide
  modified_base (6)..(6): 5-methyl modified nucleotide
  modified_base (14)..(14): bicyclic nucleic acid (BNA)
aacaucaaggaaga

SEQ ID NO: 16193 - RNA, 13 nt, Artificial Sequence
  source: /note="Description of Artificial Sequence: Synthetic oligonucleotide"
  source: /note="RNA"
  modified_base (1)..(1): bicyclic nucleic acid (BNA)
  modified_base (3)..(3): 5-methyl modified nucleotide
  modified_base (6)..(6): 5-methyl modified nucleotide
  modified_base (13)..(13): bicyclic nucleic acid (BNA)
aacaucaaggaag

SEQ ID NO: 16194 - RNA, 25 nt, Artificial Sequence
  source: /note="Description of Artificial Sequence: Synthetic oligonucleotide"
  source: /note="RNA"
  modified_base (1)..(1): bicyclic nucleic acid (BNA)
  modified_base (2)..(2): 5-methyl modified nucleotide
  modified_base (5)..(5): 5-methyl modified nucleotide
  modified_base (17)..(17): 5-methyl modified nucleotide
  modified_base (22)..(22): 5-methyl modified nucleotide
  modified_base (25)..(25): bicyclic nucleic acid (BNA)
acaucaaggaagauggcauuucuag

SEQ ID NO: 16195 - RNA, 24 nt, Artificial Sequence
  source: /note="Description of Artificial Sequence: Synthetic oligonucleotide"
  source: /note="RNA"
  modified_base (1)..(1): bicyclic nucleic acid (BNA)
  modified_base (2)..(2): 5-methyl modified nucleotide
  modified_base (5)..(5): 5-methyl modified nucleotide
  modified_base (17)..(17): 5-methyl modified nucleotide
  modified_base (22)..(22): 5-methyl modified nucleotide
  modified_base (24)..(24): bicyclic nucleic acid (BNA)
acaucaaggaagauggcauuucua

SEQ ID NO: 16196 - DNA, 23 bp, Artificial Sequence
  source: /note="Description of Artificial Sequence: Synthetic oligonucleotide"
  source: /note="Description of Combined DNA/RNA Molecule: Synthetic oligonucleotide"
  source: /note="DNA/RNA"
  modified_base (1)..(1): bicyclic nucleic acid (BNA)
  modified_base (2)..(2): 5-methyl modified nucleotide
  modified_base (5)..(5): 5-methyl modified nucleotide
  modified_base (17)..(17): 5-methyl modified nucleotide
  modified_base (22)..(22): 5-methyl modified nucleotide
  modified_base (23)..(23): bicyclic nucleic acid (BNA)
acaucaaggaagauggcauuuct

SEQ ID NO: 16197 - RNA, 22 nt, Artificial Sequence
  source: /note="Description of Artificial Sequence: Synthetic oligonucleotide"
  source: /note="RNA"
  modified_base (1)..(1): bicyclic nucleic acid (BNA)
  modified_base (2)..(2): 5-methyl modified nucleotide
  modified_base (5)..(5): 5-methyl modified nucleotide
  modified_base (17)..(17): 5-methyl modified nucleotide
  modified_base (22)..(22): 5-methyl bicyclic nucleic acid
acaucaaggaagauggcauuuc

SEQ ID NO: 16198 - DNA, 21 bp, Artificial Sequence
  source: /note="Description of Artificial Sequence: Synthetic oligonucleotide"
  source: /note="Description of Combined DNA/RNA Molecule: Synthetic oligonucleotide"
  source: /note="DNA/RNA"
  modified_base (1)..(1): bicyclic nucleic acid (BNA)
  modified_base (2)..(2): 5-methyl modified nucleotide
  modified_base (5)..(5): 5-methyl modified nucleotide
  modified_base (17)..(17): 5-methyl modified nucleotide
  modified_base (21)..(21): bicyclic nucleic acid (BNA)
acaucaaggaagauggcauut

SEQ ID NO: 16199 - DNA, 20 bp, Artificial Sequence
  source: /note="Description of Artificial Sequence: Synthetic oligonucleotide"
  source: /note="Description of Combined DNA/RNA Molecule: Synthetic oligonucleotide"
  source: /note="DNA/RNA"
  modified_base (1)..(1): bicyclic nucleic acid (BNA)
  modified_base (2)..(2): 5-methyl modified nucleotide
  modified_base (5)..(5): 5-methyl modified nucleotide
  modified_base (17)..(17): 5-methyl modified nucleotide
  modified_base (20)..(20): bicyclic nucleic acid (BNA)
acaucaaggaagauggcaut

SEQ ID NO: 16200 - DNA, 19 bp, Artificial Sequence
  source: /note="Description of Artificial Sequence: Synthetic oligonucleotide"
  source: /note="Description of Combined DNA/RNA Molecule: Synthetic oligonucleotide"
  source: /note="DNA/RNA"
  modified_base (1)..(1): bicyclic nucleic acid (BNA)
  modified_base (2)..(2): 5-methyl modified nucleotide
  modified_base (5)..(5): 5-methyl modified nucleotide
  modified_base (17)..(17): 5-methyl modified nucleotide
  modified_base (19)..(19): bicyclic nucleic acid (BNA)
acaucaaggaagauggcat

SEQ ID NO: 16201 - RNA, 18 nt, Artificial Sequence
  source: /note="Description of Artificial Sequence: Synthetic oligonucleotide"
  source: /note="RNA"
  modified_base (1)..(1): bicyclic nucleic acid (BNA)
  modified_base (2)..(2): 5-methyl modified nucleotide
  modified_base (5)..(5): 5-methyl modified nucleotide
  modified_base (17)..(17): 5-methyl modified nucleotide
  modified_base (18)..(18): bicyclic nucleic acid (BNA)
acaucaaggaagauggca

SEQ ID NO: 16202 - RNA, 17 nt, Artificial Sequence
  source: /note="Description of Artificial Sequence: Synthetic oligonucleotide"
  source: /note="RNA"
  modified_base (1)..(1): bicyclic nucleic acid (BNA)
  modified_base (2)..(2): 5-methyl modified nucleotide
  modified_base (5)..(5): 5-methyl modified nucleotide
  modified_base (17)..(17): 5-methyl bicyclic nucleic acid
acaucaaggaagauggc

SEQ ID NO: 16203 - RNA, 16 nt, Artificial Sequence
  source: /note="Description of Artificial Sequence: Synthetic oligonucleotide"
  source: /note="RNA"
  modified_base (1)..(1): bicyclic nucleic acid (BNA)
  modified_base (2)..(2): 5-methyl modified nucleotide
  modified_base (5)..(5): 5-methyl modified nucleotide
  modified_base (16)..(16): bicyclic nucleic acid (BNA)
acaucaaggaagaugg

SEQ ID NO: 16204 - RNA, 15 nt, Artificial Sequence
  source: /note="Description of Artificial Sequence: Synthetic oligonucleotide"
  source: /note="RNA"
  modified_base (1)..(1): bicyclic nucleic acid (BNA)
  modified_base (2)..(2): 5-methyl modified nucleotide
  modified_base (5)..(5): 5-methyl modified nucleotide
  modified_base (15)..(15): bicyclic nucleic acid (BNA)
acaucaaggaagaug

SEQ ID NO: 16205 - DNA, 14 bp, Artificial Sequence
  source: /note="Description of Artificial Sequence: Synthetic oligonucleotide"
  source: /note="Description of Combined DNA/RNA Molecule: Synthetic oligonucleotide"
  source: /note="DNA/RNA"
  modified_base (1)..(1): bicyclic nucleic acid (BNA)
  modified_base (2)..(2): 5-methyl modified nucleotide
  modified_base (5)..(5): 5-methyl modified nucleotide
  modified_base (14)..(14): bicyclic nucleic acid (BNA)
acaucaaggaagat

SEQ ID NO: 16206 - RNA, 13 nt, Artificial Sequence
  source: /note="Description of Artificial Sequence: Synthetic oligonucleotide"
  source: /note="RNA"
  modified_base (1)..(1): bicyclic nucleic acid (BNA)
  modified_base (2)..(2): 5-methyl modified nucleotide
  modified_base (5)..(5): 5-methyl modified nucleotide
  modified_base (13)..(13): bicyclic nucleic acid (BNA)
acaucaaggaaga

SEQ ID NO: 16207 - RNA, 12 nt, Artificial Sequence
  source: /note="Description of Artificial Sequence: Synthetic oligonucleotide"
  source: /note="RNA"
  modified_base (1)..(1): bicyclic nucleic acid (BNA)
  modified_base (2)..(2): 5-methyl modified nucleotide
  modified_base (5)..(5): 5-methyl modified nucleotide
  modified_base (12)..(12): bicyclic nucleic acid (BNA)
acaucaaggaag

SEQ ID NO: 16208 - RNA, 24 nt, Artificial Sequence
  source: /note="Description of Artificial Sequence: Synthetic oligonucleotide"
  source: /note="RNA"
  modified_base (1)..(1): 5-methyl bicyclic nucleic acid
  modified_base (4)..(4): 5-methyl modified nucleotide
  modified_base (16)..(16): 5-methyl modified nucleotide
  modified_base (21)..(21): 5-methyl modified nucleotide
  modified_base (24)..(24): bicyclic nucleic acid (BNA)
caucaaggaagauggcauuucuag

SEQ ID NO: 16209 - RNA, 23 nt, Artificial Sequence
  source: /note="Description of Artificial Sequence: Synthetic oligonucleotide"
  source: /note="RNA"
  modified_base (1)..(1): 5-methyl bicyclic nucleic acid
  modified_base (4)..(4): 5-methyl modified nucleotide
  modified_base (16)..(16): 5-methyl modified nucleotide
  modified_base (21)..(21): 5-methyl modified nucleotide
  modified_base (23)..(23): bicyclic nucleic acid (BNA)
caucaaggaagauggcauuucua

SEQ ID NO: 16210 - DNA, 22 bp, Artificial Sequence
  source: /note="Description of Artificial Sequence: Synthetic oligonucleotide"
  source: /note="Description of Combined DNA/RNA Molecule: Synthetic oligonucleotide"
  source: /note="DNA/RNA"
  modified_base (1)..(1): 5-methyl bicyclic nucleic acid
  modified_base (4)..(4): 5-methyl modified nucleotide
  modified_base (16)..(16): 5-methyl modified nucleotide
  modified_base (21)..(21): 5-methyl modified nucleotide
  modified_base (22)..(22): bicyclic nucleic acid (BNA)
caucaaggaagauggcauuuct

SEQ ID NO: 16211 - RNA, 21 nt, Artificial Sequence
  source: /note="Description of Artificial Sequence: Synthetic oligonucleotide"
  source: /note="RNA"
  modified_base (1)..(1): 5-methyl bicyclic nucleic acid
  modified_base (4)..(4): 5-methyl modified nucleotide
  modified_base (16)..(16): 5-methyl modified nucleotide
  modified_base (21)..(21): 5-methyl bicyclic nucleic acid
caucaaggaagauggcauuuc

SEQ ID NO: 16212 - DNA, 20 bp, Artificial Sequence
  source: /note="Description of Artificial Sequence: Synthetic oligonucleotide"
  source: /note="Description of Combined DNA/RNA Molecule: Synthetic oligonucleotide"
  source: /note="DNA/RNA"
  modified_base (1)..(1): 5-methyl bicyclic nucleic acid
  modified_base (4)..(4): 5-methyl modified nucleotide
  modified_base (16)..(16): 5-methyl modified nucleotide
  modified_base (20)..(20): bicyclic nucleic acid (BNA)
caucaaggaagauggcauut

SEQ ID NO: 16213 - DNA, 19 bp, Artificial Sequence
  source: /note="Description of Artificial Sequence: Synthetic oligonucleotide"
  source: /note="Description of Combined DNA/RNA Molecule: Synthetic oligonucleotide"
  source: /note="DNA/RNA"
  modified_base (1)..(1): 5-methyl bicyclic nucleic acid
  modified_base (4)..(4): 5-methyl modified nucleotide
  modified_base (16)..(16): 5-methyl modified nucleotide
  modified_base (19)..(19): bicyclic nucleic acid (BNA)
caucaaggaagauggcaut

SEQ ID NO: 16214 - DNA, 18 bp, Artificial Sequence
  source: /note="Description of Artificial Sequence: Synthetic oligonucleotide"
  source: /note="Description of Combined DNA/RNA Molecule: Synthetic oligonucleotide"
  source: /note="DNA/RNA"
  modified_base (1)..(1): 5-methyl bicyclic nucleic acid
  modified_base (4)..(4): 5-methyl modified nucleotide
  modified_base (16)..(16): 5-methyl modified nucleotide
  modified_base (18)..(18): bicyclic nucleic acid (BNA)
caucaaggaagauggcat

SEQ ID NO: 16215 - RNA, 17 nt, Artificial Sequence
  source: /note="Description of Artificial Sequence: Synthetic oligonucleotide"
  source: /note="RNA"
  modified_base (1)..(1): 5-methyl bicyclic nucleic acid
  modified_base (4)..(4): 5-methyl modified nucleotide
  modified_base (16)..(16): 5-methyl modified nucleotide
  modified_base (17)..(17): bicyclic nucleic acid (BNA)
caucaaggaagauggca

SEQ ID NO: 16216 - RNA, 16 nt, Artificial Sequence
  source: /note="Description of Artificial Sequence: Synthetic oligonucleotide"
  source: /note="RNA"
  modified_base (1)..(1): 5-methyl bicyclic nucleic acid
  modified_base (4)..(4): 5-methyl modified nucleotide
  modified_base (16)..(16): 5-methyl bicyclic nucleic acid
caucaaggaagauggc

SEQ ID NO: 16217 - RNA, 15 nt, Artificial Sequence
  source: /note="Description of Artificial Sequence: Synthetic oligonucleotide"
  source: /note="RNA"
  modified_base (1)..(1): 5-methyl bicyclic nucleic acid
  modified_base (4)..(4): 5-methyl modified nucleotide
  modified_base (15)..(15): bicyclic nucleic acid (BNA)
caucaaggaagaugg

SEQ ID NO: 16218 - RNA, 14 nt, Artificial Sequence
  source: /note="Description of Artificial Sequence: Synthetic oligonucleotide"
  source: /note="RNA"
  modified_base (1)..(1): 5-methyl bicyclic nucleic acid
  modified_base (4)..(4): 5-methyl modified nucleotide
  modified_base (14)..(14): bicyclic nucleic acid (BNA)
caucaaggaagaug

SEQ ID NO: 16219 - DNA, 13 bp, Artificial Sequence
  source: /note="Description of Artificial Sequence: Synthetic oligonucleotide"
  source: /note="Description of Combined DNA/RNA Molecule: Synthetic oligonucleotide"
  source: /note="DNA/RNA"
  modified_base (1)..(1): 5-methyl bicyclic nucleic acid
  modified_base (4)..(4): 5-methyl modified nucleotide
  modified_base (13)..(13): bicyclic nucleic acid (BNA)
caucaaggaagat

SEQ ID NO: 16220 - RNA, 12 nt, Artificial Sequence
  source: /note="Description of Artificial Sequence: Synthetic oligonucleotide"
  source: /note="RNA"
  modified_base (1)..(1): 5-methyl bicyclic nucleic acid
  modified_base (4)..(4): 5-methyl modified nucleotide
  modified_base (12)..(12): bicyclic nucleic acid (BNA)
caucaaggaaga

SEQ ID NO: 16221 - RNA, 11 nt, Artificial Sequence
  source: /note="Description of Artificial Sequence: Synthetic oligonucleotide"
  source: /note="RNA"
  modified_base (1)..(1): 5-methyl bicyclic nucleic acid
  modified_base (4)..(4): 5-methyl modified nucleotide
  modified_base (11)..(11): bicyclic nucleic acid (BNA)
caucaaggaag

SEQ ID NO: 16222 - RNA, 23 nt, Artificial Sequence
  source: /note="Description of Artificial Sequence: Synthetic oligonucleotide"
  source: /note="RNA"
  modified_base (1)..(1): bicyclic nucleic acid (BNA)
  modified_base (3)..(3): 5-methyl modified nucleotide
  modified_base (15)..(15): 5-methyl modified nucleotide
  modified_base (20)..(20): 5-methyl modified nucleotide
  modified_base (23)..(23): bicyclic nucleic acid (BNA)
aucaaggaagauggcauuucuag

SEQ ID NO: 16223 - RNA, 22 nt, Artificial Sequence
  source: /note="Description of Artificial Sequence: Synthetic oligonucleotide"
  source: /note="RNA"
  modified_base (1)..(1): bicyclic nucleic acid (BNA)
  modified_base (3)..(3): 5-methyl modified nucleotide
  modified_base (15)..(15): 5-methyl modified nucleotide
  modified_base (20)..(20): 5-methyl modified nucleotide
  modified_base (22)..(22): bicyclic nucleic acid (BNA)
aucaaggaagauggcauuucua

SEQ ID NO: 16224 - DNA, 21 bp, Artificial Sequence
  source: /note="Description of Artificial Sequence: Synthetic oligonucleotide"
  source: /note="Description of Combined DNA/RNA Molecule: Synthetic oligonucleotide"
  source: /note="DNA/RNA"
  modified_base (1)..(1): bicyclic nucleic acid (BNA)
  modified_base (3)..(3): 5-methyl modified nucleotide
  modified_base (15)..(15): 5-methyl modified nucleotide
  modified_base (20)..(20): 5-methyl modified nucleotide
  modified_base (21)..(21): bicyclic nucleic acid (BNA)
aucaaggaagauggcauuuct

SEQ ID NO: 16225 - RNA, 20 nt, Artificial Sequence
  source: /note="Description of Artificial Sequence: Synthetic oligonucleotide"
  source: /note="RNA"
  modified_base (1)..(1): bicyclic nucleic acid (BNA)
  modified_base (3)..(3): 5-methyl modified nucleotide
  modified_base (15)..(15): 5-methyl modified nucleotide
  modified_base (20)..(20): 5-methyl bicyclic nucleic acid
aucaaggaagauggcauuuc

SEQ ID NO: 16226 - DNA, 19 bp, Artificial Sequence
  source: /note="Description of Artificial Sequence: Synthetic oligonucleotide"
  source: /note="Description of Combined DNA/RNA Molecule: Synthetic oligonucleotide"
  source: /note="DNA/RNA"
  modified_base (1)..(1): bicyclic nucleic acid (BNA)
  modified_base (3)..(3): 5-methyl modified nucleotide
  modified_base (15)..(15): 5-methyl modified nucleotide
  modified_base (19)..(19): bicyclic nucleic acid (BNA)
aucaaggaagauggcauut

SEQ ID NO: 16227 - DNA, 18 bp, Artificial Sequence
  source: /note="Description of Artificial Sequence: Synthetic oligonucleotide"
  source: /note="Description of Combined DNA/RNA Molecule: Synthetic oligonucleotide"
  source: /note="DNA/RNA"
  modified_base (1)..(1): bicyclic nucleic acid (BNA)
  modified_base (3)..(3): 5-methyl modified nucleotide
  modified_base (15)..(15): 5-methyl modified nucleotide
  modified_base (18)..(18): bicyclic nucleic acid (BNA)
aucaaggaagauggcaut

SEQ ID NO: 16228 - DNA, 17 bp, Artificial Sequence
  source: /note="Description of Artificial Sequence: Synthetic oligonucleotide"
  source: /note="Description of Combined DNA/RNA Molecule: Synthetic oligonucleotide"
  source: /note="DNA/RNA"
  modified_base (1)..(1): bicyclic nucleic acid (BNA)
  modified_base (3)..(3): 5-methyl modified nucleotide
  modified_base (15)..(15): 5-methyl modified nucleotide
  modified_base (17)..(17): bicyclic nucleic acid (BNA)
aucaaggaagauggcat

SEQ ID NO: 16229 - RNA, 16 nt, Artificial Sequence
  source: /note="Description of Artificial Sequence: Synthetic oligonucleotide"
  source: /note="RNA"
  modified_base (1)..(1): bicyclic nucleic acid (BNA)
  modified_base (3)..(3): 5-methyl modified nucleotide
  modified_base (15)..(15): 5-methyl modified nucleotide
  modified_base (16)..(16): bicyclic nucleic acid (BNA)
aucaaggaagauggca

SEQ ID NO: 16230 - RNA, 15 nt, Artificial Sequence
  source: /note="Description of Artificial Sequence: Synthetic oligonucleotide"
  source: /note="RNA"
  modified_base (1)..(1): bicyclic nucleic acid (BNA)
  modified_base (3)..(3): 5-methyl modified nucleotide
  modified_base (15)..(15): 5-methyl bicyclic nucleic acid
aucaaggaagauggc

SEQ ID NO: 16231 - RNA, 14 nt, Artificial Sequence
  source: /note="Description of Artificial Sequence: Synthetic oligonucleotide"
  source: /note="RNA"
  modified_base (1)..(1): bicyclic nucleic acid (BNA)
  modified_base (3)..(3): 5-methyl modified nucleotide
  modified_base (14)..(14): bicyclic nucleic acid (BNA)
aucaaggaagaugg

SEQ ID NO: 16232 - RNA, 13 nt, Artificial Sequence
  source: /note="Description of Artificial Sequence: Synthetic oligonucleotide"
  source: /note="RNA"
  modified_base (1)..(1): bicyclic nucleic acid (BNA)
  modified_base (3)..(3): 5-methyl modified nucleotide
  modified_base (13)..(13): bicyclic nucleic acid (BNA)
aucaaggaagaug

SEQ ID NO: 16233 - DNA, 12 bp, Artificial Sequence
  source: /note="Description of Artificial Sequence: Synthetic oligonucleotide"
  source: /note="Description of Combined DNA/RNA Molecule: Synthetic oligonucleotide"
  source: /note="DNA/RNA"
  modified_base (1)..(1): bicyclic nucleic acid (BNA)
  modified_base (3)..(3): 5-methyl modified nucleotide
  modified_base (12)..(12): bicyclic nucleic acid (BNA)
aucaaggaagat

SEQ ID NO: 16234 - RNA, 11 nt, Artificial Sequence
  source: /note="Description of Artificial Sequence: Synthetic oligonucleotide"
  source: /note="RNA"
  modified_base (1)..(1): bicyclic nucleic acid (BNA)
  modified_base (3)..(3): 5-methyl modified nucleotide
  modified_base (11)..(11): bicyclic nucleic acid (BNA)
aucaaggaaga

SEQ ID NO: 16235 - RNA, 10 nt, Artificial Sequence
  source: /note="Description of Artificial Sequence: Synthetic oligonucleotide"
  source: /note="RNA"
  modified_base (1)..(1): bicyclic nucleic acid (BNA)
  modified_base (3)..(3): 5-methyl modified nucleotide
  modified_base (10)..(10): bicyclic nucleic acid (BNA)
aucaaggaag

SEQ ID NO: 16236 - RNA, 23 nt, Artificial Sequence
  source: /note="Description of Artificial Sequence: Synthetic oligonucleotide"
  source: /note="RNA"
  modified_base (1)..(1): 5-methyl bicyclic nucleic acid
  modified_base (2)..(2): 5-methyl modified nucleotide
  modified_base (7)..(7): 5-methyl modified nucleotide
  modified_base (13)..(13): 5-methyl modified nucleotide
  modified_base (14)..(14): 5-methyl modified nucleotide
  modified_base (16)..(16): 5-methyl modified nucleotide
  modified_base (17)..(17): 5-methyl modified nucleotide
  modified_base (20)..(20): 5-methyl modified nucleotide
  modified_base (23)..(23): 5-methyl bicyclic nucleic acid
ccagagcagguaccuccaacauc

SEQ ID NO: 16237 - RNA, 18 nt, Artificial Sequence
  source: /note="Description of Artificial Sequence: Synthetic oligonucleotide"
  source: /note="RNA"
  modified_base (1)..(1): 5-methyl bicyclic nucleic acid
  modified_base (2)..(2): 5-methyl modified nucleotide
  modified_base (7)..(7): 5-methyl modified nucleotide
  modified_base (13)..(13): 5-methyl modified nucleotide
  modified_base (14)..(14): 5-methyl modified nucleotide
  modified_base (16)..(16): 5-methyl modified nucleotide
  modified_base (17)..(17): 5-methyl modified nucleotide
  modified_base (18)..(18): bicyclic nucleic acid (BNA)
ccagagcagguaccucca

SEQ ID NO: 16238 - DNA, 23 bp, Artificial Sequence
  source: /note="Description of Artificial Sequence: Synthetic oligonucleotide"
  source: /note="Description of Combined DNA/RNA Molecule: Synthetic oligonucleotide"
  source: /note="DNA/RNA"
  modified_base (1)..(1): 5-methyl bicyclic nucleic acid
  modified_base (2)..(2): 5-methyl modified nucleotide
  modified_base (4)..(4): 5-methyl modified nucleotide
  modified_base (18)..(18): 5-methyl modified nucleotide
  modified_base (23)..(23): bicyclic nucleic acid (BNA)
ccucugugauuuuauaacuugat

SEQ ID NO: 16239 - DNA, 17 bp, Artificial Sequence
  source: /note="Description of Artificial Sequence: Synthetic oligonucleotide"
  source: /note="Description of Combined DNA/RNA Molecule: Synthetic oligonucleotide"
  source: /note="DNA/RNA"
  modified_base (1)..(1): bicyclic nucleic acid (BNA)
  modified_base (2)..(2): 5-methyl modified nucleotide
  modified_base (4)..(4): 5-methyl modified nucleotide
  modified_base (5)..(5): 5-methyl modified nucleotide
  modified_base (6)..(6): 5-methyl modified nucleotide
  modified_base (8)..(8): 5-methyl modified nucleotide
  modified_base (9)..(9): 5-methyl modified nucleotide
  modified_base (12)..(12): 5-methyl modified nucleotide
  modified_base (14)..(14): 5-methyl modified nucleotide
  modified_base (15)..(15): 5-methyl modified nucleotide
  modified_base (16)..(16): 5-methyl modified nucleotide
  modified_base (17)..(17): bicyclic nucleic acid (BNA)
tcacccaccaucaccct

SEQ ID NO: 16240 - DNA, 20 bp, Artificial Sequence
  source: /note="Description of Artificial Sequence: Synthetic oligonucleotide"
  source: /note="Description of Combined DNA/RNA Molecule: Synthetic oligonucleotide"
  source: /note="DNA/RNA"
  modified_base (1)..(1): bicyclic nucleic acid (BNA)
  modified_base (7)..(7): 5-methyl modified nucleotide
  modified_base (8)..(8): 5-methyl modified nucleotide
  modified_base (10)..(10): 5-methyl modified nucleotide
  modified_base (16)..(16): 5-methyl modified nucleotide
  modified_base (18)..(18): 5-methyl modified nucleotide
  modified_base (19)..(19): 5-methyl modified nucleotide
  modified_base (20)..(20): 5-methyl bicyclic nucleic acid
tgauauccucaaggucaccc

SEQ ID NO: 16241 - RNA, 22 nt, Artificial Sequence
  source: /note="Description of Artificial Sequence: Synthetic oligonucleotide"
  source: /note="RNA"
  modified_base (1)..(1): 5-methyl bicyclic nucleic acid
  modified_base (4)..(4): 5-methyl modified nucleotide
  modified_base (13)..(13): 5-methyl modified nucleotide
  modified_base (16)..(16): 5-methyl modified nucleotide
  modified_base (18)..(18): 5-methyl modified nucleotide
  modified_base (22)..(22): bicyclic nucleic acid (BNA)
cugcuugaugaucaucucguug

SEQ ID NO: 16242 - RNA, 18 nt, Artificial Sequence
  source: /note="Description of Artificial Sequence: Synthetic oligonucleotide"
  source: /note="RNA"
  modified_base (1)..(1): 5-methyl bicyclic nucleic acid
  modified_base (4)..(4): 5-methyl modified nucleotide
  modified_base (13)..(13): 5-methyl modified nucleotide
  modified_base (16)..(16): 5-methyl modified nucleotide
  modified_base (18)..(18): 5-methyl bicyclic nucleic acid
cugcuugaugaucaucuc

SEQ ID NO: 16243 - RNA, 19 nt, Artificial Sequence
  source: /note="Description of Artificial Sequence: Synthetic oligonucleotide"
  source: /note="RNA"
  modified_base (1)..(1): bicyclic nucleic acid (BNA)
  modified_base (5)..(5): 5-methyl modified nucleotide
  modified_base (6)..(6): 5-methyl modified nucleotide
  modified_base (14)..(14): 5-methyl modified nucleotide
  modified_base (15)..(15): 5-methyl modified nucleotide
  modified_base (17)..(17): 5-methyl modified nucleotide
  modified_base (19)..(19): bicyclic nucleic acid (BNA)
guuuccuuaguaaccacag

SEQ ID NO: 16244 - RNA, 17 nt, Artificial Sequence
  source: /note="Description of Artificial Sequence: Synthetic oligonucleotide"
  source: /note="RNA"
  modified_base (1)..(1): bicyclic nucleic acid (BNA)
  modified_base (5)..(5): 5-methyl modified nucleotide
  modified_base (6)..(6): 5-methyl modified nucleotide
  modified_base (14)..(14): 5-methyl modified nucleotide
  modified_base (15)..(15): 5-methyl modified nucleotide
  modified_base (17)..(17): 5-methyl bicyclic nucleic acid
guuuccuuaguaaccac

SEQ ID NO: 16245 - DNA, 20 bp, Artificial Sequence
  source: /note="Description of Artificial Sequence: Synthetic oligonucleotide"
  source: /note="Description of Combined DNA/RNA Molecule: Synthetic oligonucleotide"
  source: /note="DNA/RNA"
  source: /note="5' tri-ethylene glycol (TEG)"
  modified_base (1)..(1): bicyclic nucleic acid (BNA)
  modified_base (2)..(2): 5-methyl modified nucleotide
  modified_base (14)..(14): 5-methyl modified nucleotide
  modified_base (19)..(19): 5-methyl modified nucleotide
  modified_base (20)..(20): bicyclic nucleic acid (BNA)
tcaaggaagauggcauuuct

SEQ ID NO: 16246 - DNA, 22 bp, Artificial Sequence
  source: /note="Description of Artificial Sequence: Synthetic oligonucleotide"
  source: /note="Description of Combined DNA/RNA Molecule: Synthetic oligonucleotide"
  source: /note="DNA/RNA"
  source: /note="5' tri-ethylene glycol (TEG)"
  modified_base (1)..(1): bicyclic nucleic acid (BNA)
  modified_base (2)..(2): 5-methyl modified nucleotide
  modified_base (14)..(14): 5-methyl modified nucleotide
  modified_base (19)..(19): 5-methyl modified nucleotide
  modified_base (22)..(22): bicyclic nucleic acid (BNA)
tcaaggaagauggcauuucuag

SEQ ID NO: 16247 - RNA, 18 nt, Artificial Sequence
  source: /note="Description of Artificial Sequence: Synthetic oligonucleotide"
  source: /note="RNA"
  source: /note="5' tri-ethylene glycol (TEG)"
  modified_base (1)..(1): bicyclic nucleic acid (BNA)
  modified_base (9)..(9): 5-methyl modified nucleotide
  modified_base (13)..(13): 5-methyl modified nucleotide
  modified_base (14)..(14): 5-methyl modified nucleotide
  modified_base (18)..(18): 5-methyl bicyclic nucleic acid
gguaaguucuguccaagc

SEQ ID NO: 16248 - RNA, 18 nt, Artificial Sequence
  source: /note="Description of Artificial Sequence: Synthetic oligonucleotide"
  source: /note="RNA"
  source: /note="5' tri-ethylene glycol (TEG)"
  modified_base (1)..(1): bicyclic nucleic acid (BNA)
  modified_base (8)..(8): 5-methyl modified nucleotide
  modified_base (12)..(12): 5-methyl modified nucleotide
  modified_base (13)..(13): 5-methyl modified nucleotide
  modified_base (17)..(17): 5-methyl modified nucleotide
  modified_base (18)..(18): 5-methyl bicyclic nucleic acid
guaaguucuguccaagcc

SEQ ID NO: 16249 - RNA, 18 nt, Artificial Sequence
  source: /note="Description of Artificial Sequence: Synthetic oligonucleotide"
  source: /note="RNA"
  source: /note="5' tri-ethylene glycol (TEG)"
  modified_base (1)..(1): bicyclic nucleic acid (BNA)
  modified_base (4)..(4): 5-methyl modified nucleotide
  modified_base (13)..(13): 5-methyl modified nucleotide
  modified_base (17)..(17): 5-methyl modified nucleotide
  modified_base (18)..(18): 5-methyl bicyclic nucleic acid
agucgguaaguucugucc

SEQ ID NO: 16250 - RNA, 18 nt, Artificial Sequence
  source: /note="Description of Artificial Sequence: Synthetic oligonucleotide"
  source: /note="RNA"
  source: /note="5' tri-ethylene glycol (TEG)"
  modified_base (1)..(1): 5-methyl bicyclic nucleic acid
  modified_base (5)..(5): 5-methyl modified nucleotide
  modified_base (6)..(6): 5-methyl modified nucleotide
  modified_base (10)..(10): 5-methyl modified nucleotide
  modified_base (11)..(11): 5-methyl modified nucleotide
  modified_base (12)..(12): 5-methyl modified nucleotide
  modified_base (18)..(18): bicyclic nucleic acid (BNA)
cuguccaagcccgguuga

SEQ ID NO: 16251 - DNA, 15 bp, Artificial Sequence
  source: /note="Description of Artificial Sequence: Synthetic oligonucleotide"
  source: /note="Description of Combined DNA/RNA Molecule: Synthetic oligonucleotide"
  source: /note="DNA/RNA"
  source: /note="5' tri-ethylene glycol (TEG)"
  modified_base (1)..(1): bicyclic nucleic acid (BNA)
  modified_base (7)..(7): 5-methyl modified nucleotide
  modified_base (11)..(11): 5-methyl modified nucleotide
  modified_base (12)..(12): 5-methyl modified nucleotide
  modified_base (15)..(15): bicyclic nucleic acid (BNA)
taaguucuguccaag

SEQ ID NO: 16252 - DNA, 20 bp, Artificial Sequence
  source: /note="Description of Artificial Sequence: Synthetic oligonucleotide"
  source: /note="Description of Combined DNA/RNA Molecule: Synthetic oligonucleotide"
  source: /note="DNA/RNA"
  source: /note="5' tri-ethylene glycol (TEG)"
  modified_base (1)..(1): bicyclic nucleic acid (BNA)
  modified_base (3)..(3): 5-methyl modified nucleotide
  modified_base (7)..(7): 5-methyl modified nucleotide
  modified_base (8)..(8): 5-methyl modified nucleotide
  modified_base (12)..(12): 5-methyl modified nucleotide
  modified_base (13)..(13): 5-methyl modified nucleotide
  modified_base (14)..(14): 5-methyl modified nucleotide
  modified_base (20)..(20): bicyclic nucleic acid (BNA)
tucuguccaagcccgguuga

SEQ ID NO: 16253 - DNA, 19 bp, Artificial Sequence
  source: /note="Description of Artificial Sequence: Synthetic oligonucleotide"
  source: /note="Description of Combined DNA/RNA Molecule: Synthetic oligonucleotide"
  source: /note="DNA/RNA"
  source: /note="5' tri-ethylene glycol (TEG)"
  modified_base (1)..(1): bicyclic nucleic acid (BNA)
  modified_base (3)..(3): 5-methyl modified nucleotide
  modified_base (7)..(7): 5-methyl modified nucleotide
  modified_base (8)..(8): 5-methyl modified nucleotide
  modified_base (12)..(12): 5-methyl modified nucleotide
  modified_base (13)..(13): 5-methyl modified nucleotide
  modified_base (14)..(14): 5-methyl modified nucleotide
  modified_base (19)..(19): bicyclic nucleic acid (BNA)
tucuguccaagcccgguug

SEQ ID NO: 16254 - DNA, 18 bp, Artificial Sequence
  source: /note="Description of Artificial Sequence: Synthetic oligonucleotide"
  source: /note="Description of Combined DNA/RNA Molecule: Synthetic oligonucleotide"
  source: /note="DNA/RNA"
  source: /note="5' tri-ethylene glycol (TEG)"
  modified_base (1)..(1): bicyclic nucleic acid (BNA)
  modified_base (3)..(3): 5-methyl modified nucleotide
  modified_base (7)..(7): 5-methyl modified nucleotide
  modified_base (8)..(8): 5-methyl modified nucleotide
  modified_base (12)..(12): 5-methyl modified nucleotide
  modified_base (13)..(13): 5-methyl modified nucleotide
  modified_base (14)..(14): 5-methyl modified nucleotide
  modified_base (18)..(18): bicyclic nucleic acid (BNA)
tucuguccaagcccggut

SEQ ID NO: 16255 - DNA, 17 bp, Artificial Sequence
  source: /note="Description of Artificial Sequence: Synthetic oligonucleotide"
  source: /note="Description of Combined DNA/RNA Molecule: Synthetic oligonucleotide"
  source: /note="DNA/RNA"
  source: /note="5' tri-ethylene glycol (TEG)"
  modified_base (1)..(1): bicyclic nucleic acid (BNA)
  modified_base (3)..(3): 5-methyl modified nucleotide
  modified_base (7)..(7): 5-methyl modified nucleotide
  modified_base (8)..(8): 5-methyl modified nucleotide
  modified_base (12)..(12): 5-methyl modified nucleotide
  modified_base (13)..(13): 5-methyl modified nucleotide
  modified_base (14)..(14): 5-methyl modified nucleotide
  modified_base (17)..(17): bicyclic nucleic acid (BNA)
tucuguccaagcccggt

SEQ ID NO: 16256 - DNA, 16 bp, Artificial Sequence
  source: /note="Description of Artificial Sequence: Synthetic oligonucleotide"
  source: /note="Description of Combined DNA/RNA Molecule: Synthetic oligonucleotide"
  source: /note="DNA/RNA"
  source: /note="5' tri-ethylene glycol (TEG)"
  modified_base (1)..(1): bicyclic nucleic acid (BNA)
  modified_base (3)..(3): 5-methyl modified nucleotide
  modified_base (7)..(7): 5-methyl modified nucleotide
  modified_base (8)..(8): 5-methyl modified nucleotide
  modified_base (12)..(12): 5-methyl modified nucleotide
  modified_base (13)..(13): 5-methyl modified nucleotide
  modified_base (14)..(14): 5-methyl modified nucleotide
  modified_base (16)..(16): bicyclic nucleic acid (BNA)
tucuguccaagcccgg

SEQ ID NO: 16257 - DNA, 15 bp, Artificial Sequence
  source: /note="Description of Artificial Sequence: Synthetic oligonucleotide"
  source: /note="Description of Combined DNA/RNA Molecule: Synthetic oligonucleotide"
  source: /note="DNA/RNA"
  source: /note="5' tri-ethylene glycol (TEG)"
  modified_base (1)..(1): bicyclic nucleic acid (BNA)
  modified_base (3)..(3): 5-methyl modified nucleotide
  modified_base (7)..(7): 5-methyl modified nucleotide
  modified_base (8)..(8): 5-methyl modified nucleotide
  modified_base (12)..(12): 5-methyl modified nucleotide
  modified_base (13)..(13): 5-methyl modified nucleotide
  modified_base (14)..(14): 5-methyl modified nucleotide
  modified_base (15)..(15): bicyclic nucleic acid (BNA)
tucuguccaagcccg

SEQ ID NO: 16258 - DNA, 14 bp, Artificial Sequence
  source: /note="Description of Artificial Sequence: Synthetic oligonucleotide"
  source: /note="Description of Combined DNA/RNA Molecule: Synthetic oligonucleotide"
  source: /note="DNA/RNA"
  source: /note="5' tri-ethylene glycol (TEG)"
  modified_base (1)..(1): bicyclic nucleic acid (BNA)
  modified_base (3)..(3): 5-methyl modified nucleotide
  modified_base (7)..(7): 5-methyl modified nucleotide
  modified_base (8)..(8): 5-methyl modified nucleotide
  modified_base (12)..(12): 5-methyl modified nucleotide
  modified_base (13)..(13): 5-methyl modified nucleotide
  modified_base (14)..(14): 5-methyl bicyclic nucleic acid
tucuguccaagccc

SEQ ID NO: 16259 - DNA, 13 bp, Artificial Sequence
  source: /note="Description of Artificial Sequence: Synthetic oligonucleotide"
  source: /note="Description of Combined DNA/RNA Molecule: Synthetic oligonucleotide"
  source: /note="DNA/RNA"
  source: /note="5' tri-ethylene glycol (TEG)"
  modified_base (1)..(1): bicyclic nucleic acid (BNA)
  modified_base (3)..(3): 5-methyl modified nucleotide
  modified_base (7)..(7): 5-methyl modified nucleotide
  modified_base (8)..(8): 5-methyl modified nucleotide
  modified_base (12)..(12): 5-methyl modified nucleotide
  modified_base (13)..(13): 5-methyl bicyclic nucleic acid
tucuguccaagcc

SEQ ID NO: 16260 - DNA, 12 bp, Artificial Sequence
  source: /note="Description of Artificial Sequence: Synthetic oligonucleotide"
  source: /note="Description of Combined DNA/RNA Molecule: Synthetic oligonucleotide"
  source: /note="DNA/RNA"
  source: /note="5' tri-ethylene glycol (TEG)"
  modified_base (1)..(1): bicyclic nucleic acid (BNA)
  modified_base (3)..(3): 5-methyl modified nucleotide
  modified_base (7)..(7): 5-methyl modified nucleotide
  modified_base (8)..(8): 5-methyl modified nucleotide
  modified_base (12)..(12): 5-methyl bicyclic nucleic acid
tucuguccaagc

SEQ ID NO: 16261 - DNA, 11 bp, Artificial Sequence
  source: /note="Description of Artificial Sequence: Synthetic oligonucleotide"
  source: /note="Description of Combined DNA/RNA Molecule: Synthetic oligonucleotide"
  source: /note="DNA/RNA"
  source: /note="5' tri-ethylene glycol (TEG)"
  modified_base (1)..(1): bicyclic nucleic acid (BNA)
  modified_base (3)..(3): 5-methyl modified nucleotide
  modified_base (7)..(7): 5-methyl modified nucleotide
  modified_base (8)..(8): 5-methyl modified nucleotide
  modified_base (11)..(11): bicyclic nucleic acid (BNA)
tucuguccaag

SEQ ID NO: 16262 - DNA, 10 bp, Artificial Sequence
  source: /note="Description of Artificial Sequence: Synthetic oligonucleotide"
  source: /note="Description of Combined DNA/RNA Molecule: Synthetic oligonucleotide"
  source: /note="DNA/RNA"
  source: /note="5' tri-ethylene glycol (TEG)"
  modified_base (1)..(1): bicyclic nucleic acid (BNA)
  modified_base (3)..(3): 5-methyl modified nucleotide
  modified_base (7)..(7): 5-methyl modified nucleotide
  modified_base (8)..(8): 5-methyl modified nucleotide
  modified_base (10)..(10): bicyclic nucleic acid (BNA)
tucuguccaa

SEQ ID NO: 16263 - DNA, 9 bp, Artificial Sequence
  source: /note="Description of Artificial Sequence: Synthetic oligonucleotide"
  source: /note="Description of Combined DNA/RNA Molecule: Synthetic oligonucleotide"
  source: /note="DNA/RNA"
  source: /note="5' tri-ethylene glycol (TEG)"
  modified_base (1)..(1): bicyclic nucleic acid (BNA)
  modified_base (3)..(3): 5-methyl modified nucleotide
  modified_base (7)..(7): 5-methyl modified nucleotide
  modified_base (8)..(8): 5-methyl modified nucleotide
  modified_base (9)..(9): bicyclic nucleic acid (BNA)
tucugucca

SEQ ID NO: 16264 - DNA, 8 bp, Artificial Sequence
  source: /note="Description of Artificial Sequence: Synthetic oligonucleotide"
  source: /note="Description of Combined DNA/RNA Molecule: Synthetic oligonucleotide"
  source: /note="DNA/RNA"
  source: /note="5' tri-ethylene glycol (TEG)"
  modified_base (1)..(1): bicyclic nucleic acid (BNA)
  modified_base (3)..(3): 5-methyl modified nucleotide
  modified_base (7)..(7): 5-methyl modified nucleotide
  modified_base (8)..(8): 5-methyl bicyclic nucleic acid
tucugucc

SEQ ID NO: 16265 - DNA, 19 bp, Artificial Sequence
  source: /note="Description of Artificial Sequence: Synthetic oligonucleotide"
  source: /note="Description of Combined DNA/RNA Molecule: Synthetic oligonucleotide"
  source: /note="DNA/RNA"
  source: /note="5' tri-ethylene glycol (TEG)"
  modified_base (1)..(1): bicyclic nucleic acid (BNA)
  modified_base (2)..(2): 5-methyl modified nucleotide
  modified_base (6)..(6): 5-methyl modified nucleotide
  modified_base (7)..(7): 5-methyl modified nucleotide
  modified_base (11)..(11): 5-methyl modified nucleotide
  modified_base (12)..(12): 5-methyl modified nucleotide
  modified_base (13)..(13): 5-methyl modified nucleotide
  modified_base (19)..(19): bicyclic nucleic acid (BNA)
tcuguccaagcccgguuga

SEQ ID NO: 16266 - DNA, 18 bp, Artificial Sequence
  source: /note="Description of Artificial Sequence: Synthetic oligonucleotide"
  source: /note="Description of Combined DNA/RNA Molecule: Synthetic oligonucleotide"
  source: /note="DNA/RNA"
  source: /note="5' tri-ethylene glycol (TEG)"
  modified_base (1)..(1): bicyclic nucleic acid (BNA)
  modified_base (2)..(2): 5-methyl modified nucleotide
  modified_base (6)..(6): 5-methyl modified nucleotide
  modified_base (7)..(7): 5-methyl modified nucleotide
  modified_base (11)..(11): 5-methyl modified nucleotide
  modified_base (12)..(12): 5-methyl modified nucleotide
  modified_base (13)..(13): 5-methyl modified nucleotide
  modified_base (18)..(18): bicyclic nucleic acid (BNA)
tcuguccaagcccgguug

SEQ ID NO: 16267 - DNA, 17 bp, Artificial Sequence
  source: /note="Description of Artificial Sequence: Synthetic oligonucleotide"
  source: /note="Description of Combined DNA/RNA Molecule: Synthetic oligonucleotide"
  source: /note="DNA/RNA"
  source: /note="5' tri-ethylene glycol (TEG)"
  modified_base (1)..(1): bicyclic nucleic acid (BNA)
  modified_base (2)..(2): 5-methyl modified nucleotide
  modified_base (6)..(6): 5-methyl modified nucleotide
  modified_base (7)..(7): 5-methyl modified nucleotide
  modified_base (11)..(11): 5-methyl modified nucleotide
  modified_base (12)..(12): 5-methyl modified nucleotide
  modified_base (13)..(13): 5-methyl modified nucleotide
  modified_base (17)..(17): bicyclic nucleic acid (BNA)
tcuguccaagcccggut

SEQ ID NO: 16268 - DNA, 16 bp, Artificial Sequence
  source: /note="Description of Artificial Sequence: Synthetic oligonucleotide"
  source: /note="Description of Combined DNA/RNA Molecule: Synthetic oligonucleotide"
  source: /note="DNA/RNA"
  source: /note="5' tri-ethylene glycol (TEG)"
  modified_base (1)..(1): bicyclic nucleic acid (BNA)
  modified_base (2)..(2): 5-methyl modified nucleotide
  modified_base (6)..(6): 5-methyl modified nucleotide
  modified_base (7)..(7): 5-methyl modified nucleotide
  modified_base (11)..(11): 5-methyl modified nucleotide
  modified_base (12)..(12): 5-methyl modified nucleotide
  modified_base (13)..(13): 5-methyl modified nucleotide
  modified_base (16)..(16): bicyclic nucleic acid (BNA)
tcuguccaagcccggt

SEQ ID NO: 16269 - DNA, 15 bp, Artificial Sequence
  source: /note="Description of Artificial Sequence: Synthetic oligonucleotide"
  source: /note="Description of Combined DNA/RNA Molecule: Synthetic oligonucleotide"
  source: /note="DNA/RNA"
  source: /note="5' tri-ethylene glycol (TEG)"
  modified_base (1)..(1): bicyclic nucleic acid (BNA)
  modified_base (2)..(2): 5-methyl modified nucleotide
  modified_base (6)..(6): 5-methyl modified nucleotide
  modified_base (7)..(7): 5-methyl modified nucleotide
  modified_base (11)..(11): 5-methyl modified nucleotide
  modified_base (12)..(12): 5-methyl modified nucleotide
  modified_base (13)..(13): 5-methyl modified nucleotide
  modified_base (15)..(15): bicyclic nucleic acid (BNA)
tcuguccaagcccgg

SEQ ID NO: 16270 - DNA, 14 bp, Artificial Sequence
  source: /note="Description of Artificial Sequence: Synthetic oligonucleotide"
  source: /note="Description of Combined DNA/RNA Molecule: Synthetic oligonucleotide"
  source: /note="DNA/RNA"
  source: /note="5' tri-ethylene glycol (TEG)"
  modified_base (1)..(1): bicyclic nucleic acid (BNA)
  modified_base (2)..(2): 5-methyl modified nucleotide
  modified_base (6)..(6): 5-methyl modified nucleotide
  modified_base (7)..(7): 5-methyl modified nucleotide
  modified_base (11)..(11): 5-methyl modified nucleotide
  modified_base (12)..(12): 5-methyl modified nucleotide
  modified_base (13)..(13): 5-methyl modified nucleotide
  modified_base (14)..(14): bicyclic nucleic acid (BNA)
tcuguccaagcccg

SEQ ID NO: 16271 - DNA, 13 bp, Artificial Sequence
  source: /note="Description of Artificial Sequence: Synthetic oligonucleotide"
  source: /note="Description of Combined DNA/RNA Molecule: Synthetic oligonucleotide"
  source: /note="DNA/RNA"
  source: /note="5' tri-ethylene glycol (TEG)"
  modified_base (1)..(1): bicyclic nucleic acid (BNA)
  modified_base (2)..(2): 5-methyl modified nucleotide
  modified_base (6)..(6): 5-methyl modified nucleotide
  modified_base (7)..(7): 5-methyl modified nucleotide
  modified_base (11)..(11): 5-methyl modified nucleotide
  modified_base (12)..(12): 5-methyl modified nucleotide
  modified_base (13)..(13): 5-methyl bicyclic nucleic acid
tcuguccaagccc

SEQ ID NO: 16272 - DNA, 12 bp, Artificial Sequence
  source: /note="Description of Artificial Sequence: Synthetic oligonucleotide"
  source: /note="Description of Combined DNA/RNA Molecule: Synthetic oligonucleotide"
  source: /note="DNA/RNA"
  source: /note="5' tri-ethylene glycol (TEG)"
  modified_base (1)..(1): bicyclic nucleic acid (BNA)
  modified_base (2)..(2): 5-methyl modified nucleotide
  modified_base (6)..(6): 5-methyl modified nucleotide
  modified_base (7)..(7): 5-methyl modified nucleotide
  modified_base (11)..(11): 5-methyl modified nucleotide
  modified_base (12)..(12): 5-methyl bicyclic nucleic acid
tcuguccaagcc

SEQ ID NO: 16273 - DNA, 11 bp, Artificial Sequence
  source: /note="Description of Artificial Sequence: Synthetic oligonucleotide"
  source: /note="Description of Combined DNA/RNA Molecule: Synthetic oligonucleotide"
  source: /note="DNA/RNA"
  source: /note="5' tri-ethylene glycol (TEG)"
  modified_base (1)..(1): bicyclic nucleic acid (BNA)
  modified_base (2)..(2): 5-methyl modified nucleotide
  modified_base (6)..(6): 5-methyl modified nucleotide
  modified_base (7)..(7): 5-methyl modified nucleotide
  modified_base (11)..(11): 5-methyl bicyclic nucleic acid
tcuguccaagc

SEQ ID NO: 16274 - DNA, 10 bp, Artificial Sequence
  source: /note="Description of Artificial Sequence: Synthetic oligonucleotide"
  source: /note="Description of Combined DNA/RNA Molecule: Synthetic oligonucleotide"
  source: /note="DNA/RNA"
  source: /note="5' tri-ethylene glycol (TEG)"
  modified_base (1)..(1): bicyclic nucleic acid (BNA)
  modified_base (2)..(2): 5-methyl modified nucleotide
  modified_base (6)..(6): 5-methyl modified nucleotide
  modified_base (7)..(7): 5-methyl modified nucleotide
  modified_base (10)..(10): bicyclic nucleic acid (BNA)
tcuguccaag

SEQ ID NO: 16275 - DNA, 9 bp, Artificial Sequence
  source: /note="Description of Artificial Sequence: Synthetic oligonucleotide"
  source: /note="Description of Combined DNA/RNA Molecule: Synthetic oligonucleotide"
  source: /note="DNA/RNA"
  source: /note="5' tri-ethylene glycol (TEG)"
  modified_base (1)..(1): bicyclic nucleic acid (BNA)
  modified_base (2)..(2): 5-methyl modified nucleotide
  modified_base (6)..(6): 5-methyl modified nucleotide
  modified_base (7)..(7): 5-methyl modified nucleotide
  modified_base (9)..(9): bicyclic nucleic acid (BNA)
tcuguccaa

SEQ ID NO: 16276 - DNA, 8 bp, Artificial Sequence
  source: /note="Description of Artificial Sequence: Synthetic oligonucleotide"
  source: /note="Description of Combined DNA/RNA Molecule: Synthetic oligonucleotide"
  source: /note="DNA/RNA"
  source: /note="5' tri-ethylene glycol (TEG)"
  modified_base (1)..(1): bicyclic nucleic acid (BNA)
  modified_base (2)..(2): 5-methyl modified nucleotide
  modified_base (6)..(6): 5-methyl modified nucleotide
  modified_base (7)..(7): 5-methyl modified nucleotide
  modified_base (8)..(8): bicyclic nucleic acid (BNA)
tcugucca

SEQ ID NO: 16277 - RNA, 17 nt, Artificial Sequence
  source: /note="Description of Artificial Sequence: Synthetic oligonucleotide"
  source: /note="RNA"
  source: /note="5' tri-ethylene glycol (TEG)"
  modified_base (1)..(1): 5-methyl bicyclic nucleic acid
  modified_base (5)..(5): 5-methyl modified nucleotide
  modified_base (6)..(6): 5-methyl modified nucleotide
  modified_base (10)..(10): 5-methyl modified nucleotide
  modified_base (11)..(11): 5-methyl modified nucleotide
  modified_base (12)..(12): 5-methyl modified nucleotide
  modified_base (17)..(17): bicyclic nucleic acid (BNA)
cuguccaagcccgguug

SEQ ID NO: 16278 - DNA, 16 bp, Artificial Sequence
  source: /note="Description of Artificial Sequence: Synthetic oligonucleotide"
  source: /note="Description of Combined DNA/RNA Molecule: Synthetic oligonucleotide"
  source: /note="DNA/RNA"
  source: /note="5' tri-ethylene glycol (TEG)"
  modified_base (1)..(1): 5-methyl bicyclic nucleic acid
  modified_base (5)..(5): 5-methyl modified nucleotide
  modified_base (6)..(6): 5-methyl modified nucleotide
  modified_base (10)..(10): 5-methyl modified nucleotide
  modified_base (11)..(11): 5-methyl modified nucleotide
  modified_base (12)..(12): 5-methyl modified nucleotide
  modified_base (16)..(16): bicyclic nucleic acid (BNA)
cuguccaagcccggut

SEQ ID NO: 16279 - DNA, 15 bp, Artificial Sequence
  source: /note="Description of Artificial Sequence: Synthetic oligonucleotide"
  source: /note="Description of Combined DNA/RNA Molecule: Synthetic oligonucleotide"
  source: /note="DNA/RNA"
  source: /note="5' tri-ethylene glycol (TEG)"
  modified_base (1)..(1): 5-methyl bicyclic nucleic acid
  modified_base (5)..(5): 5-methyl modified nucleotide
  modified_base (6)..(6): 5-methyl modified nucleotide
  modified_base (10)..(10): 5-methyl modified nucleotide
  modified_base (11)..(11): 5-methyl modified nucleotide
  modified_base (12)..(12): 5-methyl modified nucleotide
  modified_base (15)..(15): bicyclic nucleic acid (BNA)
cuguccaagcccggt

SEQ ID NO: 16280 - RNA, 14 nt, Artificial Sequence
  source: /note="Description of Artificial Sequence: Synthetic oligonucleotide"
  source: /note="RNA"
  source: /note="5' tri-ethylene glycol (TEG)"
  modified_base (1)..(1): 5-methyl bicyclic nucleic acid
  modified_base (5)..(5): 5-methyl modified nucleotide
  modified_base (6)..(6): 5-methyl modified nucleotide
  modified_base (10)..(10): 5-methyl modified nucleotide
  modified_base (11)..(11): 5-methyl modified nucleotide
  modified_base (12)..(12): 5-methyl modified nucleotide
  modified_base (14)..(14): bicyclic nucleic acid (BNA)
cuguccaagcccgg

SEQ ID NO: 16281 - RNA, 13 nt, Artificial Sequence
  source: /note="Description of Artificial Sequence: Synthetic oligonucleotide"
  source: /note="RNA"
  source: /note="5' tri-ethylene glycol (TEG)"
  modified_base (1)..(1): 5-methyl bicyclic nucleic acid
  modified_base (5)..(5): 5-methyl modified nucleotide
  modified_base (6)..(6): 5-methyl modified nucleotide
  modified_base (10)..(10): 5-methyl modified nucleotide
  modified_base (11)..(11): 5-methyl modified nucleotide
  modified_base (12)..(12): 5-methyl modified nucleotide
  modified_base (13)..(13): bicyclic nucleic acid (BNA)
cuguccaagcccg

SEQ ID NO: 16282 - RNA, 12 nt, Artificial Sequence
  source: /note="Description of Artificial Sequence: Synthetic oligonucleotide"
  source: /note="RNA"
  source: /note="5' tri-ethylene glycol (TEG)"
  modified_base (1)..(1): 5-methyl bicyclic nucleic acid
  modified_base (5)..(5): 5-methyl modified nucleotide
  modified_base (6)..(6): 5-methyl modified nucleotide
  modified_base (10)..(10): 5-methyl modified nucleotide
  modified_base (11)..(11): 5-methyl modified nucleotide
  modified_base (12)..(12): 5-methyl bicyclic nucleic acid
cuguccaagccc

SEQ ID NO: 16283 - RNA, 11 nt, Artificial Sequence
  source: /note="Description of Artificial Sequence: Synthetic oligonucleotide"
  source: /note="RNA"
  source: /note="5' tri-ethylene glycol (TEG)"
  modified_base (1)..(1): 5-methyl bicyclic nucleic acid
  modified_base (5)..(5): 5-methyl modified nucleotide
  modified_base (6)..(6): 5-methyl modified nucleotide
  modified_base (10)..(10): 5-methyl modified nucleotide
  modified_base (11)..(11): 5-methyl bicyclic nucleic acid
cuguccaagcc

SEQ ID NO: 16284 - RNA, 10 nt, Artificial Sequence
  source: /note="Description of Artificial Sequence: Synthetic oligonucleotide"
  source: /note="RNA"
  source: /note="5' tri-ethylene glycol (TEG)"
  modified_base (1)..(1): 5-methyl bicyclic nucleic acid
  modified_base (5)..(5): 5-methyl modified nucleotide
  modified_base (6)..(6): 5-methyl modified nucleotide
  modified_base (10)..(10): 5-methyl bicyclic nucleic acid
cuguccaagc

SEQ ID NO: 16285 - RNA, 9 nt, Artificial Sequence
  source: /note="Description of Artificial Sequence: Synthetic oligonucleotide"
  source: /note="RNA"
  source: /note="5' tri-ethylene glycol (TEG)"
  modified_base (1)..(1): 5-methyl bicyclic nucleic acid
  modified_base (5)..(5): 5-methyl modified nucleotide
  modified_base (6)..(6): 5-methyl modified nucleotide
  modified_base (9)..(9): bicyclic nucleic acid (BNA)
cuguccaag

SEQ ID NO: 16286 - RNA, 8 nt, Artificial Sequence
  source: /note="Description of Artificial Sequence: Synthetic oligonucleotide"
  source: /note="RNA"
  source: /note="5' tri-ethylene glycol (TEG)"
  modified_base (1)..(1): 5-methyl bicyclic nucleic acid
  modified_base (5)..(5): 5-methyl modified nucleotide
  modified_base (6)..(6): 5-methyl modified nucleotide
  modified_base (8)..(8): bicyclic nucleic acid (BNA)
cuguccaa

SEQ ID NO: 16287 - RNA, 20 nt, Artificial Sequence
  source: /note="Description of Artificial Sequence: Synthetic oligonucleotide"
  source: /note="RNA"
  source: /note="5' tri-ethylene glycol (TEG)"
  modified_base (1)..(1): bicyclic nucleic acid (BNA)
  modified_base (4)..(4): 5-methyl modified nucleotide
  modified_base (8)..(8): 5-methyl modified nucleotide
  modified_base (9)..(9): 5-methyl modified nucleotide
  modified_base (13)..(13): 5-methyl modified nucleotide
  modified_base (14)..(14): 5-methyl modified nucleotide
  modified_base (15)..(15): 5-methyl modified nucleotide
  modified_base (20)..(20): bicyclic nucleic acid (BNA)
guucuguccaagcccgguug

SEQ ID NO: 16288 - DNA, 19 bp, Artificial Sequence
  source: /note="Description of Artificial Sequence: Synthetic oligonucleotide"
  source: /note="Description of Combined DNA/RNA Molecule: Synthetic oligonucleotide"
  source: /note="DNA/RNA"
  source: /note="5' tri-ethylene glycol (TEG)"
  modified_base (1)..(1): bicyclic nucleic acid (BNA)
  modified_base (4)..(4): 5-methyl modified nucleotide
  modified_base (8)..(8): 5-methyl modified nucleotide
  modified_base (9)..(9): 5-methyl modified nucleotide
  modified_base (13)..(13): 5-methyl modified nucleotide
  modified_base (14)..(14): 5-methyl modified nucleotide
  modified_base (15)..(15): 5-methyl modified nucleotide
  modified_base (19)..(19): bicyclic nucleic acid (BNA)
guucuguccaagcccggut

SEQ ID NO: 16289 - DNA, 18 bp, Artificial Sequence
  source: /note="Description of Artificial Sequence: Synthetic oligonucleotide"
  source: /note="Description of Combined DNA/RNA Molecule: Synthetic oligonucleotide"
  source: /note="DNA/RNA"
  source: /note="5' tri-ethylene glycol (TEG)"
  modified_base (1)..(1): bicyclic nucleic acid (BNA)
  modified_base (4)..(4): 5-methyl modified nucleotide
  modified_base (8)..(8): 5-methyl modified nucleotide
  modified_base (9)..(9): 5-methyl modified nucleotide
  modified_base (13)..(13): 5-methyl modified nucleotide
  modified_base (14)..(14): 5-methyl modified nucleotide
  modified_base (15)..(15): 5-methyl modified nucleotide
  modified_base (18)..(18): bicyclic nucleic acid (BNA)
guucuguccaagcccggt

SEQ ID NO: 16290 - RNA, 17 nt, Artificial Sequence
  source: /note="Description of Artificial Sequence: Synthetic oligonucleotide"
  source: /note="RNA"
  source: /note="5' tri-ethylene glycol (TEG)"
  modified_base (1)..(1): bicyclic nucleic acid (BNA)
  modified_base (4)..(4): 5-methyl modified nucleotide
  modified_base (8)..(8): 5-methyl modified nucleotide
  modified_base (9)..(9): 5-methyl modified nucleotide
  modified_base (13)..(13): 5-methyl modified nucleotide
  modified_base (14)..(14): 5-methyl modified nucleotide
  modified_base (15)..(15): 5-methyl modified nucleotide
  modified_base (17)..(17): bicyclic nucleic acid (BNA)
guucuguccaagcccgg

SEQ ID NO: 16291 - RNA, 16 nt, Artificial Sequence
  source: /note="Description of Artificial Sequence: Synthetic oligonucleotide"
  source: /note="RNA"
  source: /note="5' tri-ethylene glycol (TEG)"
  modified_base (1)..(1): bicyclic nucleic acid (BNA)
  modified_base (4)..(4): 5-methyl modified nucleotide
  modified_base (8)..(8): 5-methyl modified nucleotide
  modified_base (9)..(9): 5-methyl modified nucleotide
  modified_base (13)..(13): 5-methyl modified nucleotide
  modified_base (14)..(14): 5-methyl modified nucleotide
  modified_base (15)..(15): 5-methyl modified nucleotide
  modified_base (16)..(16): bicyclic nucleic acid (BNA)
guucuguccaagcccg

SEQ ID NO: 16292 - RNA, 15 nt, Artificial Sequence
  source: /note="Description of Artificial Sequence: Synthetic oligonucleotide"
  source: /note="RNA"
  source: /note="5' tri-ethylene glycol (TEG)"
  modified_base (1)..(1): bicyclic nucleic acid (BNA)
  modified_base (4)..(4): 5-methyl modified nucleotide
  modified_base (8)..(8): 5-methyl modified nucleotide
  modified_base (9)..(9): 5-methyl modified nucleotide
  modified_base (13)..(13): 5-methyl modified nucleotide
  modified_base (14)..(14): 5-methyl modified nucleotide
  modified_base (15)..(15): 5-methyl bicyclic nucleic acid
guucuguccaagccc

SEQ ID NO: 16293 - RNA, 14 nt, Artificial Sequence
  source: /note="Description of Artificial Sequence: Synthetic oligonucleotide"
  source: /note="RNA"
  source: /note="5' tri-ethylene glycol (TEG)"
  modified_base (1)..(1): bicyclic nucleic acid (BNA)
  modified_base (4)..(4): 5-methyl modified nucleotide
  modified_base (8)..(8): 5-methyl modified nucleotide
  modified_base (9)..(9): 5-methyl modified nucleotide
  modified_base (13)..(13): 5-methyl modified nucleotide
  modified_base (14)..(14): 5-methyl bicyclic nucleic acid
guucuguccaagcc

SEQ ID NO: 16294 - RNA, 13 nt, Artificial Sequence
  source: /note="Description of Artificial Sequence: Synthetic oligonucleotide"
  source: /note="RNA"
  source: /note="5' tri-ethylene glycol (TEG)"
  modified_base (1)..(1): bicyclic nucleic acid (BNA)
  modified_base (4)..(4): 5-methyl modified nucleotide
  modified_base (8)..(8): 5-methyl modified nucleotide
  modified_base (9)..(9): 5-methyl modified nucleotide
  modified_base (13)..(13): 5-methyl bicyclic nucleic acid
guucuguccaagc

SEQ ID NO: 16295 - RNA, 12 nt, Artificial Sequence
  source: /note="Description of Artificial Sequence: Synthetic oligonucleotide"
  source: /note="RNA"
  source: /note="5' tri-ethylene glycol (TEG)"
  modified_base (1)..(1): bicyclic nucleic acid (BNA)
  modified_base (4)..(4): 5-methyl modified nucleotide
  modified_base (8)..(8): 5-methyl modified nucleotide
  modified_base (9)..(9): 5-methyl modified nucleotide
  modified_base (12)..(12): bicyclic nucleic acid (BNA)
guucuguccaag

SEQ ID NO: 16296 - RNA, 11 nt, Artificial Sequence
  source: /note="Description of Artificial Sequence: Synthetic oligonucleotide"
  source: /note="RNA"
  source: /note="5' tri-ethylene glycol (TEG)"
  modified_base (1)..(1): bicyclic nucleic acid (BNA)
  modified_base (4)..(4): 5-methyl modified nucleotide
  modified_base (8)..(8): 5-methyl modified nucleotide
  modified_base (9)..(9): 5-methyl modified nucleotide
  modified_base (11)..(11): bicyclic nucleic acid (BNA)
guucuguccaa

SEQ ID NO: 16297 - RNA, 10 nt, Artificial Sequence
  source: /note="Description of Artificial Sequence: Synthetic oligonucleotide"
  source: /note="RNA"
  source: /note="5' tri-ethylene glycol (TEG)"
  modified_base (1)..(1): bicyclic nucleic acid (BNA)
  modified_base (4)..(4): 5-methyl modified nucleotide
  modified_base (8)..(8): 5-methyl modified nucleotide
  modified_base (9)..(9): 5-methyl modified nucleotide
  modified_base (10)..(10): bicyclic nucleic acid (BNA)
guucugucca

SEQ ID NO: 16298 - RNA, 9 nt, Artificial Sequence
  source: /note="Description of Artificial Sequence: Synthetic oligonucleotide"
  source: /note="RNA"
  source: /note="5' tri-ethylene glycol (TEG)"
  modified_base (1)..(1): bicyclic nucleic acid (BNA)
  modified_base (4)..(4): 5-methyl modified nucleotide
  modified_base (8)..(8): 5-methyl modified nucleotide
  modified_base (9)..(9): 5-methyl bicyclic nucleic acid
guucugucc

SEQ ID NO: 16299 - RNA, 8 nt, Artificial Sequence
  source: /note="Description of Artificial Sequence: Synthetic oligonucleotide"
  source: /note="RNA"
  source: /note="5' tri-ethylene glycol (TEG)"
  modified_base (1)..(1): bicyclic nucleic acid (BNA)
  modified_base (4)..(4): 5-methyl modified nucleotide
  modified_base (8)..(8): 5-methyl bicyclic nucleic acid
guucuguc

SEQ ID NO: 16300 - DNA, 20 bp, Artificial Sequence
  source: /note="Description of Artificial Sequence: Synthetic oligonucleotide"
  source: /note="Description of Combined DNA/RNA Molecule: Synthetic oligonucleotide"
  source: /note="DNA/RNA"
  source: /note="5' tri-ethylene glycol (TEG)"
  modified_base (1)..(1): bicyclic nucleic acid (BNA)
  modified_base (5)..(5): 5-methyl modified nucleotide
  modified_base (9)..(9): 5-methyl modified nucleotide
  modified_base (10)..(10): 5-methyl modified nucleotide
  modified_base (14)..(14): 5-methyl modified nucleotide
  modified_base (15)..(15): 5-methyl modified nucleotide
  modified_base (16)..(16): 5-methyl modified nucleotide
  modified_base (20)..(20): bicyclic nucleic acid (BNA)
aguucuguccaagcccggut

SEQ ID NO: 16301 - DNA, 19 bp, Artificial Sequence
  source: /note="Description of Artificial Sequence: Synthetic oligonucleotide"
  source: /note="Description of Combined DNA/RNA Molecule: Synthetic oligonucleotide"
  source: /note="DNA/RNA"
  source: /note="5' tri-ethylene glycol (TEG)"
  modified_base (1)..(1): bicyclic nucleic acid (BNA)
  modified_base (5)..(5): 5-methyl modified nucleotide
  modified_base (9)..(9): 5-methyl modified nucleotide
  modified_base (10)..(10): 5-methyl modified nucleotide
  modified_base (14)..(14): 5-methyl modified nucleotide
  modified_base (15)..(15): 5-methyl modified nucleotide
  modified_base (16)..(16): 5-methyl modified nucleotide
  modified_base (19)..(19): bicyclic nucleic acid (BNA)
aguucuguccaagcccggt

SEQ ID NO: 16302 - RNA, 18 nt, Artificial Sequence
  source: /note="Description of Artificial Sequence: Synthetic oligonucleotide"
  source: /note="RNA"
  source: /note="5' tri-ethylene glycol (TEG)"
  modified_base (1)..(1): bicyclic nucleic acid (BNA)
  modified_base (5)..(5): 5-methyl modified nucleotide
  modified_base (9)..(9): 5-methyl modified nucleotide
  modified_base (10)..(10): 5-methyl modified nucleotide
  modified_base (14)..(14): 5-methyl modified nucleotide
  modified_base (15)..(15): 5-methyl modified nucleotide
  modified_base (16)..(16): 5-methyl modified nucleotide
  modified_base (18)..(18): bicyclic nucleic acid (BNA)
aguucuguccaagcccgg

SEQ ID NO: 16303 - RNA, 17 nt, Artificial Sequence
  source: /note="Description of Artificial Sequence: Synthetic oligonucleotide"
  source: /note="RNA"
  source: /note="5' tri-ethylene glycol (TEG)"
  modified_base (1)..(1): bicyclic nucleic acid (BNA)
  modified_base (5)..(5): 5-methyl modified nucleotide
  modified_base (9)..(9): 5-methyl modified nucleotide
  modified_base (10)..(10): 5-methyl modified nucleotide
  modified_base (14)..(14): 5-methyl modified nucleotide
  modified_base (15)..(15): 5-methyl modified nucleotide
  modified_base (16)..(16): 5-methyl modified nucleotide
  modified_base (17)..(17): bicyclic nucleic acid (BNA)
aguucuguccaagcccg

SEQ ID NO: 16304 - RNA, 16 nt, Artificial Sequence
  source: /note="Description of Artificial Sequence: Synthetic oligonucleotide"
  source: /note="RNA"
  source: /note="5' tri-ethylene glycol (TEG)"
  modified_base (1)..(1): bicyclic nucleic acid (BNA)
  modified_base (5)..(5): 5-methyl modified nucleotide
  modified_base (9)..(9): 5-methyl modified nucleotide
  modified_base (10)..(10): 5-methyl modified nucleotide
  modified_base (14)..(14): 5-methyl modified nucleotide
  modified_base (15)..(15): 5-methyl modified nucleotide
  modified_base (16)..(16): 5-methyl bicyclic nucleic acid
aguucuguccaagccc

SEQ ID NO: 16305 - RNA, 15 nt, Artificial Sequence
  source: /note="Description of Artificial Sequence: Synthetic oligonucleotide"
  source: /note="RNA"
  source: /note="5' tri-ethylene glycol (TEG)"
  modified_base (1)..(1): bicyclic nucleic acid (BNA)
  modified_base (5)..(5): 5-methyl modified nucleotide
  modified_base (9)..(9): 5-methyl modified nucleotide
  modified_base (10)..(10): 5-methyl modified nucleotide
  modified_base (14)..(14): 5-methyl modified nucleotide
  modified_base (15)..(15): 5-methyl bicyclic nucleic acid
aguucuguccaagcc

SEQ ID NO: 16306 - RNA, 14 nt, Artificial Sequence
  source: /note="Description of Artificial Sequence: Synthetic oligonucleotide"
  source: /note="RNA"
  source: /note="5' tri-ethylene glycol (TEG)"
  modified_base (1)..(1): bicyclic nucleic acid (BNA)
  modified_base (5)..(5): 5-methyl modified nucleotide
  modified_base (9)..(9): 5-methyl modified nucleotide
  modified_base (10)..(10): 5-methyl modified nucleotide
  modified_base (14)..(14): 5-methyl bicyclic nucleic acid
aguucuguccaagc

SEQ ID NO: 16307 - RNA, 13 nt, Artificial Sequence
  source: /note="Description of Artificial Sequence: Synthetic oligonucleotide"
  source: /note="RNA"
  source: /note="5' tri-ethylene glycol (TEG)"
  modified_base (1)..(1): bicyclic nucleic acid (BNA)
  modified_base (5)..(5): 5-methyl modified nucleotide
  modified_base (9)..(9): 5-methyl modified nucleotide
  modified_base (10)..(10): 5-methyl modified nucleotide
  modified_base (13)..(13): bicyclic nucleic acid (BNA)
aguucuguccaag

SEQ ID NO: 16308 - RNA, 12 nt, Artificial Sequence
  source: /note="Description of Artificial Sequence: Synthetic oligonucleotide"
  source: /note="RNA"
  source: /note="5' tri-ethylene glycol (TEG)"
  modified_base (1)..(1): bicyclic nucleic acid (BNA)
  modified_base (5)..(5): 5-methyl modified nucleotide
  modified_base (9)..(9): 5-methyl modified nucleotide
  modified_base (10)..(10): 5-methyl modified nucleotide
  modified_base (12)..(12): bicyclic nucleic acid (BNA)
aguucuguccaa

SEQ ID NO: 16309 - RNA, 11 nt, Artificial Sequence
  source: /note="Description of Artificial Sequence: Synthetic oligonucleotide"
  source: /note="RNA"
  source: /note="5' tri-ethylene glycol (TEG)"
  modified_base (1)..(1): bicyclic nucleic acid (BNA)
  modified_base (5)..(5): 5-methyl modified nucleotide
  modified_base (9)..(9): 5-methyl modified nucleotide
  modified_base (10)..(10): 5-methyl modified nucleotide
  modified_base (11)..(11): bicyclic nucleic acid (BNA)
aguucugucca

SEQ ID NO: 16310 - RNA, 10 nt, Artificial Sequence
  source: /note="Description of Artificial Sequence: Synthetic oligonucleotide"
  source: /note="RNA"
  source: /note="5' tri-ethylene glycol (TEG)"
  modified_base (1)..(1): bicyclic nucleic acid (BNA)
  modified_base (5)..(5): 5-methyl modified nucleotide
  modified_base (9)..(9): 5-methyl modified nucleotide
  modified_base (10)..(10): 5-methyl bicyclic nucleic acid
aguucugucc

SEQ ID NO: 16311 - RNA, 9 nt, Artificial Sequence
  source: /note="Description of Artificial Sequence: Synthetic oligonucleotide"
  source: /note="RNA"
  source: /note="5' tri-ethylene glycol (TEG)"
  modified_base (1)..(1): bicyclic nucleic acid (BNA)
  modified_base (5)..(5): 5-methyl modified nucleotide
  modified_base (9)..(9): 5-methyl bicyclic nucleic acid
aguucuguc

SEQ ID NO: 16312 - DNA, 8 bp, Artificial Sequence
  source: /note="Description of Artificial Sequence: Synthetic oligonucleotide"
  source: /note="Description of Combined DNA/RNA Molecule: Synthetic oligonucleotide"
  source: /note="DNA/RNA"
  source: /note="5' tri-ethylene glycol (TEG)"
  modified_base (1)..(1): bicyclic nucleic acid (BNA)
  modified_base (5)..(5): 5-methyl modified nucleotide
  modified_base (8)..(8): bicyclic nucleic acid (BNA)
aguucugt

SEQ ID NO: 16313 - DNA, 20 bp, Artificial Sequence
  source: /note="Description of Artificial Sequence: Synthetic oligonucleotide"
  source: /note="Description of Combined DNA/RNA Molecule: Synthetic oligonucleotide"
  source: /note="DNA/RNA"
  source: /note="5' tri-ethylene glycol (TEG)"
  modified_base (1)..(1): bicyclic nucleic acid (BNA)
  modified_base (6)..(6): 5-methyl modified nucleotide
  modified_base (10)..(10): 5-methyl modified nucleotide
  modified_base (11)..(11): 5-methyl modified nucleotide
  modified_base (15)..(15): 5-methyl modified nucleotide
  modified_base (16)..(16): 5-methyl modified nucleotide
  modified_base (17)..(17): 5-methyl modified nucleotide
  modified_base (20)..(20): bicyclic nucleic acid (BNA)
aaguucuguccaagcccggt

SEQ ID NO: 16314 - RNA, 19 nt, Artificial Sequence
  source: /note="Description of Artificial Sequence: Synthetic oligonucleotide"
  source: /note="RNA"
  source: /note="5' tri-ethylene glycol (TEG)"
  modified_base (1)..(1): bicyclic nucleic acid (BNA)
  modified_base (6)..(6): 5-methyl modified nucleotide
  modified_base (10)..(10): 5-methyl modified nucleotide
  modified_base (11)..(11): 5-methyl modified nucleotide
  modified_base (15)..(15): 5-methyl modified nucleotide
  modified_base (16)..(16): 5-methyl modified nucleotide
  modified_base (17)..(17): 5-methyl modified nucleotide
  modified_base (19)..(19): bicyclic nucleic acid (BNA)
aaguucuguccaagcccgg

SEQ ID NO: 16315 - RNA, 18 nt, Artificial Sequence
  source: /note="Description of Artificial Sequence: Synthetic oligonucleotide"
  source: /note="RNA"
  source: /note="5' tri-ethylene glycol (TEG)"
  modified_base (1)..(1): bicyclic nucleic acid (BNA)
  modified_base (6)..(6): 5-methyl modified nucleotide
  modified_base (10)..(10): 5-methyl modified nucleotide
  modified_base (11)..(11): 5-methyl modified nucleotide
  modified_base (15)..(15): 5-methyl modified nucleotide
  modified_base (16)..(16): 5-methyl modified nucleotide
  modified_base (17)..(17): 5-methyl modified nucleotide
  modified_base (18)..(18): bicyclic nucleic acid (BNA)
aaguucuguccaagcccg

SEQ ID NO: 16316 - RNA, 17 nt, Artificial Sequence
  source: /note="Description of Artificial Sequence: Synthetic oligonucleotide"
  source: /note="RNA"
  source: /note="5' tri-ethylene glycol (TEG)"
  modified_base (1)..(1): bicyclic nucleic acid (BNA)
  modified_base (6)..(6): 5-methyl modified nucleotide
  modified_base (10)..(10): 5-methyl modified nucleotide
  modified_base (11)..(11): 5-methyl modified nucleotide
  modified_base (15)..(15): 5-methyl modified nucleotide
  modified_base (16)..(16): 5-methyl modified nucleotide
  modified_base (17)..(17): 5-methyl bicyclic nucleic acid
aaguucuguccaagccc

SEQ ID NO: 16317 - RNA, 16 nt, Artificial Sequence
  source: /note="Description of Artificial Sequence: Synthetic oligonucleotide"
  source: /note="RNA"
  source: /note="5' tri-ethylene glycol (TEG)"
  modified_base (1)..(1): bicyclic nucleic acid (BNA)
  modified_base (6)..(6): 5-methyl modified nucleotide
  modified_base (10)..(10): 5-methyl modified nucleotide
  modified_base (11)..(11): 5-methyl modified nucleotide
  modified_base (15)..(15): 5-methyl modified nucleotide
  modified_base (16)..(16): 5-methyl bicyclic nucleic acid
aaguucuguccaagcc

SEQ ID NO: 16318 - RNA, 15 nt, Artificial Sequence
  source: /note="Description of Artificial Sequence: Synthetic oligonucleotide"
  source: /note="RNA"
  source: /note="5' tri-ethylene glycol (TEG)"
  modified_base (1)..(1): bicyclic nucleic acid (BNA)
  modified_base (6)..(6): 5-methyl modified nucleotide
  modified_base (10)..(10): 5-methyl modified nucleotide
  modified_base (11)..(11): 5-methyl modified nucleotide
  modified_base (15)..(15): 5-methyl bicyclic nucleic acid
aaguucuguccaagc

SEQ ID NO: 16319 - RNA, 14 nt, Artificial Sequence
  source: /note="Description of Artificial Sequence: Synthetic oligonucleotide"
  source: /note="RNA"
  source: /note="5' tri-ethylene glycol (TEG)"
  modified_base (1)..(1): bicyclic nucleic acid (BNA)
  modified_base (6)..(6): 5-methyl modified nucleotide
  modified_base (10)..(10): 5-methyl modified nucleotide
  modified_base (11)..(11): 5-methyl modified nucleotide
  modified_base (14)..(14): bicyclic nucleic acid (BNA)
aaguucuguccaag

SEQ ID NO: 16320 - RNA, 13 nt, Artificial Sequence
  source: /note="Description of Artificial Sequence: Synthetic oligonucleotide"
  source: /note="RNA"
  source: /note="5' tri-ethylene glycol (TEG)"
  modified_base (1)..(1): bicyclic nucleic acid (BNA)
  modified_base (6)..(6): 5-methyl modified nucleotide
  modified_base (10)..(10): 5-methyl modified nucleotide
  modified_base (11)..(11): 5-methyl modified nucleotide
  modified_base (13)..(13): bicyclic nucleic acid (BNA)
aaguucuguccaa

SEQ ID NO: 16321 - RNA, 12 nt, Artificial Sequence
  source: /note="Description of Artificial Sequence: Synthetic oligonucleotide"
  source: /note="RNA"
  source: /note="5' tri-ethylene glycol (TEG)"
  modified_base (1)..(1): bicyclic nucleic acid (BNA)
  modified_base (6)..(6): 5-methyl modified nucleotide
  modified_base (10)..(10): 5-methyl modified nucleotide
  modified_base (11)..(11): 5-methyl modified nucleotide
  modified_base (12)..(12): bicyclic nucleic acid (BNA)
aaguucugucca

SEQ ID NO: 16322 - RNA, 11 nt, Artificial Sequence
  source: /note="Description of Artificial Sequence: Synthetic oligonucleotide"
  source: /note="RNA"
  source: /note="5' tri-ethylene glycol (TEG)"
  modified_base (1)..(1): bicyclic nucleic acid (BNA)
  modified_base (6)..(6): 5-methyl modified nucleotide
  modified_base (10)..(10): 5-methyl modified nucleotide
  modified_base (11)..(11): 5-methyl bicyclic nucleic acid
aaguucugucc

SEQ ID NO: 16323 - RNA, 10 nt, Artificial Sequence
  source: /note="Description of Artificial Sequence: Synthetic oligonucleotide"
  source: /note="RNA"
  source: /note="5' tri-ethylene glycol (TEG)"
  modified_base (1)..(1): bicyclic nucleic acid (BNA)
  modified_base (6)..(6): 5-methyl modified nucleotide
  modified_base (10)..(10): 5-methyl bicyclic nucleic acid
aaguucuguc

SEQ ID NO: 16324 - DNA, 9 bp, Artificial Sequence
  source: /note="Description of Artificial Sequence: Synthetic oligonucleotide"
  source: /note="Description of Combined DNA/RNA Molecule: Synthetic oligonucleotide"
  source: /note="DNA/RNA"
  source: /note="5' tri-ethylene glycol (TEG)"
  modified_base (1)..(1): bicyclic nucleic acid (BNA)
  modified_base (6)..(6): 5-methyl modified nucleotide
  modified_base (9)..(9): bicyclic nucleic acid (BNA)
aaguucugt

SEQ ID NO: 16325 - RNA, 8 nt, Artificial Sequence
  source: /note="Description of Artificial Sequence: Synthetic oligonucleotide"
  source: /note="RNA"
  source: /note="5' tri-ethylene glycol (TEG)"
  modified_base (1)..(1): bicyclic nucleic acid (BNA)
  modified_base (6)..(6): 5-methyl modified nucleotide
  modified_base (8)..(8): bicyclic nucleic acid (BNA)
aaguucug

SEQ ID NO: 16326 - DNA, 20 bp, Artificial Sequence
  source: /note="Description of Artificial Sequence: Synthetic oligonucleotide"
  source: /note="Description of Combined DNA/RNA Molecule: Synthetic oligonucleotide"
  source: /note="DNA/RNA"
  source: /note="5' tri-ethylene glycol (TEG)"
  modified_base (1)..(1): bicyclic nucleic acid (BNA)
  modified_base (7)..(7): 5-methyl modified nucleotide
  modified_base (11)..(11): 5-methyl modified nucleotide
  modified_base (12)..(12): 5-methyl modified nucleotide
  modified_base (16)..(16): 5-methyl modified nucleotide
  modified_base (17)..(17): 5-methyl modified nucleotide
  modified_base (18)..(18): 5-methyl modified nucleotide
  modified_base (20)..(20): bicyclic nucleic acid (BNA)
taaguucuguccaagcccgg

SEQ ID NO: 16327 - DNA, 19 bp, Artificial Sequence
  source: /note="Description of Artificial Sequence: Synthetic oligonucleotide"
  source: /note="Description of Combined DNA/RNA Molecule: Synthetic oligonucleotide"
  source: /note="DNA/RNA"
  source: /note="5' tri-ethylene glycol (TEG)"
  modified_base (1)..(1): bicyclic nucleic acid (BNA)
  modified_base (7)..(7): 5-methyl modified nucleotide
  modified_base (11)..(11): 5-methyl modified nucleotide
  modified_base (12)..(12): 5-methyl modified nucleotide
  modified_base (16)..(16): 5-methyl modified nucleotide
  modified_base (17)..(17): 5-methyl modified nucleotide
  modified_base (18)..(18): 5-methyl modified nucleotide
  modified_base (19)..(19): bicyclic nucleic acid (BNA)
taaguucuguccaagcccg

SEQ ID NO: 16328 - DNA, 18 bp, Artificial Sequence
  source: /note="Description of Artificial Sequence: Synthetic oligonucleotide"
  source: /note="Description of Combined DNA/RNA Molecule: Synthetic oligonucleotide"
  source: /note="DNA/RNA"
  source: /note="5' tri-ethylene glycol (TEG)"
  modified_base (1)..(1): bicyclic nucleic acid (BNA)
  modified_base (7)..(7): 5-methyl modified nucleotide
  modified_base (11)..(11): 5-methyl modified nucleotide
  modified_base (12)..(12): 5-methyl modified nucleotide
  modified_base (16)..(16): 5-methyl modified nucleotide
  modified_base (17)..(17): 5-methyl modified nucleotide
  modified_base (18)..(18): 5-methyl bicyclic nucleic acid
taaguucuguccaagccc

SEQ ID NO: 16329 - DNA, 17 bp, Artificial Sequence
  source: /note="Description of Artificial Sequence: Synthetic oligonucleotide"
  source: /note="Description of Combined DNA/RNA Molecule: Synthetic oligonucleotide"
  source: /note="DNA/RNA"
  source: /note="5' tri-ethylene glycol (TEG)"
  modified_base (1)..(1): bicyclic nucleic acid (BNA)
  modified_base (7)..(7): 5-methyl modified nucleotide
  modified_base (11)..(11): 5-methyl modified nucleotide
  modified_base (12)..(12): 5-methyl modified nucleotide
  modified_base (16)..(16): 5-methyl modified nucleotide
  modified_base (17)..(17): 5-methyl bicyclic nucleic acid
taaguucuguccaagcc

SEQ ID NO: 16330 - DNA, 16 bp, Artificial Sequence
  source: /note="Description of Artificial Sequence: Synthetic oligonucleotide"
  source: /note="Description of Combined DNA/RNA Molecule: Synthetic oligonucleotide"
  source: /note="DNA/RNA"
  source: /note="5' tri-ethylene glycol (TEG)"
  modified_base (1)..(1): bicyclic nucleic acid (BNA)
  modified_base (7)..(7): 5-methyl modified nucleotide
  modified_base (11)..(11): 5-methyl modified nucleotide
  modified_base (12)..(12): 5-methyl modified nucleotide
  modified_base (16)..(16): 5-methyl bicyclic nucleic acid
taaguucuguccaagc

SEQ ID NO: 16331 - DNA, 14 bp, Artificial Sequence
  source: /note="Description of Artificial Sequence: Synthetic oligonucleotide"
  source: /note="Description of Combined DNA/RNA Molecule: Synthetic oligonucleotide"
  source: /note="DNA/RNA"
  source: /note="5' tri-ethylene glycol (TEG)"
  modified_base (1)..(1): bicyclic nucleic acid (BNA)
  modified_base (7)..(7): 5-methyl modified nucleotide
  modified_base (11)..(11): 5-methyl modified nucleotide
  modified_base (12)..(12): 5-methyl modified nucleotide
  modified_base (14)..(14): bicyclic nucleic acid (BNA)
taaguucuguccaa

SEQ ID NO: 16332 - DNA, 13 bp, Artificial Sequence
  source: /note="Description of Artificial Sequence: Synthetic oligonucleotide"
  source: /note="Description of Combined DNA/RNA Molecule: Synthetic oligonucleotide"
  source: /note="DNA/RNA"
  source: /note="5' tri-ethylene glycol (TEG)"
  modified_base (1)..(1): bicyclic nucleic acid (BNA)
  modified_base (7)..(7): 5-methyl modified nucleotide
  modified_base (11)..(11): 5-methyl modified nucleotide
  modified_base (12)..(12): 5-methyl modified nucleotide
  modified_base (13)..(13): bicyclic nucleic acid (BNA)
taaguucugucca

SEQ ID NO: 16333 - DNA, 12 bp, Artificial Sequence
  source: /note="Description of Artificial Sequence: Synthetic oligonucleotide"
  source: /note="Description of Combined DNA/RNA Molecule: Synthetic oligonucleotide"
  source: /note="DNA/RNA"
  source: /note="5' tri-ethylene glycol (TEG)"
  modified_base (1)..(1): bicyclic nucleic acid (BNA)
  modified_base (7)..(7): 5-methyl modified nucleotide
  modified_base (11)..(11): 5-methyl modified nucleotide
  modified_base (12)..(12): 5-methyl bicyclic nucleic acid
taaguucugucc

SEQ ID NO: 16334 - DNA, 11 bp, Artificial Sequence
  source: /note="Description of Artificial Sequence: Synthetic oligonucleotide"
  source: /note="Description of Combined DNA/RNA Molecule: Synthetic oligonucleotide"
  source: /note="DNA/RNA"
  source: /note="5' tri-ethylene glycol (TEG)"
  modified_base (1)..(1): bicyclic nucleic acid (BNA)
  modified_base (7)..(7): 5-methyl modified nucleotide
  modified_base (11)..(11): 5-methyl bicyclic nucleic acid
taaguucuguc

SEQ ID NO: 16335 - DNA, 10 bp, Artificial Sequence
  source: /note="Description of Artificial Sequence: Synthetic oligonucleotide"
  source: /note="Description of Combined DNA/RNA Molecule: Synthetic oligonucleotide"
  source: /note="DNA/RNA"
  source: /note="5' tri-ethylene glycol (TEG)"
  modified_base (1)..(1): bicyclic nucleic acid (BNA)
  modified_base (7)..(7): 5-methyl modified nucleotide
  modified_base (10)..(10): bicyclic nucleic acid (BNA)
taaguucugt

SEQ ID NO: 16336 - DNA, 9 bp, Artificial Sequence
  source: /note="Description of Artificial Sequence: Synthetic oligonucleotide"
  source: /note="Description of Combined DNA/RNA Molecule: Synthetic oligonucleotide"
  source: /note="DNA/RNA"
  source: /note="5' tri-ethylene glycol (TEG)"
  modified_base (1)..(1): bicyclic nucleic acid (BNA)
  modified_base (7)..(7): 5-methyl modified nucleotide
  modified_base (9)..(9): bicyclic nucleic acid (BNA)
taaguucug

SEQ ID NO: 16337 - DNA, 8 bp, Artificial Sequence
  source: /note="Description of Artificial Sequence: Synthetic oligonucleotide"
  source: /note="Description of Combined DNA/RNA Molecule: Synthetic oligonucleotide"
  source: /note="DNA/RNA"
  source: /note="5' tri-ethylene glycol (TEG)"
  modified_base (1)..(1): bicyclic nucleic acid (BNA)
  modified_base (7)..(7): 5-methyl modified nucleotide
  modified_base (8)..(8): bicyclic nucleic acid (BNA)
taaguuct

SEQ ID NO: 16338 - RNA, 20 nt, Artificial Sequence
  source: /note="Description of Artificial Sequence: Synthetic oligonucleotide"
  source: /note="RNA"
  source: /note="5' tri-ethylene glycol (TEG)"
  modified_base (1)..(1): bicyclic nucleic acid (BNA)
  modified_base (8)..(8): 5-methyl modified nucleotide
  modified_base (12)..(12): 5-methyl modified nucleotide
  modified_base (13)..(13): 5-methyl modified nucleotide
  modified_base (17)..(17): 5-methyl modified nucleotide
  modified_base (18)..(18): 5-methyl modified nucleotide
  modified_base (19)..(19): 5-methyl modified nucleotide
  modified_base (20)..(20): bicyclic nucleic acid (BNA)
guaaguucuguccaagcccg

SEQ ID NO: 16339 - RNA, 19 nt, Artificial Sequence
  source: /note="Description of Artificial Sequence: Synthetic oligonucleotide"
  source: /note="RNA"
  source: /note="5' tri-ethylene glycol (TEG)"
  modified_base (1)..(1): bicyclic nucleic acid (BNA)
  modified_base (8)..(8): 5-methyl modified nucleotide
  modified_base (12)..(12): 5-methyl modified nucleotide
  modified_base (13)..(13): 5-methyl modified nucleotide
  modified_base (17)..(17): 5-methyl modified nucleotide
  modified_base (18)..(18): 5-methyl modified nucleotide
  modified_base (19)..(19): 5-methyl bicyclic nucleic acid
guaaguucuguccaagccc

SEQ ID NO: 16340 - RNA, 17 nt, Artificial Sequence
  source: /note="Description of Artificial Sequence: Synthetic oligonucleotide"
  source: /note="RNA"
  source: /note="5' tri-ethylene glycol (TEG)"
  modified_base (1)..(1): bicyclic nucleic acid (BNA)
  modified_base (8)..(8): 5-methyl modified nucleotide
  modified_base (12)..(12): 5-methyl modified nucleotide
  modified_base (13)..(13): 5-methyl modified nucleotide
  modified_base (17)..(17): 5-methyl bicyclic nucleic acid
guaaguucuguccaagc

SEQ ID NO: 16341 - RNA, 16 nt, Artificial Sequence
  source: /note="Description of Artificial Sequence: Synthetic oligonucleotide"
  source: /note="RNA"
  source: /note="5' tri-ethylene glycol (TEG)"
  modified_base (1)..(1): bicyclic nucleic acid (BNA)
  modified_base (8)..(8): 5-methyl modified nucleotide
  modified_base (12)..(12): 5-methyl modified nucleotide
  modified_base (13)..(13): 5-methyl modified nucleotide
  modified_base (16)..(16): bicyclic nucleic acid (BNA)
guaaguucuguccaag

SEQ ID NO: 16342 - RNA, 15 nt, Artificial Sequence
  source: /note="Description of Artificial Sequence: Synthetic oligonucleotide"
  source: /note="RNA"
  source: /note="5' tri-ethylene glycol (TEG)"
  modified_base (1)..(1): bicyclic nucleic acid (BNA)
  modified_base (8)..(8): 5-methyl modified nucleotide
  modified_base (12)..(12): 5-methyl modified nucleotide
  modified_base (13)..(13): 5-methyl modified nucleotide
  modified_base (15)..(15): bicyclic nucleic acid (BNA)
guaaguucuguccaa

SEQ ID NO: 16343 - RNA, 14 nt, Artificial Sequence
  source: /note="Description of Artificial Sequence: Synthetic oligonucleotide"
  source: /note="RNA"
  source: /note="5' tri-ethylene glycol (TEG)"
  modified_base (1)..(1): bicyclic nucleic acid (BNA)
  modified_base (8)..(8): 5-methyl modified nucleotide
  modified_base (12)..(12): 5-methyl modified nucleotide
  modified_base (13)..(13): 5-methyl modified nucleotide
  modified_base (14)..(14): bicyclic nucleic acid (BNA)
guaaguucugucca

SEQ ID NO: 16344 - RNA, 13 nt, Artificial Sequence
  source: /note="Description of Artificial Sequence: Synthetic oligonucleotide"
  source: /note="RNA"
  source: /note="5' tri-ethylene glycol (TEG)"
  modified_base (1)..(1): bicyclic nucleic acid (BNA)
  modified_base (8)..(8): 5-methyl modified nucleotide
  modified_base (12)..(12): 5-methyl modified nucleotide
  modified_base (13)..(13): 5-methyl bicyclic nucleic acid
guaaguucugucc

SEQ ID NO: 16345 - RNA, 12 nt, Artificial Sequence
  source: /note="Description of Artificial Sequence: Synthetic oligonucleotide"
  source: /note="RNA"
  source: /note="5' tri-ethylene glycol (TEG)"
  modified_base (1)..(1): bicyclic nucleic acid (BNA)
  modified_base (8)..(8): 5-methyl modified nucleotide
  modified_base (12)..(12): 5-methyl bicyclic nucleic acid
guaaguucuguc

SEQ ID NO: 16346 - DNA, 11 bp, Artificial Sequence
  source: /note="Description of Artificial Sequence: Synthetic oligonucleotide"
  source: /note="Description of Combined DNA/RNA Molecule: Synthetic oligonucleotide"
  source: /note="DNA/RNA"
  source: /note="5' tri-ethylene glycol (TEG)"
  modified_base (1)..(1): bicyclic nucleic acid (BNA)
  modified_base (8)..(8): 5-methyl modified nucleotide
  modified_base (11)..(11): bicyclic nucleic acid (BNA)
guaaguucugt

SEQ ID NO: 16347 - RNA, 10 nt, Artificial Sequence
  source: /note="Description of Artificial Sequence: Synthetic oligonucleotide"
  source: /note="RNA"
  source: /note="5' tri-ethylene glycol (TEG)"
  modified_base (1)..(1): bicyclic nucleic acid (BNA)
  modified_base (8)..(8): 5-methyl modified nucleotide
  modified_base (10)..(10): bicyclic nucleic acid (BNA)
guaaguucug

SEQ ID NO: 16348 - DNA, 9 bp, Artificial Sequence
  source: /note="Description of Artificial Sequence: Synthetic oligonucleotide"
  source: /note="Description of Combined DNA/RNA Molecule: Synthetic oligonucleotide"
  source: /note="DNA/RNA"
  source: /note="5' tri-ethylene glycol (TEG)"
  modified_base (1)..(1): bicyclic nucleic acid (BNA)
  modified_base (8)..(8): 5-methyl modified nucleotide
  modified_base (9)..(9): bicyclic nucleic acid (BNA)
guaaguuct

SEQ ID NO: 16349 - RNA, 8 nt, Artificial Sequence
  source: /note="Description of Artificial Sequence: Synthetic oligonucleotide"
  source: /note="RNA"
  source: /note="5' tri-ethylene glycol (TEG)"
  modified_base (1)..(1): bicyclic nucleic acid (BNA)
  modified_base (8)..(8): 5-methyl bicyclic nucleic acid
guaaguuc

SEQ ID NO: 16350 - RNA, 20 nt, Artificial Sequence
  source: /note="Description of Artificial Sequence: Synthetic oligonucleotide"
  source: /note="RNA"
  source: /note="5' tri-ethylene glycol (TEG)"
  modified_base (1)..(1): bicyclic nucleic acid (BNA)
  modified_base (9)..(9): 5-methyl modified nucleotide
  modified_base (13)..(13): 5-methyl modified nucleotide
  modified_base (14)..(14): 5-methyl modified nucleotide
  modified_base (18)..(18): 5-methyl modified nucleotide
  modified_base (19)..(19): 5-methyl modified nucleotide
  modified_base (20)..(20): 5-methyl bicyclic nucleic acid
gguaaguucuguccaagccc

SEQ ID NO: 16351 - RNA, 19 nt, Artificial Sequence
  source: /note="Description of Artificial Sequence: Synthetic oligonucleotide"
  source: /note="RNA"
  source: /note="5' tri-ethylene glycol (TEG)"
  modified_base (1)..(1): bicyclic nucleic acid (BNA)
  modified_base (9)..(9): 5-methyl modified nucleotide
  modified_base (13)..(13): 5-methyl modified nucleotide
  modified_base (14)..(14): 5-methyl modified nucleotide
  modified_base (18)..(18): 5-methyl modified nucleotide
  modified_base (19)..(19): 5-methyl bicyclic nucleic acid
gguaaguucuguccaagcc

SEQ ID NO: 16352 - RNA, 17 nt, Artificial Sequence
  source: /note="Description of Artificial Sequence: Synthetic oligonucleotide"
  source: /note="RNA"
  source: /note="5' tri-ethylene glycol (TEG)"
  modified_base (1)..(1): bicyclic nucleic acid (BNA)
  modified_base (9)..(9): 5-methyl modified nucleotide
  modified_base (13)..(13): 5-methyl modified nucleotide
  modified_base (14)..(14): 5-methyl modified nucleotide
  modified_base (17)..(17): bicyclic nucleic acid (BNA)
gguaaguucuguccaag

SEQ ID NO: 16353 - RNA, 16 nt, Artificial Sequence
  source: /note="Description of Artificial Sequence: Synthetic oligonucleotide"
  source: /note="RNA"
  source: /note="5' tri-ethylene glycol (TEG)"
  modified_base (1)..(1): bicyclic nucleic acid (BNA)
  modified_base (9)..(9): 5-methyl modified nucleotide
  modified_base (13)..(13): 5-methyl modified nucleotide
  modified_base (14)..(14): 5-methyl modified nucleotide
  modified_base (16)..(16): bicyclic nucleic acid (BNA)
gguaaguucuguccaa

SEQ ID NO: 16354 - RNA, 15 nt, Artificial Sequence
  source: /note="Description of Artificial Sequence: Synthetic oligonucleotide"
  source: /note="RNA"
  source: /note="5' tri-ethylene glycol (TEG)"
  modified_base (1)..(1): bicyclic nucleic acid (BNA)
  modified_base (9)..(9): 5-methyl modified nucleotide
  modified_base (13)..(13): 5-methyl modified nucleotide
  modified_base (14)..(14): 5-methyl modified nucleotide
  modified_base (15)..(15): bicyclic nucleic acid (BNA)
gguaaguucugucca

SEQ ID NO: 16355 - RNA, 14 nt, Artificial Sequence
  source: /note="Description of Artificial Sequence: Synthetic oligonucleotide"
  source: /note="RNA"
  source: /note="5' tri-ethylene glycol (TEG)"
  modified_base (1)..(1): bicyclic nucleic acid (BNA)
  modified_base (9)..(9): 5-methyl modified nucleotide
  modified_base (13)..(13): 5-methyl modified nucleotide
  modified_base (14)..(14): 5-methyl bicyclic nucleic acid
gguaaguucugucc

SEQ ID NO: 16356 - RNA, 13 nt, Artificial Sequence
  source: /note="Description of Artificial Sequence: Synthetic oligonucleotide"
  source: /note="RNA"
  source: /note="5' tri-ethylene glycol (TEG)"
  modified_base (1)..(1): bicyclic nucleic acid (BNA)
  modified_base (9)..(9): 5-methyl modified nucleotide
  modified_base (13)..(13): 5-methyl bicyclic nucleic acid
gguaaguucuguc

SEQ ID NO: 16357 - DNA, 12 bp, Artificial Sequence
  source: /note="Description of Artificial Sequence: Synthetic oligonucleotide"
  source: /note="Description of Combined DNA/RNA Molecule: Synthetic oligonucleotide"
  source: /note="DNA/RNA"
  source: /note="5' tri-ethylene glycol (TEG)"
  modified_base (1)..(1): bicyclic nucleic acid (BNA)
  modified_base (9)..(9): 5-methyl modified nucleotide
  modified_base (12)..(12): bicyclic nucleic acid (BNA)
gguaaguucugt

SEQ ID NO: 16358 - RNA, 11 nt, Artificial Sequence
  source: /note="Description of Artificial Sequence: Synthetic oligonucleotide"
  source: /note="RNA"
  source: /note="5' tri-ethylene glycol (TEG)"
  modified_base (1)..(1): bicyclic nucleic acid (BNA)
  modified_base (9)..(9): 5-methyl modified nucleotide
  modified_base (11)..(11): bicyclic nucleic acid (BNA)
gguaaguucug

SEQ ID NO: 16359 - DNA, 10 bp, Artificial Sequence
  source: /note="Description of Artificial Sequence: Synthetic oligonucleotide"
  source: /note="Description of Combined DNA/RNA Molecule: Synthetic oligonucleotide"
  source: /note="DNA/RNA"
  source: /note="5' tri-ethylene glycol (TEG)"
  modified_base (1)..(1): bicyclic nucleic acid (BNA)
  modified_base (9)..(9): 5-methyl modified nucleotide
  modified_base (10)..(10): bicyclic nucleic acid (BNA)
gguaaguuct

SEQ ID NO: 16360 - RNA, 9 nt, Artificial Sequence
  source: /note="Description of Artificial Sequence: Synthetic oligonucleotide"
  source: /note="RNA"
  source: /note="5' tri-ethylene glycol (TEG)"
  modified_base (1)..(1): bicyclic nucleic acid (BNA)
  modified_base (9)..(9): 5-methyl bicyclic nucleic acid
gguaaguuc

SEQ ID NO: 16361 - DNA, 8 bp, Artificial Sequence
  source: /note="Description of Artificial Sequence: Synthetic oligonucleotide"
  source: /note="Description of Combined DNA/RNA Molecule: Synthetic oligonucleotide"
  source: /note="DNA/RNA"
  source: /note="5' tri-ethylene glycol (TEG)"
  modified_base (1)..(1): bicyclic nucleic acid (BNA)
  modified_base (8)..(8): bicyclic nucleic acid (BNA)
gguaagut

SEQ ID NO: 16362 - RNA, 20 nt, Artificial Sequence
  source: /note="Description of Artificial Sequence: Synthetic oligonucleotide"
  source: /note="RNA"
  source: /note="5' tri-ethylene glycol (TEG)"
  modified_base (1)..(1): 5-methyl bicyclic nucleic acid
  modified_base (10)..(10): 5-methyl modified nucleotide
  modified_base (14)..(14): 5-methyl modified nucleotide
  modified_base (15)..(15): 5-methyl modified nucleotide
  modified_base (19)..(19): 5-methyl modified nucleotide
  modified_base (20)..(20): 5-methyl bicyclic nucleic acid
cgguaaguucuguccaagcc

SEQ ID NO: 16363 - RNA, 19 nt, Artificial Sequence
  source: /note="Description of Artificial Sequence: Synthetic oligonucleotide"
  source: /note="RNA"
  source: /note="5' tri-ethylene glycol (TEG)"
  modified_base (1)..(1): 5-methyl bicyclic nucleic acid
  modified_base (10)..(10): 5-methyl modified nucleotide
  modified_base (14)..(14): 5-methyl modified nucleotide
  modified_base (15)..(15): 5-methyl modified nucleotide
  modified_base (19)..(19): 5-methyl bicyclic nucleic acid
cgguaaguucuguccaagc

SEQ ID NO: 16364 - RNA, 18 nt, Artificial Sequence
  source: /note="Description of Artificial Sequence: Synthetic oligonucleotide"
  source: /note="RNA"
  source: /note="5' tri-ethylene glycol (TEG)"
  modified_base (1)..(1): 5-methyl bicyclic nucleic acid
  modified_base (10)..(10): 5-methyl modified nucleotide
  modified_base (14)..(14): 5-methyl modified nucleotide
  modified_base (15)..(15): 5-methyl modified nucleotide
  modified_base (18)..(18): bicyclic nucleic acid (BNA)
cgguaaguucuguccaag

SEQ ID NO: 16365 - RNA, 17 nt, Artificial Sequence
  source: /note="Description of Artificial Sequence: Synthetic oligonucleotide"
  source: /note="RNA"
  source: /note="5' tri-ethylene glycol (TEG)"
  modified_base (1)..(1): 5-methyl bicyclic nucleic acid
  modified_base (10)..(10): 5-methyl modified nucleotide
  modified_base (14)..(14): 5-methyl modified nucleotide
  modified_base (15)..(15): 5-methyl modified nucleotide
  modified_base (17)..(17): bicyclic nucleic acid (BNA)
cgguaaguucuguccaa

SEQ ID NO: 16366 - RNA, 16 nt, Artificial Sequence
  source: /note="Description of Artificial Sequence: Synthetic oligonucleotide"
  source: /note="RNA"
  source: /note="5' tri-ethylene glycol (TEG)"
  modified_base (1)..(1): 5-methyl bicyclic nucleic acid
  modified_base (10)..(10): 5-methyl modified nucleotide
  modified_base (14)..(14): 5-methyl modified nucleotide
  modified_base (15)..(15): 5-methyl modified nucleotide
  modified_base (16)..(16): bicyclic nucleic acid (BNA)
cgguaaguucugucca

SEQ ID NO: 16367 - RNA, 15 nt, Artificial Sequence
  source: /note="Description of Artificial Sequence: Synthetic oligonucleotide"
  source: /note="RNA"
  source: /note="5' tri-ethylene glycol (TEG)"
  modified_base (1)..(1): 5-methyl bicyclic nucleic acid
  modified_base (10)..(10): 5-methyl modified nucleotide
  modified_base (14)..(14): 5-methyl modified nucleotide
  modified_base (15)..(15): 5-methyl bicyclic nucleic acid
cgguaaguucugucc

SEQ ID NO: 16368 - RNA, 14 nt, Artificial Sequence
  source: /note="Description of Artificial Sequence: Synthetic oligonucleotide"
  source: /note="RNA"
  source: /note="5' tri-ethylene glycol (TEG)"
  modified_base (1)..(1): 5-methyl bicyclic nucleic acid
  modified_base (10)..(10): 5-methyl modified nucleotide
  modified_base (14)..(14): 5-methyl bicyclic nucleic acid
cgguaaguucuguc

SEQ ID NO: 16369 - DNA, 13 bp, Artificial Sequence
  source: /note="Description of Artificial Sequence: Synthetic oligonucleotide"
  source: /note="Description of Combined DNA/RNA Molecule: Synthetic oligonucleotide"
  source: /note="DNA/RNA"
  source: /note="5' tri-ethylene glycol (TEG)"
  modified_base (1)..(1): 5-methyl bicyclic nucleic acid
  modified_base (10)..(10): 5-methyl modified nucleotide
  modified_base (13)..(13): bicyclic nucleic acid (BNA)
cgguaaguucugt

SEQ ID NO: 16370 - RNA, 12 nt, Artificial Sequence
  source: /note="Description of Artificial Sequence: Synthetic oligonucleotide"
  source: /note="RNA"
  source: /note="5' tri-ethylene glycol (TEG)"
  modified_base (1)..(1): 5-methyl bicyclic nucleic acid
  modified_base (10)..(10): 5-methyl modified nucleotide
  modified_base (12)..(12): bicyclic nucleic acid (BNA)
cgguaaguucug

SEQ ID NO: 16371 - DNA, 11 bp, Artificial Sequence
  source: /note="Description of Artificial Sequence: Synthetic oligonucleotide"
  source: /note="Description of Combined DNA/RNA Molecule: Synthetic oligonucleotide"
  source: /note="DNA/RNA"
  source: /note="5' tri-ethylene glycol (TEG)"
  modified_base (1)..(1): 5-methyl bicyclic nucleic acid
  modified_base (10)..(10): 5-methyl modified nucleotide
  modified_base (11)..(11): bicyclic nucleic acid (BNA)
cgguaaguuct

SEQ ID NO: 16372 - RNA, 10 nt, Artificial Sequence
  source: /note="Description of Artificial Sequence: Synthetic oligonucleotide"
  source: /note="RNA"
  source: /note="5' tri-ethylene glycol (TEG)"
  modified_base (1)..(1): 5-methyl bicyclic nucleic acid
  modified_base (10)..(10): 5-methyl bicyclic nucleic acid
cgguaaguuc

SEQ ID NO: 16373 - DNA, 9 bp, Artificial Sequence
  source: /note="Description of Artificial Sequence: Synthetic oligonucleotide"
  source: /note="Description of Combined DNA/RNA Molecule: Synthetic oligonucleotide"
  source: /note="DNA/RNA"
  source: /note="5' tri-ethylene glycol (TEG)"
  modified_base (1)..(1): 5-methyl bicyclic nucleic acid
  modified_base (9)..(9): bicyclic nucleic acid (BNA)
cgguaagut

SEQ ID NO: 16374 - DNA, 8 bp, Artificial Sequence
  source: /note="Description of Artificial Sequence: Synthetic oligonucleotide"
  source: /note="Description of Combined DNA/RNA Molecule: Synthetic oligonucleotide"
  source: /note="DNA/RNA"
  source: /note="5' tri-ethylene glycol (TEG)"
  modified_base (1)..(1): 5-methyl bicyclic nucleic acid
  modified_base (8)..(8): bicyclic nucleic acid (BNA)
cgguaagt

SEQ ID NO: 16375 - DNA, 20 bp, Artificial Sequence
  source: /note="Description of Artificial Sequence: Synthetic oligonucleotide"
  source: /note="Description of Combined DNA/RNA Molecule: Synthetic oligonucleotide"
  source: /note="DNA/RNA"
  source: /note="5' tri-ethylene glycol (TEG)"
  modified_base (1)..(1): bicyclic nucleic acid (BNA)
  modified_base (2)..(2): 5-methyl modified nucleotide
  modified_base (11)..(11): 5-methyl modified nucleotide
  modified_base (15)..(15): 5-methyl modified nucleotide
  modified_base (16)..(16): 5-methyl modified nucleotide
  modified_base (20)..(20): 5-methyl bicyclic nucleic acid
tcgguaaguucuguccaagc

SEQ ID NO: 16376 - DNA, 19 bp, Artificial Sequence
  source: /note="Description of Artificial Sequence: Synthetic oligonucleotide"
  source: /note="Description of Combined DNA/RNA Molecule: Synthetic oligonucleotide"
  source: /note="DNA/RNA"
  source: /note="5' tri-ethylene glycol (TEG)"
  modified_base (1)..(1): bicyclic nucleic acid (BNA)
  modified_base (2)..(2): 5-methyl modified nucleotide
  modified_base (11)..(11): 5-methyl modified nucleotide
  modified_base (15)..(15): 5-methyl modified nucleotide
  modified_base (16)..(16): 5-methyl modified nucleotide
  modified_base (19)..(19): bicyclic nucleic acid (BNA)
tcgguaaguucuguccaag

SEQ ID NO: 16377 - DNA, 18 bp, Artificial Sequence
  source: /note="Description of Artificial Sequence: Synthetic oligonucleotide"
  source: /note="Description of Combined DNA/RNA Molecule: Synthetic oligonucleotide"
  source: /note="DNA/RNA"
  source: /note="5' tri-ethylene glycol (TEG)"
  modified_base (1)..(1): bicyclic nucleic acid (BNA)
  modified_base (2)..(2): 5-methyl modified nucleotide
  modified_base (11)..(11): 5-methyl modified nucleotide
  modified_base (15)..(15): 5-methyl modified nucleotide
  modified_base (16)..(16): 5-methyl modified nucleotide
  modified_base (18)..(18): bicyclic nucleic acid (BNA)
tcgguaaguucuguccaa

SEQ ID NO: 16378 - DNA, 17 bp, Artificial Sequence
  source: /note="Description of Artificial Sequence: Synthetic oligonucleotide"
  source: /note="Description of Combined DNA/RNA Molecule: Synthetic oligonucleotide"
  source: /note="DNA/RNA"
  source: /note="5' tri-ethylene glycol (TEG)"
  modified_base (1)..(1): bicyclic nucleic acid (BNA)
  modified_base (2)..(2): 5-methyl modified nucleotide
  modified_base (11)..(11): 5-methyl modified nucleotide
  modified_base (15)..(15): 5-methyl modified nucleotide
  modified_base (16)..(16): 5-methyl modified nucleotide
  modified_base (17)..(17): bicyclic nucleic acid (BNA)
tcgguaaguucugucca

SEQ ID NO: 16379 - DNA, 16 bp, Artificial Sequence
  source: /note="Description of Artificial Sequence: Synthetic oligonucleotide"
  source: /note="Description of Combined DNA/RNA Molecule: Synthetic oligonucleotide"
  source: /note="DNA/RNA"
  source: /note="5' tri-ethylene glycol (TEG)"
  modified_base (1)..(1): bicyclic nucleic acid (BNA)
  modified_base (2)..(2): 5-methyl modified nucleotide
  modified_base (11)..(11): 5-methyl modified nucleotide
  modified_base (15)..(15): 5-methyl modified nucleotide
  modified_base (16)..(16): 5-methyl bicyclic nucleic acid
tcgguaaguucugucc

SEQ ID NO: 16380 - DNA, 15 bp, Artificial Sequence
  source: /note="Description of Artificial Sequence: Synthetic oligonucleotide"
  source: /note="Description of Combined DNA/RNA Molecule: Synthetic oligonucleotide"
  source: /note="DNA/RNA"
  source: /note="5' tri-ethylene glycol (TEG)"
  modified_base (1)..(1): bicyclic nucleic acid (BNA)
  modified_base (2)..(2): 5-methyl modified nucleotide
  modified_base (11)..(11): 5-methyl modified nucleotide
  modified_base (15)..(15): 5-methyl bicyclic nucleic acid
tcgguaaguucuguc

SEQ ID NO: 16381 - DNA, 14 bp, Artificial Sequence
  source: /note="Description of Artificial Sequence: Synthetic oligonucleotide"
  source: /note="Description of Combined DNA/RNA Molecule: Synthetic oligonucleotide"
  source: /note="DNA/RNA"
  source: /note="5' tri-ethylene glycol (TEG)"
  modified_base (1)..(1): bicyclic nucleic acid (BNA)
  modified_base (2)..(2): 5-methyl modified nucleotide
  modified_base (11)..(11): 5-methyl modified nucleotide
  modified_base (14)..(14): bicyclic nucleic acid (BNA)
tcgguaaguucugt

SEQ ID NO: 16382 - DNA, 13 bp, Artificial Sequence
  source: /note="Description of Artificial Sequence: Synthetic oligonucleotide"
  source: /note="Description of Combined DNA/RNA Molecule: Synthetic oligonucleotide"
  source: /note="DNA/RNA"
  source: /note="5' tri-ethylene glycol (TEG)"
  modified_base (1)..(1): bicyclic nucleic acid (BNA)
  modified_base (2)..(2): 5-methyl modified nucleotide
  modified_base (11)..(11): 5-methyl modified nucleotide
  modified_base (13)..(13): bicyclic nucleic acid (BNA)
tcgguaaguucug

SEQ ID NO: 16383 - DNA, 12 bp, Artificial Sequence
  source: /note="Description of Artificial Sequence: Synthetic oligonucleotide"
  source: /note="Description of Combined DNA/RNA Molecule: Synthetic oligonucleotide"
  source: /note="DNA/RNA"
  source: /note="5' tri-ethylene glycol (TEG)"
  modified_base (1)..(1): bicyclic nucleic acid (BNA)
  modified_base (2)..(2): 5-methyl modified nucleotide
  modified_base (11)..(11): 5-methyl modified nucleotide
  modified_base (12)..(12): bicyclic nucleic acid (BNA)
tcgguaaguuct

SEQ ID NO: 16384 - DNA, 11 bp, Artificial Sequence
  source: /note="Description of Artificial Sequence: Synthetic oligonucleotide"
  source: /note="Description of Combined DNA/RNA Molecule: Synthetic oligonucleotide"
  source: /note="DNA/RNA"
  source: /note="5' tri-ethylene glycol (TEG)"
  modified_base (1)..(1): bicyclic nucleic acid (BNA)
  modified_base (2)..(2): 5-methyl modified nucleotide
  modified_base (11)..(11): 5-methyl bicyclic nucleic acid
tcgguaaguuc

SEQ ID NO: 16385 - DNA, 10 bp, Artificial Sequence
  source: /note="Description of Artificial Sequence: Synthetic oligonucleotide"
  source: /note="Description of Combined DNA/RNA Molecule: Synthetic oligonucleotide"
  source: /note="DNA/RNA"
  source: /note="5' tri-ethylene glycol (TEG)"
  modified_base (1)..(1): bicyclic nucleic acid (BNA)
  modified_base (2)..(2): 5-methyl modified nucleotide
  modified_base (10)..(10): bicyclic nucleic acid (BNA)
tcgguaagut

SEQ ID NO: 16386 - DNA, 9 bp, Artificial Sequence
  source: /note="Description of Artificial Sequence: Synthetic oligonucleotide"
  source: /note="Description of Combined DNA/RNA Molecule: Synthetic oligonucleotide"
  source: /note="DNA/RNA"
  source: /note="5' tri-ethylene glycol (TEG)"
  modified_base (1)..(1): bicyclic nucleic acid (BNA)
  modified_base (2)..(2): 5-methyl modified nucleotide
  modified_base (9)..(9): bicyclic nucleic acid (BNA)
tcgguaagt

SEQ ID NO: 16387 - RNA, 20 nt, Artificial Sequence
  source: /note="Description of Artificial Sequence: Synthetic oligonucleotide"
  source: /note="RNA"
  source: /note="5' tri-ethylene glycol (TEG)"
  modified_base (1)..(1): bicyclic nucleic acid (BNA)
  modified_base (3)..(3): 5-methyl modified nucleotide
  modified_base (12)..(12): 5-methyl modified nucleotide
  modified_base (16)..(16): 5-methyl modified nucleotide
  modified_base (17)..(17): 5-methyl modified nucleotide
  modified_base (20)..(20): bicyclic nucleic acid (BNA)
gucgguaaguucuguccaag

SEQ ID NO: 16388 - RNA, 19 nt, Artificial Sequence
  source: /note="Description of Artificial Sequence: Synthetic oligonucleotide"
  source: /note="RNA"
  source: /note="5' tri-ethylene glycol (TEG)"
  modified_base (1)..(1): bicyclic nucleic acid (BNA)
  modified_base (3)..(3): 5-methyl modified nucleotide
  modified_base (12)..(12): 5-methyl modified nucleotide
  modified_base (16)..(16): 5-methyl modified nucleotide
  modified_base (17)..(17): 5-methyl modified nucleotide
  modified_base (19)..(19): bicyclic nucleic acid (BNA)
gucgguaaguucuguccaa

SEQ ID NO: 16389 - RNA, 18 nt, Artificial Sequence
  source: /note="Description of Artificial Sequence: Synthetic oligonucleotide"
  source: /note="RNA"
  source: /note="5' tri-ethylene glycol (TEG)"
  modified_base (1)..(1): bicyclic nucleic acid (BNA)
  modified_base (3)..(3): 5-methyl modified nucleotide
  modified_base (12)..(12): 5-methyl modified nucleotide
  modified_base (16)..(16): 5-methyl modified nucleotide
  modified_base (17)..(17): 5-methyl modified nucleotide
  modified_base (18)..(18): bicyclic nucleic acid (BNA)
gucgguaaguucugucca

SEQ ID NO: 16390 - RNA, 17 nt, Artificial Sequence
  source: /note="Description of Artificial Sequence: Synthetic oligonucleotide"
  source: /note="RNA"
  source: /note="5' tri-ethylene glycol (TEG)"
  modified_base (1)..(1): bicyclic nucleic acid (BNA)
  modified_base (3)..(3): 5-methyl modified nucleotide
  modified_base (12)..(12): 5-methyl modified nucleotide
  modified_base (16)..(16): 5-methyl modified nucleotide
  modified_base (17)..(17): 5-methyl bicyclic nucleic acid
gucgguaaguucugucc

SEQ ID NO: 16391 - RNA, 16 nt, Artificial Sequence
  source: /note="Description of Artificial Sequence: Synthetic oligonucleotide"
  source: /note="RNA"
  source: /note="5' tri-ethylene glycol (TEG)"
  modified_base (1)..(1): bicyclic nucleic acid (BNA)
  modified_base (3)..(3): 5-methyl modified nucleotide
  modified_base (12)..(12): 5-methyl modified nucleotide
  modified_base (16)..(16): 5-methyl bicyclic nucleic acid
gucgguaaguucuguc

SEQ ID NO: 16392 - DNA, 15 bp, Artificial Sequence
  source: /note="Description of Artificial Sequence: Synthetic oligonucleotide"
  source: /note="Description of Combined DNA/RNA Molecule: Synthetic oligonucleotide"
  source: /note="DNA/RNA"
  source: /note="5' tri-ethylene glycol (TEG)"
  modified_base (1)..(1): bicyclic nucleic acid (BNA)
  modified_base (3)..(3): 5-methyl modified nucleotide
  modified_base (12)..(12): 5-methyl modified nucleotide
  modified_base (15)..(15): bicyclic nucleic acid (BNA)
gucgguaaguucugt

SEQ ID NO: 16393 - RNA, 14 nt, Artificial Sequence
  source: /note="Description of Artificial Sequence: Synthetic oligonucleotide"
  source: /note="RNA"
  source: /note="5' tri-ethylene glycol (TEG)"
  modified_base (1)..(1): bicyclic nucleic acid (BNA)
  modified_base (3)..(3): 5-methyl modified nucleotide
  modified_base (12)..(12): 5-methyl modified nucleotide
  modified_base (14)..(14): bicyclic nucleic acid (BNA)
gucgguaaguucug

SEQ ID NO: 16394 - DNA, 13 bp, Artificial Sequence
  source: /note="Description of Artificial Sequence: Synthetic oligonucleotide"
  source: /note="Description of Combined DNA/RNA Molecule: Synthetic oligonucleotide"
  source: /note="DNA/RNA"
  source: /note="5' tri-ethylene glycol (TEG)"
  modified_base (1)..(1): bicyclic nucleic acid (BNA)
  modified_base (3)..(3): 5-methyl modified nucleotide
  modified_base (12)..(12): 5-methyl modified nucleotide
  modified_base (13)..(13): bicyclic nucleic acid (BNA)
gucgguaaguuct

SEQ ID NO: 16395 - RNA, 12 nt, Artificial Sequence
  source: /note="Description of Artificial Sequence: Synthetic oligonucleotide"
  source: /note="RNA"
  source: /note="5' tri-ethylene glycol (TEG)"
  modified_base (1)..(1): bicyclic nucleic acid (BNA)
  modified_base (3)..(3): 5-methyl modified nucleotide
  modified_base (12)..(12): 5-methyl bicyclic nucleic acid
gucgguaaguuc

SEQ ID NO: 16396 - DNA, 11 bp, Artificial Sequence
  source: /note="Description of Artificial Sequence: Synthetic oligonucleotide"
  source: /note="Description of Combined DNA/RNA Molecule: Synthetic oligonucleotide"
  source: /note="DNA/RNA"
  source: /note="5' tri-ethylene glycol (TEG)"
  modified_base (1)..(1): bicyclic nucleic acid (BNA)
  modified_base (3)..(3): 5-methyl modified nucleotide
  modified_base (11)..(11): bicyclic nucleic acid (BNA)
gucgguaagut

SEQ ID NO: 16397 - DNA, 10 bp, Artificial Sequence
  source: /note="Description of Artificial Sequence: Synthetic oligonucleotide"
  source: /note="Description of Combined DNA/RNA Molecule: Synthetic oligonucleotide"
  source: /note="DNA/RNA"
  source: /note="5' tri-ethylene glycol (TEG)"
  modified_base (1)..(1): bicyclic nucleic acid (BNA)
  modified_base (3)..(3): 5-methyl modified nucleotide
  modified_base (10)..(10): bicyclic nucleic acid (BNA)
gucgguaagt

SEQ ID NO: 16398 - RNA, 20 nt, Artificial Sequence
  source: /note="Description of Artificial Sequence: Synthetic oligonucleotide"
  source: /note="RNA"
  source: /note="5' tri-ethylene glycol (TEG)"
  modified_base (1)..(1): bicyclic nucleic acid (BNA)
  modified_base (4)..(4): 5-methyl modified nucleotide
  modified_base (13)..(13): 5-methyl modified nucleotide
  modified_base (17)..(17): 5-methyl modified nucleotide
  modified_base (18)..(18): 5-methyl modified nucleotide
  modified_base (20)..(20): bicyclic nucleic acid (BNA)
agucgguaaguucuguccaa

SEQ ID NO: 16399 - RNA, 19 nt, Artificial Sequence
  source: /note="Description of Artificial Sequence: Synthetic oligonucleotide"
  source: /note="RNA"
  source: /note="5' tri-ethylene glycol (TEG)"
  modified_base (1)..(1): bicyclic nucleic acid (BNA)
  modified_base (4)..(4): 5-methyl modified nucleotide
  modified_base (13)..(13): 5-methyl modified nucleotide
  modified_base (17)..(17): 5-methyl modified nucleotide
  modified_base (18)..(18): 5-methyl modified nucleotide
  modified_base (19)..(19): bicyclic nucleic acid (BNA)
agucgguaaguucugucca

SEQ ID NO: 16400 - RNA, 17 nt, Artificial Sequence
  source: /note="Description of Artificial Sequence: Synthetic oligonucleotide"
  source: /note="RNA"
  source: /note="5' tri-ethylene glycol (TEG)"
  modified_base (1)..(1): bicyclic nucleic acid (BNA)
  modified_base (4)..(4): 5-methyl modified nucleotide
  modified_base (13)..(13): 5-methyl modified nucleotide
  modified_base (17)..(17): 5-methyl bicyclic nucleic acid
agucgguaaguucuguc

SEQ ID NO: 16401 - DNA, 16 bp, Artificial Sequence
  source: /note="Description of Artificial Sequence: Synthetic oligonucleotide"
  source: /note="Description of Combined DNA/RNA Molecule: Synthetic oligonucleotide"
  source: /note="DNA/RNA"
  source: /note="5' tri-ethylene glycol (TEG)"
  modified_base (1)..(1): bicyclic nucleic acid (BNA)
  modified_base (4)..(4): 5-methyl modified nucleotide
  modified_base (13)..(13): 5-methyl modified nucleotide
  modified_base (16)..(16): bicyclic nucleic acid (BNA)
agucgguaaguucugt

SEQ ID NO: 16402 - RNA, 15 nt, Artificial Sequence
  source: /note="Description of Artificial Sequence: Synthetic oligonucleotide"
  source: /note="RNA"
  source: /note="5' tri-ethylene glycol (TEG)"
  modified_base (1)..(1): bicyclic nucleic acid (BNA)
  modified_base (4)..(4): 5-methyl modified nucleotide
  modified_base (13)..(13): 5-methyl modified nucleotide
  modified_base (15)..(15): bicyclic nucleic acid (BNA)
agucgguaaguucug

SEQ ID NO: 16403 - DNA, 14 bp, Artificial Sequence
  source: /note="Description of Artificial Sequence: Synthetic oligonucleotide"
  source: /note="Description of Combined DNA/RNA Molecule: Synthetic oligonucleotide"
  source: /note="DNA/RNA"
  source: /note="5' tri-ethylene glycol (TEG)"
  modified_base (1)..(1): bicyclic nucleic acid (BNA)
  modified_base (4)..(4): 5-methyl modified nucleotide
  modified_base (13)..(13): 5-methyl modified nucleotide
  modified_base (14)..(14): bicyclic nucleic acid (BNA)
agucgguaaguuct

SEQ ID NO: 16404 - RNA, 13 nt, Artificial Sequence
  source: /note="Description of Artificial Sequence: Synthetic oligonucleotide"
  source: /note="RNA"
  source: /note="5' tri-ethylene glycol (TEG)"
  modified_base (1)..(1): bicyclic nucleic acid (BNA)
  modified_base (4)..(4): 5-methyl modified nucleotide
  modified_base (13)..(13): 5-methyl bicyclic nucleic acid
agucgguaaguuc

SEQ ID NO: 16405 - DNA, 12 bp, Artificial Sequence
  source: /note="Description of Artificial Sequence: Synthetic oligonucleotide"
  source: /note="Description of Combined DNA/RNA Molecule: Synthetic oligonucleotide"
  source: /note="DNA/RNA"
  source: /note="5' tri-ethylene glycol (TEG)"
  modified_base (1)..(1): bicyclic nucleic acid (BNA)
  modified_base (4)..(4): 5-methyl modified nucleotide
  modified_base (12)..(12): bicyclic nucleic acid (BNA)
agucgguaagut

SEQ ID NO: 16406 - DNA, 11 bp, Artificial Sequence
  source: /note="Description of Artificial Sequence: Synthetic oligonucleotide"
  source: /note="Description of Combined DNA/RNA Molecule: Synthetic oligonucleotide"
  source: /note="DNA/RNA"
  source: /note="5' tri-ethylene glycol (TEG)"
  modified_base (1)..(1): bicyclic nucleic acid (BNA)
  modified_base (4)..(4): 5-methyl modified nucleotide
  modified_base (11)..(11): bicyclic nucleic acid (BNA)
agucgguaagt

SEQ ID NO: 16407 - RNA, 20 nt, Artificial Sequence
  source: /note="Description of Artificial Sequence: Synthetic oligonucleotide"
  source: /note="RNA"
  source: /note="5' tri-ethylene glycol (TEG)"
  modified_base (1)..(1): 5-methyl bicyclic nucleic acid
  modified_base (5)..(5): 5-methyl modified nucleotide
  modified_base (14)..(14): 5-methyl modified nucleotide
  modified_base (18)..(18): 5-methyl modified nucleotide
  modified_base (19)..(19): 5-methyl modified nucleotide
  modified_base (20)..(20): bicyclic nucleic acid (BNA)
cagucgguaaguucugucca

SEQ ID NO: 16408 - RNA, 19 nt, Artificial Sequence
  source: /note="Description of Artificial Sequence: Synthetic oligonucleotide"
  source: /note="RNA"
  source: /note="5' tri-ethylene glycol (TEG)"
  modified_base (1)..(1): 5-methyl bicyclic nucleic acid
  modified_base (5)..(5): 5-methyl modified nucleotide
  modified_base (14)..(14): 5-methyl modified nucleotide
  modified_base (18)..(18): 5-methyl modified nucleotide
  modified_base (19)..(19): 5-methyl bicyclic nucleic acid
cagucgguaaguucugucc

SEQ ID NO: 16409 - RNA, 18 nt, Artificial Sequence
  source: /note="Description of Artificial Sequence: Synthetic oligonucleotide"
  source: /note="RNA"
  source: /note="5' tri-ethylene glycol (TEG)"
  modified_base (1)..(1): 5-methyl bicyclic nucleic acid
  modified_base (5)..(5): 5-methyl modified nucleotide
  modified_base (14)..(14): 5-methyl modified nucleotide
  modified_base (18)..(18): 5-methyl bicyclic nucleic acid
cagucgguaaguucuguc

SEQ ID NO: 16410 - DNA, 17 bp, Artificial Sequence
  source: /note="Description of Artificial Sequence: Synthetic oligonucleotide"
  source: /note="Description of Combined DNA/RNA Molecule: Synthetic oligonucleotide"
  source: /note="DNA/RNA"
  source: /note="5' tri-ethylene glycol (TEG)"
  modified_base (1)..(1): 5-methyl bicyclic nucleic acid
  modified_base (5)..(5): 5-methyl modified nucleotide
  modified_base (14)..(14): 5-methyl modified nucleotide
  modified_base (17)..(17): bicyclic nucleic acid (BNA)
cagucgguaaguucugt

SEQ ID NO: 16411 - RNA, 16 nt, Artificial Sequence
  source: /note="Description of Artificial Sequence: Synthetic oligonucleotide"
  source: /note="RNA"
  source: /note="5' tri-ethylene glycol (TEG)"
  modified_base (1)..(1): 5-methyl bicyclic nucleic acid
  modified_base (5)..(5): 5-methyl modified nucleotide
  modified_base (14)..(14): 5-methyl modified nucleotide
  modified_base (16)..(16): bicyclic nucleic acid (BNA)
cagucgguaaguucug

SEQ ID NO: 16412 - DNA, 15 bp, Artificial Sequence
  source: /note="Description of Artificial Sequence: Synthetic oligonucleotide"
  source: /note="Description of Combined DNA/RNA Molecule: Synthetic oligonucleotide"
  source: /note="DNA/RNA"
  source: /note="5' tri-ethylene glycol (TEG)"
  modified_base (1)..(1): 5-methyl bicyclic nucleic acid
  modified_base (5)..(5): 5-methyl modified nucleotide
  modified_base (14)..(14): 5-methyl modified nucleotide
  modified_base (15)..(15): bicyclic nucleic acid (BNA)
cagucgguaaguuct

SEQ ID NO: 16413 - RNA, 14 nt, Artificial Sequence
  source: /note="Description of Artificial Sequence: Synthetic oligonucleotide"
  source: /note="RNA"
  source: /note="5' tri-ethylene glycol (TEG)"
  modified_base (1)..(1): 5-methyl bicyclic nucleic acid
  modified_base (5)..(5): 5-methyl modified nucleotide
  modified_base (14)..(14): 5-methyl bicyclic nucleic acid
cagucgguaaguuc

SEQ ID NO: 16414 - DNA, 13 bp, Artificial Sequence
  source: /note="Description of Artificial Sequence: Synthetic oligonucleotide"
  source: /note="Description of Combined DNA/RNA Molecule: Synthetic oligonucleotide"
  source: /note="DNA/RNA"
  source: /note="5' tri-ethylene glycol (TEG)"
  modified_base (1)..(1): 5-methyl bicyclic nucleic acid
  modified_base (5)..(5): 5-methyl modified nucleotide
  modified_base (13)..(13): bicyclic nucleic acid (BNA)
cagucgguaagut

SEQ ID NO: 16415 - DNA, 12 bp, Artificial Sequence
  source: /note="Description of Artificial Sequence: Synthetic oligonucleotide"
  source: /note="Description of Combined DNA/RNA Molecule: Synthetic oligonucleotide"
  source: /note="DNA/RNA"
  source: /note="5' tri-ethylene glycol (TEG)"
  modified_base (1)..(1): 5-methyl bicyclic nucleic acid
  modified_base (5)..(5): 5-methyl modified nucleotide
  modified_base (12)..(12): bicyclic nucleic acid (BNA)
cagucgguaagt

SEQ ID NO: 16416 - RNA, 20 nt, Artificial Sequence
  source: /note="Description of Artificial Sequence: Synthetic oligonucleotide"
  source: /note="RNA"
  source: /note="5' tri-ethylene glycol (TEG)"
  modified_base (1)..(1): 5-methyl bicyclic nucleic acid
  modified_base (2)..(2): 5-methyl modified nucleotide
  modified_base (6)..(6): 5-methyl modified nucleotide
  modified_base (15)..(15): 5-methyl modified nucleotide
  modified_base (19)..(19): 5-methyl modified nucleotide
  modified_base (20)..(20): 5-methyl bicyclic nucleic acid
ccagucgguaaguucugucc

SEQ ID NO: 16417 - RNA, 19 nt, Artificial Sequence
  source: /note="Description of Artificial Sequence: Synthetic oligonucleotide"
  source: /note="RNA"
  source: /note="5' tri-ethylene glycol (TEG)"
  modified_base (1)..(1): 5-methyl bicyclic nucleic acid
  modified_base (2)..(2): 5-methyl modified nucleotide
  modified_base (6)..(6): 5-methyl modified nucleotide
  modified_base (15)..(15): 5-methyl modified nucleotide
  modified_base (19)..(19): 5-methyl bicyclic nucleic acid
ccagucgguaaguucuguc

SEQ ID NO: 16418 - DNA, 18 bp, Artificial Sequence
  source: /note="Description of Artificial Sequence: Synthetic oligonucleotide"
  source: /note="Description of Combined DNA/RNA Molecule: Synthetic oligonucleotide"
  source: /note="DNA/RNA"
  source: /note="5' tri-ethylene glycol (TEG)"
  modified_base (1)..(1): 5-methyl bicyclic nucleic acid
  modified_base (2)..(2): 5-methyl modified nucleotide
  modified_base (6)..(6): 5-methyl modified nucleotide
  modified_base (15)..(15): 5-methyl modified nucleotide
  modified_base (18)..(18): bicyclic nucleic acid (BNA)
ccagucgguaaguucugt

SEQ ID NO: 16419 - RNA, 17 nt, Artificial Sequence
  source: /note="Description of Artificial Sequence: Synthetic oligonucleotide"
  source: /note="RNA"
  source: /note="5' tri-ethylene glycol (TEG)"
  modified_base (1)..(1): 5-methyl bicyclic nucleic acid
  modified_base (2)..(2): 5-methyl modified nucleotide
  modified_base (6)..(6): 5-methyl modified nucleotide
  modified_base (15)..(15): 5-methyl modified nucleotide
  modified_base (17)..(17): bicyclic nucleic acid (BNA)
ccagucgguaaguucug

SEQ ID NO: 16420 - DNA, 16 bp, Artificial Sequence
  source: /note="Description of Artificial Sequence: Synthetic oligonucleotide"
  source: /note="Description of Combined DNA/RNA Molecule: Synthetic oligonucleotide"
  source: /note="DNA/RNA"
  source: /note="5' tri-ethylene glycol (TEG)"
  modified_base (1)..(1): 5-methyl bicyclic nucleic acid
  modified_base (2)..(2): 5-methyl modified nucleotide
  modified_base (6)..(6): 5-methyl modified nucleotide
  modified_base (15)..(15): 5-methyl modified nucleotide
  modified_base (16)..(16): bicyclic nucleic acid (BNA)
ccagucgguaaguuct

SEQ ID NO: 16421 - RNA, 15 nt, Artificial Sequence
  source: /note="Description of Artificial Sequence: Synthetic oligonucleotide"
  source: /note="RNA"
  source: /note="5' tri-ethylene glycol (TEG)"
  modified_base (1)..(1): 5-methyl bicyclic nucleic acid
  modified_base (2)..(2): 5-methyl modified nucleotide
  modified_base (6)..(6): 5-methyl modified nucleotide
  modified_base (15)..(15): 5-methyl bicyclic nucleic acid
ccagucgguaaguuc

SEQ ID NO: 16422 - DNA, 14 bp, Artificial Sequence
  source: /note="Description of Artificial Sequence: Synthetic oligonucleotide"
  source: /note="Description of Combined DNA/RNA Molecule: Synthetic oligonucleotide"
  source: /note="DNA/RNA"
  source: /note="5' tri-ethylene glycol (TEG)"
  modified_base (1)..(1): 5-methyl bicyclic nucleic acid
  modified_base (2)..(2): 5-methyl modified nucleotide
  modified_base (6)..(6): 5-methyl modified nucleotide
  modified_base (14)..(14): bicyclic nucleic acid (BNA)
ccagucgguaagut

SEQ ID NO: 16423 - DNA, 13 bp, Artificial Sequence
  source: /note="Description of Artificial Sequence: Synthetic oligonucleotide"
  source: /note="Description of Combined DNA/RNA Molecule: Synthetic oligonucleotide"
  source: /note="DNA/RNA"
  source: /note="5' tri-ethylene glycol (TEG)"
  modified_base (1)..(1): 5-methyl bicyclic nucleic acid
  modified_base (2)..(2): 5-methyl modified nucleotide
  modified_base (6)..(6): 5-methyl modified nucleotide
  modified_base (13)..(13): bicyclic nucleic acid (BNA)
ccagucgguaagt

SEQ ID NO: 16424 - RNA, 20 nt, Artificial Sequence
  source: /note="Description of Artificial Sequence: Synthetic oligonucleotide"
  source: /note="RNA"
  source: /note="5' tri-ethylene glycol (TEG)"
  modified_base (1)..(1): bicyclic nucleic acid (BNA)
  modified_base (2)..(2): 5-methyl modified nucleotide
  modified_base (3)..(3): 5-methyl modified nucleotide
  modified_base (7)..(7): 5-methyl modified nucleotide
  modified_base (16)..(16): 5-methyl modified nucleotide
  modified_base (20)..(20): 5-methyl bicyclic nucleic acid
gccagucgguaaguucuguc

SEQ ID NO: 16425 - DNA, 19 bp, Artificial Sequence
  source: /note="Description of Artificial Sequence: Synthetic oligonucleotide"
  source: /note="Description of Combined DNA/RNA Molecule: Synthetic oligonucleotide"
  source: /note="DNA/RNA"
  source: /note="5' tri-ethylene glycol (TEG)"
  modified_base (1)..(1): bicyclic nucleic acid (BNA)
  modified_base (2)..(2): 5-methyl modified nucleotide
  modified_base (3)..(3): 5-methyl modified nucleotide
  modified_base (7)..(7): 5-methyl modified nucleotide
  modified_base (16)..(16): 5-methyl modified nucleotide
  modified_base (19)..(19): bicyclic nucleic acid (BNA)
gccagucgguaaguucugt

SEQ ID NO: 16426 - RNA, 18 nt, Artificial Sequence
  source: /note="Description of Artificial Sequence: Synthetic oligonucleotide"
  source: /note="RNA"
  source: /note="5' tri-ethylene glycol (TEG)"
  modified_base (1)..(1): bicyclic nucleic acid (BNA)
  modified_base (2)..(2): 5-methyl modified nucleotide
  modified_base (3)..(3): 5-methyl modified nucleotide
  modified_base (7)..(7): 5-methyl modified nucleotide
  modified_base (16)..(16): 5-methyl modified nucleotide
  modified_base (18)..(18): bicyclic nucleic acid (BNA)
gccagucgguaaguucug

SEQ ID NO: 16427 - DNA, 17 bp, Artificial Sequence
  source: /note="Description of Artificial Sequence: Synthetic oligonucleotide"
  source: /note="Description of Combined DNA/RNA Molecule: Synthetic oligonucleotide"
  source: /note="DNA/RNA"
  source: /note="5' tri-ethylene glycol (TEG)"
  modified_base (1)..(1): bicyclic nucleic acid (BNA)
  modified_base (2)..(2): 5-methyl modified nucleotide
  modified_base (3)..(3): 5-methyl modified nucleotide
  modified_base (7)..(7): 5-methyl modified nucleotide
  modified_base (16)..(16): 5-methyl modified nucleotide
  modified_base (17)..(17): bicyclic nucleic acid (BNA)
gccagucgguaaguuct

SEQ ID NO: 16428 - RNA, 16 nt, Artificial Sequence
  source: /note="Description of Artificial Sequence: Synthetic oligonucleotide"
  source: /note="RNA"
  source: /note="5' tri-ethylene glycol (TEG)"
  modified_base (1)..(1): bicyclic nucleic acid (BNA)
  modified_base (2)..(2): 5-methyl modified nucleotide
  modified_base (3)..(3): 5-methyl modified nucleotide
  modified_base (7)..(7): 5-methyl modified nucleotide
  modified_base (16)..(16): 5-methyl bicyclic nucleic acid
gccagucgguaaguuc

SEQ ID NO: 16429 - DNA, 15 bp, Artificial Sequence
  source: /note="Description of Artificial Sequence: Synthetic oligonucleotide"
  source: /note="Description of Combined DNA/RNA Molecule: Synthetic oligonucleotide"
  source: /note="DNA/RNA"
  source: /note="5' tri-ethylene glycol (TEG)"
  modified_base (1)..(1): bicyclic nucleic acid (BNA)
  modified_base (2)..(2): 5-methyl modified nucleotide
  modified_base (3)..(3): 5-methyl modified nucleotide
  modified_base (7)..(7): 5-methyl modified nucleotide
  modified_base (15)..(15): bicyclic nucleic acid (BNA)
gccagucgguaagut

SEQ ID NO: 16430 - DNA, 14 bp, Artificial Sequence
  source: /note="Description of Artificial Sequence: Synthetic oligonucleotide"
  source: /note="Description of Combined DNA/RNA Molecule: Synthetic oligonucleotide"
  source: /note="DNA/RNA"
  source: /note="5' tri-ethylene glycol (TEG)"
  modified_base (1)..(1): bicyclic nucleic acid (BNA)
  modified_base (2)..(2): 5-methyl modified nucleotide
  modified_base (3)..(3): 5-methyl modified nucleotide
  modified_base (7)..(7): 5-methyl modified nucleotide
  modified_base (14)..(14): bicyclic nucleic acid (BNA)
gccagucgguaagt

SEQ ID NO: 16431 - DNA, 20 bp, Artificial Sequence
  source: /note="Description of Artificial Sequence: Synthetic oligonucleotide"
  source: /note="Description of Combined DNA/RNA Molecule: Synthetic oligonucleotide"
  source: /note="DNA/RNA"
  source: /note="5' tri-ethylene glycol (TEG)"
  modified_base (1)..(1): bicyclic nucleic acid (BNA)
  modified_base (2)..(2): 5-methyl modified nucleotide
  modified_base (14)..(14): 5-methyl modified nucleotide
  modified_base (19)..(19): 5-methyl modified nucleotide
  modified_base (20)..(20): bicyclic nucleic acid (BNA)
tcaaggaagauggcauuuct

SEQ ID NO: 16432 - DNA, 22 bp, Artificial Sequence
  source: /note="Description of Artificial Sequence: Synthetic oligonucleotide"
  source: /note="Description of Combined DNA/RNA Molecule: Synthetic oligonucleotide"
  source: /note="DNA/RNA"
  source: /note="5' tri-ethylene glycol (TEG)"
  modified_base (1)..(1): bicyclic nucleic acid (BNA)
  modified_base (2)..(2): 5-methyl modified nucleotide
  modified_base (14)..(14): 5-methyl modified nucleotide
  modified_base (19)..(19): 5-methyl modified nucleotide
  modified_base (22)..(22): bicyclic nucleic acid (BNA)
tcaaggaagauggcauuucuag

SEQ ID NO: 16433 - DNA, 16 bp, Artificial Sequence
  source: /note="Description of Artificial Sequence: Synthetic oligonucleotide"
  source: /note="Description of Combined DNA/RNA Molecule: Synthetic oligonucleotide"
  source: /note="DNA/RNA"
  source: /note="5' tri-ethylene glycol (TEG)"
  modified_base (1)..(1): bicyclic nucleic acid (BNA)
  modified_base (2)..(2): 5-methyl modified nucleotide
  modified_base (14)..(14): 5-methyl modified nucleotide
  modified_base (16)..(16): bicyclic nucleic acid (BNA)
tcaaggaagauggcat

SEQ ID NO: 16434 - DNA, 15 bp, Artificial Sequence
  source: /note="Description of Artificial Sequence: Synthetic oligonucleotide"
  source: /note="Description of Combined DNA/RNA Molecule: Synthetic oligonucleotide"
  source: /note="DNA/RNA"
  source: /note="5' tri-ethylene glycol (TEG)"
  modified_base (1)..(1): bicyclic nucleic acid (BNA)
  modified_base (9)..(9): 5-methyl modified nucleotide
  modified_base (14)..(14): 5-methyl modified nucleotide
  modified_base (15)..(15): bicyclic nucleic acid (BNA)
gaagauggcauuuct

SEQ ID NO: 16435 - DNA, 21 bp, Artificial Sequence
  source: /note="Description of Artificial Sequence: Synthetic oligonucleotide"
  source: /note="Description of Combined DNA/RNA Molecule: Synthetic oligonucleotide"
  source: /note="DNA/RNA"
  source: /note="5' tri-ethylene glycol (TEG)"
  modified_base (1)..(1): bicyclic nucleic acid (BNA)
  modified_base (2)..(2): 5-methyl modified nucleotide
  modified_base (14)..(14): 5-methyl modified nucleotide
  modified_base (19)..(19): 5-methyl modified nucleotide
  modified_base (21)..(21): bicyclic nucleic acid (BNA)
tcaaggaagauggcauuucua

SEQ ID NO: 16436 - DNA, 19 bp, Artificial Sequence
  source: /note="Description of Artificial Sequence: Synthetic oligonucleotide"
  source: /note="Description of Combined DNA/RNA Molecule: Synthetic oligonucleotide"
  source: /note="DNA/RNA"
  source: /note="5' tri-ethylene glycol (TEG)"
  modified_base (1)..(1): bicyclic nucleic acid (BNA)
  modified_base (2)..(2): 5-methyl modified nucleotide
  modified_base (14)..(14): 5-methyl modified nucleotide
  modified_base (19)..(19): 5-methyl bicyclic nucleic acid
tcaaggaagauggcauuuc

SEQ ID NO: 16437 - DNA, 18 bp, Artificial Sequence
  source: /note="Description of Artificial Sequence: Synthetic oligonucleotide"
  source: /note="Description of Combined DNA/RNA Molecule: Synthetic oligonucleotide"
  source: /note="DNA/RNA"
  source: /note="5' tri-ethylene glycol (TEG)"
  modified_base (1)..(1): bicyclic nucleic acid (BNA)
  modified_base (2)..(2): 5-methyl modified nucleotide
  modified_base (14)..(14): 5-methyl modified nucleotide
  modified_base (18)..(18): bicyclic nucleic acid (BNA)
tcaaggaagauggcauut

SEQ ID NO: 16438 - DNA, 17 bp, Artificial Sequence
  source: /note="Description of Artificial Sequence: Synthetic oligonucleotide"
  source: /note="Description of Combined DNA/RNA Molecule: Synthetic oligonucleotide"
  source: /note="DNA/RNA"
  source: /note="5' tri-ethylene glycol (TEG)"
  modified_base (1)..(1): bicyclic nucleic acid (BNA)
  modified_base (2)..(2): 5-methyl modified nucleotide
  modified_base (14)..(14): 5-methyl modified nucleotide
  modified_base (17)..(17): bicyclic nucleic acid (BNA)
tcaaggaagauggcaut

SEQ ID NO: 16439 - DNA, 15 bp, Artificial Sequence
  source: /note="Description of Artificial Sequence: Synthetic oligonucleotide"
  source: /note="Description of Combined DNA/RNA Molecule: Synthetic oligonucleotide"
  source: /note="DNA/RNA"
  source: /note="5' tri-ethylene glycol (TEG)"
  modified_base (1)..(1): bicyclic nucleic acid (BNA)
  modified_base (2)..(2): 5-methyl modified nucleotide
  modified_base (14)..(14): 5-methyl modified nucleotide
  modified_base (15)..(15): bicyclic nucleic acid (BNA)
tcaaggaagauggca

SEQ ID NO: 16440 - DNA, 14 bp, Artificial Sequence
  source: /note="Description of Artificial Sequence: Synthetic oligonucleotide"
  source: /note="Description of Combined DNA/RNA Molecule: Synthetic oligonucleotide"
  source: /note="DNA/RNA"
  source: /note="5' tri-ethylene glycol (TEG)"
  modified_base (1)..(1): bicyclic nucleic acid (BNA)
  modified_base (2)..(2): 5-methyl modified nucleotide
  modified_base (14)..(14): 5-methyl bicyclic nucleic acid
tcaaggaagauggc

SEQ ID NO: 16441 - DNA, 13 bp, Artificial Sequence
  source: /note="Description of Artificial Sequence: Synthetic oligonucleotide"
  source: /note="Description of Combined DNA/RNA Molecule: Synthetic oligonucleotide"
  source: /note="DNA/RNA"
  source: /note="5' tri-ethylene glycol (TEG)"
  modified_base (1)..(1): bicyclic nucleic acid (BNA)
  modified_base (2)..(2): 5-methyl modified nucleotide
  modified_base (13)..(13): bicyclic nucleic acid (BNA)
tcaaggaagaugg

SEQ ID NO: 16442 - DNA, 12 bp, Artificial Sequence
  source: /note="Description of Artificial Sequence: Synthetic oligonucleotide"
  source: /note="Description of Combined DNA/RNA Molecule: Synthetic oligonucleotide"
  source: /note="DNA/RNA"
  source: /note="5' tri-ethylene glycol (TEG)"
  modified_base (1)..(1): bicyclic nucleic acid (BNA)
  modified_base (2)..(2): 5-methyl modified nucleotide
  modified_base (12)..(12): bicyclic nucleic acid (BNA)
tcaaggaagaug

SEQ ID NO: 16443 - DNA, 11 bp, Artificial Sequence
  source: /note="Description of Artificial Sequence: Synthetic oligonucleotide"
  source: /note="DNA/RNA"
  source: /note="5' tri-ethylene glycol (TEG)"
  modified_base (1)..(1): bicyclic nucleic acid (BNA)
  modified_base (2)..(2): 5-methyl modified nucleotide
  modified_base (11)..(11): bicyclic nucleic acid (BNA)
tcaaggaagat

SEQ ID NO: 16444 - DNA, 10 bp, Artificial Sequence
  source: /note="Description of Artificial Sequence: Synthetic oligonucleotide"
  source: /note="DNA/RNA"
  source: /note="5' tri-ethylene glycol (TEG)"
  modified_base (1)..(1): bicyclic nucleic acid (BNA)
  modified_base (2)..(2): 5-methyl modified nucleotide
  modified_base (10)..(10): bicyclic nucleic acid (BNA)
tcaaggaaga

SEQ ID NO: 16445 - DNA, 9 bp, Artificial Sequence
  source: /note="Description of Artificial Sequence: Synthetic oligonucleotide"
  source: /note="DNA/RNA"
  source: /note="5' tri-ethylene glycol (TEG)"
  modified_base (1)..(1): bicyclic nucleic acid (BNA)
  modified_base (2)..(2): 5-methyl modified nucleotide
  modified_base (9)..(9): bicyclic nucleic acid (BNA)
tcaaggaag

SEQ ID NO: 16446 - RNA, 21 nt, Artificial Sequence
  source: /note="Description of Artificial Sequence: Synthetic oligonucleotide"
  source: /note="RNA"
  source: /note="5' tri-ethylene glycol (TEG)"
  modified_base (1)..(1): 5-methyl bicyclic nucleic acid
  modified_base (13)..(13): 5-methyl modified nucleotide
  modified_base (18)..(18): 5-methyl modified nucleotide
  modified_base (21)..(21): bicyclic nucleic acid (BNA)
caaggaagauggcauuucuag

SEQ ID NO: 16447 - RNA, 20 nt, Artificial Sequence
  source: /note="Description of Artificial Sequence: Synthetic oligonucleotide"
  source: /note="RNA"
  source: /note="5' tri-ethylene glycol (TEG)"
  modified_base (1)..(1): 5-methyl bicyclic nucleic acid
  modified_base (13)..(13): 5-methyl modified nucleotide
  modified_base (18)..(18): 5-methyl modified nucleotide
  modified_base (20)..(20): bicyclic nucleic acid (BNA)
caaggaagauggcauuucua

SEQ ID NO: 16448 - DNA, 19 bp, Artificial Sequence
  source: /note="Description of Artificial Sequence: Synthetic oligonucleotide"
  source: /note="Description of Combined DNA/RNA Molecule: Synthetic oligonucleotide"
  source: /note="DNA/RNA"
  source: /note="5' tri-ethylene glycol (TEG)"
  modified_base (1)..(1): 5-methyl bicyclic nucleic acid
  modified_base (13)..(13): 5-methyl modified nucleotide
  modified_base (18)..(18): 5-methyl modified nucleotide
  modified_base (19)..(19): bicyclic nucleic acid (BNA)
caaggaagauggcauuuct

SEQ ID NO: 16449 - RNA, 18 nt, Artificial Sequence
  source: /note="Description of Artificial Sequence: Synthetic oligonucleotide"
  source: /note="RNA"
  source: /note="5' tri-ethylene glycol (TEG)"
  modified_base (1)..(1): 5-methyl bicyclic nucleic acid
  modified_base (13)..(13): 5-methyl modified nucleotide
  modified_base (18)..(18): 5-methyl bicyclic nucleic acid
caaggaagauggcauuuc

SEQ ID NO: 16450 - DNA, 17 bp, Artificial Sequence
  source: /note="Description of Artificial Sequence: Synthetic oligonucleotide"
  source: /note="Description of Combined DNA/RNA Molecule: Synthetic oligonucleotide"
  source: /note="DNA/RNA"
  source: /note="5' tri-ethylene glycol (TEG)"
  modified_base (1)..(1): 5-methyl bicyclic nucleic acid
  modified_base (13)..(13): 5-methyl modified nucleotide
  modified_base (17)..(17): bicyclic nucleic acid (BNA)
caaggaagauggcauut

SEQ ID NO: 16451 - DNA, 16 bp, Artificial Sequence
  source: /note="Description of Artificial Sequence: Synthetic oligonucleotide"
  source: /note="Description of Combined DNA/RNA Molecule: Synthetic oligonucleotide"
  source: /note="DNA/RNA"
  source: /note="5' tri-ethylene glycol (TEG)"
  modified_base (1)..(1): 5-methyl bicyclic nucleic acid
  modified_base (13)..(13): 5-methyl modified nucleotide
  modified_base (16)..(16): bicyclic nucleic acid (BNA)
caaggaagauggcaut

SEQ ID NO: 16452 - DNA, 15 bp, Artificial Sequence
  source: /note="Description of Artificial Sequence: Synthetic oligonucleotide"
  source: /note="Description of Combined DNA/RNA Molecule: Synthetic oligonucleotide"
  source: /note="DNA/RNA"
  source: /note="5' tri-ethylene glycol (TEG)"
  modified_base (1)..(1): 5-methyl bicyclic nucleic acid
  modified_base (13)..(13): 5-methyl modified nucleotide
  modified_base (15)..(15): bicyclic nucleic acid (BNA)
caaggaagauggcat

SEQ ID NO: 16453 - RNA, 14 nt, Artificial Sequence
  source: /note="Description of Artificial Sequence: Synthetic oligonucleotide"
  source: /note="RNA"
  source: /note="5' tri-ethylene glycol (TEG)"
  modified_base (1)..(1): 5-methyl bicyclic nucleic acid
  modified_base (13)..(13): 5-methyl modified nucleotide
  modified_base (14)..(14): bicyclic nucleic acid (BNA)
caaggaagauggca

SEQ ID NO: 16454 - RNA, 13 nt, Artificial Sequence
  source: /note="Description of Artificial Sequence: Synthetic oligonucleotide"
  source: /note="RNA"
  source: /note="5' tri-ethylene glycol (TEG)"
  modified_base (1)..(1): 5-methyl bicyclic nucleic acid
  modified_base (13)..(13): 5-methyl bicyclic nucleic acid
caaggaagauggc

SEQ ID NO: 16455 - RNA, 12 nt, Artificial Sequence
  source: /note="Description of Artificial Sequence: Synthetic oligonucleotide"
  source: /note="RNA"
  source: /note="5' tri-ethylene glycol (TEG)"
  modified_base (1)..(1): 5-methyl bicyclic nucleic acid
  modified_base (12)..(12): bicyclic nucleic acid (BNA)
caaggaagaugg

SEQ ID NO: 16456 - RNA, 11 nt, Artificial Sequence
  source: /note="Description of Artificial Sequence: Synthetic oligonucleotide"
  source: /note="RNA"
  source: /note="5' tri-ethylene glycol (TEG)"
  modified_base (1)..(1): 5-methyl bicyclic nucleic acid
  modified_base (11)..(11): bicyclic nucleic acid (BNA)
caaggaagaug

SEQ ID NO: 16457 - DNA, 10 bp, Artificial Sequence
  source: /note="Description of Artificial Sequence: Synthetic oligonucleotide"
  source: /note="DNA/RNA"
  source: /note="5' tri-ethylene glycol (TEG)"
  modified_base (1)..(1): 5-methyl bicyclic nucleic acid
  modified_base (10)..(10): bicyclic nucleic acid (BNA)
caaggaagat

SEQ ID NO: 16458 - RNA, 9 nt, Artificial Sequence
  source: /note="Description of Artificial Sequence: Synthetic oligonucleotide"
  source: /note="RNA/Antisense Oligonucleotide"
  source: /note="5' tri-ethylene glycol (TEG)"
  modified_base (1)..(1): 5-methyl bicyclic nucleic acid
  modified_base (9)..(9): bicyclic nucleic acid (BNA)
caaggaaga

SEQ ID NO: 16459 - RNA, 8 nt, Artificial Sequence
  source: /note="Description of Artificial Sequence: Synthetic oligonucleotide"
  source: /note="RNA/Antisense Oligonucleotide"
  source: /note="5' tri-ethylene glycol (TEG)"
  modified_base (1)..(1): 5-methyl bicyclic nucleic acid
  modified_base (8)..(8): bicyclic nucleic acid (BNA)
caaggaag

SEQ ID NO: 16460 - RNA, 20 nt, Artificial Sequence
  source: /note="Description of Artificial Sequence: Synthetic oligonucleotide"
  source: /note="RNA"
  source: /note="5' tri-ethylene glycol (TEG)"
  modified_base (1)..(1): bicyclic nucleic acid (BNA)
  modified_base (12)..(12): 5-methyl modified nucleotide
  modified_base (17)..(17): 5-methyl modified nucleotide
  modified_base (20)..(20): bicyclic nucleic acid (BNA)
aaggaagauggcauuucuag

SEQ ID NO: 16461 - RNA, 19 nt, Artificial Sequence
  source: /note="Description of Artificial Sequence: Synthetic oligonucleotide"
  source: /note="RNA"
  source: /note="5' tri-ethylene glycol (TEG)"
  modified_base (1)..(1): bicyclic nucleic acid (BNA)
  modified_base (12)..(12): 5-methyl modified nucleotide
  modified_base (17)..(17): 5-methyl modified nucleotide
  modified_base (19)..(19): bicyclic nucleic acid (BNA)
aaggaagauggcauuucua

SEQ ID NO: 16462 - DNA, 18 bp, Artificial Sequence
  source: /note="Description of Artificial Sequence: Synthetic oligonucleotide"
  source: /note="Description of Combined DNA/RNA Molecule: Synthetic oligonucleotide"
  source: /note="DNA/RNA"
  source: /note="5' tri-ethylene glycol (TEG)"
  modified_base (1)..(1): bicyclic nucleic acid (BNA)
  modified_base (12)..(12): 5-methyl modified nucleotide
  modified_base (17)..(17): 5-methyl modified nucleotide
  modified_base (18)..(18): bicyclic nucleic acid (BNA)
aaggaagauggcauuuct

SEQ ID NO: 16463 - RNA, 17 nt, Artificial Sequence
  source: /note="Description of Artificial Sequence: Synthetic oligonucleotide"
  source: /note="RNA"
  source: /note="5' tri-ethylene glycol (TEG)"
  modified_base (1)..(1): bicyclic nucleic acid (BNA)
  modified_base (12)..(12): 5-methyl modified nucleotide
  modified_base (17)..(17): 5-methyl bicyclic nucleic acid
aaggaagauggcauuuc

SEQ ID NO: 16464 - DNA, 16 bp, Artificial Sequence
  source: /note="Description of Artificial Sequence: Synthetic oligonucleotide"
  source: /note="Description of Combined DNA/RNA Molecule: Synthetic oligonucleotide"
  source: /note="DNA/RNA"
  source: /note="5' tri-ethylene glycol (TEG)"
  modified_base (1)..(1): bicyclic nucleic acid (BNA)
  modified_base (12)..(12): 5-methyl modified nucleotide
  modified_base (16)..(16): bicyclic nucleic acid (BNA)
aaggaagauggcauut

SEQ ID NO: 16465 - DNA, 15 bp, Artificial Sequence
  source: /note="Description of Artificial Sequence: Synthetic oligonucleotide"
  source: /note="Description of Combined DNA/RNA Molecule: Synthetic oligonucleotide"
  source: /note="DNA/RNA"
  source: /note="5' tri-ethylene glycol (TEG)"
  modified_base (1)..(1): bicyclic nucleic acid (BNA)
  modified_base (12)..(12): 5-methyl modified nucleotide
  modified_base (15)..(15): bicyclic nucleic acid (BNA)
aaggaagauggcaut

SEQ ID NO: 16466 - DNA, 14 bp, Artificial Sequence
  source: /note="Description of Artificial Sequence: Synthetic oligonucleotide"
  source: /note="Description of Combined DNA/RNA Molecule: Synthetic oligonucleotide"
  source: /note="DNA/RNA"
  source: /note="5' tri-ethylene glycol (TEG)"
  modified_base (1)..(1): bicyclic nucleic acid (BNA)
  modified_base (12)..(12): 5-methyl modified nucleotide
  modified_base (14)..(14): bicyclic nucleic acid (BNA)
aaggaagauggcat

SEQ ID NO: 16467 - RNA, 13 nt, Artificial Sequence
  source: /note="Description of Artificial Sequence: Synthetic oligonucleotide"
  source: /note="RNA"
  source: /note="5' tri-ethylene glycol (TEG)"
  modified_base (1)..(1): bicyclic nucleic acid (BNA)
  modified_base (12)..(12): 5-methyl modified nucleotide
  modified_base (13)..(13): bicyclic nucleic acid (BNA)
aaggaagauggca

SEQ ID NO: 16468 - RNA, 12 nt, Artificial Sequence
  source: /note="Description of Artificial Sequence: Synthetic oligonucleotide"
  source: /note="RNA"
  source: /note="5' tri-ethylene glycol (TEG)"
  modified_base (1)..(1): bicyclic nucleic acid (BNA)
  modified_base (12)..(12): 5-methyl bicyclic nucleic acid
aaggaagauggc

SEQ ID NO: 16469 - RNA, 11 nt, Artificial Sequence
  source: /note="Description of Artificial Sequence: Synthetic oligonucleotide"
  source: /note="RNA"
  source: /note="5' tri-ethylene glycol (TEG)"
  modified_base (1)..(1): bicyclic nucleic acid (BNA)
  modified_base (11)..(11): bicyclic nucleic acid (BNA)
aaggaagaugg

SEQ ID NO: 16470 - RNA, 10 nt, Artificial Sequence
  source: /note="Description of Artificial Sequence: Synthetic oligonucleotide"
  source: /note="RNA"
  source: /note="5' tri-ethylene glycol (TEG)"
  modified_base (1)..(1): bicyclic nucleic acid (BNA)
  modified_base (10)..(10): bicyclic nucleic acid (BNA)
aaggaagaug

SEQ ID NO: 16471 - DNA, 9 bp, Artificial Sequence
  source: /note="Description of Artificial Sequence: Synthetic oligonucleotide"
  source: /note="DNA/RNA"
  source: /note="5' tri-ethylene glycol (TEG)"
  modified_base (1)..(1): bicyclic nucleic acid (BNA)
  modified_base (9)..(9): bicyclic nucleic acid (BNA)
aaggaagat

SEQ ID NO: 16472 - RNA, 8 nt, Artificial Sequence
  source: /note="Description of Artificial Sequence: Synthetic oligonucleotide"
  source: /note="RNA/Antisense Oligonucleotide"
  source: /note="5' tri-ethylene glycol (TEG)"
  modified_base (1)..(1): bicyclic nucleic acid (BNA)
  modified_base (8)..(8): bicyclic nucleic acid (BNA)
aaggaaga

SEQ ID NO: 16473 - RNA, 19 nt, Artificial Sequence
  source: /note="Description of Artificial Sequence: Synthetic oligonucleotide"
  source: /note="RNA"
  source: /note="5' tri-ethylene glycol (TEG)"
  modified_base (1)..(1): bicyclic nucleic acid (BNA)
  modified_base (11)..(11): 5-methyl modified nucleotide
  modified_base (16)..(16): 5-methyl modified nucleotide
  modified_base (19)..(19): bicyclic nucleic acid (BNA)
aggaagauggcauuucuag

SEQ ID NO: 16474 - RNA, 18 nt, Artificial Sequence
  source: /note="Description of Artificial Sequence: Synthetic oligonucleotide"
  source: /note="RNA"
  source: /note="5' tri-ethylene glycol (TEG)"
  modified_base (1)..(1): bicyclic nucleic acid (BNA)
  modified_base (11)..(11): 5-methyl modified nucleotide
  modified_base (16)..(16): 5-methyl modified nucleotide
  modified_base (18)..(18): bicyclic nucleic acid (BNA)
aggaagauggcauuucua

SEQ ID NO: 16475 - DNA, 17 bp, Artificial Sequence
  source: /note="Description of Artificial Sequence: Synthetic oligonucleotide"
  source: /note="Description of Combined DNA/RNA Molecule: Synthetic oligonucleotide"
  source: /note="DNA/RNA"
  source: /note="5' tri-ethylene glycol (TEG)"
  modified_base (1)..(1): bicyclic nucleic acid (BNA)
  modified_base (11)..(11): 5-methyl modified nucleotide
  modified_base (16)..(16): 5-methyl modified nucleotide
  modified_base (17)..(17): bicyclic nucleic acid (BNA)
aggaagauggcauuuct

SEQ ID NO: 16476 - RNA, 16 nt, Artificial Sequence
  source: /note="Description of Artificial Sequence: Synthetic oligonucleotide"
  source: /note="RNA"
  source: /note="5' tri-ethylene glycol (TEG)"
  modified_base (1)..(1): bicyclic nucleic acid (BNA)
  modified_base (11)..(11): 5-methyl modified nucleotide
  modified_base (16)..(16): 5-methyl bicyclic nucleic acid
aggaagauggcauuuc

SEQ ID NO: 16477 - DNA, 15 bp, Artificial Sequence
  source: /note="Description of Artificial Sequence: Synthetic oligonucleotide"
  source: /note="Description of Combined DNA/RNA Molecule: Synthetic oligonucleotide"
  source: /note="DNA/RNA"
  source: /note="5' tri-ethylene glycol (TEG)"
  modified_base (1)..(1): bicyclic nucleic acid (BNA)
  modified_base (11)..(11): 5-methyl modified nucleotide
  modified_base (15)..(15): bicyclic nucleic acid (BNA)
aggaagauggcauut

SEQ ID NO: 16478 - DNA, 14 bp, Artificial Sequence
  source: /note="Description of Artificial Sequence: Synthetic oligonucleotide"
  source: /note="Description of Combined DNA/RNA Molecule: Synthetic oligonucleotide"
  source: /note="DNA/RNA"
  source: /note="5' tri-ethylene glycol (TEG)"
  modified_base (1)..(1): bicyclic nucleic acid (BNA)
  modified_base (11)..(11): 5-methyl modified nucleotide
  modified_base (14)..(14): bicyclic nucleic acid (BNA)
aggaagauggcaut

SEQ ID NO: 16479 - DNA, 13 bp, Artificial Sequence
  source: /note="Description of Artificial Sequence: Synthetic oligonucleotide"
  source: /note="Description of Combined DNA/RNA Molecule: Synthetic oligonucleotide"
  source: /note="DNA/RNA"
  source: /note="5' tri-ethylene glycol (TEG)"
  modified_base (1)..(1): bicyclic nucleic acid (BNA)
  modified_base (11)..(11): 5-methyl modified nucleotide
  modified_base (13)..(13): bicyclic nucleic acid (BNA)
aggaagauggcat

SEQ ID NO: 16480 - RNA, 12 nt, Artificial Sequence
  source: /note="Description of Artificial Sequence: Synthetic oligonucleotide"
  source: /note="RNA"
  source: /note="5' tri-ethylene glycol (TEG)"
  modified_base (1)..(1): bicyclic nucleic acid (BNA)
  modified_base (11)..(11): 5-methyl modified nucleotide
  modified_base (12)..(12): bicyclic nucleic acid (BNA)
aggaagauggca

SEQ ID NO: 16481 - RNA, 10 nt, Artificial Sequence
  source: /note="Description of Artificial Sequence: Synthetic oligonucleotide"
  source: /note="RNA"
  source: /note="5' tri-ethylene glycol (TEG)"
  modified_base (1)..(1): bicyclic nucleic acid (BNA)
  modified_base (10)..(10): bicyclic nucleic acid (BNA)
aggaagaugg

SEQ ID NO: 16482 - RNA, 9 nt, Artificial Sequence
  source: /note="Description of Artificial Sequence: Synthetic oligonucleotide"
  source: /note="RNA"
  source: /note="5' tri-ethylene glycol (TEG)"
  modified_base (1)..(1): bicyclic nucleic acid (BNA)
  modified_base (9)..(9): bicyclic nucleic acid (BNA)
aggaagaug

SEQ ID NO: 16483 - DNA, 8 bp, Artificial Sequence
  source: /note="Description of Artificial Sequence: Synthetic oligonucleotide"
  source: /note="DNA/RNA"
  source: /note="5' tri-ethylene glycol (TEG)"
  modified_base (1)..(1): bicyclic nucleic acid (BNA)
  modified_base (8)..(8): bicyclic nucleic acid (BNA)
aggaagat

SEQ ID NO: 16484 - RNA, 18 nt, Artificial Sequence
  source: /note="Description of Artificial Sequence: Synthetic oligonucleotide"
  source: /note="RNA"
  source: /note="5' tri-ethylene glycol (TEG)"
  modified_base (1)..(1): bicyclic nucleic acid (BNA)
  modified_base (10)..(10): 5-methyl modified nucleotide
  modified_base (15)..(15): 5-methyl modified nucleotide
  modified_base (18)..(18): bicyclic nucleic acid (BNA)
ggaagauggcauuucuag

SEQ ID NO: 16485 - RNA, 17 nt, Artificial Sequence
  source: /note="Description of Artificial Sequence: Synthetic oligonucleotide"
  source: /note="RNA"
  source: /note="5' tri-ethylene glycol (TEG)"
  modified_base (1)..(1): bicyclic nucleic acid (BNA)
  modified_base (10)..(10): 5-methyl modified nucleotide
  modified_base (15)..(15): 5-methyl modified nucleotide
  modified_base (17)..(17): bicyclic nucleic acid (BNA)
ggaagauggcauuucua

SEQ ID NO: 16486 - DNA, 16 bp, Artificial Sequence
  source: /note="Description of Artificial Sequence: Synthetic oligonucleotide"
  source: /note="Description of Combined DNA/RNA Molecule: Synthetic oligonucleotide"
  source: /note="DNA/RNA"
  source: /note="5' tri-ethylene glycol (TEG)"
  modified_base (1)..(1): bicyclic nucleic acid (BNA)
  modified_base (10)..(10): 5-methyl modified nucleotide
  modified_base (15)..(15): 5-methyl modified nucleotide
  modified_base (16)..(16): bicyclic nucleic acid (BNA)
ggaagauggcauuuct

SEQ ID NO: 16487 - RNA, 15 nt, Artificial Sequence
  source: /note="Description of Artificial Sequence: Synthetic oligonucleotide"
  source: /note="RNA"
  source: /note="5' tri-ethylene glycol (TEG)"
  modified_base (1)..(1): bicyclic nucleic acid (BNA)
  modified_base (10)..(10): 5-methyl modified nucleotide
  modified_base (15)..(15): 5-methyl bicyclic nucleic acid
ggaagauggcauuuc

SEQ ID NO: 16488 - DNA, 14 bp, Artificial Sequence
  source: /note="Description of Artificial Sequence: Synthetic oligonucleotide"
  source: /note="Description of Combined DNA/RNA Molecule: Synthetic oligonucleotide"
  source: /note="DNA/RNA"
  source: /note="5' tri-ethylene glycol (TEG)"
  modified_base (1)..(1): bicyclic nucleic acid (BNA)
  modified_base (10)..(10): 5-methyl modified nucleotide
  modified_base (14)..(14): bicyclic nucleic acid (BNA)
ggaagauggcauut

SEQ ID NO: 16489 - DNA, 13 bp, Artificial Sequence
  source: /note="Description of Artificial Sequence: Synthetic oligonucleotide"
  source: /note="Description of Combined DNA/RNA Molecule: Synthetic oligonucleotide"
  source: /note="DNA/RNA"
  source: /note="5' tri-ethylene glycol (TEG)"
  modified_base (1)..(1): bicyclic nucleic acid (BNA)
  modified_base (10)..(10): 5-methyl modified nucleotide
  modified_base (13)..(13): bicyclic nucleic acid (BNA)
ggaagauggcaut

SEQ ID NO: 16490 - DNA, 12 bp, Artificial Sequence
  source: /note="Description of Artificial Sequence: Synthetic oligonucleotide"
  source: /note="Description of Combined DNA/RNA Molecule: Synthetic oligonucleotide"
  source: /note="DNA/RNA"
  source: /note="5' tri-ethylene glycol (TEG)"
  modified_base (1)..(1): bicyclic nucleic acid (BNA)
  modified_base (10)..(10): 5-methyl modified nucleotide
  modified_base (12)..(12): bicyclic nucleic acid (BNA)
ggaagauggcat

SEQ ID NO: 16491 - RNA, 11 nt, Artificial Sequence
  source: /note="Description of Artificial Sequence: Synthetic oligonucleotide"
  source: /note="RNA"
  source: /note="5' tri-ethylene glycol (TEG)"
  modified_base (1)..(1): bicyclic nucleic acid (BNA)
  modified_base (10)..(10): 5-methyl modified nucleotide
  modified_base (11)..(11): bicyclic nucleic acid (BNA)
ggaagauggca

SEQ ID NO: 16492 - RNA, 10 nt, Artificial Sequence
  source: /note="Description of Artificial Sequence: Synthetic oligonucleotide"
  source: /note="RNA"
  source: /note="5' tri-ethylene glycol (TEG)"
  modified_base (1)..(1): bicyclic nucleic acid (BNA)
  modified_base (10)..(10): 5-methyl bicyclic nucleic acid
ggaagauggc

SEQ ID NO: 16493 - RNA, 8 nt, Artificial Sequence
  source: /note="Description of Artificial Sequence: Synthetic oligonucleotide"
  source: /note="RNA"
  source: /note="5' tri-ethylene glycol (TEG)"
  modified_base (1)..(1): bicyclic nucleic acid (BNA)
  modified_base (8)..(8): bicyclic nucleic acid (BNA)
ggaagaug

SEQ ID NO: 16494 - RNA, 17 nt, Artificial Sequence
  source: /note="Description of Artificial Sequence: Synthetic oligonucleotide"
  source: /note="RNA"
  source: /note="5' tri-ethylene glycol (TEG)"
  modified_base (1)..(1): bicyclic nucleic acid (BNA)
  modified_base (9)..(9): 5-methyl modified nucleotide
  modified_base (14)..(14): 5-methyl modified nucleotide
  modified_base (17)..(17): bicyclic nucleic acid (BNA)
gaagauggcauuucuag

SEQ ID NO: 16495 - RNA, 16 nt, Artificial Sequence
  source: /note="Description of Artificial Sequence: Synthetic oligonucleotide"
  source: /note="RNA"
  source: /note="5' tri-ethylene glycol (TEG)"
  modified_base (1)..(1): bicyclic nucleic acid (BNA)
  modified_base (9)..(9): 5-methyl modified nucleotide
  modified_base (14)..(14): 5-methyl modified nucleotide
  modified_base (16)..(16): bicyclic nucleic acid (BNA)
gaagauggcauuucua

SEQ ID NO: 16496 - RNA, 14 nt, Artificial Sequence
  source: /note="Description of Artificial Sequence: Synthetic oligonucleotide"
  source: /note="RNA"
  source: /note="5' tri-ethylene glycol (TEG)"
  modified_base (1)..(1): bicyclic nucleic acid (BNA)
  modified_base (9)..(9): 5-methyl modified nucleotide
  modified_base (14)..(14): 5-methyl bicyclic nucleic acid
gaagauggcauuuc

SEQ ID NO: 16497 - DNA, 13 bp, Artificial Sequence
  source: /note="Description of Artificial Sequence: Synthetic oligonucleotide"
  source: /note="Description of Combined DNA/RNA Molecule: Synthetic oligonucleotide"
  source: /note="DNA/RNA"
  source: /note="5' tri-ethylene glycol (TEG)"
  modified_base (1)..(1): bicyclic nucleic acid (BNA)
  modified_base (9)..(9): 5-methyl modified nucleotide
  modified_base (13)..(13): bicyclic nucleic acid (BNA)
gaagauggcauut

SEQ ID NO: 16498 - DNA, 12 bp, Artificial Sequence
  source: /note="Description of Artificial Sequence: Synthetic oligonucleotide"
  source: /note="Description of Combined DNA/RNA Molecule: Synthetic oligonucleotide"
  source: /note="DNA/RNA"
  source: /note="5' tri-ethylene glycol (TEG)"
  modified_base (1)..(1): bicyclic nucleic acid (BNA)
  modified_base (9)..(9): 5-methyl modified nucleotide
  modified_base (12)..(12): bicyclic nucleic acid (BNA)
gaagauggcaut

SEQ ID NO: 16499 - DNA, 11 bp, Artificial Sequence
  source: /note="Description of Artificial Sequence: Synthetic oligonucleotide"
  source: /note="Description of Combined DNA/RNA Molecule: Synthetic oligonucleotide"
  source: /note="DNA/RNA"
  source: /note="5' tri-ethylene glycol (TEG)"
  modified_base (1)..(1): bicyclic nucleic acid (BNA)
  modified_base (9)..(9): 5-methyl modified nucleotide
  modified_base (11)..(11): bicyclic nucleic acid (BNA)
gaagauggcat

SEQ ID NO: 16500 - RNA, 10 nt, Artificial Sequence
  source: /note="Description of Artificial Sequence: Synthetic oligonucleotide"
  source: /note="RNA"
  source: /note="5' tri-ethylene glycol (TEG)"
  modified_base (1)..(1): bicyclic nucleic acid (BNA)
  modified_base (9)..(9): 5-methyl modified nucleotide
  modified_base (10)..(10): bicyclic nucleic acid (BNA)
gaagauggca

SEQ ID NO: 16501 - RNA, 9 nt, Artificial Sequence
  source: /note="Description of Artificial Sequence: Synthetic oligonucleotide"
  source: /note="RNA"
  source: /note="5' tri-ethylene glycol (TEG)"
  modified_base (1)..(1): bicyclic nucleic acid (BNA)
  modified_base (9)..(9): 5-methyl bicyclic nucleic acid
gaagauggc

SEQ ID NO: 16502 - RNA, 8 nt, Artificial Sequence
  source: /note="Description of Artificial Sequence: Synthetic oligonucleotide"
  source: /note="RNA"
  source: /note="5' tri-ethylene glycol (TEG)"
  modified_base (1)..(1): bicyclic nucleic acid (BNA)
  modified_base (8)..(8): bicyclic nucleic acid (BNA)
gaagaugg

SEQ ID NO: 16503 - RNA, 16 nt, Artificial Sequence
  source: /note="Description of Artificial Sequence: Synthetic oligonucleotide"
  source: /note="RNA"
  source: /note="5' tri-ethylene glycol (TEG)"
  modified_base (1)..(1): bicyclic nucleic acid (BNA)
  modified_base (8)..(8): 5-methyl modified nucleotide
  modified_base (13)..(13): 5-methyl modified nucleotide
  modified_base (16)..(16): bicyclic nucleic acid (BNA)
aagauggcauuucuag

SEQ ID NO: 16504 - RNA, 15 nt, Artificial Sequence
  source: /note="Description of Artificial Sequence: Synthetic oligonucleotide"
  source: /note="RNA"
  source: /note="5' tri-ethylene glycol (TEG)"
  modified_base (1)..(1): bicyclic nucleic acid (BNA)
  modified_base (8)..(8): 5-methyl modified nucleotide
  modified_base (13)..(13): 5-methyl modified nucleotide
  modified_base (15)..(15): bicyclic nucleic acid (BNA)
aagauggcauuucua

SEQ ID NO: 16505 - DNA, 14 bp, Artificial Sequence
  source: /note="Description of Artificial Sequence: Synthetic oligonucleotide"
  source: /note="Description of Combined DNA/RNA Molecule: Synthetic oligonucleotide"
  source: /note="DNA/RNA"
  source: /note="5' tri-ethylene glycol (TEG)"
  modified_base (1)..(1): bicyclic nucleic acid (BNA)
  modified_base (8)..(8): 5-methyl modified nucleotide
  modified_base (13)..(13): 5-methyl modified nucleotide
  modified_base (14)..(14): bicyclic nucleic acid (BNA)
aagauggcauuuct

SEQ ID NO: 16506 - RNA, 13 nt, Artificial Sequence
  source: /note="Description of Artificial Sequence: Synthetic oligonucleotide"
  source: /note="RNA"
  source: /note="5' tri-ethylene glycol (TEG)"
  modified_base (1)..(1): bicyclic nucleic acid (BNA)
  modified_base (8)..(8): 5-methyl modified nucleotide
  modified_base (13)..(13): 5-methyl bicyclic nucleic acid
aagauggcauuuc

SEQ ID NO: 16507 - DNA, 12 bp, Artificial Sequence
  source: /note="Description of Artificial Sequence: Synthetic oligonucleotide"
  source: /note="Description of Combined DNA/RNA Molecule: Synthetic oligonucleotide"
  source: /note="DNA/RNA"
  source: /note="5' tri-ethylene glycol (TEG)"
  modified_base (1)..(1): bicyclic nucleic acid (BNA)
  modified_base (8)..(8): 5-methyl modified nucleotide
  modified_base (12)..(12): bicyclic nucleic acid (BNA)
aagauggcauut

SEQ ID NO: 16508 - DNA, 11 bp, Artificial Sequence
  source: /note="Description of Artificial Sequence: Synthetic oligonucleotide"
  source: /note="Description of Combined DNA/RNA Molecule: Synthetic oligonucleotide"
  source: /note="DNA/RNA"
  source: /note="5' tri-ethylene glycol (TEG)"
  modified_base (1)..(1): bicyclic nucleic acid (BNA)
  modified_base (8)..(8): 5-methyl modified nucleotide
  modified_base (11)..(11): bicyclic nucleic acid (BNA)
aagauggcaut

SEQ ID NO: 16509 - DNA, 10 bp, Artificial Sequence
  source: /note="Description of Artificial Sequence: Synthetic oligonucleotide"
  source: /note="Description of Combined DNA/RNA Molecule: Synthetic oligonucleotide"
  source: /note="DNA/RNA"
  source: /note="5' tri-ethylene glycol (TEG)"
  modified_base (1)..(1): bicyclic nucleic acid (BNA)
  modified_base (8)..(8): 5-methyl modified nucleotide
  modified_base (10)..(10): bicyclic nucleic acid (BNA)
aagauggcat

SEQ ID NO: 16510 - RNA, 9 nt, Artificial Sequence
  source: /note="Description of Artificial Sequence: Synthetic oligonucleotide"
  source: /note="RNA"
  source: /note="5' tri-ethylene glycol (TEG)"
  modified_base (1)..(1): bicyclic nucleic acid (BNA)
  modified_base (8)..(8): 5-methyl modified nucleotide
  modified_base (9)..(9): bicyclic nucleic acid (BNA)
aagauggca

SEQ ID NO: 16511 - RNA, 8 nt, Artificial Sequence
  source: /note="Description of Artificial Sequence: Synthetic oligonucleotide"
  source: /note="RNA"
  source: /note="5' tri-ethylene glycol (TEG)"
  modified_base (1)..(1): bicyclic nucleic acid (BNA)
  modified_base (8)..(8): 5-methyl bicyclic nucleic acid
aagauggc

SEQ ID NO: 16512 - RNA, 15 nt, Artificial Sequence
  source: /note="Description of Artificial Sequence: Synthetic oligonucleotide"
  source: /note="RNA"
  source: /note="5' tri-ethylene glycol (TEG)"
  modified_base (1)..(1): bicyclic nucleic acid (BNA)
  modified_base (7)..(7): 5-methyl modified nucleotide
  modified_base (12)..(12): 5-methyl modified nucleotide
  modified_base (15)..(15): bicyclic nucleic acid (BNA)
agauggcauuucuag

SEQ ID NO: 16513 - RNA, 14 nt, Artificial Sequence
  source: /note="Description of Artificial Sequence: Synthetic oligonucleotide"
  source: /note="RNA"
  source: /note="5' tri-ethylene glycol (TEG)"
  modified_base (1)..(1): bicyclic nucleic acid (BNA)
  modified_base (7)..(7): 5-methyl modified nucleotide
  modified_base (12)..(12): 5-methyl modified nucleotide
  modified_base (14)..(14): bicyclic nucleic acid (BNA)
agauggcauuucua

SEQ ID NO: 16514 - DNA, 13 bp, Artificial Sequence
  source: /note="Description of Artificial Sequence: Synthetic oligonucleotide"
  source: /note="Description of Combined DNA/RNA Molecule: Synthetic oligonucleotide"
  source: /note="DNA/RNA"
  source: /note="5' tri-ethylene glycol (TEG)"
  modified_base (1)..(1): bicyclic nucleic acid (BNA)
  modified_base (7)..(7): 5-methyl modified nucleotide
  modified_base (12)..(12): 5-methyl modified nucleotide
  modified_base (13)..(13): bicyclic nucleic acid (BNA)
agauggcauuuct

SEQ ID NO: 16515 - RNA, 12 nt, Artificial Sequence
  source: /note="Description of Artificial Sequence: Synthetic oligonucleotide"
  source: /note="RNA"
  source: /note="5' tri-ethylene glycol (TEG)"
  modified_base (1)..(1): bicyclic nucleic acid (BNA)
  modified_base (7)..(7): 5-methyl modified nucleotide
  modified_base (12)..(12): 5-methyl bicyclic nucleic acid
agauggcauuuc

SEQ ID NO: 16516 - DNA, 11 bp, Artificial Sequence
  source: /note="Description of Artificial Sequence: Synthetic oligonucleotide"
  source: /note="Description of Combined DNA/RNA Molecule: Synthetic oligonucleotide"
  source: /note="DNA/RNA"
  source: /note="5' tri-ethylene glycol (TEG)"
  modified_base (1)..(1): bicyclic nucleic acid (BNA)
  modified_base (7)..(7): 5-methyl modified nucleotide
  modified_base (11)..(11): bicyclic nucleic acid (BNA)
agauggcauut

SEQ ID NO: 16517 - DNA, 10 bp, Artificial Sequence
  source: /note="Description of Artificial Sequence: Synthetic oligonucleotide"
  source: /note="Description of Combined DNA/RNA Molecule: Synthetic oligonucleotide"
  source: /note="DNA/RNA"
  source: /note="5' tri-ethylene glycol (TEG)"
  modified_base (1)..(1): bicyclic nucleic acid (BNA)
  modified_base (7)..(7): 5-methyl modified nucleotide
  modified_base (10)..(10): bicyclic nucleic acid (BNA)
agauggcaut

SEQ ID NO: 16518 - DNA, 9 bp, Artificial Sequence
  source: /note="Description of Artificial Sequence: Synthetic oligonucleotide"
  source: /note="Description of Combined DNA/RNA Molecule: Synthetic oligonucleotide"
  source: /note="DNA/RNA"
  source: /note="5' tri-ethylene glycol (TEG)"
  modified_base (1)..(1): bicyclic nucleic acid (BNA)
  modified_base (7)..(7): 5-methyl modified nucleotide
  modified_base (9)..(9): bicyclic nucleic acid (BNA)
agauggcat

SEQ ID NO: 16519 - RNA, 8 nt, Artificial Sequence
  source: /note="Description of Artificial Sequence: Synthetic oligonucleotide"
  source: /note="RNA"
  source: /note="5' tri-ethylene glycol (TEG)"
  modified_base (1)..(1): bicyclic nucleic acid (BNA)
  modified_base (7)..(7): 5-methyl modified nucleotide
  modified_base (8)..(8): bicyclic nucleic acid (BNA)
agauggca

SEQ ID NO: 16520 - RNA, 30 nt, Artificial Sequence; identical to SEQ ID NO: 284
  source: /note="Description of Artificial Sequence: Synthetic oligonucleotide"
  source: /note="RNA"
  source: /note="5' tri-ethylene glycol (TEG)"
  modified_base (1)..(1): 5-methyl bicyclic nucleic acid
  modified_base (3)..(3): 5-methyl modified nucleotide
  modified_base (4)..(4): 5-methyl modified nucleotide
  modified_base (7)..(7): 5-methyl modified nucleotide
  modified_base (10)..(10): 5-methyl modified nucleotide
  modified_base (22)..(22): 5-methyl modified nucleotide
  modified_base (27)..(27): 5-methyl modified nucleotide
  modified_base (30)..(30): bicyclic nucleic acid (BNA)

SEQ ID NO: 16521 - RNA, 29 nt, Artificial Sequence
  source: /note="Description of Artificial Sequence: Synthetic oligonucleotide"
  source: /note="RNA"
  source: /note="5' tri-ethylene glycol (TEG)"
  modified_base (1)..(1): 5-methyl bicyclic nucleic acid
  modified_base (3)..(3): 5-methyl modified nucleotide
  modified_base (4)..(4): 5-methyl modified nucleotide
  modified_base (7)..(7): 5-methyl modified nucleotide
  modified_base (10)..(10): 5-methyl modified nucleotide
  modified_base (22)..(22): 5-methyl modified nucleotide
  modified_base (27)..(27): 5-methyl modified nucleotide
  modified_base (29)..(29): bicyclic nucleic acid (BNA)
cuccaacaucaaggaagauggcauuucua

SEQ ID NO: 16522 - DNA, 28 bp, Artificial Sequence
  source: /note="Description of Artificial Sequence: Synthetic oligonucleotide"
  source: /note="Description of Combined DNA/RNA Molecule: Synthetic oligonucleotide"
  source: /note="DNA/RNA"
  source: /note="5' tri-ethylene glycol (TEG)"
  modified_base (1)..(1): 5-methyl bicyclic nucleic acid
  modified_base (3)..(3): 5-methyl modified nucleotide
  modified_base (4)..(4): 5-methyl modified nucleotide
  modified_base (7)..(7): 5-methyl modified nucleotide
  modified_base (10)..(10): 5-methyl modified nucleotide
  modified_base (22)..(22): 5-methyl modified nucleotide
  modified_base (27)..(27): 5-methyl modified nucleotide
  modified_base (28)..(28): bicyclic nucleic acid (BNA)
cuccaacaucaaggaagauggcauuuct

SEQ ID NO: 16523 - RNA, 27 nt, Artificial Sequence
  source: /note="Description of Artificial Sequence: Synthetic oligonucleotide"
  source: /note="RNA"
  source: /note="5' tri-ethylene glycol (TEG)"
  modified_base (1)..(1): 5-methyl bicyclic nucleic acid
  modified_base (3)..(3): 5-methyl modified nucleotide
  modified_base (4)..(4): 5-methyl modified nucleotide
  modified_base (7)..(7): 5-methyl modified nucleotide
  modified_base (10)..(10): 5-methyl modified nucleotide
  modified_base (22)..(22): 5-methyl modified nucleotide
  modified_base (27)..(27): 5-methyl bicyclic nucleic acid
cuccaacaucaaggaagauggcauuuc

SEQ ID NO: 16524 - DNA, 26 bp, Artificial Sequence
  source: /note="Description of Artificial Sequence: Synthetic oligonucleotide"
  source: /note="Description of Combined DNA/RNA Molecule: Synthetic oligonucleotide"
  source: /note="DNA/RNA"
  source: /note="5' tri-ethylene glycol (TEG)"
  modified_base (1)..(1): 5-methyl bicyclic nucleic acid
  modified_base (3)..(3): 5-methyl modified nucleotide
  modified_base (4)..(4): 5-methyl modified nucleotide
  modified_base (7)..(7): 5-methyl modified nucleotide
  modified_base (10)..(10): 5-methyl modified nucleotide
  modified_base (22)..(22): 5-methyl modified nucleotide
  modified_base (26)..(26): bicyclic nucleic acid (BNA)
cuccaacaucaaggaagauggcauut

SEQ ID NO: 16525 - DNA, 25 bp, Artificial Sequence
  source: /note="Description of Artificial Sequence: Synthetic oligonucleotide"
  source: /note="Description of Combined DNA/RNA Molecule: Synthetic oligonucleotide"
  source: /note="DNA/RNA"
  source: /note="5' tri-ethylene glycol (TEG)"
  modified_base (1)..(1): 5-methyl bicyclic nucleic acid
  modified_base (3)..(3): 5-methyl modified nucleotide
  modified_base (4)..(4): 5-methyl modified nucleotide
  modified_base (7)..(7): 5-methyl modified nucleotide
  modified_base (10)..(10): 5-methyl modified nucleotide
  modified_base (22)..(22): 5-methyl modified nucleotide
  modified_base (25)..(25): bicyclic nucleic acid (BNA)
cuccaacaucaaggaagauggcaut

SEQ ID NO: 16526 - DNA, 24 bp, Artificial Sequence
  source: /note="Description of Artificial Sequence: Synthetic oligonucleotide"
  source: /note="Description of Combined DNA/RNA Molecule: Synthetic oligonucleotide"
  source: /note="DNA/RNA"
  source: /note="5' tri-ethylene glycol (TEG)"
  modified_base (1)..(1): 5-methyl bicyclic nucleic acid
  modified_base (3)..(3): 5-methyl modified nucleotide
  modified_base (4)..(4): 5-methyl modified nucleotide
  modified_base (7)..(7): 5-methyl modified nucleotide
  modified_base (10)..(10): 5-methyl modified nucleotide
  modified_base (22)..(22): 5-methyl modified nucleotide
  modified_base (24)..(24): bicyclic nucleic acid (BNA)
cuccaacaucaaggaagauggcat

SEQ ID NO: 16527 - RNA, 23 nt, Artificial Sequence
  source: /note="Description of Artificial Sequence: Synthetic oligonucleotide"
  source: /note="RNA"
  source: /note="5' tri-ethylene glycol (TEG)"
  modified_base (1)..(1): 5-methyl bicyclic nucleic acid
  modified_base (3)..(3): 5-methyl modified nucleotide
  modified_base (4)..(4): 5-methyl modified nucleotide
  modified_base (7)..(7): 5-methyl modified nucleotide
  modified_base (10)..(10): 5-methyl modified nucleotide
  modified_base (22)..(22): 5-methyl modified nucleotide
  modified_base (23)..(23): bicyclic nucleic acid (BNA)
cuccaacaucaaggaagauggca

SEQ ID NO: 16528 - RNA, 22 nt, Artificial Sequence
  source: /note="Description of Artificial Sequence: Synthetic oligonucleotide"
  source: /note="RNA"
  source: /note="5' tri-ethylene glycol (TEG)"
  modified_base (1)..(1): 5-methyl bicyclic nucleic acid
  modified_base (3)..(3): 5-methyl modified nucleotide
  modified_base (4)..(4): 5-methyl modified nucleotide
  modified_base (7)..(7): 5-methyl modified nucleotide
  modified_base (10)..(10): 5-methyl modified nucleotide
  modified_base (22)..(22): 5-methyl bicyclic nucleic acid
cuccaacaucaaggaagauggc

SEQ ID NO: 16529 - RNA, 21 nt, Artificial Sequence
  source: /note="Description of Artificial Sequence: Synthetic oligonucleotide"
  source: /note="RNA"
  source: /note="5' tri-ethylene glycol (TEG)"
  modified_base (1)..(1): 5-methyl bicyclic nucleic acid
  modified_base (3)..(3): 5-methyl modified nucleotide
  modified_base (4)..(4): 5-methyl modified nucleotide
  modified_base (7)..(7): 5-methyl modified nucleotide
  modified_base (10)..(10): 5-methyl modified nucleotide
  modified_base (21)..(21): bicyclic nucleic acid (BNA)
cuccaacaucaaggaagaugg

SEQ ID NO: 16530 - RNA, 20 nt, Artificial Sequence
  source: /note="Description of Artificial Sequence: Synthetic oligonucleotide"
  source: /note="RNA"
  source: /note="5' tri-ethylene glycol (TEG)"
  modified_base (1)..(1): 5-methyl bicyclic nucleic acid
  modified_base (3)..(3): 5-methyl modified nucleotide
  modified_base (4)..(4): 5-methyl modified nucleotide
  modified_base (7)..(7): 5-methyl modified nucleotide
  modified_base (10)..(10): 5-methyl modified nucleotide
  modified_base (20)..(20): bicyclic nucleic acid (BNA)
cuccaacaucaaggaagaug

SEQ ID NO: 16531 - DNA, 19 bp, Artificial Sequence
  source: /note="Description of Artificial Sequence: Synthetic oligonucleotide"
  source: /note="Description of Combined DNA/RNA Molecule: Synthetic oligonucleotide"
  source: /note="DNA/RNA"
  source: /note="5' tri-ethylene glycol (TEG)"
  modified_base (1)..(1): 5-methyl bicyclic nucleic acid
  modified_base (3)..(3): 5-methyl modified nucleotide
  modified_base (4)..(4): 5-methyl modified nucleotide
  modified_base (7)..(7): 5-methyl modified nucleotide
  modified_base (10)..(10): 5-methyl modified nucleotide
  modified_base (19)..(19): bicyclic nucleic acid (BNA)
cuccaacaucaaggaagat

SEQ ID NO: 16532 - RNA, 18 nt, Artificial Sequence
  source: /note="Description of Artificial Sequence: Synthetic oligonucleotide"
  source: /note="RNA"
  source: /note="5' tri-ethylene glycol (TEG)"
  modified_base (1)..(1): 5-methyl bicyclic nucleic acid
  modified_base (3)..(3): 5-methyl modified nucleotide
  modified_base (4)..(4): 5-methyl modified nucleotide
  modified_base (7)..(7): 5-methyl modified nucleotide
  modified_base (10)..(10): 5-methyl modified nucleotide
  modified_base (18)..(18): bicyclic nucleic acid (BNA)
cuccaacaucaaggaaga

SEQ ID NO: 16533 - RNA, 17 nt, Artificial Sequence
  source: /note="Description of Artificial Sequence: Synthetic oligonucleotide"
  source: /note="RNA"
  source: /note="5' tri-ethylene glycol (TEG)"
  modified_base (1)..(1): 5-methyl bicyclic nucleic acid
  modified_base (3)..(3): 5-methyl modified nucleotide
  modified_base (4)..(4): 5-methyl modified nucleotide
  modified_base (7)..(7): 5-methyl modified nucleotide
  modified_base (10)..(10): 5-methyl modified nucleotide
  modified_base (17)..(17): bicyclic nucleic acid (BNA)
cuccaacaucaaggaag

SEQ ID NO: 16534 - DNA, 29 bp, Artificial Sequence
  source: /note="Description of Artificial Sequence: Synthetic oligonucleotide"
  source: /note="Description of Combined DNA/RNA Molecule: Synthetic oligonucleotide"
  source: /note="DNA/RNA"
  source: /note="5' tri-ethylene glycol (TEG)"
  modified_base (1)..(1): bicyclic nucleic acid (BNA)
  modified_base (2)..(2): 5-methyl modified nucleotide
  modified_base (3)..(3): 5-methyl modified nucleotide
  modified_base (6)..(6): 5-methyl modified nucleotide
  modified_base (9)..(9): 5-methyl modified nucleotide
  modified_base (21)..(21): 5-methyl modified nucleotide
  modified_base (26)..(26): 5-methyl modified nucleotide
  modified_base (29)..(29): bicyclic nucleic acid (BNA)
tccaacaucaaggaagauggcauuucuag

SEQ ID NO: 16535 - DNA, 28 bp, Artificial Sequence
  source: /note="Description of Artificial Sequence: Synthetic oligonucleotide"
  source: /note="Description of Combined DNA/RNA Molecule: Synthetic oligonucleotide"
  source: /note="DNA/RNA"
  source: /note="5' tri-ethylene glycol (TEG)"
  modified_base (1)..(1): bicyclic nucleic acid (BNA)
  modified_base (2)..(2): 5-methyl modified nucleotide
  modified_base (3)..(3): 5-methyl modified nucleotide
  modified_base (6)..(6): 5-methyl modified nucleotide
  modified_base (9)..(9): 5-methyl modified nucleotide
  modified_base (21)..(21): 5-methyl modified nucleotide
  modified_base (26)..(26): 5-methyl modified nucleotide
  modified_base (28)..(28): bicyclic nucleic acid (BNA)
tccaacaucaaggaagauggcauuucua

SEQ ID NO: 16536 - DNA, 27 bp, Artificial Sequence
  source: /note="Description of Artificial Sequence: Synthetic oligonucleotide"
  source: /note="Description of Combined DNA/RNA Molecule: Synthetic oligonucleotide"
  source: /note="DNA/RNA"
  source: /note="5' tri-ethylene glycol (TEG)"
  modified_base (1)..(1): bicyclic nucleic acid (BNA)
  modified_base (2)..(2): 5-methyl modified nucleotide
  modified_base (3)..(3): 5-methyl modified nucleotide
  modified_base (6)..(6): 5-methyl modified nucleotide
  modified_base (9)..(9): 5-methyl modified nucleotide
  modified_base (21)..(21): 5-methyl modified nucleotide
  modified_base (26)..(26): 5-methyl modified nucleotide
  modified_base (27)..(27): bicyclic nucleic acid (BNA)
tccaacaucaaggaagauggcauuuct

SEQ ID NO: 16537 - DNA, 26 bp, Artificial Sequence
  source: /note="Description of Artificial Sequence: Synthetic oligonucleotide"
  source: /note="Description of Combined DNA/RNA Molecule: Synthetic oligonucleotide"
  source: /note="DNA/RNA"
  source: /note="5' tri-ethylene glycol (TEG)"
  modified_base (1)..(1): bicyclic nucleic acid (BNA)
  modified_base (2)..(2): 5-methyl modified nucleotide
  modified_base (3)..(3): 5-methyl modified nucleotide
  modified_base (6)..(6): 5-methyl modified nucleotide
  modified_base (9)..(9): 5-methyl modified nucleotide
  modified_base (21)..(21): 5-methyl modified nucleotide
  modified_base (26)..(26): 5-methyl bicyclic nucleic acid
tccaacaucaaggaagauggcauuuc

SEQ ID NO: 16538 - DNA, 25 bp, Artificial Sequence
  source: /note="Description of Artificial Sequence: Synthetic oligonucleotide"
  source: /note="Description of Combined DNA/RNA Molecule: Synthetic oligonucleotide"
  source: /note="DNA/RNA"
  source: /note="5' tri-ethylene glycol (TEG)"
  modified_base (1)..(1): bicyclic nucleic acid (BNA)
  modified_base (2)..(2): 5-methyl modified nucleotide
  modified_base (3)..(3): 5-methyl modified nucleotide
  modified_base (6)..(6): 5-methyl modified nucleotide
  modified_base (9)..(9): 5-methyl modified nucleotide
  modified_base (21)..(21): 5-methyl modified nucleotide
  modified_base (25)..(25): bicyclic nucleic acid (BNA)
tccaacaucaaggaagauggcauut

SEQ ID NO: 16539 - DNA, 24 bp, Artificial Sequence
  source: /note="Description of Artificial Sequence: Synthetic oligonucleotide"
  source: /note="Description of Combined DNA/RNA Molecule: Synthetic oligonucleotide"
  source: /note="DNA/RNA"
  source: /note="5' tri-ethylene glycol (TEG)"
  modified_base (1)..(1): bicyclic nucleic acid (BNA)
  modified_base (2)..(2): 5-methyl modified nucleotide
  modified_base (3)..(3): 5-methyl modified nucleotide
  modified_base (6)..(6): 5-methyl modified nucleotide
  modified_base (9)..(9): 5-methyl modified nucleotide
  modified_base (21)..(21): 5-methyl modified nucleotide
  modified_base (24)..(24): bicyclic nucleic acid (BNA)
tccaacaucaaggaagauggcaut

SEQ ID NO: 16540 - DNA, 23 bp, Artificial Sequence
  source: /note="Description of Artificial Sequence: Synthetic oligonucleotide"
  source: /note="Description of Combined DNA/RNA Molecule: Synthetic oligonucleotide"
  source: /note="DNA/RNA"
  source: /note="5' tri-ethylene glycol (TEG)"
  modified_base (1)..(1): bicyclic nucleic acid (BNA)
  modified_base (2)..(2): 5-methyl modified nucleotide
  modified_base (3)..(3): 5-methyl modified nucleotide
  modified_base (6)..(6): 5-methyl modified nucleotide
  modified_base (9)..(9): 5-methyl modified nucleotide
  modified_base (21)..(21): 5-methyl modified nucleotide
  modified_base (23)..(23): bicyclic nucleic acid (BNA)
tccaacaucaaggaagauggcat

SEQ ID NO: 16541 - DNA, 22 bp, Artificial Sequence
  source: /note="Description of Artificial Sequence: Synthetic oligonucleotide"
  source: /note="Description of Combined DNA/RNA Molecule: Synthetic oligonucleotide"
  source: /note="DNA/RNA"
  source: /note="5' tri-ethylene glycol (TEG)"
  modified_base (1)..(1): bicyclic nucleic acid (BNA)
  modified_base (2)..(2): 5-methyl modified nucleotide
  modified_base (3)..(3): 5-methyl modified nucleotide
  modified_base (6)..(6): 5-methyl modified nucleotide
  modified_base (9)..(9): 5-methyl modified nucleotide
  modified_base (21)..(21): 5-methyl modified nucleotide
  modified_base (22)..(22): bicyclic nucleic acid (BNA)
tccaacaucaaggaagauggca

SEQ ID NO: 16542 - DNA, 21 bp, Artificial Sequence
  source: /note="Description of Artificial Sequence: Synthetic oligonucleotide"
  source: /note="Description of Combined DNA/RNA Molecule: Synthetic oligonucleotide"
  source: /note="DNA/RNA"
  source: /note="5' tri-ethylene glycol (TEG)"
  modified_base (1)..(1): bicyclic nucleic acid (BNA)
  modified_base (2)..(2): 5-methyl modified nucleotide
  modified_base (3)..(3): 5-methyl modified nucleotide
  modified_base (6)..(6): 5-methyl modified nucleotide
  modified_base (9)..(9): 5-methyl modified nucleotide
  modified_base (21)..(21): 5-methyl bicyclic nucleic acid
tccaacaucaaggaagauggc

SEQ ID NO: 16543 - DNA, 20 bp, Artificial Sequence
  source: /note="Description of Artificial Sequence: Synthetic oligonucleotide"
  source: /note="Description of Combined DNA/RNA Molecule: Synthetic oligonucleotide"
  source: /note="DNA/RNA"
  source: /note="5' tri-ethylene glycol (TEG)"
  modified_base (1)..(1): bicyclic nucleic acid (BNA)
  modified_base (2)..(2): 5-methyl modified nucleotide
  modified_base (3)..(3): 5-methyl modified nucleotide
  modified_base (6)..(6): 5-methyl modified nucleotide
  modified_base (9)..(9): 5-methyl modified nucleotide
  modified_base (20)..(20): bicyclic nucleic acid (BNA)
tccaacaucaaggaagaugg

SEQ ID NO: 16544 - DNA, 19 bp, Artificial Sequence
  source: /note="Description of Artificial Sequence: Synthetic oligonucleotide"
  source: /note="Description of Combined DNA/RNA Molecule: Synthetic oligonucleotide"
  source: /note="DNA/RNA"
  source: /note="5' tri-ethylene glycol (TEG)"
  modified_base (1)..(1): bicyclic nucleic acid (BNA)
  modified_base (2)..(2): 5-methyl modified nucleotide
  modified_base (3)..(3): 5-methyl modified nucleotide
  modified_base (6)..(6): 5-methyl modified nucleotide
  modified_base (9)..(9): 5-methyl modified nucleotide
  modified_base (19)..(19): bicyclic nucleic acid (BNA)
tccaacaucaaggaagaug

SEQ ID NO: 16545 - DNA, 18 bp, Artificial Sequence
  source: /note="Description of Artificial Sequence: Synthetic oligonucleotide"
  source: /note="Description of Combined DNA/RNA Molecule: Synthetic oligonucleotide"
  source: /note="DNA/RNA"
  source: /note="5' tri-ethylene glycol (TEG)"
  modified_base (1)..(1): bicyclic nucleic acid (BNA)
  modified_base (2)..(2): 5-methyl modified nucleotide
  modified_base (3)..(3): 5-methyl modified nucleotide
  modified_base (6)..(6): 5-methyl modified nucleotide
  modified_base (9)..(9): 5-methyl modified nucleotide
  modified_base (18)..(18): bicyclic nucleic acid (BNA)
tccaacaucaaggaagat

SEQ ID NO: 16546 - DNA, 17 bp, Artificial Sequence
  source: /note="Description of Artificial Sequence: Synthetic oligonucleotide"
  source: /note="Description of Combined DNA/RNA Molecule: Synthetic oligonucleotide"
  source: /note="DNA/RNA"
  source: /note="5' tri-ethylene glycol (TEG)"
  modified_base (1)..(1): bicyclic nucleic acid (BNA)
  modified_base (2)..(2): 5-methyl modified nucleotide
  modified_base (3)..(3): 5-methyl modified nucleotide
  modified_base (6)..(6): 5-methyl modified nucleotide
  modified_base (9)..(9): 5-methyl modified nucleotide
  modified_base (17)..(17): bicyclic nucleic acid (BNA)
tccaacaucaaggaaga

SEQ ID NO: 16547 - DNA, 16 bp, Artificial Sequence
  source: /note="Description of Artificial Sequence: Synthetic oligonucleotide"
  source: /note="Description of Combined DNA/RNA Molecule: Synthetic oligonucleotide"
  source: /note="DNA/RNA"
  source: /note="5' tri-ethylene glycol (TEG)"
  modified_base (1)..(1): bicyclic nucleic acid (BNA)
  modified_base (2)..(2): 5-methyl modified nucleotide
  modified_base (3)..(3): 5-methyl modified nucleotide
  modified_base (6)..(6): 5-methyl modified nucleotide
  modified_base (9)..(9): 5-methyl modified nucleotide
  modified_base (16)..(16): bicyclic nucleic acid (BNA)
tccaacaucaaggaag

SEQ ID NO: 16548 - RNA, 28 nt, Artificial Sequence
  source: /note="Description of Artificial Sequence: Synthetic oligonucleotide"
  source: /note="RNA"
  source: /note="5' tri-ethylene glycol (TEG)"
  modified_base (1)..(1): 5-methyl bicyclic nucleic acid
  modified_base (2)..(2): 5-methyl modified nucleotide
  modified_base (5)..(5): 5-methyl modified nucleotide
  modified_base (8)..(8): 5-methyl modified nucleotide
  modified_base (20)..(20): 5-methyl modified nucleotide
  modified_base (25)..(25): 5-methyl modified nucleotide
  modified_base (28)..(28): bicyclic nucleic acid (BNA)
ccaacaucaaggaagauggcauuucuag

SEQ ID NO: 16549 - RNA, 27 nt, Artificial Sequence
  source: /note="Description of Artificial Sequence: Synthetic oligonucleotide"
  source: /note="RNA"
  source: /note="5' tri-ethylene glycol (TEG)"
  modified_base (1)..(1): 5-methyl bicyclic nucleic acid
  modified_base (2)..(2): 5-methyl modified nucleotide
  modified_base (5)..(5): 5-methyl modified nucleotide
  modified_base (8)..(8): 5-methyl modified nucleotide
  modified_base (20)..(20): 5-methyl modified nucleotide
  modified_base (25)..(25): 5-methyl modified nucleotide
  modified_base (27)..(27): bicyclic nucleic acid (BNA)
ccaacaucaaggaagauggcauuucua

SEQ ID NO: 16550 - DNA, 26 bp, Artificial Sequence
  source: /note="Description of Artificial Sequence: Synthetic oligonucleotide"
  source: /note="Description of Combined DNA/RNA Molecule: Synthetic oligonucleotide"
  source: /note="DNA/RNA"
  source: /note="5' tri-ethylene glycol (TEG)"
  modified_base (1)..(1): 5-methyl bicyclic nucleic acid
  modified_base (2)..(2): 5-methyl modified nucleotide
  modified_base (5)..(5): 5-methyl modified nucleotide
  modified_base (8)..(8): 5-methyl modified nucleotide
  modified_base (20)..(20): 5-methyl modified nucleotide
  modified_base (25)..(25): 5-methyl modified nucleotide
  modified_base (26)..(26): bicyclic nucleic acid (BNA)
ccaacaucaaggaagauggcauuuct

SEQ ID NO: 16551 - RNA, 25 nt, Artificial Sequence
  source: /note="Description of Artificial Sequence: Synthetic oligonucleotide"
  source: /note="RNA"
  source: /note="5' tri-ethylene glycol (TEG)"
  modified_base (1)..(1): 5-methyl bicyclic nucleic acid
  modified_base (2)..(2): 5-methyl modified nucleotide
  modified_base (5)..(5): 5-methyl modified nucleotide
  modified_base (8)..(8): 5-methyl modified nucleotide
  modified_base (20)..(20): 5-methyl modified nucleotide
  modified_base (25)..(25): 5-methyl bicyclic nucleic acid
ccaacaucaaggaagauggcauuuc

SEQ ID NO: 16552 - DNA, 24 bp, Artificial Sequence
  source: /note="Description of Artificial Sequence: Synthetic oligonucleotide"
  source: /note="Description of Combined DNA/RNA Molecule: Synthetic oligonucleotide"
  source: /note="DNA/RNA"
  source: /note="5' tri-ethylene glycol (TEG)"
  modified_base (1)..(1): 5-methyl bicyclic nucleic acid
  modified_base (2)..(2): 5-methyl modified nucleotide
  modified_base (5)..(5): 5-methyl modified nucleotide
  modified_base (8)..(8): 5-methyl modified nucleotide
  modified_base (20)..(20): 5-methyl modified nucleotide
  modified_base (24)..(24): bicyclic nucleic acid (BNA)
ccaacaucaaggaagauggcauut

SEQ ID NO: 16553 - DNA, 23 bp, Artificial Sequence
  source: /note="Description of Artificial Sequence: Synthetic oligonucleotide"
  source: /note="Description of Combined DNA/RNA Molecule: Synthetic oligonucleotide"
  source: /note="DNA/RNA"
  source: /note="5' tri-ethylene glycol (TEG)"
  modified_base (1)..(1): 5-methyl bicyclic nucleic acid
  modified_base (2)..(2): 5-methyl modified nucleotide
  modified_base (5)..(5): 5-methyl modified nucleotide
  modified_base (8)..(8): 5-methyl modified nucleotide
  modified_base (20)..(20): 5-methyl modified nucleotide
  modified_base (23)..(23): bicyclic nucleic acid (BNA)
ccaacaucaaggaagauggcaut

SEQ ID NO: 16554 - DNA, 22 bp, Artificial Sequence
  source: /note="Description of Artificial Sequence: Synthetic oligonucleotide"
  source: /note="Description of Combined DNA/RNA Molecule: Synthetic oligonucleotide"
  source: /note="DNA/RNA"
  source: /note="5' tri-ethylene glycol (TEG)"
  modified_base (1)..(1): 5-methyl bicyclic nucleic acid
  modified_base (2)..(2): 5-methyl modified nucleotide
  modified_base (5)..(5): 5-methyl modified nucleotide
  modified_base (8)..(8): 5-methyl modified nucleotide
  modified_base (20)..(20): 5-methyl modified nucleotide
  modified_base (22)..(22): bicyclic nucleic acid (BNA)
ccaacaucaaggaagauggcat

SEQ ID NO: 16555 - RNA, 21 nt, Artificial Sequence
  source: /note="Description of Artificial Sequence: Synthetic oligonucleotide"
  source: /note="RNA"
  source: /note="5' tri-ethylene glycol (TEG)"
  modified_base (1)..(1): 5-methyl bicyclic nucleic acid
  modified_base (2)..(2): 5-methyl modified nucleotide
  modified_base (5)..(5): 5-methyl modified nucleotide
  modified_base (8)..(8): 5-methyl modified nucleotide
  modified_base (20)..(20): 5-methyl modified nucleotide
  modified_base (21)..(21): bicyclic nucleic acid (BNA)
ccaacaucaaggaagauggca

SEQ ID NO: 16556 - RNA, 20 nt, Artificial Sequence
  source: /note="Description of Artificial Sequence: Synthetic oligonucleotide"
  source: /note="RNA"
  source: /note="5' tri-ethylene glycol (TEG)"
  modified_base (1)..(1): 5-methyl bicyclic nucleic acid
  modified_base (2)..(2): 5-methyl modified nucleotide
  modified_base (5)..(5): 5-methyl modified nucleotide
  modified_base (8)..(8): 5-methyl modified nucleotide
  modified_base (20)..(20): 5-methyl bicyclic nucleic acid
ccaacaucaaggaagauggc

SEQ ID NO: 16557 - RNA, 19 nt, Artificial Sequence
  source: /note="Description of Artificial Sequence: Synthetic oligonucleotide"
  source: /note="RNA"
  source: /note="5' tri-ethylene glycol (TEG)"
  modified_base (1)..(1): 5-methyl bicyclic nucleic acid
  modified_base (2)..(2): 5-methyl modified nucleotide
  modified_base (5)..(5): 5-methyl modified nucleotide
  modified_base (8)..(8): 5-methyl modified nucleotide
  modified_base (19)..(19): bicyclic nucleic acid (BNA)
ccaacaucaaggaagaugg

SEQ ID NO: 16558 - RNA, 18 nt, Artificial Sequence
  source: /note="Description of Artificial Sequence: Synthetic oligonucleotide"
  source: /note="RNA"
  source: /note="5' tri-ethylene glycol (TEG)"
  modified_base (1)..(1): 5-methyl bicyclic nucleic acid
  modified_base (2)..(2): 5-methyl modified nucleotide
  modified_base (5)..(5): 5-methyl modified nucleotide
  modified_base (8)..(8): 5-methyl modified nucleotide
  modified_base (18)..(18): bicyclic nucleic acid (BNA)
ccaacaucaaggaagaug

SEQ ID NO: 16559 - DNA, 17 bp, Artificial Sequence
  source: /note="Description of Artificial Sequence: Synthetic oligonucleotide"
  source: /note="Description of Combined DNA/RNA Molecule: Synthetic oligonucleotide"
  source: /note="DNA/RNA"
  source: /note="5' tri-ethylene glycol (TEG)"
  modified_base (1)..(1): 5-methyl bicyclic nucleic acid
  modified_base (2)..(2): 5-methyl modified nucleotide
  modified_base (5)..(5): 5-methyl modified nucleotide
  modified_base (8)..(8): 5-methyl modified nucleotide
  modified_base (17)..(17): bicyclic nucleic acid (BNA)
ccaacaucaaggaagat

SEQ ID NO: 16560 - RNA, 16 nt, Artificial Sequence
  source: /note="Description of Artificial Sequence: Synthetic oligonucleotide"
  source: /note="RNA"
  source: /note="5' tri-ethylene glycol (TEG)"
  modified_base (1)..(1): 5-methyl bicyclic nucleic acid
  modified_base (2)..(2): 5-methyl modified nucleotide
  modified_base (5)..(5): 5-methyl modified nucleotide
  modified_base (8)..(8): 5-methyl modified nucleotide
  modified_base (16)..(16): bicyclic nucleic acid (BNA)
ccaacaucaaggaaga

SEQ ID NO: 16561 - RNA, 15 nt, Artificial Sequence
  source: /note="Description of Artificial Sequence: Synthetic oligonucleotide"
  source: /note="RNA"
  source: /note="5' tri-ethylene glycol (TEG)"
  modified_base (1)..(1): 5-methyl bicyclic nucleic acid
  modified_base (2)..(2): 5-methyl modified nucleotide
  modified_base (5)..(5): 5-methyl modified nucleotide
  modified_base (8)..(8): 5-methyl modified nucleotide
  modified_base (15)..(15): bicyclic nucleic acid (BNA)
ccaacaucaaggaag

SEQ ID NO: 16562 - RNA, 27 nt, Artificial Sequence
  source: /note="Description of Artificial Sequence: Synthetic oligonucleotide"
  source: /note="RNA"
  source: /note="5' tri-ethylene glycol (TEG)"
  modified_base (1)..(1): 5-methyl bicyclic nucleic acid
  modified_base (4)..(4): 5-methyl modified nucleotide
  modified_base (7)..(7): 5-methyl modified nucleotide
  modified_base (19)..(19): 5-methyl modified nucleotide
  modified_base (24)..(24): 5-methyl modified nucleotide
  modified_base (27)..(27): bicyclic nucleic acid (BNA)
caacaucaaggaagauggcauuucuag

SEQ ID NO: 16563 - RNA, 26 nt, Artificial Sequence
  source: /note="Description of Artificial Sequence: Synthetic oligonucleotide"
  source: /note="RNA"
  source: /note="5' tri-ethylene glycol (TEG)"
  modified_base (1)..(1): 5-methyl bicyclic nucleic acid
  modified_base (4)..(4): 5-methyl modified nucleotide
  modified_base (7)..(7): 5-methyl modified nucleotide
  modified_base (19)..(19): 5-methyl modified nucleotide
  modified_base (24)..(24): 5-methyl modified nucleotide
  modified_base (26)..(26): bicyclic nucleic acid (BNA)
caacaucaaggaagauggcauuucua

SEQ ID NO: 16564 - DNA, 25 bp, Artificial Sequence
  source: /note="Description of Artificial Sequence: Synthetic oligonucleotide"
  source: /note="Description of Combined DNA/RNA Molecule: Synthetic oligonucleotide"
  source: /note="DNA/RNA"
  source: /note="5' tri-ethylene glycol (TEG)"
  modified_base (1)..(1): 5-methyl bicyclic nucleic acid
  modified_base (4)..(4): 5-methyl modified nucleotide
  modified_base (7)..(7): 5-methyl modified nucleotide
  modified_base (19)..(19): 5-methyl modified nucleotide
  modified_base (24)..(24): 5-methyl modified nucleotide
  modified_base (25)..(25): bicyclic nucleic acid (BNA)
caacaucaaggaagauggcauuuct

SEQ ID NO: 16565 - RNA, 24 nt, Artificial Sequence
  source: /note="Description of Artificial Sequence: Synthetic oligonucleotide"
  source: /note="RNA"
  source: /note="5' tri-ethylene glycol (TEG)"
  modified_base (1)..(1): 5-methyl bicyclic nucleic acid
  modified_base (4)..(4): 5-methyl modified nucleotide
  modified_base (7)..(7): 5-methyl modified nucleotide
  modified_base (19)..(19): 5-methyl modified nucleotide
  modified_base (24)..(24): 5-methyl bicyclic nucleic acid
caacaucaaggaagauggcauuuc

SEQ ID NO: 16566 - DNA, 23 bp, Artificial Sequence
  source: /note="Description of Artificial Sequence: Synthetic oligonucleotide"
  source: /note="Description of Combined DNA/RNA Molecule: Synthetic oligonucleotide"
  source: /note="DNA/RNA"
  source: /note="5' tri-ethylene glycol (TEG)"
  modified_base (1)..(1): 5-methyl bicyclic nucleic acid
  modified_base (4)..(4): 5-methyl modified nucleotide
  modified_base (7)..(7): 5-methyl modified nucleotide
  modified_base (19)..(19): 5-methyl modified nucleotide
  modified_base (23)..(23): bicyclic nucleic acid (BNA)
caacaucaaggaagauggcauut

SEQ ID NO: 16567 - DNA, 22 bp, Artificial Sequence
  source: /note="Description of Artificial Sequence: Synthetic oligonucleotide"
  source: /note="Description of Combined DNA/RNA Molecule: Synthetic oligonucleotide"
  source: /note="DNA/RNA"
  source: /note="5' tri-ethylene glycol (TEG)"
  modified_base (1)..(1): 5-methyl bicyclic nucleic acid
  modified_base (4)..(4): 5-methyl modified nucleotide
  modified_base (7)..(7): 5-methyl modified nucleotide
  modified_base (19)..(19): 5-methyl modified nucleotide
  modified_base (22)..(22): bicyclic nucleic acid (BNA)
caacaucaaggaagauggcaut

SEQ ID NO: 16568 - DNA, 21 bp, Artificial Sequence
  source: /note="Description of Artificial Sequence: Synthetic oligonucleotide"
  source: /note="Description of Combined DNA/RNA Molecule: Synthetic oligonucleotide"
  source: /note="DNA/RNA"
  source: /note="5' tri-ethylene glycol (TEG)"
  modified_base (1)..(1): 5-methyl bicyclic nucleic acid
  modified_base (4)..(4): 5-methyl modified nucleotide
  modified_base (7)..(7): 5-methyl modified nucleotide
  modified_base (19)..(19): 5-methyl modified nucleotide
  modified_base (21)..(21): bicyclic nucleic acid (BNA)
caacaucaaggaagauggcat

SEQ ID NO: 16569 - RNA, 20 nt, Artificial Sequence
  source: /note="Description of Artificial Sequence: Synthetic oligonucleotide"
  source: /note="RNA"
  source: /note="5' tri-ethylene glycol (TEG)"
  modified_base (1)..(1): 5-methyl bicyclic nucleic acid
  modified_base (4)..(4): 5-methyl modified nucleotide
  modified_base (7)..(7): 5-methyl modified nucleotide
  modified_base (19)..(19): 5-methyl modified nucleotide
  modified_base (20)..(20): bicyclic nucleic acid (BNA)
caacaucaaggaagauggca

SEQ ID NO: 16570 - RNA, 19 nt, Artificial Sequence
  source: /note="Description of Artificial Sequence: Synthetic oligonucleotide"
  source: /note="RNA"
  source: /note="5' tri-ethylene glycol (TEG)"
  modified_base (1)..(1): 5-methyl bicyclic nucleic acid
  modified_base (4)..(4): 5-methyl modified nucleotide
  modified_base (7)..(7): 5-methyl modified nucleotide
  modified_base (19)..(19): 5-methyl bicyclic nucleic acid
caacaucaaggaagauggc

SEQ ID NO: 16571 - RNA, 18 nt, Artificial Sequence
  source: /note="Description of Artificial Sequence: Synthetic oligonucleotide"
  source: /note="RNA"
  source: /note="5' tri-ethylene glycol (TEG)"
  modified_base (1)..(1): 5-methyl bicyclic nucleic acid
  modified_base (4)..(4): 5-methyl modified nucleotide
  modified_base (7)..(7): 5-methyl modified nucleotide
  modified_base (18)..(18): bicyclic nucleic acid (BNA)
caacaucaaggaagaugg

SEQ ID NO: 16572 - RNA, 17 nt, Artificial Sequence
  source: /note="Description of Artificial Sequence: Synthetic oligonucleotide"
  source: /note="RNA"
  source: /note="5' tri-ethylene glycol (TEG)"
  modified_base (1)..(1): 5-methyl bicyclic nucleic acid
  modified_base (4)..(4): 5-methyl modified nucleotide
  modified_base (7)..(7): 5-methyl modified nucleotide
  modified_base (17)..(17): bicyclic nucleic acid (BNA)
caacaucaaggaagaug

SEQ ID NO: 16573 - DNA, 16 bp, Artificial Sequence
  source: /note="Description of Artificial Sequence: Synthetic oligonucleotide"
  source: /note="Description of Combined DNA/RNA Molecule: Synthetic oligonucleotide"
  source: /note="DNA/RNA"
  source: /note="5' tri-ethylene glycol (TEG)"
  modified_base (1)..(1): 5-methyl bicyclic nucleic acid
  modified_base (4)..(4): 5-methyl modified nucleotide
  modified_base (7)..(7): 5-methyl modified nucleotide
  modified_base (16)..(16): bicyclic nucleic acid (BNA)
caacaucaaggaagat

SEQ ID NO: 16574 - RNA, 15 nt, Artificial Sequence
  source: /note="Description of Artificial Sequence: Synthetic oligonucleotide"
  source: /note="RNA"
  source: /note="5' tri-ethylene glycol (TEG)"
  modified_base (1)..(1): 5-methyl bicyclic nucleic acid
  modified_base (4)..(4): 5-methyl modified nucleotide
  modified_base (7)..(7): 5-methyl modified nucleotide
  modified_base (15)..(15): bicyclic nucleic acid (BNA)
caacaucaaggaaga

SEQ ID NO: 16575 - RNA, 14 nt, Artificial Sequence
  source: /note="Description of Artificial Sequence: Synthetic oligonucleotide"
  source: /note="RNA"
  source: /note="5' tri-ethylene glycol (TEG)"
  modified_base (1)..(1): 5-methyl bicyclic nucleic acid
  modified_base (4)..(4): 5-methyl modified nucleotide
  modified_base (7)..(7): 5-methyl modified nucleotide
  modified_base (14)..(14): bicyclic nucleic acid (BNA)
caacaucaaggaag

SEQ ID NO: 16576 - RNA, 26 nt, Artificial Sequence
  source: /note="Description of Artificial Sequence: Synthetic oligonucleotide"
  source: /note="RNA"
  source: /note="5' tri-ethylene glycol (TEG)"
  modified_base (1)..(1): bicyclic nucleic acid (BNA)
  modified_base (3)..(3): 5-methyl modified nucleotide
  modified_base (6)..(6): 5-methyl modified nucleotide
  modified_base (18)..(18): 5-methyl modified nucleotide
  modified_base (23)..(23): 5-methyl modified nucleotide
  modified_base (26)..(26): bicyclic nucleic acid (BNA)
aacaucaaggaagauggcauuucuag

SEQ ID NO: 16577 - RNA, 25 nt, Artificial Sequence
  source: /note="Description of Artificial Sequence: Synthetic oligonucleotide"
  source: /note="RNA"
  source: /note="5' tri-ethylene glycol (TEG)"
  modified_base (1)..(1): bicyclic nucleic acid (BNA)
  modified_base (3)..(3): 5-methyl modified nucleotide
  modified_base (6)..(6): 5-methyl modified nucleotide
  modified_base (18)..(18): 5-methyl modified nucleotide
  modified_base (23)..(23): 5-methyl modified nucleotide
  modified_base (25)..(25): bicyclic nucleic acid (BNA)
aacaucaaggaagauggcauuucua

SEQ ID NO: 16578 - DNA, 24 bp, Artificial Sequence
  source: /note="Description of Artificial Sequence: Synthetic oligonucleotide"
  source: /note="Description of Combined DNA/RNA Molecule: Synthetic oligonucleotide"
  source: /note="DNA/RNA"
  source: /note="5' tri-ethylene glycol (TEG)"
  modified_base (1)..(1): bicyclic nucleic acid (BNA)
  modified_base (3)..(3): 5-methyl modified nucleotide
  modified_base (6)..(6): 5-methyl modified nucleotide
  modified_base (18)..(18): 5-methyl modified nucleotide
  modified_base (23)..(23): 5-methyl modified nucleotide
  modified_base (24)..(24): bicyclic nucleic acid (BNA)
aacaucaaggaagauggcauuuct

SEQ ID NO: 16579 - RNA, 23 nt, Artificial Sequence
  source: /note="Description of Artificial Sequence: Synthetic oligonucleotide"
  source: /note="RNA"
  source: /note="5' tri-ethylene glycol (TEG)"
  modified_base (1)..(1): bicyclic nucleic acid (BNA)
  modified_base (3)..(3): 5-methyl modified nucleotide
  modified_base (6)..(6): 5-methyl modified nucleotide
  modified_base (18)..(18): 5-methyl modified nucleotide
  modified_base (23)..(23): 5-methyl bicyclic nucleic acid
aacaucaaggaagauggcauuuc

SEQ ID NO: 16580 - DNA, 22 bp, Artificial Sequence
  source: /note="Description of Artificial Sequence: Synthetic oligonucleotide"
  source: /note="Description of Combined DNA/RNA Molecule: Synthetic oligonucleotide"
  source: /note="DNA/RNA"
  source: /note="5' tri-ethylene glycol (TEG)"
  modified_base (1)..(1): bicyclic nucleic acid (BNA)
  modified_base (3)..(3): 5-methyl modified nucleotide
  modified_base (6)..(6): 5-methyl modified nucleotide
  modified_base (18)..(18): 5-methyl modified nucleotide
  modified_base (22)..(22): bicyclic nucleic acid (BNA)
aacaucaaggaagauggcauut

SEQ ID NO: 16581 - DNA, 21 bp, Artificial Sequence
  source: /note="Description of Artificial Sequence: Synthetic oligonucleotide"
  source: /note="Description of Combined DNA/RNA Molecule: Synthetic oligonucleotide"
  source: /note="DNA/RNA"
  source: /note="5' tri-ethylene glycol (TEG)"
  modified_base (1)..(1): bicyclic nucleic acid (BNA)
  modified_base (3)..(3): 5-methyl modified nucleotide
  modified_base (6)..(6): 5-methyl modified nucleotide
  modified_base (18)..(18): 5-methyl modified nucleotide
  modified_base (21)..(21): bicyclic nucleic acid (BNA)
aacaucaaggaagauggcaut

SEQ ID NO: 16582 - DNA, 20 bp, Artificial Sequence
  source: /note="Description of Artificial Sequence: Synthetic oligonucleotide"
  source: /note="Description of Combined DNA/RNA Molecule: Synthetic oligonucleotide"
  source: /note="DNA/RNA"
  source: /note="5' tri-ethylene glycol (TEG)"
  modified_base (1)..(1): bicyclic nucleic acid (BNA)
  modified_base (3)..(3): 5-methyl modified nucleotide
  modified_base (6)..(6): 5-methyl modified nucleotide
  modified_base (18)..(18): 5-methyl modified nucleotide
  modified_base (20)..(20): bicyclic nucleic acid (BNA)
aacaucaaggaagauggcat

SEQ ID NO: 16583 - RNA, 19 nt, Artificial Sequence
  source: /note="Description of Artificial Sequence: Synthetic oligonucleotide"
  source: /note="RNA"
  source: /note="5' tri-ethylene glycol (TEG)"
  modified_base (1)..(1): bicyclic nucleic acid (BNA)
  modified_base (3)..(3): 5-methyl modified nucleotide
  modified_base (6)..(6): 5-methyl modified nucleotide
  modified_base (18)..(18): 5-methyl modified nucleotide
  modified_base (19)..(19): bicyclic nucleic acid (BNA)
aacaucaaggaagauggca

SEQ ID NO: 16584 - RNA, 18 nt, Artificial Sequence
  source: /note="Description of Artificial Sequence: Synthetic oligonucleotide"
  source: /note="RNA"
  source: /note="5' tri-ethylene glycol (TEG)"
  modified_base (1)..(1): bicyclic nucleic acid (BNA)
  modified_base (3)..(3): 5-methyl modified nucleotide
  modified_base (6)..(6): 5-methyl modified nucleotide
  modified_base (18)..(18): 5-methyl bicyclic nucleic acid
aacaucaaggaagauggc

SEQ ID NO: 16585 - RNA, 17 nt, Artificial Sequence
  source: /note="Description of Artificial Sequence: Synthetic oligonucleotide"
  source: /note="RNA"
  source: /note="5' tri-ethylene glycol (TEG)"
  modified_base (1)..(1): bicyclic nucleic acid (BNA)
  modified_base (3)..(3): 5-methyl modified nucleotide
  modified_base (6)..(6): 5-methyl modified nucleotide
  modified_base (17)..(17): bicyclic nucleic acid (BNA)
aacaucaaggaagaugg

SEQ ID NO: 16586 - RNA, 16 nt, Artificial Sequence
  source: /note="Description of Artificial Sequence: Synthetic oligonucleotide"
  source: /note="RNA"
  source: /note="5' tri-ethylene glycol (TEG)"
  modified_base (1)..(1): bicyclic nucleic acid (BNA)
  modified_base (3)..(3): 5-methyl modified nucleotide
  modified_base (6)..(6): 5-methyl modified nucleotide
  modified_base (16)..(16): bicyclic nucleic acid (BNA)
aacaucaaggaagaug

SEQ ID NO: 16587 - DNA, 15 bp, Artificial Sequence
  source: /note="Description of Artificial Sequence: Synthetic oligonucleotide"
  source: /note="Description of Combined DNA/RNA Molecule: Synthetic oligonucleotide"
  source: /note="DNA/RNA"
  source: /note="5' tri-ethylene glycol (TEG)"
  modified_base (1)..(1): bicyclic nucleic acid (BNA)
  modified_base (3)..(3): 5-methyl modified nucleotide
  modified_base (6)..(6): 5-methyl modified nucleotide
  modified_base (15)..(15): bicyclic nucleic acid (BNA)
aacaucaaggaagat

SEQ ID NO: 16588 - RNA, 14 nt, Artificial Sequence
  source: /note="Description of Artificial Sequence: Synthetic oligonucleotide"
  source: /note="RNA"
  source: /note="5' tri-ethylene glycol (TEG)"
  modified_base (1)..(1): bicyclic nucleic acid (BNA)
  modified_base (3)..(3): 5-methyl modified nucleotide
  modified_base (6)..(6): 5-methyl modified nucleotide
  modified_base (14)..(14): bicyclic nucleic acid (BNA)
aacaucaaggaaga

SEQ ID NO: 16589 - RNA, 13 nt, Artificial Sequence
  source: /note="Description of Artificial Sequence: Synthetic oligonucleotide"
  source: /note="RNA"
  source: /note="5' tri-ethylene glycol (TEG)"
  modified_base (1)..(1): bicyclic nucleic acid (BNA)
  modified_base (3)..(3): 5-methyl modified nucleotide
  modified_base (6)..(6): 5-methyl modified nucleotide
  modified_base (13)..(13): bicyclic nucleic acid (BNA)
aacaucaaggaag

SEQ ID NO: 16590 - RNA, 25 nt, Artificial Sequence
  source: /note="Description of Artificial Sequence: Synthetic oligonucleotide"
  source: /note="RNA"
  source: /note="5' tri-ethylene glycol (TEG)"
  modified_base (1)..(1): bicyclic nucleic acid (BNA)
  modified_base (2)..(2): 5-methyl modified nucleotide
  modified_base (5)..(5): 5-methyl modified nucleotide
  modified_base (17)..(17): 5-methyl modified nucleotide
  modified_base (22)..(22): 5-methyl modified nucleotide
  modified_base (25)..(25): bicyclic nucleic acid (BNA)
acaucaaggaagauggcauuucuag

SEQ ID NO: 16591 - RNA, 24 nt, Artificial Sequence
  source: /note="Description of Artificial Sequence: Synthetic oligonucleotide"
  source: /note="RNA"
  source: /note="5' tri-ethylene glycol (TEG)"
  modified_base (1)..(1): bicyclic nucleic acid (BNA)
  modified_base (2)..(2): 5-methyl modified nucleotide
  modified_base (5)..(5): 5-methyl modified nucleotide
  modified_base (17)..(17): 5-methyl modified nucleotide
  modified_base (22)..(22): 5-methyl modified nucleotide
  modified_base (24)..(24): bicyclic nucleic acid (BNA)
acaucaaggaagauggcauuucua

SEQ ID NO: 16592 - DNA, 23 bp, Artificial Sequence
  source: /note="Description of Artificial Sequence: Synthetic oligonucleotide"
  source: /note="Description of Combined DNA/RNA Molecule: Synthetic oligonucleotide"
  source: /note="DNA/RNA"
  source: /note="5' tri-ethylene glycol (TEG)"
  modified_base (1)..(1): bicyclic nucleic acid (BNA)
  modified_base (2)..(2): 5-methyl modified nucleotide
  modified_base (5)..(5): 5-methyl modified nucleotide
  modified_base (17)..(17): 5-methyl modified nucleotide
  modified_base (22)..(22): 5-methyl modified nucleotide
  modified_base (23)..(23): bicyclic nucleic acid (BNA)
acaucaaggaagauggcauuuct

SEQ ID NO: 16593 - RNA, 22 nt, Artificial Sequence
  source: /note="Description of Artificial Sequence: Synthetic oligonucleotide"
  source: /note="RNA"
  source: /note="5' tri-ethylene glycol (TEG)"
  modified_base (1)..(1): bicyclic nucleic acid (BNA)
  modified_base (2)..(2): 5-methyl modified nucleotide
  modified_base (5)..(5): 5-methyl modified nucleotide
  modified_base (17)..(17): 5-methyl modified nucleotide
  modified_base (22)..(22): 5-methyl bicyclic nucleic acid
acaucaaggaagauggcauuuc

SEQ ID NO: 16594 - DNA, 21 bp, Artificial Sequence
  source: /note="Description of Artificial Sequence: Synthetic oligonucleotide"
  source: /note="Description of Combined DNA/RNA Molecule: Synthetic oligonucleotide"
  source: /note="DNA/RNA"
  source: /note="5' tri-ethylene glycol (TEG)"
  modified_base (1)..(1): bicyclic nucleic acid (BNA)
  modified_base (2)..(2): 5-methyl modified nucleotide
  modified_base (5)..(5): 5-methyl modified nucleotide
  modified_base (17)..(17): 5-methyl modified nucleotide
  modified_base (21)..(21): bicyclic nucleic acid (BNA)
acaucaaggaagauggcauut

SEQ ID NO: 16595 - DNA, 20 bp, Artificial Sequence
  source: /note="Description of Artificial Sequence: Synthetic oligonucleotide"
  source: /note="Description of Combined DNA/RNA Molecule: Synthetic oligonucleotide"
  source: /note="DNA/RNA"
  source: /note="5' tri-ethylene glycol (TEG)"
  modified_base (1)..(1): bicyclic nucleic acid (BNA)
  modified_base (2)..(2): 5-methyl modified nucleotide
  modified_base (5)..(5): 5-methyl modified nucleotide
  modified_base (17)..(17): 5-methyl modified nucleotide
  modified_base (20)..(20): bicyclic nucleic acid (BNA)
acaucaaggaagauggcaut

SEQ ID NO: 16596 - DNA, 19 bp, Artificial Sequence
  source: /note="Description of Artificial Sequence: Synthetic oligonucleotide"
  source: /note="Description of Combined DNA/RNA Molecule: Synthetic oligonucleotide"
  source: /note="DNA/RNA"
  source: /note="5' tri-ethylene glycol (TEG)"
  modified_base (1)..(1): bicyclic nucleic acid (BNA)
  modified_base (2)..(2): 5-methyl modified nucleotide
  modified_base (5)..(5): 5-methyl modified nucleotide
  modified_base (17)..(17): 5-methyl modified nucleotide
  modified_base (19)..(19): bicyclic nucleic acid (BNA)
acaucaaggaagauggcat

SEQ ID NO: 16597 - RNA, 18 nt, Artificial Sequence
  source: /note="Description of Artificial Sequence: Synthetic oligonucleotide"
  source: /note="RNA"
  source: /note="5' tri-ethylene glycol (TEG)"
  modified_base (1)..(1): bicyclic nucleic acid (BNA)
  modified_base (2)..(2): 5-methyl modified nucleotide
  modified_base (5)..(5): 5-methyl modified nucleotide
  modified_base (17)..(17): 5-methyl modified nucleotide
  modified_base (18)..(18): bicyclic nucleic acid (BNA)
acaucaaggaagauggca

SEQ ID NO: 16598 - RNA, 17 nt, Artificial Sequence
  source: /note="Description of Artificial Sequence: Synthetic oligonucleotide"
  source: /note="RNA"
  source: /note="5' tri-ethylene glycol (TEG)"
  modified_base (1)..(1): bicyclic nucleic acid (BNA)
  modified_base (2)..(2): 5-methyl modified nucleotide
  modified_base (5)..(5): 5-methyl modified nucleotide
  modified_base (17)..(17): 5-methyl bicyclic nucleic acid
acaucaaggaagauggc

SEQ ID NO: 16599 - RNA, 16 nt, Artificial Sequence
  source: /note="Description of Artificial Sequence: Synthetic oligonucleotide"
  source: /note="RNA"
  source: /note="5' tri-ethylene glycol (TEG)"
  modified_base (1)..(1): bicyclic nucleic acid (BNA)
  modified_base (2)..(2): 5-methyl modified nucleotide
  modified_base (5)..(5): 5-methyl modified nucleotide
  modified_base (16)..(16): bicyclic nucleic acid (BNA)
acaucaaggaagaugg

SEQ ID NO: 16600 - RNA, 15 nt, Artificial Sequence
  source: /note="Description of Artificial Sequence: Synthetic oligonucleotide"
  source: /note="RNA"
  source: /note="5' tri-ethylene glycol (TEG)"
  modified_base (1)..(1): bicyclic nucleic acid (BNA)
  modified_base (2)..(2): 5-methyl modified nucleotide
  modified_base (5)..(5): 5-methyl modified nucleotide
  modified_base (15)..(15): bicyclic nucleic acid (BNA)
acaucaaggaagaug

SEQ ID NO: 16601 - DNA, 14 bp, Artificial Sequence
  source: /note="Description of Artificial Sequence: Synthetic oligonucleotide"
  source: /note="Description of Combined DNA/RNA Molecule: Synthetic oligonucleotide"
  source: /note="DNA/RNA"
  source: /note="5' tri-ethylene glycol (TEG)"
  modified_base (1)..(1): bicyclic nucleic acid (BNA)
  modified_base (2)..(2): 5-methyl modified nucleotide
  modified_base (5)..(5): 5-methyl modified nucleotide
  modified_base (14)..(14): bicyclic nucleic acid (BNA)
acaucaaggaagat

SEQ ID NO: 16602 - RNA, 13 nt, Artificial Sequence
  source: /note="Description of Artificial Sequence: Synthetic oligonucleotide"
  source: /note="RNA"
  source: /note="5' tri-ethylene glycol (TEG)"
  modified_base (1)..(1): bicyclic nucleic acid (BNA)
  modified_base (2)..(2): 5-methyl modified nucleotide
  modified_base (5)..(5): 5-methyl modified nucleotide
  modified_base (13)..(13): bicyclic nucleic acid (BNA)
acaucaaggaaga

SEQ ID NO: 16603 - RNA, 12 nt, Artificial Sequence
  source: /note="Description of Artificial Sequence: Synthetic oligonucleotide"
  source: /note="RNA"
  source: /note="5' tri-ethylene glycol (TEG)"
  modified_base (1)..(1): bicyclic nucleic acid (BNA)
  modified_base (2)..(2): 5-methyl modified nucleotide
  modified_base (5)..(5): 5-methyl modified nucleotide
  modified_base (12)..(12): bicyclic nucleic acid (BNA)
acaucaaggaag

SEQ ID NO: 16604 - RNA, 24 nt, Artificial Sequence
  source: /note="Description of Artificial Sequence: Synthetic oligonucleotide"
  source: /note="RNA"
  source: /note="5' tri-ethylene glycol (TEG)"
  modified_base (1)..(1): 5-methyl bicyclic nucleic acid
  modified_base (4)..(4): 5-methyl modified nucleotide
  modified_base (16)..(16): 5-methyl modified nucleotide
  modified_base (21)..(21): 5-methyl modified nucleotide
  modified_base (24)..(24): bicyclic nucleic acid (BNA)
caucaaggaagauggcauuucuag

SEQ ID NO: 16605 - RNA, 23 nt, Artificial Sequence
  source: /note="Description of Artificial Sequence: Synthetic oligonucleotide"
  source: /note="RNA"
  source: /note="5' tri-ethylene glycol (TEG)"
  modified_base (1)..(1): 5-methyl bicyclic nucleic acid
  modified_base (4)..(4): 5-methyl modified nucleotide
  modified_base (16)..(16): 5-methyl modified nucleotide
  modified_base (21)..(21): 5-methyl modified nucleotide
  modified_base (23)..(23): bicyclic nucleic acid (BNA)
caucaaggaagauggcauuucua

SEQ ID NO: 16606 - DNA, 22 bp, Artificial Sequence
  source: /note="Description of Artificial Sequence: Synthetic oligonucleotide"
  source: /note="Description of Combined DNA/RNA Molecule: Synthetic oligonucleotide"
  source: /note="DNA/RNA"
  source: /note="5' tri-ethylene glycol (TEG)"
  modified_base (1)..(1): 5-methyl bicyclic nucleic acid
  modified_base (4)..(4): 5-methyl modified nucleotide
  modified_base (16)..(16): 5-methyl modified nucleotide
  modified_base (21)..(21): 5-methyl modified nucleotide
  modified_base (22)..(22): bicyclic nucleic acid (BNA)
caucaaggaagauggcauuuct

SEQ ID NO: 16607 - RNA, 21 nt, Artificial Sequence
  source: /note="Description of Artificial Sequence: Synthetic oligonucleotide"
  source: /note="RNA"
  source: /note="5' tri-ethylene glycol (TEG)"
  modified_base (1)..(1): 5-methyl bicyclic nucleic acid
  modified_base (4)..(4): 5-methyl modified nucleotide
  modified_base (16)..(16): 5-methyl modified nucleotide
  modified_base (21)..(21): 5-methyl bicyclic nucleic acid
caucaaggaagauggcauuuc

SEQ ID NO: 16608 - DNA, 20 bp, Artificial Sequence
  source: /note="Description of Artificial Sequence: Synthetic oligonucleotide"
  source: /note="Description of Combined DNA/RNA Molecule: Synthetic oligonucleotide"
  source: /note="DNA/RNA"
  source: /note="5' tri-ethylene glycol (TEG)"
  modified_base (1)..(1): 5-methyl bicyclic nucleic acid
  modified_base (4)..(4): 5-methyl modified nucleotide
  modified_base (16)..(16): 5-methyl modified nucleotide
  modified_base (20)..(20): bicyclic nucleic acid (BNA)
caucaaggaagauggcauut

SEQ ID NO: 16609 - DNA, 19 bp, Artificial Sequence
  source: /note="Description of Artificial Sequence: Synthetic oligonucleotide"
  source: /note="Description of Combined DNA/RNA Molecule: Synthetic oligonucleotide"
  source: /note="DNA/RNA"
  source: /note="5' tri-ethylene glycol (TEG)"
  modified_base (1)..(1): 5-methyl bicyclic nucleic acid
  modified_base (4)..(4): 5-methyl modified nucleotide
  modified_base (16)..(16): 5-methyl modified nucleotide
  modified_base (19)..(19): bicyclic nucleic acid (BNA)
caucaaggaagauggcaut

SEQ ID NO: 16610 - DNA, 18 bp, Artificial Sequence
  source: /note="Description of Artificial Sequence: Synthetic oligonucleotide"
  source: /note="Description of Combined DNA/RNA Molecule: Synthetic oligonucleotide"
  source: /note="DNA/RNA"
  source: /note="5' tri-ethylene glycol (TEG)"
  modified_base (1)..(1): 5-methyl bicyclic nucleic acid
  modified_base (4)..(4): 5-methyl modified nucleotide
  modified_base (16)..(16): 5-methyl modified nucleotide
  modified_base (18)..(18): bicyclic nucleic acid (BNA)
caucaaggaagauggcat

SEQ ID NO: 16611 - RNA, 17 nt, Artificial Sequence
  source: /note="Description of Artificial Sequence: Synthetic oligonucleotide"
  source: /note="RNA"
  source: /note="5' tri-ethylene glycol (TEG)"
  modified_base (1)..(1): 5-methyl bicyclic nucleic acid
  modified_base (4)..(4): 5-methyl modified nucleotide
  modified_base (16)..(16): 5-methyl modified nucleotide
  modified_base (17)..(17): bicyclic nucleic acid (BNA)
caucaaggaagauggca

SEQ ID NO: 16612 - RNA, 16 nt, Artificial Sequence
  source: /note="Description of Artificial Sequence: Synthetic oligonucleotide"
  source: /note="RNA"
  source: /note="5' tri-ethylene glycol (TEG)"
  modified_base (1)..(1): 5-methyl bicyclic nucleic acid
  modified_base (4)..(4): 5-methyl modified nucleotide
  modified_base (16)..(16): 5-methyl bicyclic nucleic acid
caucaaggaagauggc

SEQ ID NO: 16613 - RNA, 15 nt, Artificial Sequence
  source: /note="Description of Artificial Sequence: Synthetic oligonucleotide"
  source: /note="RNA"
  source: /note="5' tri-ethylene glycol (TEG)"
  modified_base (1)..(1): 5-methyl bicyclic nucleic acid
  modified_base (4)..(4): 5-methyl modified nucleotide
  modified_base (15)..(15): bicyclic nucleic acid (BNA)
caucaaggaagaugg

SEQ ID NO: 16614 - RNA, 14 nt, Artificial Sequence
  source: /note="Description of Artificial Sequence: Synthetic oligonucleotide"
  source: /note="RNA"
  source: /note="5' tri-ethylene glycol (TEG)"
  modified_base (1)..(1): 5-methyl bicyclic nucleic acid
  modified_base (4)..(4): 5-methyl modified nucleotide
  modified_base (14)..(14): bicyclic nucleic acid (BNA)
caucaaggaagaug

SEQ ID NO: 16615 - DNA, 13 bp, Artificial Sequence
  source: /note="Description of Artificial Sequence: Synthetic oligonucleotide"
  source: /note="Description of Combined DNA/RNA Molecule: Synthetic oligonucleotide"
  source: /note="DNA/RNA"
  source: /note="5' tri-ethylene glycol (TEG)"
  modified_base (1)..(1): 5-methyl bicyclic nucleic acid
  modified_base (4)..(4): 5-methyl modified nucleotide
  modified_base (13)..(13): bicyclic nucleic acid (BNA)
caucaaggaagat

SEQ ID NO: 16616 - RNA, 12 nt, Artificial Sequence
  source: /note="Description of Artificial Sequence: Synthetic oligonucleotide"
  source: /note="RNA"
  source: /note="5' tri-ethylene glycol (TEG)"
  modified_base (1)..(1): 5-methyl bicyclic nucleic acid
  modified_base (4)..(4): 5-methyl modified nucleotide
  modified_base (12)..(12): bicyclic nucleic acid (BNA)
caucaaggaaga

SEQ ID NO: 16617 - RNA, 11 nt, Artificial Sequence
  source: /note="Description of Artificial Sequence: Synthetic oligonucleotide"
  source: /note="RNA"
  source: /note="5' tri-ethylene glycol (TEG)"
  modified_base (1)..(1): 5-methyl bicyclic nucleic acid
  modified_base (4)..(4): 5-methyl modified nucleotide
  modified_base (11)..(11): bicyclic nucleic acid (BNA)
caucaaggaag

SEQ ID NO: 16618 - RNA, 23 nt, Artificial Sequence
  source: /note="Description of Artificial Sequence: Synthetic oligonucleotide"
  source: /note="RNA"
  source: /note="5' tri-ethylene glycol (TEG)"
  modified_base (1)..(1): bicyclic nucleic acid (BNA)
  modified_base (3)..(3): 5-methyl modified nucleotide
  modified_base (15)..(15): 5-methyl modified nucleotide
  modified_base (20)..(20): 5-methyl modified nucleotide
  modified_base (23)..(23): bicyclic nucleic acid (BNA)
aucaaggaagauggcauuucuag

SEQ ID NO: 16619 - RNA, 22 nt, Artificial Sequence
  source: /note="Description of Artificial Sequence: Synthetic oligonucleotide"
  source: /note="RNA"
  source: /note="5' tri-ethylene glycol (TEG)"
  modified_base (1)..(1): bicyclic nucleic acid (BNA)
  modified_base (3)..(3): 5-methyl modified nucleotide
  modified_base (15)..(15): 5-methyl modified nucleotide
  modified_base (20)..(20): 5-methyl modified nucleotide
  modified_base (22)..(22): bicyclic nucleic acid (BNA)
aucaaggaagauggcauuucua

SEQ ID NO: 16620 - DNA, 21 bp, Artificial Sequence
  source: /note="Description of Artificial Sequence: Synthetic oligonucleotide"
  source: /note="Description of Combined DNA/RNA Molecule: Synthetic oligonucleotide"
  source: /note="DNA/RNA"
  source: /note="5' tri-ethylene glycol (TEG)"
  modified_base (1)..(1): bicyclic nucleic acid (BNA)
  modified_base (3)..(3): 5-methyl modified nucleotide
  modified_base (15)..(15): 5-methyl modified nucleotide
  modified_base (20)..(20): 5-methyl modified nucleotide
  modified_base (21)..(21): bicyclic nucleic acid (BNA)
aucaaggaagauggcauuuct

SEQ ID NO: 16621 - RNA, 20 nt, Artificial Sequence
  source: /note="Description of Artificial Sequence: Synthetic oligonucleotide"
  source: /note="RNA"
  source: /note="5' tri-ethylene glycol (TEG)"
  modified_base (1)..(1): bicyclic nucleic acid (BNA)
  modified_base (3)..(3): 5-methyl modified nucleotide
  modified_base (15)..(15): 5-methyl modified nucleotide
  modified_base (20)..(20): 5-methyl bicyclic nucleic acid
aucaaggaagauggcauuuc

SEQ ID NO: 16622 - DNA, 19 bp, Artificial Sequence
  source: /note="Description of Artificial Sequence: Synthetic oligonucleotide"
  source: /note="Description of Combined DNA/RNA Molecule: Synthetic oligonucleotide"
  source: /note="DNA/RNA"
  source: /note="5' tri-ethylene glycol (TEG)"
  modified_base (1)..(1): bicyclic nucleic acid (BNA)
  modified_base (3)..(3): 5-methyl modified nucleotide
  modified_base (15)..(15): 5-methyl modified nucleotide
  modified_base (19)..(19): bicyclic nucleic acid (BNA)
aucaaggaagauggcauut

SEQ ID NO: 16623 - DNA, 18 bp, Artificial Sequence
  source: /note="Description of Artificial Sequence: Synthetic oligonucleotide"
  source: /note="Description of Combined DNA/RNA Molecule: Synthetic oligonucleotide"
  source: /note="DNA/RNA"
  source: /note="5' tri-ethylene glycol (TEG)"
  modified_base (1)..(1): bicyclic nucleic acid (BNA)
  modified_base (3)..(3): 5-methyl modified nucleotide
  modified_base (15)..(15): 5-methyl modified nucleotide
  modified_base (18)..(18): bicyclic nucleic acid (BNA)
aucaaggaagauggcaut

SEQ ID NO: 16624 - DNA, 17 bp, Artificial Sequence
  source: /note="Description of Artificial Sequence: Synthetic oligonucleotide"
  source: /note="Description of Combined DNA/RNA Molecule: Synthetic oligonucleotide"
  source: /note="DNA/RNA"
  source: /note="5' tri-ethylene glycol (TEG)"
  modified_base (1)..(1): bicyclic nucleic acid (BNA)
  modified_base (3)..(3): 5-methyl modified nucleotide
  modified_base (15)..(15): 5-methyl modified nucleotide
  modified_base (17)..(17): bicyclic nucleic acid (BNA)
aucaaggaagauggcat

SEQ ID NO: 16625 - RNA, 16 nt, Artificial Sequence
  source: /note="Description of Artificial Sequence: Synthetic oligonucleotide"
  source: /note="RNA"
  source: /note="5' tri-ethylene glycol (TEG)"
  modified_base (1)..(1): bicyclic nucleic acid (BNA)
  modified_base (3)..(3): 5-methyl modified nucleotide
  modified_base (15)..(15): 5-methyl modified nucleotide
  modified_base (16)..(16): bicyclic nucleic acid (BNA)
aucaaggaagauggca

SEQ ID NO: 16626 - RNA, 15 nt, Artificial Sequence
  source: /note="Description of Artificial Sequence: Synthetic oligonucleotide"
  source: /note="RNA"
  source: /note="5' tri-ethylene glycol (TEG)"
  modified_base (1)..(1): bicyclic nucleic acid (BNA)
  modified_base (3)..(3): 5-methyl modified nucleotide
  modified_base (15)..(15): 5-methyl bicyclic nucleic acid
aucaaggaagauggc

SEQ ID NO: 16627 - RNA, 14 nt, Artificial Sequence
  source: /note="Description of Artificial Sequence: Synthetic oligonucleotide"
  source: /note="RNA"
  source: /note="5' tri-ethylene glycol (TEG)"
  modified_base (1)..(1): bicyclic nucleic acid (BNA)
  modified_base (3)..(3): 5-methyl modified nucleotide
  modified_base (14)..(14): bicyclic nucleic acid (BNA)
aucaaggaagaugg

SEQ ID NO: 16628 - RNA, 13 nt, Artificial Sequence
  source: /note="Description of Artificial Sequence: Synthetic oligonucleotide"
  source: /note="RNA"
  source: /note="5' tri-ethylene glycol (TEG)"
  modified_base (1)..(1): bicyclic nucleic acid (BNA)
  modified_base (3)..(3): 5-methyl modified nucleotide
  modified_base (13)..(13): bicyclic nucleic acid (BNA)
aucaaggaagaug

SEQ ID NO: 16629 - DNA, 12 bp, Artificial Sequence
  source: /note="Description of Artificial Sequence: Synthetic oligonucleotide"
  source: /note="Description of Combined DNA/RNA Molecule: Synthetic oligonucleotide"
  source: /note="DNA/RNA"
  source: /note="5' tri-ethylene glycol (TEG)"
  modified_base (1)..(1): bicyclic nucleic acid (BNA)
  modified_base (3)..(3): 5-methyl modified nucleotide
  modified_base (12)..(12): bicyclic nucleic acid (BNA)
aucaaggaagat

SEQ ID NO: 16630 - RNA, 11 nt, Artificial Sequence
  source: /note="Description of Artificial Sequence: Synthetic oligonucleotide"
  source: /note="RNA"
  source: /note="5' tri-ethylene glycol (TEG)"
  modified_base (1)..(1): bicyclic nucleic acid (BNA)
  modified_base (3)..(3): 5-methyl modified nucleotide
  modified_base (11)..(11): bicyclic nucleic acid (BNA)
aucaaggaaga

SEQ ID NO: 16631 - RNA, 10 nt, Artificial Sequence
  source: /note="Description of Artificial Sequence: Synthetic oligonucleotide"
  source: /note="RNA"
  source: /note="5' tri-ethylene glycol (TEG)"
  modified_base (1)..(1): bicyclic nucleic acid (BNA)
  modified_base (3)..(3): 5-methyl modified nucleotide
  modified_base (10)..(10): bicyclic nucleic acid (BNA)
aucaaggaag

SEQ ID NO: 16632 - RNA, 23 nt, Artificial Sequence
  source: /note="Description of Artificial Sequence: Synthetic oligonucleotide"
  source: /note="RNA"
  source: /note="5' tri-ethylene glycol (TEG)"
  modified_base (1)..(1): 5-methyl bicyclic nucleic acid
  modified_base (2)..(2): 5-methyl modified nucleotide
  modified_base (7)..(7): 5-methyl modified nucleotide
  modified_base (13)..(13): 5-methyl modified nucleotide
  modified_base (14)..(14): 5-methyl modified nucleotide
  modified_base (16)..(16): 5-methyl modified nucleotide
  modified_base (17)..(17): 5-methyl modified nucleotide
  modified_base (20)..(20): 5-methyl modified nucleotide
  modified_base (23)..(23): 5-methyl bicyclic nucleic acid
ccagagcagguaccuccaacauc

SEQ ID NO: 16633 - RNA, 18 nt, Artificial Sequence
  source: /note="Description of Artificial Sequence: Synthetic oligonucleotide"
  source: /note="RNA"
  source: /note="5' tri-ethylene glycol (TEG)"
  modified_base (1)..(1): 5-methyl bicyclic nucleic acid
  modified_base (2)..(2): 5-methyl modified nucleotide
  modified_base (7)..(7): 5-methyl modified nucleotide
  modified_base (13)..(13): 5-methyl modified nucleotide
  modified_base (14)..(14): 5-methyl modified nucleotide
  modified_base (16)..(16): 5-methyl modified nucleotide
  modified_base (17)..(17): 5-methyl modified nucleotide
  modified_base (18)..(18): bicyclic nucleic acid (BNA)
ccagagcagguaccucca

SEQ ID NO: 16634 - DNA, 23 bp, Artificial Sequence
  source: /note="Description of Artificial Sequence: Synthetic oligonucleotide"
  source: /note="Description of Combined DNA/RNA Molecule: Synthetic oligonucleotide"
  source: /note="DNA/RNA"
  source: /note="5' tri-ethylene glycol (TEG)"
  modified_base (1)..(1): 5-methyl bicyclic nucleic acid
  modified_base (2)..(2): 5-methyl modified nucleotide
  modified_base (4)..(4): 5-methyl modified nucleotide
  modified_base (18)..(18): 5-methyl modified nucleotide
  modified_base (23)..(23): bicyclic nucleic acid (BNA)
ccucugugauuuuauaacuugat

SEQ ID NO: 16635 - DNA, 17 bp, Artificial Sequence
  source: /note="Description of Artificial Sequence: Synthetic oligonucleotide"
  source: /note="Description of Combined DNA/RNA Molecule: Synthetic oligonucleotide"
  source: /note="DNA/RNA"
  source: /note="5' tri-ethylene glycol (TEG)"
  modified_base (1)..(1): bicyclic nucleic acid (BNA)
  modified_base (2)..(2): 5-methyl modified nucleotide
  modified_base (4)..(4): 5-methyl modified nucleotide
  modified_base (5)..(5): 5-methyl modified nucleotide
  modified_base (6)..(6): 5-methyl modified nucleotide
  modified_base (8)..(8): 5-methyl modified nucleotide
  modified_base (9)..(9): 5-methyl modified nucleotide
  modified_base (12)..(12): 5-methyl modified nucleotide
  modified_base (14)..(14): 5-methyl modified nucleotide
  modified_base (15)..(15): 5-methyl modified nucleotide
  modified_base (16)..(16): 5-methyl modified nucleotide
  modified_base (17)..(17): bicyclic nucleic acid (BNA)
tcacccaccaucaccct

SEQ ID NO: 16636 - DNA, 20 bp, Artificial Sequence
  source: /note="Description of Artificial Sequence: Synthetic oligonucleotide"
  source: /note="Description of Combined DNA/RNA Molecule: Synthetic oligonucleotide"
  source: /note="DNA/RNA"
  source: /note="5' tri-ethylene glycol (TEG)"
  modified_base (1)..(1): bicyclic nucleic acid (BNA)
  modified_base (7)..(7): 5-methyl modified nucleotide
  modified_base (8)..(8): 5-methyl modified nucleotide
  modified_base (10)..(10): 5-methyl modified nucleotide
  modified_base (16)..(16): 5-methyl modified nucleotide
  modified_base (18)..(18): 5-methyl modified nucleotide
  modified_base (19)..(19): 5-methyl modified nucleotide
  modified_base (20)..(20): 5-methyl bicyclic nucleic acid
tgauauccucaaggucaccc

SEQ ID NO: 16637 - RNA, 22 nt, Artificial Sequence
  source: /note="Description of Artificial Sequence: Synthetic oligonucleotide"
  source: /note="RNA"
  source: /note="5' tri-ethylene glycol (TEG)"
  modified_base (1)..(1): 5-methyl bicyclic nucleic acid
  modified_base (4)..(4): 5-methyl modified nucleotide
  modified_base (13)..(13): 5-methyl modified nucleotide
  modified_base (16)..(16): 5-methyl modified nucleotide
  modified_base (18)..(18): 5-methyl modified nucleotide
  modified_base (22)..(22): bicyclic nucleic acid (BNA)
cugcuugaugaucaucucguug

SEQ ID NO: 16638 - RNA, 18 nt, Artificial Sequence
  source: /note="Description of Artificial Sequence: Synthetic oligonucleotide"
  source: /note="RNA"
  source: /note="5' tri-ethylene glycol (TEG)"
  modified_base (1)..(1): 5-methyl bicyclic nucleic acid
  modified_base (4)..(4): 5-methyl modified nucleotide
  modified_base (13)..(13): 5-methyl modified nucleotide
  modified_base (16)..(16): 5-methyl modified nucleotide
  modified_base (18)..(18): 5-methyl bicyclic nucleic acid
cugcuugaugaucaucuc

SEQ ID NO: 16639 - RNA, 19 nt, Artificial Sequence
  source: /note="Description of Artificial Sequence: Synthetic oligonucleotide"
  source: /note="RNA"
  source: /note="5' tri-ethylene glycol (TEG)"
  modified_base (1)..(1): bicyclic nucleic acid (BNA)
  modified_base (5)..(5): 5-methyl modified nucleotide
  modified_base (6)..(6): 5-methyl modified nucleotide
  modified_base (14)..(14): 5-methyl modified nucleotide
  modified_base (15)..(15): 5-methyl modified nucleotide
  modified_base (17)..(17): 5-methyl modified nucleotide
  modified_base (19)..(19): bicyclic nucleic acid (BNA)
guuuccuuaguaaccacag

SEQ ID NO: 16640 - RNA, 17 nt, Artificial Sequence
  source: /note="Description of Artificial Sequence: Synthetic oligonucleotide"
  source: /note="RNA"
  source: /note="5' tri-ethylene glycol (TEG)"
  modified_base (1)..(1): bicyclic nucleic acid (BNA)
  modified_base (5)..(5): 5-methyl modified nucleotide
  modified_base (6)..(6): 5-methyl modified nucleotide
  modified_base (14)..(14): 5-methyl modified nucleotide
  modified_base (15)..(15): 5-methyl modified nucleotide
  modified_base (17)..(17): 5-methyl bicyclic nucleic acid
guuuccuuaguaaccac

SEQ ID NO: 16641 - DNA, 20 bp, Artificial Sequence
  source: /note="Description of Artificial Sequence: Synthetic oligonucleotide"
  source: /note="Description of Combined DNA/RNA Molecule: Synthetic oligonucleotide"
  source: /note="DNA/RNA"
  modified_base (1)..(1): bicyclic nucleic acid (BNA)
  modified_base (2)..(2): 5-methyl modified nucleotide
  modified_base (14)..(14): 5-methyl modified nucleotide
  modified_base (19)..(19): 5-methyl modified nucleotide
  modified_base (20)..(20): bicyclic nucleic acid (BNA)
  source: /note="3' tri-ethylene glycol (TEG)"
tcaaggaagauggcauuuct

SEQ ID NO: 16642 - DNA, 22 bp, Artificial Sequence
  source: /note="Description of Artificial Sequence: Synthetic oligonucleotide"
  source: /note="Description of Combined DNA/RNA Molecule: Synthetic oligonucleotide"
  source: /note="DNA/RNA"
  modified_base (1)..(1): bicyclic nucleic acid (BNA)
  modified_base (2)..(2): 5-methyl modified nucleotide
  modified_base (14)..(14): 5-methyl modified nucleotide
  modified_base (19)..(19): 5-methyl modified nucleotide
  modified_base (22)..(22): bicyclic nucleic acid (BNA)
  source: /note="3' tri-ethylene glycol (TEG)"
tcaaggaagauggcauuucuag

SEQ ID NO: 16643 - RNA, 18 nt, Artificial Sequence
  source: /note="Description of Artificial Sequence: Synthetic oligonucleotide"
  source: /note="RNA"
  modified_base (1)..(1): bicyclic nucleic acid (BNA)
  modified_base (9)..(9): 5-methyl modified nucleotide
  modified_base (13)..(13): 5-methyl modified nucleotide
  modified_base (14)..(14): 5-methyl modified nucleotide
  modified_base (18)..(18): 5-methyl bicyclic nucleic acid
  source: /note="3' tri-ethylene glycol (TEG)"
gguaaguucuguccaagc

SEQ ID NO: 16644 - RNA, 18 nt, Artificial Sequence
  source: /note="Description of Artificial Sequence: Synthetic oligonucleotide"
  source: /note="RNA"
  modified_base (1)..(1): bicyclic nucleic acid (BNA)
  modified_base (8)..(8): 5-methyl modified nucleotide
  modified_base (12)..(12): 5-methyl modified nucleotide
  modified_base (13)..(13): 5-methyl modified nucleotide
  modified_base (17)..(17): 5-methyl modified nucleotide
  modified_base (18)..(18): 5-methyl bicyclic nucleic acid
  source: /note="3' tri-ethylene glycol (TEG)"
guaaguucuguccaagcc

SEQ ID NO: 16645 - RNA, 18 nt, Artificial Sequence
  source: /note="Description of Artificial Sequence: Synthetic oligonucleotide"
  source: /note="RNA"
  modified_base (1)..(1): bicyclic nucleic acid (BNA)
  modified_base (4)..(4): 5-methyl modified nucleotide
  modified_base (13)..(13): 5-methyl modified nucleotide
  modified_base (17)..(17): 5-methyl modified nucleotide
  modified_base (18)..(18): 5-methyl bicyclic nucleic acid
  source: /note="3' tri-ethylene glycol (TEG)"
agucgguaaguucugucc

SEQ ID NO: 16646 - RNA, 18 nt, Artificial Sequence
  source: /note="Description of Artificial Sequence: Synthetic oligonucleotide"
  source: /note="RNA"
  modified_base (1)..(1): 5-methyl bicyclic nucleic acid
  modified_base (5)..(5): 5-methyl modified nucleotide
  modified_base (6)..(6): 5-methyl modified nucleotide
  modified_base (10)..(10): 5-methyl modified nucleotide
  modified_base (11)..(11): 5-methyl modified nucleotide
  modified_base (12)..(12): 5-methyl modified nucleotide
  modified_base (18)..(18): bicyclic nucleic acid (BNA)
  source: /note="3' tri-ethylene glycol (TEG)"
cuguccaagcccgguuga

SEQ ID NO: 16647 - DNA, 15 bp, Artificial Sequence
  source: /note="Description of Artificial Sequence: Synthetic oligonucleotide"
  source: /note="Description of Combined DNA/RNA Molecule: Synthetic oligonucleotide"
  source: /note="DNA/RNA"
  modified_base (1)..(1): bicyclic nucleic acid (BNA)
  modified_base (7)..(7): 5-methyl modified nucleotide
  modified_base (11)..(11): 5-methyl modified nucleotide
  modified_base (12)..(12): 5-methyl modified nucleotide
  modified_base (15)..(15): bicyclic nucleic acid (BNA)
  source: /note="3' tri-ethylene glycol (TEG)"
taaguucuguccaag

SEQ ID NO: 16648 - DNA, 20 bp, Artificial Sequence
  source: /note="Description of Artificial Sequence: Synthetic oligonucleotide"
  source: /note="Description of Combined DNA/RNA Molecule: Synthetic oligonucleotide"
  source: /note="DNA/RNA"
  modified_base (1)..(1): bicyclic nucleic acid (BNA)
  modified_base (3)..(3): 5-methyl modified nucleotide
  modified_base (7)..(7): 5-methyl modified nucleotide
  modified_base (8)..(8): 5-methyl modified nucleotide
  modified_base (12)..(12): 5-methyl modified nucleotide
  modified_base (13)..(13): 5-methyl modified nucleotide
  modified_base (14)..(14): 5-methyl modified nucleotide
  modified_base (20)..(20): bicyclic nucleic acid (BNA)
  source: /note="3' tri-ethylene glycol (TEG)"
tucuguccaagcccgguuga

SEQ ID NO: 16649 - DNA, 19 bp, Artificial Sequence
  source: /note="Description of Artificial Sequence: Synthetic oligonucleotide"
  source: /note="Description of Combined DNA/RNA Molecule: Synthetic oligonucleotide"
  source: /note="DNA/RNA"
  modified_base (1)..(1): bicyclic nucleic acid (BNA)
  modified_base (3)..(3): 5-methyl modified nucleotide
  modified_base (7)..(7): 5-methyl modified nucleotide
  modified_base (8)..(8): 5-methyl modified nucleotide
  modified_base (12)..(12): 5-methyl modified nucleotide
  modified_base (13)..(13): 5-methyl modified nucleotide
  modified_base (14)..(14): 5-methyl modified nucleotide
  modified_base (19)..(19): bicyclic nucleic acid (BNA)
  source: /note="3' tri-ethylene glycol (TEG)"
tucuguccaagcccgguug

SEQ ID NO: 16650 - DNA, 18 bp, Artificial Sequence
  source: /note="Description of Artificial Sequence: Synthetic oligonucleotide"
  source: /note="Description of Combined DNA/RNA Molecule: Synthetic oligonucleotide"
  source: /note="DNA/RNA"
  modified_base (1)..(1): bicyclic nucleic acid (BNA)
  modified_base (3)..(3): 5-methyl modified nucleotide
  modified_base (7)..(7): 5-methyl modified nucleotide
  modified_base (8)..(8): 5-methyl modified nucleotide
  modified_base (12)..(12): 5-methyl modified nucleotide
  modified_base (13)..(13): 5-methyl modified nucleotide
  modified_base (14)..(14): 5-methyl modified nucleotide
  modified_base (18)..(18): bicyclic nucleic acid (BNA)
  source: /note="3' tri-ethylene glycol (TEG)"
tucuguccaagcccggut

SEQ ID NO: 16651 - DNA, 17 bp, Artificial Sequence
  source: /note="Description of Artificial Sequence: Synthetic oligonucleotide"
  source: /note="Description of Combined DNA/RNA Molecule: Synthetic oligonucleotide"
  source: /note="DNA/RNA"
  modified_base (1)..(1): bicyclic nucleic acid (BNA)
  modified_base (3)..(3): 5-methyl modified nucleotide
  modified_base (7)..(7): 5-methyl modified nucleotide
  modified_base (8)..(8): 5-methyl modified nucleotide
  modified_base (12)..(12): 5-methyl modified nucleotide
  modified_base (13)..(13): 5-methyl modified nucleotide
  modified_base (14)..(14): 5-methyl modified nucleotide
  modified_base (17)..(17): bicyclic nucleic acid (BNA)
  source: /note="3' tri-ethylene glycol (TEG)"
tucuguccaagcccggt

SEQ ID NO: 16652 - DNA, 16 bp, Artificial Sequence
  source: /note="Description of Artificial Sequence: Synthetic oligonucleotide"
  source: /note="Description of Combined DNA/RNA Molecule: Synthetic oligonucleotide"
  source: /note="DNA/RNA"
  modified_base (1)..(1): bicyclic nucleic acid (BNA)
  modified_base (3)..(3): 5-methyl modified nucleotide
  modified_base (7)..(7): 5-methyl modified nucleotide
  modified_base (8)..(8): 5-methyl modified nucleotide
  modified_base (12)..(12): 5-methyl modified nucleotide
  modified_base (13)..(13): 5-methyl modified nucleotide
  modified_base (14)..(14): 5-methyl modified nucleotide
  modified_base (16)..(16): bicyclic nucleic acid (BNA)
  source: /note="3' tri-ethylene glycol (TEG)"
tucuguccaagcccgg

SEQ ID NO: 16653 - DNA, 15 bp, Artificial Sequence
  source: /note="Description of Artificial Sequence: Synthetic oligonucleotide"
  source: /note="Description of Combined DNA/RNA Molecule: Synthetic oligonucleotide"
  source: /note="DNA/RNA"
  modified_base (1)..(1): bicyclic nucleic acid (BNA)
  modified_base (3)..(3): 5-methyl modified nucleotide
  modified_base (7)..(7): 5-methyl modified nucleotide
  modified_base (8)..(8): 5-methyl modified nucleotide
  modified_base (12)..(12): 5-methyl modified nucleotide
  modified_base (13)..(13): 5-methyl modified nucleotide
  modified_base (14)..(14): 5-methyl modified nucleotide
  modified_base (15)..(15): bicyclic nucleic acid (BNA)
  source: /note="3' tri-ethylene glycol (TEG)"
tucuguccaagcccg

SEQ ID NO: 16654 - DNA, 14 bp, Artificial Sequence
  source: /note="Description of Artificial Sequence: Synthetic oligonucleotide"
  source: /note="Description of Combined DNA/RNA Molecule: Synthetic oligonucleotide"
  source: /note="DNA/RNA"
  modified_base (1)..(1): bicyclic nucleic acid (BNA)
  modified_base (3)..(3): 5-methyl modified nucleotide
  modified_base (7)..(7): 5-methyl modified nucleotide
  modified_base (8)..(8): 5-methyl modified nucleotide
  modified_base (12)..(12): 5-methyl modified nucleotide
  modified_base (13)..(13): 5-methyl modified nucleotide
  modified_base (14)..(14): 5-methyl bicyclic nucleic acid
  source: /note="3' tri-ethylene glycol (TEG)"
tucuguccaagccc

SEQ ID NO: 16655 - DNA, 13 bp, Artificial Sequence
  source: /note="Description of Artificial Sequence: Synthetic oligonucleotide"
  source: /note="Description of Combined DNA/RNA Molecule: Synthetic oligonucleotide"
  source: /note="DNA/RNA"
  modified_base (1)..(1): bicyclic nucleic acid (BNA)
  modified_base (3)..(3): 5-methyl modified nucleotide
  modified_base (7)..(7): 5-methyl modified nucleotide
  modified_base (8)..(8): 5-methyl modified nucleotide
  modified_base (12)..(12): 5-methyl modified nucleotide
  modified_base (13)..(13): 5-methyl bicyclic nucleic acid
  source: /note="3' tri-ethylene glycol (TEG)"
tucuguccaagcc

SEQ ID NO: 16656 - DNA, 12 bp, Artificial Sequence
  source: /note="Description of Artificial Sequence: Synthetic oligonucleotide"
  source: /note="Description of Combined DNA/RNA Molecule: Synthetic oligonucleotide"
  source: /note="DNA/RNA"
  modified_base (1)..(1): bicyclic nucleic acid (BNA)
  modified_base (3)..(3): 5-methyl modified nucleotide
  modified_base (7)..(7): 5-methyl modified nucleotide
  modified_base (8)..(8): 5-methyl modified nucleotide
  modified_base (12)..(12): 5-methyl bicyclic nucleic acid
  source: /note="3' tri-ethylene glycol (TEG)"
tucuguccaagc

SEQ ID NO: 16657 - DNA, 11 bp, Artificial Sequence
  source: /note="Description of Artificial Sequence: Synthetic oligonucleotide"
  source: /note="Description of Combined DNA/RNA Molecule: Synthetic oligonucleotide"
  source: /note="DNA/RNA"
  modified_base (1)..(1): bicyclic nucleic acid (BNA)
  modified_base (3)..(3): 5-methyl modified nucleotide
  modified_base (7)..(7): 5-methyl modified nucleotide
  modified_base (8)..(8): 5-methyl modified nucleotide
  modified_base (11)..(11): bicyclic nucleic acid (BNA)
  source: /note="3' tri-ethylene glycol (TEG)"
tucuguccaag

SEQ ID NO: 16658 - DNA, 10 bp, Artificial Sequence
  source: /note="Description of Artificial Sequence: Synthetic oligonucleotide"
  source: /note="Description of Combined DNA/RNA Molecule: Synthetic oligonucleotide"
  source: /note="DNA/RNA"
  modified_base (1)..(1): bicyclic nucleic acid (BNA)
  modified_base (3)..(3): 5-methyl modified nucleotide
  modified_base (7)..(7): 5-methyl modified nucleotide
  modified_base (8)..(8): 5-methyl modified nucleotide
  modified_base (10)..(10): bicyclic nucleic acid (BNA)
  source: /note="3' tri-ethylene glycol (TEG)"
tucuguccaa

SEQ ID NO: 16659 - DNA, 9 bp, Artificial Sequence
  source: /note="Description of Artificial Sequence: Synthetic oligonucleotide"
  source: /note="Description of Combined DNA/RNA Molecule: Synthetic oligonucleotide"
  source: /note="DNA/RNA"
  modified_base (1)..(1): bicyclic nucleic acid (BNA)
  modified_base (3)..(3): 5-methyl modified nucleotide
  modified_base (7)..(7): 5-methyl modified nucleotide
  modified_base (8)..(8): 5-methyl modified nucleotide
  modified_base (9)..(9): bicyclic nucleic acid (BNA)
  source: /note="3' tri-ethylene glycol (TEG)"
tucugucca

SEQ ID NO: 16660 - DNA, 8 bp, Artificial Sequence
  source: /note="Description of Artificial Sequence: Synthetic oligonucleotide"
  source: /note="Description of Combined DNA/RNA Molecule: Synthetic oligonucleotide"
  source: /note="DNA/RNA"
  modified_base (1)..(1): bicyclic nucleic acid (BNA)
  modified_base (3)..(3): 5-methyl modified nucleotide
  modified_base (7)..(7): 5-methyl modified nucleotide
  modified_base (8)..(8): 5-methyl bicyclic nucleic acid
  source: /note="3' tri-ethylene glycol (TEG)"
tucugucc

SEQ ID NO: 16661 - DNA, 19 bp, Artificial Sequence
  source: /note="Description of Artificial Sequence: Synthetic oligonucleotide"
  source: /note="Description of Combined DNA/RNA Molecule: Synthetic oligonucleotide"
  source: /note="DNA/RNA"
  modified_base (1)..(1): bicyclic nucleic acid (BNA)
  modified_base (2)..(2): 5-methyl modified nucleotide
  modified_base (6)..(6): 5-methyl modified nucleotide
  modified_base (7)..(7): 5-methyl modified nucleotide
  modified_base (11)..(11): 5-methyl modified nucleotide
  modified_base (12)..(12): 5-methyl modified nucleotide
  modified_base (13)..(13): 5-methyl modified nucleotide
  modified_base (19)..(19): bicyclic nucleic acid (BNA)
  source: /note="3' tri-ethylene glycol (TEG)"
tcuguccaagcccgguuga

SEQ ID NO: 16662 - DNA, 18 bp, Artificial Sequence
  source: /note="Description of Artificial Sequence: Synthetic oligonucleotide"
  source: /note="Description of Combined DNA/RNA Molecule: Synthetic oligonucleotide"
  source: /note="DNA/RNA"
  modified_base (1)..(1): bicyclic nucleic acid (BNA)
  modified_base (2)..(2): 5-methyl modified nucleotide
  modified_base (6)..(6): 5-methyl modified nucleotide
  modified_base (7)..(7): 5-methyl modified nucleotide
  modified_base (11)..(11): 5-methyl modified nucleotide
  modified_base (12)..(12): 5-methyl modified nucleotide
  modified_base (13)..(13): 5-methyl modified nucleotide
  modified_base (18)..(18): bicyclic nucleic acid (BNA)
  source: /note="3' tri-ethylene glycol (TEG)"
tcuguccaagcccgguug

SEQ ID NO: 16663 - DNA, 17 bp, Artificial Sequence
  source: /note="Description of Artificial Sequence: Synthetic oligonucleotide"
  source: /note="Description of Combined DNA/RNA Molecule: Synthetic oligonucleotide"
  source: /note="DNA/RNA"
  modified_base (1)..(1): bicyclic nucleic acid (BNA)
  modified_base (2)..(2): 5-methyl modified nucleotide
  modified_base (6)..(6): 5-methyl modified nucleotide
  modified_base (7)..(7): 5-methyl modified nucleotide
  modified_base (11)..(11): 5-methyl modified nucleotide
  modified_base (12)..(12): 5-methyl modified nucleotide
  modified_base (13)..(13): 5-methyl modified nucleotide
  modified_base (17)..(17): bicyclic nucleic acid (BNA)
  source: /note="3' tri-ethylene glycol (TEG)"
tcuguccaagcccggut

SEQ ID NO: 16664 - DNA, 16 bp, Artificial Sequence
  source: /note="Description of Artificial Sequence: Synthetic oligonucleotide"
  source: /note="Description of Combined DNA/RNA Molecule: Synthetic oligonucleotide"
  source: /note="DNA/RNA"
  modified_base (1)..(1): bicyclic nucleic acid (BNA)
  modified_base (2)..(2): 5-methyl modified nucleotide
  modified_base (6)..(6): 5-methyl modified nucleotide
  modified_base (7)..(7): 5-methyl modified nucleotide
  modified_base (11)..(11): 5-methyl modified nucleotide
  modified_base (12)..(12): 5-methyl modified nucleotide
  modified_base (13)..(13): 5-methyl modified nucleotide
  modified_base (16)..(16): bicyclic nucleic acid (BNA)
  source: /note="3' tri-ethylene glycol (TEG)"
tcuguccaagcccggt

SEQ ID NO: 16665 - DNA, 15 bp, Artificial Sequence
  source: /note="Description of Artificial Sequence: Synthetic oligonucleotide"
  source: /note="Description of Combined DNA/RNA Molecule: Synthetic oligonucleotide"
  source: /note="DNA/RNA"
  modified_base (1)..(1): bicyclic nucleic acid (BNA)
  modified_base (2)..(2): 5-methyl modified nucleotide
  modified_base (6)..(6): 5-methyl modified nucleotide
  modified_base (7)..(7): 5-methyl modified nucleotide
  modified_base (11)..(11): 5-methyl modified nucleotide
  modified_base (12)..(12): 5-methyl modified nucleotide
  modified_base (13)..(13): 5-methyl modified nucleotide
  modified_base (15)..(15): bicyclic nucleic acid (BNA)
  source: /note="3' tri-ethylene glycol (TEG)"
tcuguccaagcccgg

SEQ ID NO: 16666 - DNA, 14 bp, Artificial Sequence
  source: /note="Description of Artificial Sequence: Synthetic oligonucleotide"
  source: /note="Description of Combined DNA/RNA Molecule: Synthetic oligonucleotide"
  source: /note="DNA/RNA"
  modified_base (1)..(1): bicyclic nucleic acid (BNA)
  modified_base (2)..(2): 5-methyl modified nucleotide
  modified_base (6)..(6): 5-methyl modified nucleotide
  modified_base (7)..(7): 5-methyl modified nucleotide
  modified_base (11)..(11): 5-methyl modified nucleotide
  modified_base (12)..(12): 5-methyl modified nucleotide
  modified_base (13)..(13): 5-methyl modified nucleotide
  modified_base (14)..(14): bicyclic nucleic acid (BNA)
  source: /note="3' tri-ethylene glycol (TEG)"
tcuguccaagcccg

SEQ ID NO: 16667 - DNA, 13 bp, Artificial Sequence
  source: /note="Description of Artificial Sequence: Synthetic oligonucleotide"
  source: /note="Description of Combined DNA/RNA Molecule: Synthetic oligonucleotide"
  source: /note="DNA/RNA"
  modified_base (1)..(1): bicyclic nucleic acid (BNA)
  modified_base (2)..(2): 5-methyl modified nucleotide
  modified_base (6)..(6): 5-methyl modified nucleotide
  modified_base (7)..(7): 5-methyl modified nucleotide
  modified_base (11)..(11): 5-methyl modified nucleotide
  modified_base (12)..(12): 5-methyl modified nucleotide
  modified_base (13)..(13): 5-methyl bicyclic nucleic acid
  source: /note="3' tri-ethylene glycol (TEG)"
tcuguccaagccc

SEQ ID NO: 16668 - DNA, 12 bp, Artificial Sequence
  source: /note="Description of Artificial Sequence: Synthetic oligonucleotide"
  source: /note="Description of Combined DNA/RNA Molecule: Synthetic oligonucleotide"
  source: /note="DNA/RNA"
  modified_base (1)..(1): bicyclic nucleic acid (BNA)
  modified_base (2)..(2): 5-methyl modified nucleotide
  modified_base (6)..(6): 5-methyl modified nucleotide
  modified_base (7)..(7): 5-methyl modified nucleotide
  modified_base (11)..(11): 5-methyl modified nucleotide
  modified_base (12)..(12): 5-methyl bicyclic nucleic acid
  source: /note="3' tri-ethylene glycol (TEG)"
tcuguccaagcc

SEQ ID NO: 16669 - DNA, 11 bp, Artificial Sequence
  source: /note="Description of Artificial Sequence: Synthetic oligonucleotide"
  source: /note="Description of Combined DNA/RNA Molecule: Synthetic oligonucleotide"
  source: /note="DNA/RNA"
  modified_base (1)..(1): bicyclic nucleic acid (BNA)
  modified_base (2)..(2): 5-methyl modified nucleotide
  modified_base (6)..(6): 5-methyl modified nucleotide
  modified_base (7)..(7): 5-methyl modified nucleotide
  modified_base (11)..(11): 5-methyl bicyclic nucleic acid
  source: /note="3' tri-ethylene glycol (TEG)"
tcuguccaagc

SEQ ID NO: 16670 - DNA, 10 bp, Artificial Sequence
  source: /note="Description of Artificial Sequence: Synthetic oligonucleotide"
  source: /note="Description of Combined DNA/RNA Molecule: Synthetic oligonucleotide"
  source: /note="DNA/RNA"
  modified_base (1)..(1): bicyclic nucleic acid (BNA)
  modified_base (2)..(2): 5-methyl modified nucleotide
  modified_base (6)..(6): 5-methyl modified nucleotide
  modified_base (7)..(7): 5-methyl modified nucleotide
  modified_base (10)..(10): bicyclic nucleic acid (BNA)
  source: /note="3' tri-ethylene glycol (TEG)"
tcuguccaag

SEQ ID NO: 16671 - DNA, 9 bp, Artificial Sequence
  source: /note="Description of Artificial Sequence: Synthetic oligonucleotide"
  source: /note="Description of Combined DNA/RNA Molecule: Synthetic oligonucleotide"
  source: /note="DNA/RNA"
  modified_base (1)..(1): bicyclic nucleic acid (BNA)
  modified_base (2)..(2): 5-methyl modified nucleotide
  modified_base (6)..(6): 5-methyl modified nucleotide
  modified_base (7)..(7): 5-methyl modified nucleotide
  modified_base (9)..(9): bicyclic nucleic acid (BNA)
  source: /note="3' tri-ethylene glycol (TEG)"
tcuguccaa

SEQ ID NO: 16672 - DNA, 8 bp, Artificial Sequence
  source: /note="Description of Artificial Sequence: Synthetic oligonucleotide"
  source: /note="Description of Combined DNA/RNA Molecule: Synthetic oligonucleotide"
  source: /note="DNA/RNA"
  modified_base (1)..(1): bicyclic nucleic acid (BNA)
  modified_base (2)..(2): 5-methyl modified nucleotide
  modified_base (6)..(6): 5-methyl modified nucleotide
  modified_base (7)..(7): 5-methyl modified nucleotide
  modified_base (8)..(8): bicyclic nucleic acid (BNA)
  source: /note="3' tri-ethylene glycol (TEG)"
tcugucca

SEQ ID NO: 16673 - RNA, 17 nt, Artificial Sequence
  source: /note="Description of Artificial Sequence: Synthetic oligonucleotide"
  source: /note="RNA"
  modified_base (1)..(1): 5-methyl bicyclic nucleic acid
  modified_base (5)..(5): 5-methyl modified nucleotide
  modified_base (6)..(6): 5-methyl modified nucleotide
  modified_base (10)..(10): 5-methyl modified nucleotide
  modified_base (11)..(11): 5-methyl modified nucleotide
  modified_base (12)..(12): 5-methyl modified nucleotide
  modified_base (17)..(17): bicyclic nucleic acid (BNA)
  source: /note="3' tri-ethylene glycol (TEG)"
cuguccaagcccgguug

SEQ ID NO: 16674 - DNA, 16 bp, Artificial Sequence
  source: /note="Description of Artificial Sequence: Synthetic oligonucleotide"
  source: /note="Description of Combined DNA/RNA Molecule: Synthetic oligonucleotide"
  source: /note="DNA/RNA"
  modified_base (1)..(1): 5-methyl bicyclic nucleic acid
  modified_base (5)..(5): 5-methyl modified nucleotide
  modified_base (6)..(6): 5-methyl modified nucleotide
  modified_base (10)..(10): 5-methyl modified nucleotide
  modified_base (11)..(11): 5-methyl modified nucleotide
  modified_base (12)..(12): 5-methyl modified nucleotide
  modified_base (16)..(16): bicyclic nucleic acid (BNA)
  source: /note="3' tri-ethylene glycol (TEG)"
cuguccaagcccggut

SEQ ID NO: 16675 - DNA, 15 bp, Artificial Sequence
  source: /note="Description of Artificial Sequence: Synthetic oligonucleotide"
  source: /note="Description of Combined DNA/RNA Molecule: Synthetic oligonucleotide"
  source: /note="DNA/RNA"
  modified_base (1)..(1): 5-methyl bicyclic nucleic acid
  modified_base (5)..(5): 5-methyl modified nucleotide
  modified_base (6)..(6): 5-methyl modified nucleotide
  modified_base (10)..(10): 5-methyl modified nucleotide
  modified_base (11)..(11): 5-methyl modified nucleotide
  modified_base (12)..(12): 5-methyl modified nucleotide
  modified_base (15)..(15): bicyclic nucleic acid (BNA)
  source: /note="3' tri-ethylene glycol (TEG)"
cuguccaagcccggt

SEQ ID NO: 16676 - RNA, 14 nt, Artificial Sequence
  source: /note="Description of Artificial Sequence: Synthetic oligonucleotide"
  source: /note="RNA"
  modified_base (1)..(1): 5-methyl bicyclic nucleic acid
  modified_base (5)..(5): 5-methyl modified nucleotide
  modified_base (6)..(6): 5-methyl modified nucleotide
  modified_base (10)..(10): 5-methyl modified nucleotide
  modified_base (11)..(11): 5-methyl modified nucleotide
  modified_base (12)..(12): 5-methyl modified nucleotide
  modified_base (14)..(14): bicyclic nucleic acid (BNA)
  source: /note="3' tri-ethylene glycol (TEG)"
cuguccaagcccgg

SEQ ID NO: 16677 - RNA, 13 nt, Artificial Sequence
  source: /note="Description of Artificial Sequence: Synthetic oligonucleotide"
  source: /note="RNA"
  modified_base (1)..(1): 5-methyl bicyclic nucleic acid
  modified_base (5)..(5): 5-methyl modified nucleotide
  modified_base (6)..(6): 5-methyl modified nucleotide
  modified_base (10)..(10): 5-methyl modified nucleotide
  modified_base (11)..(11): 5-methyl modified nucleotide
  modified_base (12)..(12): 5-methyl modified nucleotide
  modified_base (13)..(13): bicyclic nucleic acid (BNA)
  source: /note="3' tri-ethylene glycol (TEG)"
cuguccaagcccg

SEQ ID NO: 16678 - RNA, 12 nt, Artificial Sequence
  source: /note="Description of Artificial Sequence: Synthetic oligonucleotide"
  source: /note="RNA"
  modified_base (1)..(1): 5-methyl bicyclic nucleic acid
  modified_base (5)..(5): 5-methyl modified nucleotide
  modified_base (6)..(6): 5-methyl modified nucleotide
  modified_base (10)..(10): 5-methyl modified nucleotide
  modified_base (11)..(11): 5-methyl modified nucleotide
  modified_base (12)..(12): 5-methyl bicyclic nucleic acid
  source: /note="3' tri-ethylene glycol (TEG)"
cuguccaagccc

SEQ ID NO: 16679 - RNA, 11 nt, Artificial Sequence
  source: /note="Description of Artificial Sequence: Synthetic oligonucleotide"
  source: /note="RNA"
  modified_base (1)..(1): 5-methyl bicyclic nucleic acid
  modified_base (5)..(5): 5-methyl modified nucleotide
  modified_base (6)..(6): 5-methyl modified nucleotide
  modified_base (10)..(10): 5-methyl modified nucleotide
  modified_base (11)..(11): 5-methyl bicyclic nucleic acid
  source: /note="3' tri-ethylene glycol (TEG)"
cuguccaagcc

SEQ ID NO: 16680 - RNA, 10 nt, Artificial Sequence
  source: /note="Description of Artificial Sequence: Synthetic oligonucleotide"
  source: /note="RNA"
  modified_base (1)..(1): 5-methyl bicyclic nucleic acid
  modified_base (5)..(5): 5-methyl modified nucleotide
  modified_base (6)..(6): 5-methyl modified nucleotide
  modified_base (10)..(10): 5-methyl bicyclic nucleic acid
  source: /note="3' tri-ethylene glycol (TEG)"
cuguccaagc

SEQ ID NO: 16681 - RNA, 9 nt, Artificial Sequence
  source: /note="Description of Artificial Sequence: Synthetic oligonucleotide"
  source: /note="RNA"
  modified_base (1)..(1): 5-methyl bicyclic nucleic acid
  modified_base (5)..(5): 5-methyl modified nucleotide
  modified_base (6)..(6): 5-methyl modified nucleotide
  modified_base (9)..(9): bicyclic nucleic acid (BNA)
  source: /note="3' tri-ethylene glycol (TEG)"
cuguccaag

SEQ ID NO: 16682 - RNA, 8 nt, Artificial Sequence
  source: /note="Description of Artificial Sequence: Synthetic oligonucleotide"
  source: /note="RNA"
  modified_base (1)..(1): 5-methyl bicyclic nucleic acid
  modified_base (5)..(5): 5-methyl modified nucleotide
  modified_base (6)..(6): 5-methyl modified nucleotide
  modified_base (8)..(8): bicyclic nucleic acid (BNA)
  source: /note="3' tri-ethylene glycol (TEG)"
cuguccaa

SEQ ID NO: 16683 - RNA, 20 nt, Artificial Sequence
  source: /note="Description of Artificial Sequence: Synthetic oligonucleotide"
  source: /note="RNA"
  modified_base (1)..(1): bicyclic nucleic acid (BNA)
  modified_base (4)..(4): 5-methyl modified nucleotide
  modified_base (8)..(8): 5-methyl modified nucleotide
  modified_base (9)..(9): 5-methyl modified nucleotide
  modified_base (13)..(13): 5-methyl modified nucleotide
  modified_base (14)..(14): 5-methyl modified nucleotide
  modified_base (15)..(15): 5-methyl modified nucleotide
  modified_base (20)..(20): bicyclic nucleic acid (BNA)
  source: /note="3' tri-ethylene glycol (TEG)"
guucuguccaagcccgguug

SEQ ID NO: 16684 - DNA, 19 bp, Artificial Sequence
  source: /note="Description of Artificial Sequence: Synthetic oligonucleotide"
  source: /note="Description of Combined DNA/RNA Molecule: Synthetic oligonucleotide"
  source: /note="DNA/RNA"
  modified_base (1)..(1): bicyclic nucleic acid (BNA)
  modified_base (4)..(4): 5-methyl modified nucleotide
  modified_base (8)..(8): 5-methyl modified nucleotide
  modified_base (9)..(9): 5-methyl modified nucleotide
  modified_base (13)..(13): 5-methyl modified nucleotide
  modified_base (14)..(14): 5-methyl modified nucleotide
  modified_base (15)..(15): 5-methyl modified nucleotide
  modified_base (19)..(19): bicyclic nucleic acid (BNA)
  source: /note="3' tri-ethylene glycol (TEG)"
guucuguccaagcccggut

SEQ ID NO: 16685 - DNA, 18 bp, Artificial Sequence
  source: /note="Description of Artificial Sequence: Synthetic oligonucleotide"
  source: /note="Description of Combined DNA/RNA Molecule: Synthetic oligonucleotide"
  source: /note="DNA/RNA"
  modified_base (1)..(1): bicyclic nucleic acid (BNA)
  modified_base (4)..(4): 5-methyl modified nucleotide
  modified_base (8)..(8): 5-methyl modified nucleotide
  modified_base (9)..(9): 5-methyl modified nucleotide
  modified_base (13)..(13): 5-methyl modified nucleotide
  modified_base (14)..(14): 5-methyl modified nucleotide
  modified_base (15)..(15): 5-methyl modified nucleotide
  modified_base (18)..(18): bicyclic nucleic acid (BNA)
  source: /note="3' tri-ethylene glycol (TEG)"
guucuguccaagcccggt

SEQ ID NO: 16686 - RNA, 17 nt, Artificial Sequence
  source: /note="Description of Artificial Sequence: Synthetic oligonucleotide"
  source: /note="RNA"
  modified_base (1)..(1): bicyclic nucleic acid (BNA)
  modified_base (4)..(4): 5-methyl modified nucleotide
  modified_base (8)..(8): 5-methyl modified nucleotide
  modified_base (9)..(9): 5-methyl modified nucleotide
  modified_base (13)..(13): 5-methyl modified nucleotide
  modified_base (14)..(14): 5-methyl modified nucleotide
  modified_base (15)..(15): 5-methyl modified nucleotide
  modified_base (17)..(17): bicyclic nucleic acid (BNA)
  source: /note="3' tri-ethylene glycol (TEG)"
guucuguccaagcccgg

SEQ ID NO: 16687 - RNA, 16 nt, Artificial Sequence
  source: /note="Description of Artificial Sequence: Synthetic oligonucleotide"
  source: /note="RNA"
  modified_base (1)..(1): bicyclic nucleic acid (BNA)
  modified_base (4)..(4): 5-methyl modified nucleotide
  modified_base (8)..(8): 5-methyl modified nucleotide
  modified_base (9)..(9): 5-methyl modified nucleotide
  modified_base (13)..(13): 5-methyl modified nucleotide
  modified_base (14)..(14): 5-methyl modified nucleotide
  modified_base (15)..(15): 5-methyl modified nucleotide
  modified_base (16)..(16): bicyclic nucleic acid (BNA)
  source: /note="3' tri-ethylene glycol (TEG)"
guucuguccaagcccg

SEQ ID NO: 16688 - RNA, 15 nt, Artificial Sequence
  source: /note="Description of Artificial Sequence: Synthetic oligonucleotide"
  source: /note="RNA"
  modified_base (1)..(1): bicyclic nucleic acid (BNA)
  modified_base (4)..(4): 5-methyl modified nucleotide
  modified_base (8)..(8): 5-methyl modified nucleotide
  modified_base (9)..(9): 5-methyl modified nucleotide
  modified_base (13)..(13): 5-methyl modified nucleotide
  modified_base (14)..(14): 5-methyl modified nucleotide
  modified_base (15)..(15): 5-methyl bicyclic nucleic acid
  source: /note="3' tri-ethylene glycol (TEG)"
guucuguccaagccc

SEQ ID NO: 16689 - RNA, 14 nt, Artificial Sequence
  source: /note="Description of Artificial Sequence: Synthetic oligonucleotide"
  source: /note="RNA"
  modified_base (1)..(1): bicyclic nucleic acid (BNA)
  modified_base (4)..(4): 5-methyl modified nucleotide
  modified_base (8)..(8): 5-methyl modified nucleotide
  modified_base (9)..(9): 5-methyl modified nucleotide
  modified_base (13)..(13): 5-methyl modified nucleotide
  modified_base (14)..(14): 5-methyl bicyclic nucleic acid
  source: /note="3' tri-ethylene glycol (TEG)"
guucuguccaagcc

SEQ ID NO: 16690 - RNA, 13 nt, Artificial Sequence
  source: /note="Description of Artificial Sequence: Synthetic oligonucleotide"
  source: /note="RNA"
  modified_base (1)..(1): bicyclic nucleic acid (BNA)
  modified_base (4)..(4): 5-methyl modified nucleotide
  modified_base (8)..(8): 5-methyl modified nucleotide
  modified_base (9)..(9): 5-methyl modified nucleotide
  modified_base (13)..(13): 5-methyl bicyclic nucleic acid
  source: /note="3' tri-ethylene glycol (TEG)"
guucuguccaagc

SEQ ID NO: 16691 - RNA, 12 nt, Artificial Sequence
  source: /note="Description of Artificial Sequence: Synthetic oligonucleotide"
  source: /note="RNA"
  modified_base (1)..(1): bicyclic nucleic acid (BNA)
  modified_base (4)..(4): 5-methyl modified nucleotide
  modified_base (8)..(8): 5-methyl modified nucleotide
  modified_base (9)..(9): 5-methyl modified nucleotide
  modified_base (12)..(12): bicyclic nucleic acid (BNA)
  source: /note="3' tri-ethylene glycol (TEG)"
guucuguccaag

SEQ ID NO: 16692 - RNA, 11 nt, Artificial Sequence
  source: /note="Description of Artificial Sequence: Synthetic oligonucleotide"
  source: /note="RNA"
  modified_base (1)..(1): bicyclic nucleic acid (BNA)
  modified_base (4)..(4): 5-methyl modified nucleotide
  modified_base (8)..(8): 5-methyl modified nucleotide
  modified_base (9)..(9): 5-methyl modified nucleotide
  modified_base (11)..(11): bicyclic nucleic acid (BNA)
  source: /note="3' tri-ethylene glycol (TEG)"
guucuguccaa

SEQ ID NO: 16693 - RNA, 10 nt, Artificial Sequence
  source: /note="Description of Artificial Sequence: Synthetic oligonucleotide"
  source: /note="RNA"
  modified_base (1)..(1): bicyclic nucleic acid (BNA)
  modified_base (4)..(4): 5-methyl modified nucleotide
  modified_base (8)..(8): 5-methyl modified nucleotide
  modified_base (9)..(9): 5-methyl modified nucleotide
  modified_base (10)..(10): bicyclic nucleic acid (BNA)
  source: /note="3' tri-ethylene glycol (TEG)"
guucugucca

SEQ ID NO: 16694 - RNA, 9 nt, Artificial Sequence
  source: /note="Description of Artificial Sequence: Synthetic oligonucleotide"
  source: /note="RNA"
  modified_base (1)..(1): bicyclic nucleic acid (BNA)
  modified_base (4)..(4): 5-methyl modified nucleotide
  modified_base (8)..(8): 5-methyl modified nucleotide
  modified_base (9)..(9): 5-methyl bicyclic nucleic acid
  source: /note="3' tri-ethylene glycol (TEG)"
guucugucc

SEQ ID NO: 16695 - RNA, 8 nt, Artificial Sequence
  source: /note="Description of Artificial Sequence: Synthetic oligonucleotide"
  source: /note="RNA"
  modified_base (1)..(1): bicyclic nucleic acid (BNA)
  modified_base (4)..(4): 5-methyl modified nucleotide
  modified_base (8)..(8): 5-methyl bicyclic nucleic acid
  source: /note="3' tri-ethylene glycol (TEG)"
guucuguc

SEQ ID NO: 16696 - DNA, 20 bp, Artificial Sequence
  source: /note="Description of Artificial Sequence: Synthetic oligonucleotide"
  source: /note="Description of Combined DNA/RNA Molecule: Synthetic oligonucleotide"
  source: /note="DNA/RNA"
  modified_base (1)..(1): bicyclic nucleic acid (BNA)
  modified_base (5)..(5): 5-methyl modified nucleotide
  modified_base (9)..(9): 5-methyl modified nucleotide
  modified_base (10)..(10): 5-methyl modified nucleotide
  modified_base (14)..(14): 5-methyl modified nucleotide
  modified_base (15)..(15): 5-methyl modified nucleotide
  modified_base (16)..(16): 5-methyl modified nucleotide
  modified_base (20)..(20): bicyclic nucleic acid (BNA)
  source: /note="3' tri-ethylene glycol (TEG)"
aguucuguccaagcccggut

SEQ ID NO: 16697 - DNA, 19 bp, Artificial Sequence
  source: /note="Description of Artificial Sequence: Synthetic oligonucleotide"
  source: /note="Description of Combined DNA/RNA Molecule: Synthetic oligonucleotide"
  source: /note="DNA/RNA"
  modified_base (1)..(1): bicyclic nucleic acid (BNA)
  modified_base (5)..(5): 5-methyl modified nucleotide
  modified_base (9)..(9): 5-methyl modified nucleotide
  modified_base (10)..(10): 5-methyl modified nucleotide
  modified_base (14)..(14): 5-methyl modified nucleotide
  modified_base (15)..(15): 5-methyl modified nucleotide
  modified_base (16)..(16): 5-methyl modified nucleotide
  modified_base (19)..(19): bicyclic nucleic acid (BNA)
  source: /note="3' tri-ethylene glycol (TEG)"
aguucuguccaagcccggt

SEQ ID NO: 16698 - RNA, 18 nt, Artificial Sequence
  source: /note="Description of Artificial Sequence: Synthetic oligonucleotide"
  source: /note="RNA"
  modified_base (1)..(1): bicyclic nucleic acid (BNA)
  modified_base (5)..(5): 5-methyl modified nucleotide
  modified_base (9)..(9): 5-methyl modified nucleotide
  modified_base (10)..(10): 5-methyl modified nucleotide
  modified_base (14)..(14): 5-methyl modified nucleotide
  modified_base (15)..(15): 5-methyl modified nucleotide
  modified_base (16)..(16): 5-methyl modified nucleotide
  modified_base (18)..(18): bicyclic nucleic acid (BNA)
  source: /note="3' tri-ethylene glycol (TEG)"
aguucuguccaagcccgg

SEQ ID NO: 16699 - RNA, 17 nt, Artificial Sequence
  source: /note="Description of Artificial Sequence: Synthetic oligonucleotide"
  source: /note="RNA"
  modified_base (1)..(1): bicyclic nucleic acid (BNA)
  modified_base (5)..(5): 5-methyl modified nucleotide
  modified_base (9)..(9): 5-methyl modified nucleotide
  modified_base (10)..(10): 5-methyl modified nucleotide
  modified_base (14)..(14): 5-methyl modified nucleotide
  modified_base (15)..(15): 5-methyl modified nucleotide
  modified_base (16)..(16): 5-methyl modified nucleotide
  modified_base (17)..(17): bicyclic nucleic acid (BNA)
  source: /note="3' tri-ethylene glycol (TEG)"
aguucuguccaagcccg

SEQ ID NO: 16700 - RNA, 16 nt, Artificial Sequence
  source: /note="Description of Artificial Sequence: Synthetic oligonucleotide"
  source: /note="RNA"
  modified_base (1)..(1): bicyclic nucleic acid (BNA)
  modified_base (5)..(5): 5-methyl modified nucleotide
  modified_base (9)..(9): 5-methyl modified nucleotide
  modified_base (10)..(10): 5-methyl modified nucleotide
  modified_base (14)..(14): 5-methyl modified nucleotide
  modified_base (15)..(15): 5-methyl modified nucleotide
  modified_base (16)..(16): 5-methyl bicyclic nucleic acid
  source: /note="3' tri-ethylene glycol (TEG)"
aguucuguccaagccc

SEQ ID NO: 16701 - RNA, 15 nt, Artificial Sequence
  source: /note="Description of Artificial Sequence: Synthetic oligonucleotide"
  source: /note="RNA"
  modified_base (1)..(1): bicyclic nucleic acid (BNA)
  modified_base (5)..(5): 5-methyl modified nucleotide
  modified_base (9)..(9): 5-methyl modified nucleotide
  modified_base (10)..(10): 5-methyl modified nucleotide
  modified_base (14)..(14): 5-methyl modified nucleotide
  modified_base (15)..(15): 5-methyl bicyclic nucleic acid
  source: /note="3' tri-ethylene glycol (TEG)"
aguucuguccaagcc

SEQ ID NO: 16702 - RNA, 14 nt, Artificial Sequence
  source: /note="Description of Artificial Sequence: Synthetic oligonucleotide"
  source: /note="RNA"
  modified_base (1)..(1): bicyclic nucleic acid (BNA)
  modified_base (5)..(5): 5-methyl modified nucleotide
  modified_base (9)..(9): 5-methyl modified nucleotide
  modified_base (10)..(10): 5-methyl modified nucleotide
  modified_base (14)..(14): 5-methyl bicyclic nucleic acid
  source: /note="3' tri-ethylene glycol (TEG)"
aguucuguccaagc

SEQ ID NO: 16703 - RNA, 13 nt, Artificial Sequence
  source: /note="Description of Artificial Sequence: Synthetic oligonucleotide"
  source: /note="RNA"
  modified_base (1)..(1): bicyclic nucleic acid (BNA)
  modified_base (5)..(5): 5-methyl modified nucleotide
  modified_base (9)..(9): 5-methyl modified nucleotide
  modified_base (10)..(10): 5-methyl modified nucleotide
  modified_base (13)..(13): bicyclic nucleic acid (BNA)
  source: /note="3' tri-ethylene glycol (TEG)"
aguucuguccaag

SEQ ID NO: 16704 - RNA, 12 nt, Artificial Sequence
  source: /note="Description of Artificial Sequence: Synthetic oligonucleotide"
  source: /note="RNA"
  modified_base (1)..(1): bicyclic nucleic acid (BNA)
  modified_base (5)..(5): 5-methyl modified nucleotide
  modified_base (9)..(9): 5-methyl modified nucleotide
  modified_base (10)..(10): 5-methyl modified nucleotide
  modified_base (12)..(12): bicyclic nucleic acid (BNA)
  source: /note="3' tri-ethylene glycol (TEG)"
aguucuguccaa

SEQ ID NO: 16705 - RNA, 11 nt, Artificial Sequence
  source: /note="Description of Artificial Sequence: Synthetic oligonucleotide"
  source: /note="RNA"
  modified_base (1)..(1): bicyclic nucleic acid (BNA)
  modified_base (5)..(5): 5-methyl modified nucleotide
  modified_base (9)..(9): 5-methyl modified nucleotide
  modified_base (10)..(10): 5-methyl modified nucleotide
  modified_base (11)..(11): bicyclic nucleic acid (BNA)
  source: /note="3' tri-ethylene glycol (TEG)"
aguucugucca

SEQ ID NO: 16706 - RNA, 10 nt, Artificial Sequence
  source: /note="Description of Artificial Sequence: Synthetic oligonucleotide"
  source: /note="RNA"
  modified_base (1)..(1): bicyclic nucleic acid (BNA)
  modified_base (5)..(5): 5-methyl modified nucleotide
  modified_base (9)..(9): 5-methyl modified nucleotide
  modified_base (10)..(10): 5-methyl bicyclic nucleic acid
  source: /note="3' tri-ethylene glycol (TEG)"
aguucugucc

SEQ ID NO: 16707 - RNA, 9 nt, Artificial Sequence
  source: /note="Description of Artificial Sequence: Synthetic oligonucleotide"
  source: /note="RNA"
  modified_base (1)..(1): bicyclic nucleic acid (BNA)
  modified_base (5)..(5): 5-methyl modified nucleotide
  modified_base (9)..(9): 5-methyl bicyclic nucleic acid
  source: /note="3' tri-ethylene glycol (TEG)"
aguucuguc

SEQ ID NO: 16708 - DNA, 8 bp, Artificial Sequence
  source: /note="Description of Artificial Sequence: Synthetic oligonucleotide"
  source: /note="Description of Combined DNA/RNA Molecule: Synthetic oligonucleotide"
  source: /note="DNA/RNA"
  modified_base (1)..(1): bicyclic nucleic acid (BNA)
  modified_base (5)..(5): 5-methyl modified nucleotide
  modified_base (8)..(8): bicyclic nucleic acid (BNA)
  source: /note="3' tri-ethylene glycol (TEG)"
aguucugt

SEQ ID NO: 16709 - DNA, 20 bp, Artificial Sequence
  source: /note="Description of Artificial Sequence: Synthetic oligonucleotide"
  source: /note="Description of Combined DNA/RNA Molecule: Synthetic oligonucleotide"
  source: /note="DNA/RNA"
  modified_base (1)..(1): bicyclic nucleic acid (BNA)
  modified_base (6)..(6): 5-methyl modified nucleotide
  modified_base (10)..(10): 5-methyl modified nucleotide
  modified_base (11)..(11): 5-methyl modified nucleotide
  modified_base (15)..(15): 5-methyl modified nucleotide
  modified_base (16)..(16): 5-methyl modified nucleotide
  modified_base (17)..(17): 5-methyl modified nucleotide
  modified_base (20)..(20): bicyclic nucleic acid (BNA)
  source: /note="3' tri-ethylene glycol (TEG)"
aaguucuguccaagcccggt

SEQ ID NO: 16710 - RNA, 19 nt, Artificial Sequence
  source: /note="Description of Artificial Sequence: Synthetic oligonucleotide"
  source: /note="RNA"
  modified_base (1)..(1): bicyclic nucleic acid (BNA)
  modified_base (6)..(6): 5-methyl modified nucleotide
  modified_base (10)..(10): 5-methyl modified nucleotide
  modified_base (11)..(11): 5-methyl modified nucleotide
  modified_base (15)..(15): 5-methyl modified nucleotide
  modified_base (16)..(16): 5-methyl modified nucleotide
  modified_base (17)..(17): 5-methyl modified nucleotide
  modified_base (19)..(19): bicyclic nucleic acid (BNA)
  source: /note="3' tri-ethylene glycol (TEG)"
aaguucuguccaagcccgg

SEQ ID NO: 16711 - RNA, 18 nt, Artificial Sequence
  source: /note="Description of Artificial Sequence: Synthetic oligonucleotide"
  source: /note="RNA"
  modified_base (1)..(1): bicyclic nucleic acid (BNA)
  modified_base (6)..(6): 5-methyl modified nucleotide
  modified_base (10)..(10): 5-methyl modified nucleotide
  modified_base (11)..(11): 5-methyl modified nucleotide
  modified_base (15)..(15): 5-methyl modified nucleotide
  modified_base (16)..(16): 5-methyl modified nucleotide
  modified_base (17)..(17): 5-methyl modified nucleotide
  modified_base (18)..(18): bicyclic nucleic acid (BNA)
  source: /note="3' tri-ethylene glycol (TEG)"
aaguucuguccaagcccg

SEQ ID NO: 16712 - RNA, 17 nt, Artificial Sequence
  source: /note="Description of Artificial Sequence: Synthetic oligonucleotide"
  source: /note="RNA"
  modified_base (1)..(1): bicyclic nucleic acid (BNA)
  modified_base (6)..(6): 5-methyl modified nucleotide
  modified_base (10)..(10): 5-methyl modified nucleotide
  modified_base (11)..(11): 5-methyl modified nucleotide
  modified_base (15)..(15): 5-methyl modified nucleotide
  modified_base (16)..(16): 5-methyl modified nucleotide
  modified_base (17)..(17): 5-methyl bicyclic nucleic acid
  source: /note="3' tri-ethylene glycol (TEG)"
aaguucuguccaagccc

SEQ ID NO: 16713 - RNA, 16 nt, Artificial Sequence
  source: /note="Description of Artificial Sequence: Synthetic oligonucleotide"
  source: /note="RNA"
  modified_base (1)..(1): bicyclic nucleic acid (BNA)
  modified_base (6)..(6): 5-methyl modified nucleotide
  modified_base (10)..(10): 5-methyl modified nucleotide
  modified_base (11)..(11): 5-methyl modified nucleotide
  modified_base (15)..(15): 5-methyl modified nucleotide
  modified_base (16)..(16): 5-methyl bicyclic nucleic acid
  source: /note="3' tri-ethylene glycol (TEG)"
aaguucuguccaagcc

SEQ ID NO: 16714 - RNA, 15 nt, Artificial Sequence
  source: /note="Description of Artificial Sequence: Synthetic oligonucleotide"
  source: /note="RNA"
  modified_base (1)..(1): bicyclic nucleic acid (BNA)
  modified_base (6)..(6): 5-methyl modified nucleotide
  modified_base (10)..(10): 5-methyl modified nucleotide
  modified_base (11)..(11): 5-methyl modified nucleotide
  modified_base (15)..(15): 5-methyl bicyclic nucleic acid
  source: /note="3' tri-ethylene glycol (TEG)"
aaguucuguccaagc

SEQ ID NO: 16715 - RNA, 14 nt, Artificial Sequence
  source: /note="Description of Artificial Sequence: Synthetic oligonucleotide"
  source: /note="RNA"
  modified_base (1)..(1): bicyclic nucleic acid (BNA)
  modified_base (6)..(6): 5-methyl modified nucleotide
  modified_base (10)..(10): 5-methyl modified nucleotide
  modified_base (11)..(11): 5-methyl modified nucleotide
  modified_base (14)..(14): bicyclic nucleic acid (BNA)
  source: /note="3' tri-ethylene glycol (TEG)"
aaguucuguccaag

SEQ ID NO: 16716 - RNA, 13 nt, Artificial Sequence
  source: /note="Description of Artificial Sequence: Synthetic oligonucleotide"
  source: /note="RNA"
  modified_base (1)..(1): bicyclic nucleic acid (BNA)
  modified_base (6)..(6): 5-methyl modified nucleotide
  modified_base (10)..(10): 5-methyl modified nucleotide
  modified_base (11)..(11): 5-methyl modified nucleotide
  modified_base (13)..(13): bicyclic nucleic acid (BNA)
  source: /note="3' tri-ethylene glycol (TEG)"
aaguucuguccaa

SEQ ID NO: 16717 - RNA, 12 nt, Artificial Sequence
  source: /note="Description of Artificial Sequence: Synthetic oligonucleotide"
  source: /note="RNA"
  modified_base (1)..(1): bicyclic nucleic acid (BNA)
  modified_base (6)..(6): 5-methyl modified nucleotide
  modified_base (10)..(10): 5-methyl modified nucleotide
  modified_base (11)..(11): 5-methyl modified nucleotide
  modified_base (12)..(12): bicyclic nucleic acid (BNA)
  source: /note="3' tri-ethylene glycol (TEG)"
aaguucugucca

SEQ ID NO: 16718 - RNA, 11 nt, Artificial Sequence
  source: /note="Description of Artificial Sequence: Synthetic oligonucleotide"
  source: /note="RNA"
  modified_base (1)..(1): bicyclic nucleic acid (BNA)
  modified_base (6)..(6): 5-methyl modified nucleotide
  modified_base (10)..(10): 5-methyl modified nucleotide
  modified_base (11)..(11): 5-methyl bicyclic nucleic acid
  source: /note="3' tri-ethylene glycol (TEG)"
aaguucugucc

SEQ ID NO: 16719 - RNA, 10 nt, Artificial Sequence
  source: /note="Description of Artificial Sequence: Synthetic oligonucleotide"
  source: /note="RNA"
  modified_base (1)..(1): bicyclic nucleic acid (BNA)
  modified_base (6)..(6): 5-methyl modified nucleotide
  modified_base (10)..(10): 5-methyl bicyclic nucleic acid
  source: /note="3' tri-ethylene glycol (TEG)"
aaguucuguc

SEQ ID NO: 16720 - DNA, 9 bp, Artificial Sequence
  source: /note="Description of Artificial Sequence: Synthetic oligonucleotide"
  source: /note="Description of Combined DNA/RNA Molecule: Synthetic oligonucleotide"
  source: /note="DNA/RNA"
  modified_base (1)..(1): bicyclic nucleic acid (BNA)
  modified_base (6)..(6): 5-methyl modified nucleotide
  modified_base (9)..(9): bicyclic nucleic acid (BNA)
  source: /note="3' tri-ethylene glycol (TEG)"
aaguucugt

SEQ ID NO: 16721 - RNA, 8 nt, Artificial Sequence
  source: /note="Description of Artificial Sequence: Synthetic oligonucleotide"
  source: /note="RNA"
  modified_base (1)..(1): bicyclic nucleic acid (BNA)
  modified_base (6)..(6): 5-methyl modified nucleotide
  modified_base (8)..(8): bicyclic nucleic acid (BNA)
  source: /note="3' tri-ethylene glycol (TEG)"
aaguucug

SEQ ID NO: 16722 - DNA, 20 bp, Artificial Sequence
  source: /note="Description of Artificial Sequence: Synthetic oligonucleotide"
  source: /note="Description of Combined DNA/RNA Molecule: Synthetic oligonucleotide"
  source: /note="DNA/RNA"
  modified_base (1)..(1): bicyclic nucleic acid (BNA)
  modified_base (7)..(7): 5-methyl modified nucleotide
  modified_base (11)..(11): 5-methyl modified nucleotide
  modified_base (12)..(12): 5-methyl modified nucleotide
  modified_base (16)..(16): 5-methyl modified nucleotide
  modified_base (17)..(17): 5-methyl modified nucleotide
  modified_base (18)..(18): 5-methyl modified nucleotide
  modified_base (20)..(20): bicyclic nucleic acid (BNA)
  source: /note="3' tri-ethylene glycol (TEG)"
taaguucuguccaagcccgg

SEQ ID NO: 16723 - DNA, 19 bp, Artificial Sequence
  source: /note="Description of Artificial Sequence: Synthetic oligonucleotide"
  source: /note="Description of Combined DNA/RNA Molecule: Synthetic oligonucleotide"
  source: /note="DNA/RNA"
  modified_base (1)..(1): bicyclic nucleic acid (BNA)
  modified_base (7)..(7): 5-methyl modified nucleotide
  modified_base (11)..(11): 5-methyl modified nucleotide
  modified_base (12)..(12): 5-methyl modified nucleotide
  modified_base (16)..(16): 5-methyl modified nucleotide
  modified_base (17)..(17): 5-methyl modified nucleotide
  modified_base (18)..(18): 5-methyl modified nucleotide
  modified_base (19)..(19): bicyclic nucleic acid (BNA)
  source: /note="3' tri-ethylene glycol (TEG)"
taaguucuguccaagcccg

SEQ ID NO: 16724 - DNA, 18 bp, Artificial Sequence
  source: /note="Description of Artificial Sequence: Synthetic oligonucleotide"
  source: /note="Description of Combined DNA/RNA Molecule: Synthetic oligonucleotide"
  source: /note="DNA/RNA"
  modified_base (1)..(1): bicyclic nucleic acid (BNA)
  modified_base (7)..(7): 5-methyl modified nucleotide
  modified_base (11)..(11): 5-methyl modified nucleotide
  modified_base (12)..(12): 5-methyl modified nucleotide
  modified_base (16)..(16): 5-methyl modified nucleotide
  modified_base (17)..(17): 5-methyl modified nucleotide
  modified_base (18)..(18): 5-methyl bicyclic nucleic acid
  source: /note="3' tri-ethylene glycol (TEG)"
taaguucuguccaagccc

SEQ ID NO: 16725 - DNA, 17 bp, Artificial Sequence
  source: /note="Description of Artificial Sequence: Synthetic oligonucleotide"
  source: /note="Description of Combined DNA/RNA Molecule: Synthetic oligonucleotide"
  source: /note="DNA/RNA"
  modified_base (1)..(1): bicyclic nucleic acid (BNA)
  modified_base (7)..(7): 5-methyl modified nucleotide
  modified_base (11)..(11): 5-methyl modified nucleotide
  modified_base (12)..(12): 5-methyl modified nucleotide
  modified_base (16)..(16): 5-methyl modified nucleotide
  modified_base (17)..(17): 5-methyl bicyclic nucleic acid
  source: /note="3' tri-ethylene glycol (TEG)"
taaguucuguccaagcc

SEQ ID NO: 16726 - DNA, 16 bp, Artificial Sequence
  source: /note="Description of Artificial Sequence: Synthetic oligonucleotide"
  source: /note="Description of Combined DNA/RNA Molecule: Synthetic oligonucleotide"
  source: /note="DNA/RNA"
  modified_base (1)..(1): bicyclic nucleic acid (BNA)
  modified_base (7)..(7): 5-methyl modified nucleotide
  modified_base (11)..(11): 5-methyl modified nucleotide
  modified_base (12)..(12): 5-methyl modified nucleotide
  modified_base (16)..(16): 5-methyl bicyclic nucleic acid
  source: /note="3' tri-ethylene glycol (TEG)"
taaguucuguccaagc

SEQ ID NO: 16727 - DNA, 14 bp, Artificial Sequence
  source: /note="Description of Artificial Sequence: Synthetic oligonucleotide"
  source: /note="Description of Combined DNA/RNA Molecule: Synthetic oligonucleotide"
  source: /note="DNA/RNA"
  modified_base (1)..(1): bicyclic nucleic acid (BNA)
  modified_base (7)..(7): 5-methyl modified nucleotide
  modified_base (11)..(11): 5-methyl modified nucleotide
  modified_base (12)..(12): 5-methyl modified nucleotide
  modified_base (14)..(14): bicyclic nucleic acid (BNA)
  source: /note="3' tri-ethylene glycol (TEG)"
taaguucuguccaa

SEQ ID NO: 16728 - DNA, 13 bp, Artificial Sequence
  source: /note="Description of Artificial Sequence: Synthetic oligonucleotide"
  source: /note="Description of Combined DNA/RNA Molecule: Synthetic oligonucleotide"
  source: /note="DNA/RNA"
  modified_base (1)..(1): bicyclic nucleic acid (BNA)
  modified_base (7)..(7): 5-methyl modified nucleotide
  modified_base (11)..(11): 5-methyl modified nucleotide
  modified_base (12)..(12): 5-methyl modified nucleotide
  modified_base (13)..(13): bicyclic nucleic acid (BNA)
  source: /note="3' tri-ethylene glycol (TEG)"
taaguucugucca

SEQ ID NO: 16729 - DNA, 12 bp, Artificial Sequence
  source: /note="Description of Artificial Sequence: Synthetic oligonucleotide"
  source: /note="Description of Combined DNA/RNA Molecule: Synthetic oligonucleotide"
  source: /note="DNA/RNA"
  modified_base (1)..(1): bicyclic nucleic acid (BNA)
  modified_base (7)..(7): 5-methyl modified nucleotide
  modified_base (11)..(11): 5-methyl modified nucleotide
  modified_base (12)..(12): 5-methyl bicyclic nucleic acid
  source: /note="3' tri-ethylene glycol (TEG)"
taaguucugucc

SEQ ID NO: 16730 - DNA, 11 bp, Artificial Sequence
  source: /note="Description of Artificial Sequence: Synthetic oligonucleotide"
  source: /note="Description of Combined DNA/RNA Molecule: Synthetic oligonucleotide"
  source: /note="DNA/RNA"
  modified_base (1)..(1): bicyclic nucleic acid (BNA)
  modified_base (7)..(7): 5-methyl modified nucleotide
  modified_base (11)..(11): 5-methyl bicyclic nucleic acid
  source: /note="3' tri-ethylene glycol (TEG)"
taaguucuguc

SEQ ID NO: 16731 - DNA, 10 bp, Artificial Sequence
  source: /note="Description of Artificial Sequence: Synthetic oligonucleotide"
  source: /note="Description of Combined DNA/RNA Molecule: Synthetic oligonucleotide"
  source: /note="DNA/RNA"
  modified_base (1)..(1): bicyclic nucleic acid (BNA)
  modified_base (7)..(7): 5-methyl modified nucleotide
  modified_base (10)..(10): bicyclic nucleic acid (BNA)
  source: /note="3' tri-ethylene glycol (TEG)"
taaguucugt

SEQ ID NO: 16732 - DNA, 9 bp, Artificial Sequence
  source: /note="Description of Artificial Sequence: Synthetic oligonucleotide"
  source: /note="Description of Combined DNA/RNA Molecule: Synthetic oligonucleotide"
  source: /note="DNA/RNA"
  modified_base (1)..(1): bicyclic nucleic acid (BNA)
  modified_base (7)..(7): 5-methyl modified nucleotide
  modified_base (9)..(9): bicyclic nucleic acid (BNA)
  source: /note="3' tri-ethylene glycol (TEG)"
taaguucug

SEQ ID NO: 16733 - DNA, 8 bp, Artificial Sequence
  source: /note="Description of Artificial Sequence: Synthetic oligonucleotide"
  source: /note="Description of Combined DNA/RNA Molecule: Synthetic oligonucleotide"
  source: /note="DNA/RNA"
  modified_base (1)..(1): bicyclic nucleic acid (BNA)
  modified_base (7)..(7): 5-methyl modified nucleotide
  modified_base (8)..(8): bicyclic nucleic acid (BNA)
  source: /note="3' tri-ethylene glycol (TEG)"
taaguuct

SEQ ID NO: 16734 - RNA, 20 nt, Artificial Sequence
  source: /note="Description of Artificial Sequence: Synthetic oligonucleotide"
  source: /note="RNA"
  modified_base (1)..(1): bicyclic nucleic acid (BNA)
  modified_base (8)..(8): 5-methyl modified nucleotide
  modified_base (12)..(12): 5-methyl modified nucleotide
  modified_base (13)..(13): 5-methyl modified nucleotide
  modified_base (17)..(17): 5-methyl modified nucleotide
  modified_base (18)..(18): 5-methyl modified nucleotide
  modified_base (19)..(19): 5-methyl modified nucleotide
  modified_base (20)..(20): bicyclic nucleic acid (BNA)
  source: /note="3' tri-ethylene glycol (TEG)"
guaaguucuguccaagcccg

SEQ ID NO: 16735 - RNA, 19 nt, Artificial Sequence
  source: /note="Description of Artificial Sequence: Synthetic oligonucleotide"
  source: /note="RNA"
  modified_base (1)..(1): bicyclic nucleic acid (BNA)
  modified_base (8)..(8): 5-methyl modified nucleotide
  modified_base (12)..(12): 5-methyl modified nucleotide
  modified_base (13)..(13): 5-methyl modified nucleotide
  modified_base (17)..(17): 5-methyl modified nucleotide
  modified_base (18)..(18): 5-methyl modified nucleotide
  modified_base (19)..(19): 5-methyl bicyclic nucleic acid
  source: /note="3' tri-ethylene glycol (TEG)"
guaaguucuguccaagccc

SEQ ID NO: 16736 - RNA, 17 nt, Artificial Sequence
  source: /note="Description of Artificial Sequence: Synthetic oligonucleotide"
  source: /note="RNA"
  modified_base (1)..(1): bicyclic nucleic acid (BNA)
  modified_base (8)..(8): 5-methyl modified nucleotide
  modified_base (12)..(12): 5-methyl modified nucleotide
  modified_base (13)..(13): 5-methyl modified nucleotide
  modified_base (17)..(17): 5-methyl bicyclic nucleic acid
  source: /note="3' tri-ethylene glycol (TEG)"
guaaguucuguccaagc

SEQ ID NO: 16737 - RNA, 16 nt, Artificial Sequence
  source: /note="Description of Artificial Sequence: Synthetic oligonucleotide"
  source: /note="RNA"
  modified_base (1)..(1): bicyclic nucleic acid (BNA)
  modified_base (8)..(8): 5-methyl modified nucleotide
  modified_base (12)..(12): 5-methyl modified nucleotide
  modified_base (13)..(13): 5-methyl modified nucleotide
  modified_base (16)..(16): bicyclic nucleic acid (BNA)
  source: /note="3' tri-ethylene glycol (TEG)"
guaaguucuguccaag

SEQ ID NO: 16738 - RNA, 15 nt, Artificial Sequence
  source: /note="Description of Artificial Sequence: Synthetic oligonucleotide"
  source: /note="RNA"
  modified_base (1)..(1): bicyclic nucleic acid (BNA)
  modified_base (8)..(8): 5-methyl modified nucleotide
  modified_base (12)..(12): 5-methyl modified nucleotide
  modified_base (13)..(13): 5-methyl modified nucleotide
  modified_base (15)..(15): bicyclic nucleic acid (BNA)
  source: /note="3' tri-ethylene glycol (TEG)"
guaaguucuguccaa

SEQ ID NO: 16739 - RNA, 14 nt, Artificial Sequence
  source: /note="Description of Artificial Sequence: Synthetic oligonucleotide"
  source: /note="RNA"
  modified_base (1)..(1): bicyclic nucleic acid (BNA)
  modified_base (8)..(8): 5-methyl modified nucleotide
  modified_base (12)..(12): 5-methyl modified nucleotide
  modified_base (13)..(13): 5-methyl modified nucleotide
  modified_base (14)..(14): bicyclic nucleic acid (BNA)
  source: /note="3' tri-ethylene glycol (TEG)"
guaaguucugucca

SEQ ID NO: 16740 - RNA, 13 nt, Artificial Sequence
  source: /note="Description of Artificial Sequence: Synthetic oligonucleotide"
  source: /note="RNA"
  modified_base (1)..(1): bicyclic nucleic acid (BNA)
  modified_base (8)..(8): 5-methyl modified nucleotide
  modified_base (12)..(12): 5-methyl modified nucleotide
  modified_base (13)..(13): 5-methyl bicyclic nucleic acid
  source: /note="3' tri-ethylene glycol (TEG)"
guaaguucugucc

SEQ ID NO: 16741 - RNA, 12 nt, Artificial Sequence
  source: /note="Description of Artificial Sequence: Synthetic oligonucleotide"
  source: /note="RNA"
  modified_base (1)..(1): bicyclic nucleic acid (BNA)
  modified_base (8)..(8): 5-methyl modified nucleotide
  modified_base (12)..(12): 5-methyl bicyclic nucleic acid
  source: /note="3' tri-ethylene glycol (TEG)"
guaaguucuguc

SEQ ID NO: 16742 - DNA, 11 bp, Artificial Sequence
  source: /note="Description of Artificial Sequence: Synthetic oligonucleotide"
  source: /note="Description of Combined DNA/RNA Molecule: Synthetic oligonucleotide"
  source: /note="DNA/RNA"
  modified_base (1)..(1): bicyclic nucleic acid (BNA)
  modified_base (8)..(8): 5-methyl modified nucleotide
  modified_base (11)..(11): bicyclic nucleic acid (BNA)
  source: /note="3' tri-ethylene glycol (TEG)"
guaaguucugt

SEQ ID NO: 16743 - RNA, 10 nt, Artificial Sequence
  source: /note="Description of Artificial Sequence: Synthetic oligonucleotide"
  source: /note="RNA"
  modified_base (1)..(1): bicyclic nucleic acid (BNA)
  modified_base (8)..(8): 5-methyl modified nucleotide
  modified_base (10)..(10): bicyclic nucleic acid (BNA)
  source: /note="3' tri-ethylene glycol (TEG)"
guaaguucug

SEQ ID NO: 16744 - DNA, 9 bp, Artificial Sequence
  source: /note="Description of Artificial Sequence: Synthetic oligonucleotide"
  source: /note="Description of Combined DNA/RNA Molecule: Synthetic oligonucleotide"
  source: /note="DNA/RNA"
  modified_base (1)..(1): bicyclic nucleic acid (BNA)
  modified_base (8)..(8): 5-methyl modified nucleotide
  modified_base (9)..(9): bicyclic nucleic acid (BNA)
  source: /note="3' tri-ethylene glycol (TEG)"
guaaguuct

SEQ ID NO: 16745 - RNA, 8 nt, Artificial Sequence
  source: /note="Description of Artificial Sequence: Synthetic oligonucleotide"
  source: /note="RNA"
  modified_base (1)..(1): bicyclic nucleic acid (BNA)
  modified_base (8)..(8): 5-methyl bicyclic nucleic acid
  source: /note="3' tri-ethylene glycol (TEG)"
guaaguuc

SEQ ID NO: 16746 - RNA, 20 nt, Artificial Sequence
  source: /note="Description of Artificial Sequence: Synthetic oligonucleotide"
  source: /note="RNA"
  modified_base (1)..(1): bicyclic nucleic acid (BNA)
  modified_base (9)..(9): 5-methyl modified nucleotide
  modified_base (13)..(13): 5-methyl modified nucleotide
  modified_base (14)..(14): 5-methyl modified nucleotide
  modified_base (18)..(18): 5-methyl modified nucleotide
  modified_base (19)..(19): 5-methyl modified nucleotide
  modified_base (20)..(20): 5-methyl bicyclic nucleic acid
  source: /note="3' tri-ethylene glycol (TEG)"
gguaaguucuguccaagccc

SEQ ID NO: 16747 - RNA, 19 nt, Artificial Sequence
  source: /note="Description of Artificial Sequence: Synthetic oligonucleotide"
  source: /note="RNA"
  modified_base (1)..(1): bicyclic nucleic acid (BNA)
  modified_base (9)..(9): 5-methyl modified nucleotide
  modified_base (13)..(13): 5-methyl modified nucleotide
  modified_base (14)..(14): 5-methyl modified nucleotide
  modified_base (18)..(18): 5-methyl modified nucleotide
  modified_base (19)..(19): 5-methyl bicyclic nucleic acid
  source: /note="3' tri-ethylene glycol (TEG)"
gguaaguucuguccaagcc

SEQ ID NO: 16748 - RNA, 17 nt, Artificial Sequence
  source: /note="Description of Artificial Sequence: Synthetic oligonucleotide"
  source: /note="RNA"
  modified_base (1)..(1): bicyclic nucleic acid (BNA)
  modified_base (9)..(9): 5-methyl modified nucleotide
  modified_base (13)..(13): 5-methyl modified nucleotide
  modified_base (14)..(14): 5-methyl modified nucleotide
  modified_base (17)..(17): bicyclic nucleic acid (BNA)
  source: /note="3' tri-ethylene glycol (TEG)"
gguaaguucuguccaag

SEQ ID NO: 16749 - RNA, 16 nt, Artificial Sequence
  source: /note="Description of Artificial Sequence: Synthetic oligonucleotide"
  source: /note="RNA"
  modified_base (1)..(1): bicyclic nucleic acid (BNA)
  modified_base (9)..(9): 5-methyl modified nucleotide
  modified_base (13)..(13): 5-methyl modified nucleotide
  modified_base (14)..(14): 5-methyl modified nucleotide
  modified_base (16)..(16): bicyclic nucleic acid (BNA)
  source: /note="3' tri-ethylene glycol (TEG)"
gguaaguucuguccaa

SEQ ID NO: 16750 - RNA, 15 nt, Artificial Sequence
  source: /note="Description of Artificial Sequence: Synthetic oligonucleotide"
  source: /note="RNA"
  modified_base (1)..(1): bicyclic nucleic acid (BNA)
  modified_base (9)..(9): 5-methyl modified nucleotide
  modified_base (13)..(13): 5-methyl modified nucleotide
  modified_base (14)..(14): 5-methyl modified nucleotide
  modified_base (15)..(15): bicyclic nucleic acid (BNA)
  source: /note="3' tri-ethylene glycol (TEG)"
gguaaguucugucca

SEQ ID NO: 16751 - RNA, 14 nt, Artificial Sequence
  source: /note="Description of Artificial Sequence: Synthetic oligonucleotide"
  source: /note="RNA"
  modified_base (1)..(1): bicyclic nucleic acid (BNA)
  modified_base (9)..(9): 5-methyl modified nucleotide
  modified_base (13)..(13): 5-methyl modified nucleotide
  modified_base (14)..(14): 5-methyl bicyclic nucleic acid
  source: /note="3' tri-ethylene glycol (TEG)"
gguaaguucugucc

SEQ ID NO: 16752 - RNA, 13 nt, Artificial Sequence
  source: /note="Description of Artificial Sequence: Synthetic oligonucleotide"
  source: /note="RNA"
  modified_base (1)..(1): bicyclic nucleic acid (BNA)
  modified_base (9)..(9): 5-methyl modified nucleotide
  modified_base (13)..(13): 5-methyl bicyclic nucleic acid
  source: /note="3' tri-ethylene glycol (TEG)"
gguaaguucuguc

SEQ ID NO: 16753 - DNA, 12 bp, Artificial Sequence
  source: /note="Description of Artificial Sequence: Synthetic oligonucleotide"
  source: /note="Description of Combined DNA/RNA Molecule: Synthetic oligonucleotide"
  source: /note="DNA/RNA"
  modified_base (1)..(1): bicyclic nucleic acid (BNA)
  modified_base (9)..(9): 5-methyl modified nucleotide
  modified_base (12)..(12): bicyclic nucleic acid (BNA)
  source: /note="3' tri-ethylene glycol (TEG)"
gguaaguucugt

SEQ ID NO: 16754 - RNA, 11 nt, Artificial Sequence
  source: /note="Description of Artificial Sequence: Synthetic oligonucleotide"
  source: /note="RNA"
  modified_base (1)..(1): bicyclic nucleic acid (BNA)
  modified_base (9)..(9): 5-methyl modified nucleotide
  modified_base (11)..(11): bicyclic nucleic acid (BNA)
  source: /note="3' tri-ethylene glycol (TEG)"
gguaaguucug

SEQ ID NO: 16755 - DNA, 10 bp, Artificial Sequence
  source: /note="Description of Artificial Sequence: Synthetic oligonucleotide"
  source: /note="Description of Combined DNA/RNA Molecule: Synthetic oligonucleotide"
  source: /note="DNA/RNA"
  modified_base (1)..(1): bicyclic nucleic acid (BNA)
  modified_base (9)..(9): 5-methyl modified nucleotide
  modified_base (10)..(10): bicyclic nucleic acid (BNA)
  source: /note="3' tri-ethylene glycol (TEG)"
gguaaguuct

SEQ ID NO: 16756 - RNA, 9 nt, Artificial Sequence
  source: /note="Description of Artificial Sequence: Synthetic oligonucleotide"
  source: /note="RNA"
  modified_base (1)..(1): bicyclic nucleic acid (BNA)
  modified_base (9)..(9): 5-methyl bicyclic nucleic acid
  source: /note="3' tri-ethylene glycol (TEG)"
gguaaguuc

SEQ ID NO: 16757 - DNA, 8 bp, Artificial Sequence
  source: /note="Description of Artificial Sequence: Synthetic oligonucleotide"
  source: /note="Description of Combined DNA/RNA Molecule: Synthetic oligonucleotide"
  source: /note="DNA/RNA"
  modified_base (1)..(1): bicyclic nucleic acid (BNA)
  modified_base (8)..(8): bicyclic nucleic acid (BNA)
  source: /note="3' tri-ethylene glycol (TEG)"
gguaagut

SEQ ID NO: 16758 - RNA, 20 nt, Artificial Sequence
  source: /note="Description of Artificial Sequence: Synthetic oligonucleotide"
  source: /note="RNA"
  modified_base (1)..(1): 5-methyl bicyclic nucleic acid
  modified_base (10)..(10): 5-methyl modified nucleotide
  modified_base (14)..(14): 5-methyl modified nucleotide
  modified_base (15)..(15): 5-methyl modified nucleotide
  modified_base (19)..(19): 5-methyl modified nucleotide
  modified_base (20)..(20): 5-methyl bicyclic nucleic acid
  source: /note="3' tri-ethylene glycol (TEG)"
cgguaaguucuguccaagcc

SEQ ID NO: 16759 - RNA, 19 nt, Artificial Sequence
  source: /note="Description of Artificial Sequence: Synthetic oligonucleotide"
  source: /note="RNA"
  modified_base (1)..(1): 5-methyl bicyclic nucleic acid
  modified_base (10)..(10): 5-methyl modified nucleotide
  modified_base (14)..(14): 5-methyl modified nucleotide
  modified_base (15)..(15): 5-methyl modified nucleotide
  modified_base (19)..(19): 5-methyl bicyclic nucleic acid
  source: /note="3' tri-ethylene glycol (TEG)"
cgguaaguucuguccaagc

SEQ ID NO: 16760 - RNA, 18 nt, Artificial Sequence
  source: /note="Description of Artificial Sequence: Synthetic oligonucleotide"
  source: /note="RNA"
  modified_base (1)..(1): 5-methyl bicyclic nucleic acid
  modified_base (10)..(10): 5-methyl modified nucleotide
  modified_base (14)..(14): 5-methyl modified nucleotide
  modified_base (15)..(15): 5-methyl modified nucleotide
  modified_base (18)..(18): bicyclic nucleic acid (BNA)
  source: /note="3' tri-ethylene glycol (TEG)"
cgguaaguucuguccaag

SEQ ID NO: 16761 - RNA, 17 nt, Artificial Sequence
  source: /note="Description of Artificial Sequence: Synthetic oligonucleotide"
  source: /note="RNA"
  modified_base (1)..(1): 5-methyl bicyclic nucleic acid
  modified_base (10)..(10): 5-methyl modified nucleotide
  modified_base (14)..(14): 5-methyl modified nucleotide
  modified_base (15)..(15): 5-methyl modified nucleotide
  modified_base (17)..(17): bicyclic nucleic acid (BNA)
  source: /note="3' tri-ethylene glycol (TEG)"
cgguaaguucuguccaa

SEQ ID NO: 16762 - RNA, 16 nt, Artificial Sequence
  source: /note="Description of Artificial Sequence: Synthetic oligonucleotide"
  source: /note="RNA"
  modified_base (1)..(1): 5-methyl bicyclic nucleic acid
  modified_base (10)..(10): 5-methyl modified nucleotide
  modified_base (14)..(14): 5-methyl modified nucleotide
  modified_base (15)..(15): 5-methyl modified nucleotide
  modified_base (16)..(16): bicyclic nucleic acid (BNA)
  source: /note="3' tri-ethylene glycol (TEG)"
cgguaaguucugucca

SEQ ID NO: 16763 - RNA, 15 nt, Artificial Sequence
  source: /note="Description of Artificial Sequence: Synthetic oligonucleotide"
  source: /note="RNA"
  modified_base (1)..(1): 5-methyl bicyclic nucleic acid
  modified_base (10)..(10): 5-methyl modified nucleotide
  modified_base (14)..(14): 5-methyl modified nucleotide
  modified_base (15)..(15): 5-methyl bicyclic nucleic acid
  source: /note="3' tri-ethylene glycol (TEG)"
cgguaaguucugucc

SEQ ID NO: 16764 - RNA, 14 nt, Artificial Sequence
  source: /note="Description of Artificial Sequence: Synthetic oligonucleotide"
  source: /note="RNA"
  modified_base (1)..(1): 5-methyl bicyclic nucleic acid
  modified_base (10)..(10): 5-methyl modified nucleotide
  modified_base (14)..(14): 5-methyl bicyclic nucleic acid
  source: /note="3' tri-ethylene glycol (TEG)"
cgguaaguucuguc

SEQ ID NO: 16765 - DNA, 13 bp, Artificial Sequence
  source: /note="Description of Artificial Sequence: Synthetic oligonucleotide"
  source: /note="Description of Combined DNA/RNA Molecule: Synthetic oligonucleotide"
  source: /note="DNA/RNA"
  modified_base (1)..(1): 5-methyl bicyclic nucleic acid
  modified_base (10)..(10): 5-methyl modified nucleotide
  modified_base (13)..(13): bicyclic nucleic acid (BNA)
  source: /note="3' tri-ethylene glycol (TEG)"
cgguaaguucugt

SEQ ID NO: 16766 - RNA, 12 nt, Artificial Sequence
  source: /note="Description of Artificial Sequence: Synthetic oligonucleotide"
  source: /note="RNA"
  modified_base (1)..(1): 5-methyl bicyclic nucleic acid
  modified_base (10)..(10): 5-methyl modified nucleotide
  modified_base (12)..(12): bicyclic nucleic acid (BNA)
  source: /note="3' tri-ethylene glycol (TEG)"
cgguaaguucug

SEQ ID NO: 16767 - DNA, 11 bp, Artificial Sequence
  source: /note="Description of Artificial Sequence: Synthetic oligonucleotide"
  source: /note="Description of Combined DNA/RNA Molecule: Synthetic oligonucleotide"
  source: /note="DNA/RNA"
  modified_base (1)..(1): 5-methyl bicyclic nucleic acid
  modified_base (10)..(10): 5-methyl modified nucleotide
  modified_base (11)..(11): bicyclic nucleic acid (BNA)
  source: /note="3' tri-ethylene glycol (TEG)"
cgguaaguuct

SEQ ID NO: 16768 - RNA, 10 nt, Artificial Sequence
  source: /note="Description of Artificial Sequence: Synthetic oligonucleotide"
  source: /note="RNA"
  modified_base (1)..(1): 5-methyl bicyclic nucleic acid
  modified_base (10)..(10): 5-methyl bicyclic nucleic acid
  source: /note="3' tri-ethylene glycol (TEG)"
cgguaaguuc

SEQ ID NO: 16769 - DNA, 9 bp, Artificial Sequence
  source: /note="Description of Artificial Sequence: Synthetic oligonucleotide"
  source: /note="Description of Combined DNA/RNA Molecule: Synthetic oligonucleotide"
  source: /note="DNA/RNA"
  modified_base (1)..(1): 5-methyl bicyclic nucleic acid
  modified_base (9)..(9): bicyclic nucleic acid (BNA)
  source: /note="3' tri-ethylene glycol (TEG)"
cgguaagut

SEQ ID NO: 16770 - DNA, 8 bp, Artificial Sequence
  source: /note="Description of Artificial Sequence: Synthetic oligonucleotide"
  source: /note="Description of Combined DNA/RNA Molecule: Synthetic oligonucleotide"
  source: /note="DNA/RNA"
  modified_base (1)..(1): 5-methyl bicyclic nucleic acid
  modified_base (8)..(8): bicyclic nucleic acid (BNA)
  source: /note="3' tri-ethylene glycol (TEG)"
cgguaagt

SEQ ID NO: 16771 - DNA, 20 bp, Artificial Sequence
  source: /note="Description of Artificial Sequence: Synthetic oligonucleotide"
  source: /note="Description of Combined DNA/RNA Molecule: Synthetic oligonucleotide"
  source: /note="DNA/RNA"
  modified_base (1)..(1): bicyclic nucleic acid (BNA)
  modified_base (2)..(2): 5-methyl modified nucleotide
  modified_base (11)..(11): 5-methyl modified nucleotide
  modified_base (15)..(15): 5-methyl modified nucleotide
  modified_base (16)..(16): 5-methyl modified nucleotide
  modified_base (20)..(20): 5-methyl bicyclic nucleic acid
  source: /note="3' tri-ethylene glycol (TEG)"
tcgguaaguucuguccaagc

SEQ ID NO: 16772 - DNA, 19 bp, Artificial Sequence
  source: /note="Description of Artificial Sequence: Synthetic oligonucleotide"
  source: /note="Description of Combined DNA/RNA Molecule: Synthetic oligonucleotide"
  source: /note="DNA/RNA"
  modified_base (1)..(1): bicyclic nucleic acid (BNA)
  modified_base (2)..(2): 5-methyl modified nucleotide
  modified_base (11)..(11): 5-methyl modified nucleotide
  modified_base (15)..(15): 5-methyl modified nucleotide
  modified_base (16)..(16): 5-methyl modified nucleotide
  modified_base (19)..(19): bicyclic nucleic acid (BNA)
  source: /note="3' tri-ethylene glycol (TEG)"
tcgguaaguucuguccaag

SEQ ID NO: 16773 - DNA, 18 bp, Artificial Sequence
  source: /note="Description of Artificial Sequence: Synthetic oligonucleotide"
  source: /note="Description of Combined DNA/RNA Molecule: Synthetic oligonucleotide"
  source: /note="DNA/RNA"
  modified_base (1)..(1): bicyclic nucleic acid (BNA)
  modified_base (2)..(2): 5-methyl modified nucleotide
  modified_base (11)..(11): 5-methyl modified nucleotide
  modified_base (15)..(15): 5-methyl modified nucleotide
  modified_base (16)..(16): 5-methyl modified nucleotide
  modified_base (18)..(18): bicyclic nucleic acid (BNA)
  source: /note="3' tri-ethylene glycol (TEG)"
tcgguaaguucuguccaa

SEQ ID NO: 16774 - DNA, 17 bp, Artificial Sequence
  source: /note="Description of Artificial Sequence: Synthetic oligonucleotide"
  source: /note="Description of Combined DNA/RNA Molecule: Synthetic oligonucleotide"
  source: /note="DNA/RNA"
  modified_base (1)..(1): bicyclic nucleic acid (BNA)
  modified_base (2)..(2): 5-methyl modified nucleotide
  modified_base (11)..(11): 5-methyl modified nucleotide
  modified_base (15)..(15): 5-methyl modified nucleotide
  modified_base (16)..(16): 5-methyl modified nucleotide
  modified_base (17)..(17): bicyclic nucleic acid (BNA)
  source: /note="3' tri-ethylene glycol (TEG)"
tcgguaaguucugucca

SEQ ID NO: 16775 - DNA, 16 bp, Artificial Sequence
  source: /note="Description of Artificial Sequence: Synthetic oligonucleotide"
  source: /note="Description of Combined DNA/RNA Molecule: Synthetic oligonucleotide"
  source: /note="DNA/RNA"
  modified_base (1)..(1): bicyclic nucleic acid (BNA)
  modified_base (2)..(2): 5-methyl modified nucleotide
  modified_base (11)..(11): 5-methyl modified nucleotide
  modified_base (15)..(15): 5-methyl modified nucleotide
  modified_base (16)..(16): 5-methyl bicyclic nucleic acid
  source: /note="3' tri-ethylene glycol (TEG)"
tcgguaaguucugucc

SEQ ID NO: 16776 - DNA, 15 bp, Artificial Sequence
  source: /note="Description of Artificial Sequence: Synthetic oligonucleotide"
  source: /note="Description of Combined DNA/RNA Molecule: Synthetic oligonucleotide"
  source: /note="DNA/RNA"
  modified_base (1)..(1): bicyclic nucleic acid (BNA)
  modified_base (2)..(2): 5-methyl modified nucleotide
  modified_base (11)..(11): 5-methyl modified nucleotide
  modified_base (15)..(15): 5-methyl bicyclic nucleic acid
  source: /note="3' tri-ethylene glycol (TEG)"
tcgguaaguucuguc

SEQ ID NO: 16777 - DNA, 14 bp, Artificial Sequence
  source: /note="Description of Artificial Sequence: Synthetic oligonucleotide"
  source: /note="Description of Combined DNA/RNA Molecule: Synthetic oligonucleotide"
  source: /note="DNA/RNA"
  modified_base (1)..(1): bicyclic nucleic acid (BNA)
  modified_base (2)..(2): 5-methyl modified nucleotide
  modified_base (11)..(11): 5-methyl modified nucleotide
  modified_base (14)..(14): bicyclic nucleic acid (BNA)
  source: /note="3' tri-ethylene glycol (TEG)"
tcgguaaguucugt

SEQ ID NO: 16778 - DNA, 13 bp, Artificial Sequence
  source: /note="Description of Artificial Sequence: Synthetic oligonucleotide"
  source: /note="Description of Combined DNA/RNA Molecule: Synthetic oligonucleotide"
  source: /note="DNA/RNA"
  modified_base (1)..(1): bicyclic nucleic acid (BNA)
  modified_base (2)..(2): 5-methyl modified nucleotide
  modified_base (11)..(11): 5-methyl modified nucleotide
  modified_base (13)..(13): bicyclic nucleic acid (BNA)
  source: /note="3' tri-ethylene glycol (TEG)"
tcgguaaguucug

SEQ ID NO: 16779 - DNA, 12 bp, Artificial Sequence
  source: /note="Description of Artificial Sequence: Synthetic oligonucleotide"
  source: /note="Description of Combined DNA/RNA Molecule: Synthetic oligonucleotide"
  source: /note="DNA/RNA"
  modified_base (1)..(1): bicyclic nucleic acid (BNA)
  modified_base (2)..(2): 5-methyl modified nucleotide
  modified_base (11)..(11): 5-methyl modified nucleotide
  modified_base (12)..(12): bicyclic nucleic acid (BNA)
  source: /note="3' tri-ethylene glycol (TEG)"
tcgguaaguuct

SEQ ID NO: 16780 - DNA, 11 bp, Artificial Sequence
  source: /note="Description of Artificial Sequence: Synthetic oligonucleotide"
  source: /note="Description of Combined DNA/RNA Molecule: Synthetic oligonucleotide"
  source: /note="DNA/RNA"
  modified_base (1)..(1): bicyclic nucleic acid (BNA)
  modified_base (2)..(2): 5-methyl modified nucleotide
  modified_base (11)..(11): 5-methyl bicyclic nucleic acid
  source: /note="3' tri-ethylene glycol (TEG)"
tcgguaaguuc

SEQ ID NO: 16781 - DNA, 10 bp, Artificial Sequence
  source: /note="Description of Artificial Sequence: Synthetic oligonucleotide"
  source: /note="Description of Combined DNA/RNA Molecule: Synthetic oligonucleotide"
  source: /note="DNA/RNA"
  modified_base (1)..(1): bicyclic nucleic acid (BNA)
  modified_base (2)..(2): 5-methyl modified nucleotide
  modified_base (10)..(10): bicyclic nucleic acid (BNA)
  source: /note="3' tri-ethylene glycol (TEG)"
tcgguaagut

SEQ ID NO: 16782 - DNA, 9 bp, Artificial Sequence
  source: /note="Description of Artificial Sequence: Synthetic oligonucleotide"
  source: /note="Description of Combined DNA/RNA Molecule: Synthetic oligonucleotide"
  source: /note="DNA/RNA"
  modified_base (1)..(1): bicyclic nucleic acid (BNA)
  modified_base (2)..(2): 5-methyl modified nucleotide
  modified_base (9)..(9): bicyclic nucleic acid (BNA)
  source: /note="3' tri-ethylene glycol (TEG)"
tcgguaagt

SEQ ID NO: 16783 - RNA, 20 nt, Artificial Sequence
  source: /note="Description of Artificial Sequence: Synthetic oligonucleotide"
  source: /note="RNA"
  modified_base (1)..(1): bicyclic nucleic acid (BNA)
  modified_base (3)..(3): 5-methyl modified nucleotide
  modified_base (12)..(12): 5-methyl modified nucleotide
  modified_base (16)..(16): 5-methyl modified nucleotide
  modified_base (17)..(17): 5-methyl modified nucleotide
  modified_base (20)..(20): bicyclic nucleic acid (BNA)
  source: /note="3' tri-ethylene glycol (TEG)"
gucgguaaguucuguccaag

SEQ ID NO: 16784 - RNA, 19 nt, Artificial Sequence
  source: /note="Description of Artificial Sequence: Synthetic oligonucleotide"
  source: /note="RNA"
  modified_base (1)..(1): bicyclic nucleic acid (BNA)
  modified_base (3)..(3): 5-methyl modified nucleotide
  modified_base (12)..(12): 5-methyl modified nucleotide
  modified_base (16)..(16): 5-methyl modified nucleotide
  modified_base (17)..(17): 5-methyl modified nucleotide
  modified_base (19)..(19): bicyclic nucleic acid (BNA)
  source: /note="3' tri-ethylene glycol (TEG)"
gucgguaaguucuguccaa

SEQ ID NO: 16785 - RNA, 18 nt, Artificial Sequence
  source: /note="Description of Artificial Sequence: Synthetic oligonucleotide"
  source: /note="RNA"
  modified_base (1)..(1): bicyclic nucleic acid (BNA)
  modified_base (3)..(3): 5-methyl modified nucleotide
  modified_base (12)..(12): 5-methyl modified nucleotide
  modified_base (16)..(16): 5-methyl modified nucleotide
  modified_base (17)..(17): 5-methyl modified nucleotide
  modified_base (18)..(18): bicyclic nucleic acid (BNA)
  source: /note="3' tri-ethylene glycol (TEG)"
gucgguaaguucugucca

SEQ ID NO: 16786 - RNA, 17 nt, Artificial Sequence
  source: /note="Description of Artificial Sequence: Synthetic oligonucleotide"
  source: /note="RNA"
  modified_base (1)..(1): bicyclic nucleic acid (BNA)
  modified_base (3)..(3): 5-methyl modified nucleotide
  modified_base (12)..(12): 5-methyl modified nucleotide
  modified_base (16)..(16): 5-methyl modified nucleotide
  modified_base (17)..(17): 5-methyl bicyclic nucleic acid
  source: /note="3' tri-ethylene glycol (TEG)"
gucgguaaguucugucc

SEQ ID NO: 16787 - RNA, 16 nt, Artificial Sequence
  source: /note="Description of Artificial Sequence: Synthetic oligonucleotide"
  source: /note="RNA"
  modified_base (1)..(1): bicyclic nucleic acid (BNA)
  modified_base (3)..(3): 5-methyl modified nucleotide
  modified_base (12)..(12): 5-methyl modified nucleotide
  modified_base (16)..(16): 5-methyl bicyclic nucleic acid
  source: /note="3' tri-ethylene glycol (TEG)"
gucgguaaguucuguc

SEQ ID NO: 16788 - DNA, 15 bp, Artificial Sequence
  source: /note="Description of Artificial Sequence: Synthetic oligonucleotide"
  source: /note="Description of Combined DNA/RNA Molecule: Synthetic oligonucleotide"
  source: /note="DNA/RNA"
  modified_base (1)..(1): bicyclic nucleic acid (BNA)
  modified_base (3)..(3): 5-methyl modified nucleotide
  modified_base (12)..(12): 5-methyl modified nucleotide
  modified_base (15)..(15): bicyclic nucleic acid (BNA)
  source: /note="3' tri-ethylene glycol (TEG)"
gucgguaaguucugt

SEQ ID NO: 16789 - RNA, 14 nt, Artificial Sequence
  source: /note="Description of Artificial Sequence: Synthetic oligonucleotide"
  source: /note="RNA"
  modified_base (1)..(1): bicyclic nucleic acid (BNA)
  modified_base (3)..(3): 5-methyl modified nucleotide
  modified_base (12)..(12): 5-methyl modified nucleotide
  modified_base (14)..(14): bicyclic nucleic acid (BNA)
  source: /note="3' tri-ethylene glycol (TEG)"
gucgguaaguucug

SEQ ID NO: 16790 - DNA, 13 bp, Artificial Sequence
  source: /note="Description of Artificial Sequence: Synthetic oligonucleotide"
  source: /note="Description of Combined DNA/RNA Molecule: Synthetic oligonucleotide"
  source: /note="DNA/RNA"
  modified_base (1)..(1): bicyclic nucleic acid (BNA)
  modified_base (3)..(3): 5-methyl modified nucleotide
  modified_base (12)..(12): 5-methyl modified nucleotide
  modified_base (13)..(13): bicyclic nucleic acid (BNA)
  source: /note="3' tri-ethylene glycol (TEG)"
gucgguaaguuct

SEQ ID NO: 16791 - RNA, 12 nt, Artificial Sequence
  source: /note="Description of Artificial Sequence: Synthetic oligonucleotide"
  source: /note="RNA"
  modified_base (1)..(1): bicyclic nucleic acid (BNA)
  modified_base (3)..(3): 5-methyl modified nucleotide
  modified_base (12)..(12): 5-methyl bicyclic nucleic acid
  source: /note="3' tri-ethylene glycol (TEG)"
gucgguaaguuc

SEQ ID NO: 16792 - DNA, 11 bp, Artificial Sequence
  source: /note="Description of Artificial Sequence: Synthetic oligonucleotide"
  source: /note="Description of Combined DNA/RNA Molecule: Synthetic oligonucleotide"
  source: /note="DNA/RNA"
  modified_base (1)..(1): bicyclic nucleic acid (BNA)
  modified_base (3)..(3): 5-methyl modified nucleotide
  modified_base (11)..(11): bicyclic nucleic acid (BNA)
  source: /note="3' tri-ethylene glycol (TEG)"
gucgguaagut

SEQ ID NO: 16793 - DNA, 10 bp, Artificial Sequence
  source: /note="Description of Artificial Sequence: Synthetic oligonucleotide"
  source: /note="Description of Combined DNA/RNA Molecule: Synthetic oligonucleotide"
  source: /note="DNA/RNA"
  modified_base (1)..(1): bicyclic nucleic acid (BNA)
  modified_base (3)..(3): 5-methyl modified nucleotide
  modified_base (10)..(10): bicyclic nucleic acid (BNA)
  source: /note="3' tri-ethylene glycol (TEG)"
gucgguaagt

SEQ ID NO: 16794 - RNA, 20 nt, Artificial Sequence
  source: /note="Description of Artificial Sequence: Synthetic oligonucleotide"
  source: /note="RNA"
  modified_base (1)..(1): bicyclic nucleic acid (BNA)
  modified_base (4)..(4): 5-methyl modified nucleotide
  modified_base (13)..(13): 5-methyl modified nucleotide
  modified_base (17)..(17): 5-methyl modified nucleotide
  modified_base (18)..(18): 5-methyl modified nucleotide
  modified_base (20)..(20): bicyclic nucleic acid (BNA)
  source: /note="3' tri-ethylene glycol (TEG)"
agucgguaaguucuguccaa

SEQ ID NO: 16795 - RNA, 19 nt, Artificial Sequence
  source: /note="Description of Artificial Sequence: Synthetic oligonucleotide"
  source: /note="RNA"
  modified_base (1)..(1): bicyclic nucleic acid (BNA)
  modified_base (4)..(4): 5-methyl modified nucleotide
  modified_base (13)..(13): 5-methyl modified nucleotide
  modified_base (17)..(17): 5-methyl modified nucleotide
  modified_base (18)..(18): 5-methyl modified nucleotide
  modified_base (19)..(19): bicyclic nucleic acid (BNA)
  source: /note="3' tri-ethylene glycol (TEG)"
agucgguaaguucugucca

SEQ ID NO: 16796 - RNA, 17 nt, Artificial Sequence
  source: /note="Description of Artificial Sequence: Synthetic oligonucleotide"
  source: /note="RNA"
  modified_base (1)..(1): bicyclic nucleic acid (BNA)
  modified_base (4)..(4): 5-methyl modified nucleotide
  modified_base (13)..(13): 5-methyl modified nucleotide
  modified_base (17)..(17): 5-methyl bicyclic nucleic acid
  source: /note="3' tri-ethylene glycol (TEG)"
agucgguaaguucuguc

SEQ ID NO: 16797 - DNA, 16 bp, Artificial Sequence
  source: /note="Description of Artificial Sequence: Synthetic oligonucleotide"
  source: /note="Description of Combined DNA/RNA Molecule: Synthetic oligonucleotide"
  source: /note="DNA/RNA"
  modified_base (1)..(1): bicyclic nucleic acid (BNA)
  modified_base (4)..(4): 5-methyl modified nucleotide
  modified_base (13)..(13): 5-methyl modified nucleotide
  modified_base (16)..(16): bicyclic nucleic acid (BNA)
  source: /note="3' tri-ethylene glycol (TEG)"
agucgguaaguucugt

SEQ ID NO: 16798 - RNA, 15 nt, Artificial Sequence
  source: /note="Description of Artificial Sequence: Synthetic oligonucleotide"
  source: /note="RNA"
  modified_base (1)..(1): bicyclic nucleic acid (BNA)
  modified_base (4)..(4): 5-methyl modified nucleotide
  modified_base (13)..(13): 5-methyl modified nucleotide
  modified_base (15)..(15): bicyclic nucleic acid (BNA)
  source: /note="3' tri-ethylene glycol (TEG)"
agucgguaaguucug

SEQ ID NO: 16799 - DNA, 14 bp, Artificial Sequence
  source: /note="Description of Artificial Sequence: Synthetic oligonucleotide"
  source: /note="Description of Combined DNA/RNA Molecule: Synthetic oligonucleotide"
  source: /note="DNA/RNA"
  modified_base (1)..(1): bicyclic nucleic acid (BNA)
  modified_base (4)..(4): 5-methyl modified nucleotide
  modified_base (13)..(13): 5-methyl modified nucleotide
  modified_base (14)..(14): bicyclic nucleic acid (BNA)
  source: /note="3' tri-ethylene glycol (TEG)"
agucgguaaguuct

SEQ ID NO: 16800 - RNA, 13 nt, Artificial Sequence
  source: /note="Description of Artificial Sequence: Synthetic oligonucleotide"
  source: /note="RNA"
  modified_base (1)..(1): bicyclic nucleic acid (BNA)
  modified_base (4)..(4): 5-methyl modified nucleotide
  modified_base (13)..(13): 5-methyl bicyclic nucleic acid
  source: /note="3' tri-ethylene glycol (TEG)"
agucgguaaguuc

SEQ ID NO: 16801 - DNA, 12 bp, Artificial Sequence
  source: /note="Description of Artificial Sequence: Synthetic oligonucleotide"
  source: /note="Description of Combined DNA/RNA Molecule: Synthetic oligonucleotide"
  source: /note="DNA/RNA"
  modified_base (1)..(1): bicyclic nucleic acid (BNA)
  modified_base (4)..(4): 5-methyl modified nucleotide
  modified_base (12)..(12): bicyclic nucleic acid (BNA)
  source: /note="3' tri-ethylene glycol (TEG)"
agucgguaagut

SEQ ID NO: 16802 - DNA, 11 bp, Artificial Sequence
  source: /note="Description of Artificial Sequence: Synthetic oligonucleotide"
  source: /note="Description of Combined DNA/RNA Molecule: Synthetic oligonucleotide"
  source: /note="DNA/RNA"
  modified_base (1)..(1): bicyclic nucleic acid (BNA)
  modified_base (4)..(4): 5-methyl modified nucleotide
  modified_base (11)..(11): bicyclic nucleic acid (BNA)
  source: /note="3' tri-ethylene glycol (TEG)"
agucgguaagt

SEQ ID NO: 16803 - RNA, 20 nt, Artificial Sequence
  source: /note="Description of Artificial Sequence: Synthetic oligonucleotide"
  source: /note="RNA"
  modified_base (1)..(1): 5-methyl bicyclic nucleic acid
  modified_base (5)..(5): 5-methyl modified nucleotide
  modified_base (14)..(14): 5-methyl modified nucleotide
  modified_base (18)..(18): 5-methyl modified nucleotide
  modified_base (19)..(19): 5-methyl modified nucleotide
  modified_base (20)..(20): bicyclic nucleic acid (BNA)
  source: /note="3' tri-ethylene glycol (TEG)"
cagucgguaaguucugucca

SEQ ID NO: 16804 - RNA, 19 nt, Artificial Sequence
  source: /note="Description of Artificial Sequence: Synthetic oligonucleotide"
  source: /note="RNA"
  modified_base (1)..(1): 5-methyl bicyclic nucleic acid
  modified_base (5)..(5): 5-methyl modified nucleotide
  modified_base (14)..(14): 5-methyl modified nucleotide
  modified_base (18)..(18): 5-methyl modified nucleotide
  modified_base (19)..(19): 5-methyl bicyclic nucleic acid
  source: /note="3' tri-ethylene glycol (TEG)"
cagucgguaaguucugucc

SEQ ID NO: 16805 - RNA, 18 nt, Artificial Sequence
  source: /note="Description of Artificial Sequence: Synthetic oligonucleotide"
  source: /note="RNA"
  modified_base (1)..(1): 5-methyl bicyclic nucleic acid
  modified_base (5)..(5): 5-methyl modified nucleotide
  modified_base (14)..(14): 5-methyl modified nucleotide
  modified_base (18)..(18): 5-methyl bicyclic nucleic acid
  source: /note="3' tri-ethylene glycol (TEG)"
cagucgguaaguucuguc

SEQ ID NO: 16806 - DNA, 17 bp, Artificial Sequence
  source: /note="Description of Artificial Sequence: Synthetic oligonucleotide"
  source: /note="Description of Combined DNA/RNA Molecule: Synthetic oligonucleotide"
  source: /note="DNA/RNA"
  modified_base (1)..(1): 5-methyl bicyclic nucleic acid
  modified_base (5)..(5): 5-methyl modified nucleotide
  modified_base (14)..(14): 5-methyl modified nucleotide
  modified_base (17)..(17): bicyclic nucleic acid (BNA)
  source: /note="3' tri-ethylene glycol (TEG)"
cagucgguaaguucugt

SEQ ID NO: 16807 - RNA, 16 nt, Artificial Sequence
  source: /note="Description of Artificial Sequence: Synthetic oligonucleotide"
  source: /note="RNA"
  modified_base (1)..(1): 5-methyl bicyclic nucleic acid
  modified_base (5)..(5): 5-methyl modified nucleotide
  modified_base (14)..(14): 5-methyl modified nucleotide
  modified_base (16)..(16): bicyclic nucleic acid (BNA)
  source: /note="3' tri-ethylene glycol (TEG)"
cagucgguaaguucug

SEQ ID NO: 16808 - DNA, 15 bp, Artificial Sequence
  source: /note="Description of Artificial Sequence: Synthetic oligonucleotide"
  source: /note="Description of Combined DNA/RNA Molecule: Synthetic oligonucleotide"
  source: /note="DNA/RNA"
  modified_base (1)..(1): 5-methyl bicyclic nucleic acid
  modified_base (5)..(5): 5-methyl modified nucleotide
  modified_base (14)..(14): 5-methyl modified nucleotide
  modified_base (15)..(15): bicyclic nucleic acid (BNA)
  source: /note="3' tri-ethylene glycol (TEG)"
cagucgguaaguuct

SEQ ID NO: 16809 - RNA, 14 nt, Artificial Sequence
  source: /note="Description of Artificial Sequence: Synthetic oligonucleotide"
  source: /note="RNA"
  modified_base (1)..(1): 5-methyl bicyclic nucleic acid
  modified_base (5)..(5): 5-methyl modified nucleotide
  modified_base (14)..(14): 5-methyl bicyclic nucleic acid
  source: /note="3' tri-ethylene glycol (TEG)"
cagucgguaaguuc

SEQ ID NO: 16810 - DNA, 13 bp, Artificial Sequence
  source: /note="Description of Artificial Sequence: Synthetic oligonucleotide"
  source: /note="Description of Combined DNA/RNA Molecule: Synthetic oligonucleotide"
  source: /note="DNA/RNA"
  modified_base (1)..(1): 5-methyl bicyclic nucleic acid
  modified_base (5)..(5): 5-methyl modified nucleotide
  modified_base (13)..(13): bicyclic nucleic acid (BNA)
  source: /note="3' tri-ethylene glycol (TEG)"
cagucgguaagut

SEQ ID NO: 16811 - DNA, 12 bp, Artificial Sequence
  source: /note="Description of Artificial Sequence: Synthetic oligonucleotide"
  source: /note="Description of Combined DNA/RNA Molecule: Synthetic oligonucleotide"
  source: /note="DNA/RNA"
  modified_base (1)..(1): 5-methyl bicyclic nucleic acid
  modified_base (5)..(5): 5-methyl modified nucleotide
  modified_base (12)..(12): bicyclic nucleic acid (BNA)
  source: /note="3' tri-ethylene glycol (TEG)"
cagucgguaagt

SEQ ID NO: 16812 - RNA, 20 nt, Artificial Sequence
  source: /note="Description of Artificial Sequence: Synthetic oligonucleotide"
  source: /note="RNA"
  modified_base (1)..(1): 5-methyl bicyclic nucleic acid
  modified_base (2)..(2): 5-methyl modified nucleotide
  modified_base (6)..(6): 5-methyl modified nucleotide
  modified_base (15)..(15): 5-methyl modified nucleotide
  modified_base (19)..(19): 5-methyl modified nucleotide
  modified_base (20)..(20): 5-methyl bicyclic nucleic acid
  source: /note="3' tri-ethylene glycol (TEG)"
ccagucgguaaguucugucc

SEQ ID NO: 16813 - RNA, 19 nt, Artificial Sequence
  source: /note="Description of Artificial Sequence: Synthetic oligonucleotide"
  source: /note="RNA"
  modified_base (1)..(1): 5-methyl bicyclic nucleic acid
  modified_base (2)..(2): 5-methyl modified nucleotide
  modified_base (6)..(6): 5-methyl modified nucleotide
  modified_base (15)..(15): 5-methyl modified nucleotide
  modified_base (19)..(19): 5-methyl bicyclic nucleic acid
  source: /note="3' tri-ethylene glycol (TEG)"
ccagucgguaaguucuguc

SEQ ID NO: 16814 - DNA, 18 bp, Artificial Sequence
  source: /note="Description of Artificial Sequence: Synthetic oligonucleotide"
  source: /note="Description of Combined DNA/RNA Molecule: Synthetic oligonucleotide"
  source: /note="DNA/RNA"
  modified_base (1)..(1): 5-methyl bicyclic nucleic acid
  modified_base (2)..(2): 5-methyl modified nucleotide
  modified_base (6)..(6): 5-methyl modified nucleotide
  modified_base (15)..(15): 5-methyl modified nucleotide
  modified_base (18)..(18): bicyclic nucleic acid (BNA)
  source: /note="3' tri-ethylene glycol (TEG)"
ccagucgguaaguucugt

SEQ ID NO: 16815 - RNA, 17 nt, Artificial Sequence
  source: /note="Description of Artificial Sequence: Synthetic oligonucleotide"
  source: /note="RNA"
  modified_base (1)..(1): 5-methyl bicyclic nucleic acid
  modified_base (2)..(2): 5-methyl modified nucleotide
  modified_base (6)..(6): 5-methyl modified nucleotide
  modified_base (15)..(15): 5-methyl modified nucleotide
  modified_base (17)..(17): bicyclic nucleic acid (BNA)
  source: /note="3' tri-ethylene glycol (TEG)"
ccagucgguaaguucug

SEQ ID NO: 16816 - DNA, 16 bp, Artificial Sequence
  source: /note="Description of Artificial Sequence: Synthetic oligonucleotide"
  source: /note="Description of Combined DNA/RNA Molecule: Synthetic oligonucleotide"
  source: /note="DNA/RNA"
  modified_base (1)..(1): 5-methyl bicyclic nucleic acid
  modified_base (2)..(2): 5-methyl modified nucleotide
  modified_base (6)..(6): 5-methyl modified nucleotide
  modified_base (15)..(15): 5-methyl modified nucleotide
  modified_base (16)..(16): bicyclic nucleic acid (BNA)
  source: /note="3' tri-ethylene glycol (TEG)"
ccagucgguaaguuct

SEQ ID NO: 16817 - RNA, 15 nt, Artificial Sequence
  source: /note="Description of Artificial Sequence: Synthetic oligonucleotide"
  source: /note="RNA"
  modified_base (1)..(1): 5-methyl bicyclic nucleic acid
  modified_base (2)..(2): 5-methyl modified nucleotide
  modified_base (6)..(6): 5-methyl modified nucleotide
  modified_base (15)..(15): 5-methyl bicyclic nucleic acid
  source: /note="3' tri-ethylene glycol (TEG)"
ccagucgguaaguuc

SEQ ID NO: 16818 - DNA, 14 bp, Artificial Sequence
  source: /note="Description of Artificial Sequence: Synthetic oligonucleotide"
  source: /note="Description of Combined DNA/RNA Molecule: Synthetic oligonucleotide"
  source: /note="DNA/RNA"
  modified_base (1)..(1): 5-methyl bicyclic nucleic acid
  modified_base (2)..(2): 5-methyl modified nucleotide
  modified_base (6)..(6): 5-methyl modified nucleotide
  modified_base (14)..(14): bicyclic nucleic acid (BNA)
  source: /note="3' tri-ethylene glycol (TEG)"
ccagucgguaagut

SEQ ID NO: 16819 - DNA, 13 bp, Artificial Sequence
  source: /note="Description of Artificial Sequence: Synthetic oligonucleotide"
  source: /note="Description of Combined DNA/RNA Molecule: Synthetic oligonucleotide"
  source: /note="DNA/RNA"
  modified_base (1)..(1): 5-methyl bicyclic nucleic acid
  modified_base (2)..(2): 5-methyl modified nucleotide
  modified_base (6)..(6): 5-methyl modified nucleotide
  modified_base (13)..(13): bicyclic nucleic acid (BNA)
  source: /note="3' tri-ethylene glycol (TEG)"
ccagucgguaagt

SEQ ID NO: 16820 - RNA, 20 nt, Artificial Sequence
  source: /note="Description of Artificial Sequence: Synthetic oligonucleotide"
  source: /note="RNA"
  modified_base (1)..(1): bicyclic nucleic acid (BNA)
  modified_base (2)..(2): 5-methyl modified nucleotide
  modified_base (3)..(3): 5-methyl modified nucleotide
  modified_base (7)..(7): 5-methyl modified nucleotide
  modified_base (16)..(16): 5-methyl modified nucleotide
  modified_base (20)..(20): 5-methyl bicyclic nucleic acid
  source: /note="3' tri-ethylene glycol (TEG)"
gccagucgguaaguucuguc

SEQ ID NO: 16821 - DNA, 19 bp, Artificial Sequence
  source: /note="Description of Artificial Sequence: Synthetic oligonucleotide"
  source: /note="Description of Combined DNA/RNA Molecule: Synthetic oligonucleotide"
  source: /note="DNA/RNA"
  modified_base (1)..(1): bicyclic nucleic acid (BNA)
  modified_base (2)..(2): 5-methyl modified nucleotide
  modified_base (3)..(3): 5-methyl modified nucleotide
  modified_base (7)..(7): 5-methyl modified nucleotide
  modified_base (16)..(16): 5-methyl modified nucleotide
  modified_base (19)..(19): bicyclic nucleic acid (BNA)
  source: /note="3' tri-ethylene glycol (TEG)"
gccagucgguaaguucugt

SEQ ID NO: 16822 - RNA, 18 nt, Artificial Sequence
  source: /note="Description of Artificial Sequence: Synthetic oligonucleotide"
  source: /note="RNA"
  modified_base (1)..(1): bicyclic nucleic acid (BNA)
  modified_base (2)..(2): 5-methyl modified nucleotide
  modified_base (3)..(3): 5-methyl modified nucleotide
  modified_base (7)..(7): 5-methyl modified nucleotide
  modified_base (16)..(16): 5-methyl modified nucleotide
  modified_base (18)..(18): bicyclic nucleic acid (BNA)
  source: /note="3' tri-ethylene glycol (TEG)"
gccagucgguaaguucug

SEQ ID NO: 16823 - DNA, 17 bp, Artificial Sequence
  source: /note="Description of Artificial Sequence: Synthetic oligonucleotide"
  source: /note="Description of Combined DNA/RNA Molecule: Synthetic oligonucleotide"
  source: /note="DNA/RNA"
  modified_base (1)..(1): bicyclic nucleic acid (BNA)
  modified_base (2)..(2): 5-methyl modified nucleotide
  modified_base (3)..(3): 5-methyl modified nucleotide
  modified_base (7)..(7): 5-methyl modified nucleotide
  modified_base (16)..(16): 5-methyl modified nucleotide
  modified_base (17)..(17): bicyclic nucleic acid (BNA)
  source: /note="3' tri-ethylene glycol (TEG)"
gccagucgguaaguuct

SEQ ID NO: 16824 - RNA, 16 nt, Artificial Sequence
  source: /note="Description of Artificial Sequence: Synthetic oligonucleotide"
  source: /note="RNA"
  modified_base (1)..(1): bicyclic nucleic acid (BNA)
  modified_base (2)..(2): 5-methyl modified nucleotide
  modified_base (3)..(3): 5-methyl modified nucleotide
  modified_base (7)..(7): 5-methyl modified nucleotide
  modified_base (16)..(16): 5-methyl bicyclic nucleic acid
  source: /note="3' tri-ethylene glycol (TEG)"
gccagucgguaaguuc

SEQ ID NO: 16825 - DNA, 15 bp, Artificial Sequence
  source: /note="Description of Artificial Sequence: Synthetic oligonucleotide"
  source: /note="Description of Combined DNA/RNA Molecule: Synthetic oligonucleotide"
  source: /note="DNA/RNA"
  modified_base (1)..(1): bicyclic nucleic acid (BNA)
  modified_base (2)..(2): 5-methyl modified nucleotide
  modified_base (3)..(3): 5-methyl modified nucleotide
  modified_base (7)..(7): 5-methyl modified nucleotide
  modified_base (15)..(15): bicyclic nucleic acid (BNA)
  source: /note="3' tri-ethylene glycol (TEG)"
gccagucgguaagut

SEQ ID NO: 16826 - DNA, 14 bp, Artificial Sequence
  source: /note="Description of Artificial Sequence: Synthetic oligonucleotide"
  source: /note="Description of Combined DNA/RNA Molecule: Synthetic oligonucleotide"
  source: /note="DNA/RNA"
  modified_base (1)..(1): bicyclic nucleic acid (BNA)
  modified_base (2)..(2): 5-methyl modified nucleotide
  modified_base (3)..(3): 5-methyl modified nucleotide
  modified_base (7)..(7): 5-methyl modified nucleotide
  modified_base (14)..(14): bicyclic nucleic acid (BNA)
  source: /note="3' tri-ethylene glycol (TEG)"
gccagucgguaagt

SEQ ID NO: 16827 - DNA, 20 bp, Artificial Sequence
  source: /note="Description of Artificial Sequence: Synthetic oligonucleotide"
  source: /note="Description of Combined DNA/RNA Molecule: Synthetic oligonucleotide"
  source: /note="DNA/RNA"
  modified_base (1)..(1): bicyclic nucleic acid (BNA)
  modified_base (2)..(2): 5-methyl modified nucleotide
  modified_base (14)..(14): 5-methyl modified nucleotide
  modified_base (19)..(19): 5-methyl modified nucleotide
  modified_base (20)..(20): bicyclic nucleic acid (BNA)
  source: /note="3' tri-ethylene glycol (TEG)"
tcaaggaagauggcauuuct

SEQ ID NO: 16828 - DNA, 22 bp, Artificial Sequence
  source: /note="Description of Artificial Sequence: Synthetic oligonucleotide"
  source: /note="Description of Combined DNA/RNA Molecule: Synthetic oligonucleotide"
  source: /note="DNA/RNA"
  modified_base (1)..(1): bicyclic nucleic acid (BNA)
  modified_base (2)..(2): 5-methyl modified nucleotide
  modified_base (14)..(14): 5-methyl modified nucleotide
  modified_base (19)..(19): 5-methyl modified nucleotide
  modified_base (22)..(22): bicyclic nucleic acid (BNA)
  source: /note="3' tri-ethylene glycol (TEG)"
tcaaggaagauggcauuucuag

SEQ ID NO: 16829 - DNA, 16 bp, Artificial Sequence
  source: /note="Description of Artificial Sequence: Synthetic oligonucleotide"
  source: /note="Description of Combined DNA/RNA Molecule: Synthetic oligonucleotide"
  source: /note="DNA/RNA"
  modified_base (1)..(1): bicyclic nucleic acid (BNA)
  modified_base (2)..(2): 5-methyl modified nucleotide
  modified_base (14)..(14): 5-methyl modified nucleotide
  modified_base (16)..(16): bicyclic nucleic acid (BNA)
  source: /note="3' tri-ethylene glycol (TEG)"
tcaaggaagauggcat

SEQ ID NO: 16830 - DNA, 15 bp, Artificial Sequence
  source: /note="Description of Artificial Sequence: Synthetic oligonucleotide"
  source: /note="Description of Combined DNA/RNA Molecule: Synthetic oligonucleotide"
  source: /note="DNA/RNA"
  modified_base (1)..(1): bicyclic nucleic acid (BNA)
  modified_base (9)..(9): 5-methyl modified nucleotide
  modified_base (14)..(14): 5-methyl modified nucleotide
  modified_base (15)..(15): bicyclic nucleic acid (BNA)
  source: /note="3' tri-ethylene glycol (TEG)"
gaagauggcauuuct

SEQ ID NO: 16831 - DNA, 21 bp, Artificial Sequence
  source: /note="Description of Artificial Sequence: Synthetic oligonucleotide"
  source: /note="Description of Combined DNA/RNA Molecule: Synthetic oligonucleotide"
  source: /note="DNA/RNA"
  modified_base (1)..(1): bicyclic nucleic acid (BNA)
  modified_base (2)..(2): 5-methyl modified nucleotide
  modified_base (14)..(14): 5-methyl modified nucleotide
  modified_base (19)..(19): 5-methyl modified nucleotide
  modified_base (21)..(21): bicyclic nucleic acid (BNA)
  source: /note="3' tri-ethylene glycol (TEG)"
tcaaggaagauggcauuucua

SEQ ID NO: 16832 - DNA, 19 bp, Artificial Sequence
  source: /note="Description of Artificial Sequence: Synthetic oligonucleotide"
  source: /note="Description of Combined DNA/RNA Molecule: Synthetic oligonucleotide"
  source: /note="DNA/RNA"
  modified_base (1)..(1): bicyclic nucleic acid (BNA)
  modified_base (2)..(2): 5-methyl modified nucleotide
  modified_base (14)..(14): 5-methyl modified nucleotide
  modified_base (19)..(19): 5-methyl bicyclic nucleic acid
  source: /note="3' tri-ethylene glycol (TEG)"
tcaaggaagauggcauuuc

SEQ ID NO: 16833 - DNA, 18 bp, Artificial Sequence
  source: /note="Description of Artificial Sequence: Synthetic oligonucleotide"
  source: /note="Description of Combined DNA/RNA Molecule: Synthetic oligonucleotide"
  source: /note="DNA/RNA"
  modified_base (1)..(1): bicyclic nucleic acid (BNA)
  modified_base (2)..(2): 5-methyl modified nucleotide
  modified_base (14)..(14): 5-methyl modified nucleotide
  modified_base (18)..(18): bicyclic nucleic acid (BNA)
  source: /note="3' tri-ethylene glycol (TEG)"
tcaaggaagauggcauut

SEQ ID NO: 16834 - DNA, 17 bp, Artificial Sequence
  source: /note="Description of Artificial Sequence: Synthetic oligonucleotide"
  source: /note="Description of Combined DNA/RNA Molecule: Synthetic oligonucleotide"
  source: /note="DNA/RNA"
  modified_base (1)..(1): bicyclic nucleic acid (BNA)
  modified_base (2)..(2): 5-methyl modified nucleotide
  modified_base (14)..(14): 5-methyl modified nucleotide
  modified_base (17)..(17): bicyclic nucleic acid (BNA)
  source: /note="3' tri-ethylene glycol (TEG)"
tcaaggaagauggcaut

SEQ ID NO: 16835 - DNA, 15 bp, Artificial Sequence
  source: /note="Description of Artificial Sequence: Synthetic oligonucleotide"
  source: /note="Description of Combined DNA/RNA Molecule: Synthetic oligonucleotide"
  source: /note="DNA/RNA"
  modified_base (1)..(1): bicyclic nucleic acid (BNA)
  modified_base (2)..(2): 5-methyl modified nucleotide
  modified_base (14)..(14): 5-methyl modified nucleotide
  modified_base (15)..(15): bicyclic nucleic acid (BNA)
  source: /note="3' tri-ethylene glycol (TEG)"
tcaaggaagauggca

SEQ ID NO: 16836 - DNA, 14 bp, Artificial Sequence
  source: /note="Description of Artificial Sequence: Synthetic oligonucleotide"
  source: /note="Description of Combined DNA/RNA Molecule: Synthetic oligonucleotide"
  source: /note="DNA/RNA"
  modified_base (1)..(1): bicyclic nucleic acid (BNA)
  modified_base (2)..(2): 5-methyl modified nucleotide
  modified_base (14)..(14): 5-methyl bicyclic nucleic acid
  source: /note="3' tri-ethylene glycol (TEG)"
tcaaggaagauggc

SEQ ID NO: 16837 - DNA, 13 bp, Artificial Sequence
  source: /note="Description of Artificial Sequence: Synthetic oligonucleotide"
  source: /note="Description of Combined DNA/RNA Molecule: Synthetic oligonucleotide"
  source: /note="DNA/RNA"
  modified_base (1)..(1): bicyclic nucleic acid (BNA)
  modified_base (2)..(2): 5-methyl modified nucleotide
  modified_base (13)..(13): bicyclic nucleic acid (BNA)
  source: /note="3' tri-ethylene glycol (TEG)"
tcaaggaagaugg

SEQ ID NO: 16838 - DNA, 12 bp, Artificial Sequence
  source: /note="Description of Artificial Sequence: Synthetic oligonucleotide"
  source: /note="Description of Combined DNA/RNA Molecule: Synthetic oligonucleotide"
  source: /note="DNA/RNA"
  modified_base (1)..(1): bicyclic nucleic acid (BNA)
  modified_base (2)..(2): 5-methyl modified nucleotide
  modified_base (12)..(12): bicyclic nucleic acid (BNA)
  source: /note="3' tri-ethylene glycol (TEG)"
tcaaggaagaug

SEQ ID NO: 16839 - DNA, 11 bp, Artificial Sequence
  source: /note="Description of Artificial Sequence: Synthetic oligonucleotide"
  source: /note="DNA/RNA"
  modified_base (1)..(1): bicyclic nucleic acid (BNA)
  modified_base (2)..(2): 5-methyl modified nucleotide
  modified_base (11)..(11): bicyclic nucleic acid (BNA)
  source: /note="3' tri-ethylene glycol (TEG)"
tcaaggaagat

SEQ ID NO: 16840 - DNA, 10 bp, Artificial Sequence
  source: /note="Description of Artificial Sequence: Synthetic oligonucleotide"
  source: /note="DNA/RNA"
  modified_base (1)..(1): bicyclic nucleic acid (BNA)
  modified_base (2)..(2): 5-methyl modified nucleotide
  modified_base (10)..(10): bicyclic nucleic acid (BNA)
  source: /note="3' tri-ethylene glycol (TEG)"
tcaaggaaga

SEQ ID NO: 16841 - DNA, 9 bp, Artificial Sequence
  source: /note="Description of Artificial Sequence: Synthetic oligonucleotide"
  source: /note="DNA/RNA"
  modified_base (1)..(1): bicyclic nucleic acid (BNA)
  modified_base (2)..(2): 5-methyl modified nucleotide
  modified_base (9)..(9): bicyclic nucleic acid (BNA)
  source: /note="3' tri-ethylene glycol (TEG)"
tcaaggaag

SEQ ID NO: 16842 - RNA, 21 nt, Artificial Sequence
  source: /note="Description of Artificial Sequence: Synthetic oligonucleotide"
  source: /note="RNA"
  modified_base (1)..(1): 5-methyl bicyclic nucleic acid
  modified_base (13)..(13): 5-methyl modified nucleotide
  modified_base (18)..(18): 5-methyl modified nucleotide
  modified_base (21)..(21): bicyclic nucleic acid (BNA)
  source: /note="3' tri-ethylene glycol (TEG)"
caaggaagauggcauuucuag

SEQ ID NO: 16843 - RNA, 20 nt, Artificial Sequence
  source: /note="Description of Artificial Sequence: Synthetic oligonucleotide"
  source: /note="RNA"
  modified_base (1)..(1): 5-methyl bicyclic nucleic acid
  modified_base (13)..(13): 5-methyl modified nucleotide
  modified_base (18)..(18): 5-methyl modified nucleotide
  modified_base (20)..(20): bicyclic nucleic acid (BNA)
  source: /note="3' tri-ethylene glycol (TEG)"
caaggaagauggcauuucua

SEQ ID NO: 16844 - DNA, 19 bp, Artificial Sequence
  source: /note="Description of Artificial Sequence: Synthetic oligonucleotide"
  source: /note="Description of Combined DNA/RNA Molecule: Synthetic oligonucleotide"
  source: /note="DNA/RNA"
  modified_base (1)..(1): 5-methyl bicyclic nucleic acid
  modified_base (13)..(13): 5-methyl modified nucleotide
  modified_base (18)..(18): 5-methyl modified nucleotide
  modified_base (19)..(19): bicyclic nucleic acid (BNA)
  source: /note="3' tri-ethylene glycol (TEG)"
caaggaagauggcauuuct

SEQ ID NO: 16845 - RNA, 18 nt, Artificial Sequence
  source: /note="Description of Artificial Sequence: Synthetic oligonucleotide"
  source: /note="RNA"
  modified_base (1)..(1): 5-methyl bicyclic nucleic acid
  modified_base (13)..(13): 5-methyl modified nucleotide
  modified_base (18)..(18): 5-methyl bicyclic nucleic acid
  source: /note="3' tri-ethylene glycol (TEG)"
caaggaagauggcauuuc

SEQ ID NO: 16846 - DNA, 17 bp, Artificial Sequence
  source: /note="Description of Artificial Sequence: Synthetic oligonucleotide"
  source: /note="Description of Combined DNA/RNA Molecule: Synthetic oligonucleotide"
  source: /note="DNA/RNA"
  modified_base (1)..(1): 5-methyl bicyclic nucleic acid
  modified_base (13)..(13): 5-methyl modified nucleotide
  modified_base (17)..(17): bicyclic nucleic acid (BNA)
  source: /note="3' tri-ethylene glycol (TEG)"
caaggaagauggcauut

SEQ ID NO: 16847 - DNA, 16 bp, Artificial Sequence
  source: /note="Description of Artificial Sequence: Synthetic oligonucleotide"
  source: /note="Description of Combined DNA/RNA Molecule: Synthetic oligonucleotide"
  source: /note="DNA/RNA"
  modified_base (1)..(1): 5-methyl bicyclic nucleic acid
  modified_base (13)..(13): 5-methyl modified nucleotide
  modified_base (16)..(16): bicyclic nucleic acid (BNA)
  source: /note="3' tri-ethylene glycol (TEG)"
caaggaagauggcaut

SEQ ID NO: 16848 - DNA, 15 bp, Artificial Sequence
  source: /note="Description of Artificial Sequence: Synthetic oligonucleotide"
  source: /note="Description of Combined DNA/RNA Molecule: Synthetic oligonucleotide"
  source: /note="DNA/RNA"
  modified_base (1)..(1): 5-methyl bicyclic nucleic acid
  modified_base (13)..(13): 5-methyl modified nucleotide
  modified_base (15)..(15): bicyclic nucleic acid (BNA)
  source: /note="3' tri-ethylene glycol (TEG)"
caaggaagauggcat

SEQ ID NO: 16849 - RNA, 14 nt, Artificial Sequence
  source: /note="Description of Artificial Sequence: Synthetic oligonucleotide"
  source: /note="RNA"
  modified_base (1)..(1): 5-methyl bicyclic nucleic acid
  modified_base (13)..(13): 5-methyl modified nucleotide
  modified_base (14)..(14): bicyclic nucleic acid (BNA)
  source: /note="3' tri-ethylene glycol (TEG)"
caaggaagauggca

SEQ ID NO: 16850 - RNA, 13 nt, Artificial Sequence
  source: /note="Description of Artificial Sequence: Synthetic oligonucleotide"
  source: /note="RNA"
  modified_base (1)..(1): 5-methyl bicyclic nucleic acid
  modified_base (13)..(13): 5-methyl bicyclic nucleic acid
  source: /note="3' tri-ethylene glycol (TEG)"
caaggaagauggc

SEQ ID NO: 16851 - RNA, 12 nt, Artificial Sequence
  source: /note="Description of Artificial Sequence: Synthetic oligonucleotide"
  source: /note="RNA"
  modified_base (1)..(1): 5-methyl bicyclic nucleic acid
  modified_base (12)..(12): bicyclic nucleic acid (BNA)
  source: /note="3' tri-ethylene glycol (TEG)"
caaggaagaugg

SEQ ID NO: 16852 - RNA, 11 nt, Artificial Sequence
  source: /note="Description of Artificial Sequence: Synthetic oligonucleotide"
  source: /note="RNA"
  modified_base (1)..(1): 5-methyl bicyclic nucleic acid
  modified_base (11)..(11): bicyclic nucleic acid (BNA)
  source: /note="3' tri-ethylene glycol (TEG)"
caaggaagaug

SEQ ID NO: 16853 - DNA, 10 bp, Artificial Sequence
  source: /note="Description of Artificial Sequence: Synthetic oligonucleotide"
  source: /note="DNA/RNA"
  modified_base (1)..(1): 5-methyl bicyclic nucleic acid
  modified_base (10)..(10): bicyclic nucleic acid (BNA)
  source: /note="3' tri-ethylene glycol (TEG)"
caaggaagat

SEQ ID NO: 16854 - RNA, 9 nt, Artificial Sequence
  source: /note="Description of Artificial Sequence: Synthetic oligonucleotide"
  source: /note="RNA/Antisense Oligonucleotide"
  modified_base (1)..(1): 5-methyl bicyclic nucleic acid
  modified_base (9)..(9): bicyclic nucleic acid (BNA)
  source: /note="3' tri-ethylene glycol (TEG)"
caaggaaga

SEQ ID NO: 16855 - RNA, 8 nt, Artificial Sequence
  source: /note="Description of Artificial Sequence: Synthetic oligonucleotide"
  source: /note="RNA/Antisense Oligonucleotide"
  modified_base (1)..(1): 5-methyl bicyclic nucleic acid
  modified_base (8)..(8): bicyclic nucleic acid (BNA)
  source: /note="3' tri-ethylene glycol (TEG)"
caaggaag

SEQ ID NO: 16856 - RNA, 20 nt, Artificial Sequence
  source: /note="Description of Artificial Sequence: Synthetic oligonucleotide"
  source: /note="RNA"
  modified_base (1)..(1): bicyclic nucleic acid (BNA)
  modified_base (12)..(12): 5-methyl modified nucleotide
  modified_base (17)..(17): 5-methyl modified nucleotide
  modified_base (20)..(20): bicyclic nucleic acid (BNA)
  source: /note="3' tri-ethylene glycol (TEG)"
aaggaagauggcauuucuag

SEQ ID NO: 16857 - RNA, 19 nt, Artificial Sequence
  source: /note="Description of Artificial Sequence: Synthetic oligonucleotide"
  source: /note="RNA"
  modified_base (1)..(1): bicyclic nucleic acid (BNA)
  modified_base (12)..(12): 5-methyl modified nucleotide
  modified_base (17)..(17): 5-methyl modified nucleotide
  modified_base (19)..(19): bicyclic nucleic acid (BNA)
  source: /note="3' tri-ethylene glycol (TEG)"
aaggaagauggcauuucua

SEQ ID NO: 16858 - DNA, 18 bp, Artificial Sequence
  source: /note="Description of Artificial Sequence: Synthetic oligonucleotide"
  source: /note="Description of Combined DNA/RNA Molecule: Synthetic oligonucleotide"
  source: /note="DNA/RNA"
  modified_base (1)..(1): bicyclic nucleic acid (BNA)
  modified_base (12)..(12): 5-methyl modified nucleotide
  modified_base (17)..(17): 5-methyl modified nucleotide
  modified_base (18)..(18): bicyclic nucleic acid (BNA)
  source: /note="3' tri-ethylene glycol (TEG)"
aaggaagauggcauuuct

SEQ ID NO: 16859 - RNA, 17 nt, Artificial Sequence
  source: /note="Description of Artificial Sequence: Synthetic oligonucleotide"
  source: /note="RNA"
  modified_base (1)..(1): bicyclic nucleic acid (BNA)
  modified_base (12)..(12): 5-methyl modified nucleotide
  modified_base (17)..(17): 5-methyl bicyclic nucleic acid
  source: /note="3' tri-ethylene glycol (TEG)"
aaggaagauggcauuuc

SEQ ID NO: 16860 - DNA, 16 bp, Artificial Sequence
  source: /note="Description of Artificial Sequence: Synthetic oligonucleotide"
  source: /note="Description of Combined DNA/RNA Molecule: Synthetic oligonucleotide"
  source: /note="DNA/RNA"
  modified_base (1)..(1): bicyclic nucleic acid (BNA)
  modified_base (12)..(12): 5-methyl modified nucleotide
  modified_base (16)..(16): bicyclic nucleic acid (BNA)
  source: /note="3' tri-ethylene glycol (TEG)"
aaggaagauggcauut

SEQ ID NO: 16861 - DNA, 15 bp, Artificial Sequence
  source: /note="Description of Artificial Sequence: Synthetic oligonucleotide"
  source: /note="Description of Combined DNA/RNA Molecule: Synthetic oligonucleotide"
  source: /note="DNA/RNA"
  modified_base (1)..(1): bicyclic nucleic acid (BNA)
  modified_base (12)..(12): 5-methyl modified nucleotide
  modified_base (15)..(15): bicyclic nucleic acid (BNA)
  source: /note="3' tri-ethylene glycol (TEG)"
aaggaagauggcaut

SEQ ID NO: 16862 - DNA, 14 bp, Artificial Sequence
  source: /note="Description of Artificial Sequence: Synthetic oligonucleotide"
  source: /note="Description of Combined DNA/RNA Molecule: Synthetic oligonucleotide"
  source: /note="DNA/RNA"
  modified_base (1)..(1): bicyclic nucleic acid (BNA)
  modified_base (12)..(12): 5-methyl modified nucleotide
  modified_base (14)..(14): bicyclic nucleic acid (BNA)
  source: /note="3' tri-ethylene glycol (TEG)"
aaggaagauggcat

SEQ ID NO: 16863 - RNA, 13 nt, Artificial Sequence
  source: /note="Description of Artificial Sequence: Synthetic oligonucleotide"
  source: /note="RNA"
  modified_base (1)..(1): bicyclic nucleic acid (BNA)
  modified_base (12)..(12): 5-methyl modified nucleotide
  modified_base (13)..(13): bicyclic nucleic acid (BNA)
  source: /note="3' tri-ethylene glycol (TEG)"
aaggaagauggca

SEQ ID NO: 16864 - RNA, 12 nt, Artificial Sequence
  source: /note="Description of Artificial Sequence: Synthetic oligonucleotide"
  source: /note="RNA"
  modified_base (1)..(1): bicyclic nucleic acid (BNA)
  modified_base (12)..(12): 5-methyl bicyclic nucleic acid
  source: /note="3' tri-ethylene glycol (TEG)"
aaggaagauggc

SEQ ID NO: 16865 - RNA, 11 nt, Artificial Sequence
  source: /note="Description of Artificial Sequence: Synthetic oligonucleotide"
  source: /note="RNA"
  modified_base (1)..(1): bicyclic nucleic acid (BNA)
  modified_base (11)..(11): bicyclic nucleic acid (BNA)
  source: /note="3' tri-ethylene glycol (TEG)"
aaggaagaugg

SEQ ID NO: 16866 - RNA, 10 nt, Artificial Sequence
  source: /note="Description of Artificial Sequence: Synthetic oligonucleotide"
  source: /note="RNA"
  modified_base (1)..(1): bicyclic nucleic acid (BNA)
  modified_base (10)..(10): bicyclic nucleic acid (BNA)
  source: /note="3' tri-ethylene glycol (TEG)"
aaggaagaug

SEQ ID NO: 16867 - DNA, 9 bp, Artificial Sequence
  source: /note="Description of Artificial Sequence: Synthetic oligonucleotide"
  source: /note="DNA/RNA"
  modified_base (1)..(1): bicyclic nucleic acid (BNA)
  modified_base (9)..(9): bicyclic nucleic acid (BNA)
  source: /note="3' tri-ethylene glycol (TEG)"
aaggaagat

SEQ ID NO: 16868 - RNA, 8 nt, Artificial Sequence
  source: /note="Description of Artificial Sequence: Synthetic oligonucleotide"
  source: /note="RNA/Antisense Oligonucleotide"
  modified_base (1)..(1): bicyclic nucleic acid (BNA)
  modified_base (8)..(8): bicyclic nucleic acid (BNA)
  source: /note="3' tri-ethylene glycol (TEG)"
aaggaaga

SEQ ID NO: 16869 - RNA, 19 nt, Artificial Sequence
  source: /note="Description of Artificial Sequence: Synthetic oligonucleotide"
  source: /note="RNA"
  modified_base (1)..(1): bicyclic nucleic acid (BNA)
  modified_base (11)..(11): 5-methyl modified nucleotide
  modified_base (16)..(16): 5-methyl modified nucleotide
  modified_base (19)..(19): bicyclic nucleic acid (BNA)
  source: /note="3' tri-ethylene glycol (TEG)"
aggaagauggcauuucuag

SEQ ID NO: 16870 - RNA, 18 nt, Artificial Sequence
  source: /note="Description of Artificial Sequence: Synthetic oligonucleotide"
  source: /note="RNA"
  modified_base (1)..(1): bicyclic nucleic acid (BNA)
  modified_base (11)..(11): 5-methyl modified nucleotide
  modified_base (16)..(16): 5-methyl modified nucleotide
  modified_base (18)..(18): bicyclic nucleic acid (BNA)
  source: /note="3' tri-ethylene glycol (TEG)"
aggaagauggcauuucua

SEQ ID NO: 16871 - DNA, 17 bp, Artificial Sequence
  source: /note="Description of Artificial Sequence: Synthetic oligonucleotide"
  source: /note="Description of Combined DNA/RNA Molecule: Synthetic oligonucleotide"
  source: /note="DNA/RNA"
  modified_base (1)..(1): bicyclic nucleic acid (BNA)
  modified_base (11)..(11): 5-methyl modified nucleotide
  modified_base (16)..(16): 5-methyl modified nucleotide
  modified_base (17)..(17): bicyclic nucleic acid (BNA)
  source: /note="3' tri-ethylene glycol (TEG)"
aggaagauggcauuuct

SEQ ID NO: 16872 - RNA, 16 nt, Artificial Sequence
  source: /note="Description of Artificial Sequence: Synthetic oligonucleotide"
  source: /note="RNA"
  modified_base (1)..(1): bicyclic nucleic acid (BNA)
  modified_base (11)..(11): 5-methyl modified nucleotide
  modified_base (16)..(16): 5-methyl bicyclic nucleic acid
  source: /note="3' tri-ethylene glycol (TEG)"
aggaagauggcauuuc

SEQ ID NO: 16873 - DNA, 15 bp, Artificial Sequence
  source: /note="Description of Artificial Sequence: Synthetic oligonucleotide"
  source: /note="Description of Combined DNA/RNA Molecule: Synthetic oligonucleotide"
  source: /note="DNA/RNA"
  modified_base (1)..(1): bicyclic nucleic acid (BNA)
  modified_base (11)..(11): 5-methyl modified nucleotide
  modified_base (15)..(15): bicyclic nucleic acid (BNA)
  source: /note="3' tri-ethylene glycol (TEG)"
aggaagauggcauut

SEQ ID NO: 16874 - DNA, 14 bp, Artificial Sequence
  source: /note="Description of Artificial Sequence: Synthetic oligonucleotide"
  source: /note="Description of Combined DNA/RNA Molecule: Synthetic oligonucleotide"
  source: /note="DNA/RNA"
  modified_base (1)..(1): bicyclic nucleic acid (BNA)
  modified_base (11)..(11): 5-methyl modified nucleotide
  modified_base (14)..(14): bicyclic nucleic acid (BNA)
  source: /note="3' tri-ethylene glycol (TEG)"
aggaagauggcaut

SEQ ID NO: 16875 - DNA, 13 bp, Artificial Sequence
  source: /note="Description of Artificial Sequence: Synthetic oligonucleotide"
  source: /note="Description of Combined DNA/RNA Molecule: Synthetic oligonucleotide"
  source: /note="DNA/RNA"
  modified_base (1)..(1): bicyclic nucleic acid (BNA)
  modified_base (11)..(11): 5-methyl modified nucleotide
  modified_base (13)..(13): bicyclic nucleic acid (BNA)
  source: /note="3' tri-ethylene glycol (TEG)"
aggaagauggcat

SEQ ID NO: 16876 - RNA, 12 nt, Artificial Sequence
  source: /note="Description of Artificial Sequence: Synthetic oligonucleotide"
  source: /note="RNA"
  modified_base (1)..(1): bicyclic nucleic acid (BNA)
  modified_base (11)..(11): 5-methyl modified nucleotide
  modified_base (12)..(12): bicyclic nucleic acid (BNA)
  source: /note="3' tri-ethylene glycol (TEG)"
aggaagauggca

SEQ ID NO: 16877 - RNA, 10 nt, Artificial Sequence
  source: /note="Description of Artificial Sequence: Synthetic oligonucleotide"
  source: /note="RNA"
  modified_base (1)..(1): bicyclic nucleic acid (BNA)
  modified_base (10)..(10): bicyclic nucleic acid (BNA)
  source: /note="3' tri-ethylene glycol (TEG)"
aggaagaugg

SEQ ID NO: 16878 - RNA, 9 nt, Artificial Sequence
  source: /note="Description of Artificial Sequence: Synthetic oligonucleotide"
  source: /note="RNA"
  modified_base (1)..(1): bicyclic nucleic acid (BNA)
  modified_base (9)..(9): bicyclic nucleic acid (BNA)
  source: /note="3' tri-ethylene glycol (TEG)"
aggaagaug

SEQ ID NO: 16879 - DNA, 8 bp, Artificial Sequence
  source: /note="Description of Artificial Sequence: Synthetic oligonucleotide"
  source: /note="DNA/RNA"
  modified_base (1)..(1): bicyclic nucleic acid (BNA)
  modified_base (8)..(8): bicyclic nucleic acid (BNA)
  source: /note="3' tri-ethylene glycol (TEG)"
aggaagat

SEQ ID NO: 16880 - RNA, 18 nt, Artificial Sequence
  source: /note="Description of Artificial Sequence: Synthetic oligonucleotide"
  source: /note="RNA"
  modified_base (1)..(1): bicyclic nucleic acid (BNA)
  modified_base (10)..(10): 5-methyl modified nucleotide
  modified_base (15)..(15): 5-methyl modified nucleotide
  modified_base (18)..(18): bicyclic nucleic acid (BNA)
  source: /note="3' tri-ethylene glycol (TEG)"
ggaagauggcauuucuag

SEQ ID NO: 16881 - RNA, 17 nt, Artificial Sequence
  source: /note="Description of Artificial Sequence: Synthetic oligonucleotide"
  source: /note="RNA"
  modified_base (1)..(1): bicyclic nucleic acid (BNA)
  modified_base (10)..(10): 5-methyl modified nucleotide
  modified_base (15)..(15): 5-methyl modified nucleotide
  modified_base (17)..(17): bicyclic nucleic acid (BNA)
  source: /note="3' tri-ethylene glycol (TEG)"
ggaagauggcauuucua

SEQ ID NO: 16882 - DNA, 16 bp, Artificial Sequence
  source: /note="Description of Artificial Sequence: Synthetic oligonucleotide"
  source: /note="Description of Combined DNA/RNA Molecule: Synthetic oligonucleotide"
  source: /note="DNA/RNA"
  modified_base (1)..(1): bicyclic nucleic acid (BNA)
  modified_base (10)..(10): 5-methyl modified nucleotide
  modified_base (15)..(15): 5-methyl modified nucleotide
  modified_base (16)..(16): bicyclic nucleic acid (BNA)
  source: /note="3' tri-ethylene glycol (TEG)"
ggaagauggcauuuct

SEQ ID NO: 16883 - RNA, 15 nt, Artificial Sequence
  source: /note="Description of Artificial Sequence: Synthetic oligonucleotide"
  source: /note="RNA"
  modified_base (1)..(1): bicyclic nucleic acid (BNA)
  modified_base (10)..(10): 5-methyl modified nucleotide
  modified_base (15)..(15): 5-methyl bicyclic nucleic acid
  source: /note="3' tri-ethylene glycol (TEG)"
ggaagauggcauuuc

SEQ ID NO: 16884 - DNA, 14 bp, Artificial Sequence
  source: /note="Description of Artificial Sequence: Synthetic oligonucleotide"
  source: /note="Description of Combined DNA/RNA Molecule: Synthetic oligonucleotide"
  source: /note="DNA/RNA"
  modified_base (1)..(1): bicyclic nucleic acid (BNA)
  modified_base (10)..(10): 5-methyl modified nucleotide
  modified_base (14)..(14): bicyclic nucleic acid (BNA)
  source: /note="3' tri-ethylene glycol (TEG)"
ggaagauggcauut

SEQ ID NO: 16885 - DNA, 13 bp, Artificial Sequence
  source: /note="Description of Artificial Sequence: Synthetic oligonucleotide"
  source: /note="Description of Combined DNA/RNA Molecule: Synthetic oligonucleotide"
  source: /note="DNA/RNA"
  modified_base (1)..(1): bicyclic nucleic acid (BNA)
  modified_base (10)..(10): 5-methyl modified nucleotide
  modified_base (13)..(13): bicyclic nucleic acid (BNA)
  source: /note="3' tri-ethylene glycol (TEG)"
ggaagauggcaut

SEQ ID NO: 16886 - DNA, 12 bp, Artificial Sequence
  source: /note="Description of Artificial Sequence: Synthetic oligonucleotide"
  source: /note="Description of Combined DNA/RNA Molecule: Synthetic oligonucleotide"
  source: /note="DNA/RNA"
  modified_base (1)..(1): bicyclic nucleic acid (BNA)
  modified_base (10)..(10): 5-methyl modified nucleotide
  modified_base (12)..(12): bicyclic nucleic acid (BNA)
  source: /note="3' tri-ethylene glycol (TEG)"
ggaagauggcat

SEQ ID NO: 16887 - RNA, 11 nt, Artificial Sequence
  source: /note="Description of Artificial Sequence: Synthetic oligonucleotide"
  source: /note="RNA"
  modified_base (1)..(1): bicyclic nucleic acid (BNA)
  modified_base (10)..(10): 5-methyl modified nucleotide
  modified_base (11)..(11): bicyclic nucleic acid (BNA)
  source: /note="3' tri-ethylene glycol (TEG)"
ggaagauggca

SEQ ID NO: 16888 - RNA, 10 nt, Artificial Sequence
  source: /note="Description of Artificial Sequence: Synthetic oligonucleotide"
  source: /note="RNA"
  modified_base (1)..(1): bicyclic nucleic acid (BNA)
  modified_base (10)..(10): 5-methyl bicyclic nucleic acid
  source: /note="3' tri-ethylene glycol (TEG)"
ggaagauggc

SEQ ID NO: 16889 - RNA, 8 nt, Artificial Sequence
  source: /note="Description of Artificial Sequence: Synthetic oligonucleotide"
  source: /note="RNA"
  modified_base (1)..(1): bicyclic nucleic acid (BNA)
  modified_base (8)..(8): bicyclic nucleic acid (BNA)
  source: /note="3' tri-ethylene glycol (TEG)"
ggaagaug

SEQ ID NO: 16890 - RNA, 17 nt, Artificial Sequence
  source: /note="Description of Artificial Sequence: Synthetic oligonucleotide"
  source: /note="RNA"
  modified_base (1)..(1): bicyclic nucleic acid (BNA)
  modified_base (9)..(9): 5-methyl modified nucleotide
  modified_base (14)..(14): 5-methyl modified nucleotide
  modified_base (17)..(17): bicyclic nucleic acid (BNA)
  source: /note="3' tri-ethylene glycol (TEG)"
gaagauggcauuucuag

SEQ ID NO: 16891 - RNA, 16 nt, Artificial Sequence
  source: /note="Description of Artificial Sequence: Synthetic oligonucleotide"
  source: /note="RNA"
  modified_base (1)..(1): bicyclic nucleic acid (BNA)
  modified_base (9)..(9): 5-methyl modified nucleotide
  modified_base (14)..(14): 5-methyl modified nucleotide
  modified_base (16)..(16): bicyclic nucleic acid (BNA)
  source: /note="3' tri-ethylene glycol (TEG)"
gaagauggcauuucua

SEQ ID NO: 16892 - RNA, 14 nt, Artificial Sequence
  source: /note="Description of Artificial Sequence: Synthetic oligonucleotide"
  source: /note="RNA"
  modified_base (1)..(1): bicyclic nucleic acid (BNA)
  modified_base (9)..(9): 5-methyl modified nucleotide
  modified_base (14)..(14): 5-methyl bicyclic nucleic acid
  source: /note="3' tri-ethylene glycol (TEG)"
gaagauggcauuuc

SEQ ID NO: 16893 - DNA, 13 bp, Artificial Sequence
  source: /note="Description of Artificial Sequence: Synthetic oligonucleotide"
  source: /note="Description of Combined DNA/RNA Molecule: Synthetic oligonucleotide"
  source: /note="DNA/RNA"
  modified_base (1)..(1): bicyclic nucleic acid (BNA)
  modified_base (9)..(9): 5-methyl modified nucleotide
  modified_base (13)..(13): bicyclic nucleic acid (BNA)
  source: /note="3' tri-ethylene glycol (TEG)"
gaagauggcauut

SEQ ID NO: 16894 - DNA, 12 bp, Artificial Sequence
  source: /note="Description of Artificial Sequence: Synthetic oligonucleotide"
  source: /note="Description of Combined DNA/RNA Molecule: Synthetic oligonucleotide"
  source: /note="DNA/RNA"
  modified_base (1)..(1): bicyclic nucleic acid (BNA)
  modified_base (9)..(9): 5-methyl modified nucleotide
  modified_base (12)..(12): bicyclic nucleic acid (BNA)
  source: /note="3' tri-ethylene glycol (TEG)"
gaagauggcaut

SEQ ID NO: 16895 - DNA, 11 bp, Artificial Sequence
  source: /note="Description of Artificial Sequence: Synthetic oligonucleotide"
  source: /note="Description of Combined DNA/RNA Molecule: Synthetic oligonucleotide"
  source: /note="DNA/RNA"
  modified_base (1)..(1): bicyclic nucleic acid (BNA)
  modified_base (9)..(9): 5-methyl modified nucleotide
  modified_base (11)..(11): bicyclic nucleic acid (BNA)
  source: /note="3' tri-ethylene glycol (TEG)"
gaagauggcat

SEQ ID NO: 16896 - RNA, 10 nt, Artificial Sequence
  source: /note="Description of Artificial Sequence: Synthetic oligonucleotide"
  source: /note="RNA"
  modified_base (1)..(1): bicyclic nucleic acid (BNA)
  modified_base (9)..(9): 5-methyl modified nucleotide
  modified_base (10)..(10): bicyclic nucleic acid (BNA)
  source: /note="3' tri-ethylene glycol (TEG)"
gaagauggca

SEQ ID NO: 16897 - RNA, 9 nt, Artificial Sequence
  source: /note="Description of Artificial Sequence: Synthetic oligonucleotide"
  source: /note="RNA"
  modified_base (1)..(1): bicyclic nucleic acid (BNA)
  modified_base (9)..(9): 5-methyl bicyclic nucleic acid
  source: /note="3' tri-ethylene glycol (TEG)"
gaagauggc

SEQ ID NO: 16898 - RNA, 8 nt, Artificial Sequence
  source: /note="Description of Artificial Sequence: Synthetic oligonucleotide"
  source: /note="RNA"
  modified_base (1)..(1): bicyclic nucleic acid (BNA)
  modified_base (8)..(8): bicyclic nucleic acid (BNA)
  source: /note="3' tri-ethylene glycol (TEG)"
gaagaugg

SEQ ID NO: 16899 - RNA, 16 nt, Artificial Sequence
  source: /note="Description of Artificial Sequence: Synthetic oligonucleotide"
  source: /note="RNA"
  modified_base (1)..(1): bicyclic nucleic acid (BNA)
  modified_base (8)..(8): 5-methyl modified nucleotide
  modified_base (13)..(13): 5-methyl modified nucleotide
  modified_base (16)..(16): bicyclic nucleic acid (BNA)
  source: /note="3' tri-ethylene glycol (TEG)"
aagauggcauuucuag

SEQ ID NO: 16900 - RNA, 15 nt, Artificial Sequence
  source: /note="Description of Artificial Sequence: Synthetic oligonucleotide"
  source: /note="RNA"
  modified_base (1)..(1): bicyclic nucleic acid (BNA)
  modified_base (8)..(8): 5-methyl modified nucleotide
  modified_base (13)..(13): 5-methyl modified nucleotide
  modified_base (15)..(15): bicyclic nucleic acid (BNA)
  source: /note="3' tri-ethylene glycol (TEG)"
aagauggcauuucua

SEQ ID NO: 16901 - DNA, 14 bp, Artificial Sequence
  source: /note="Description of Artificial Sequence: Synthetic oligonucleotide"
  source: /note="Description of Combined DNA/RNA Molecule: Synthetic oligonucleotide"
  source: /note="DNA/RNA"
  modified_base (1)..(1): bicyclic nucleic acid (BNA)
  modified_base (8)..(8): 5-methyl modified nucleotide
  modified_base (13)..(13): 5-methyl modified nucleotide
  modified_base (14)..(14): bicyclic nucleic acid (BNA)
  source: /note="3' tri-ethylene glycol (TEG)"
aagauggcauuuct

SEQ ID NO: 16902 - RNA, 13 nt, Artificial Sequence
  source: /note="Description of Artificial Sequence: Synthetic oligonucleotide"
  source: /note="RNA"
  modified_base (1)..(1): bicyclic nucleic acid (BNA)
  modified_base (8)..(8): 5-methyl modified nucleotide
  modified_base (13)..(13): 5-methyl bicyclic nucleic acid
  source: /note="3' tri-ethylene glycol (TEG)"
aagauggcauuuc

SEQ ID NO: 16903 - DNA, 12 bp, Artificial Sequence
  source: /note="Description of Artificial Sequence: Synthetic oligonucleotide"
  source: /note="Description of Combined DNA/RNA Molecule: Synthetic oligonucleotide"
  source: /note="DNA/RNA"
  modified_base (1)..(1): bicyclic nucleic acid (BNA)
  modified_base (8)..(8): 5-methyl modified nucleotide
  modified_base (12)..(12): bicyclic nucleic acid (BNA)
  source: /note="3' tri-ethylene glycol (TEG)"
aagauggcauut

SEQ ID NO: 16904 - DNA, 11 bp, Artificial Sequence
  source: /note="Description of Artificial Sequence: Synthetic oligonucleotide"
  source: /note="Description of Combined DNA/RNA Molecule: Synthetic oligonucleotide"
  source: /note="DNA/RNA"
  modified_base (1)..(1): bicyclic nucleic acid (BNA)
  modified_base (8)..(8): 5-methyl modified nucleotide
  modified_base (11)..(11): bicyclic nucleic acid (BNA)
  source: /note="3' tri-ethylene glycol (TEG)"
aagauggcaut

SEQ ID NO: 16905 - DNA, 10 bp, Artificial Sequence
  source: /note="Description of Artificial Sequence: Synthetic oligonucleotide"
  source: /note="Description of Combined DNA/RNA Molecule: Synthetic oligonucleotide"
  source: /note="DNA/RNA"
  modified_base (1)..(1): bicyclic nucleic acid (BNA)
  modified_base (8)..(8): 5-methyl modified nucleotide
  modified_base (10)..(10): bicyclic nucleic acid (BNA)
  source: /note="3' tri-ethylene glycol (TEG)"
aagauggcat

SEQ ID NO: 16906 - RNA, 9 nt, Artificial Sequence
  source: /note="Description of Artificial Sequence: Synthetic oligonucleotide"
  source: /note="RNA"
  modified_base (1)..(1): bicyclic nucleic acid (BNA)
  modified_base (8)..(8): 5-methyl modified nucleotide
  modified_base (9)..(9): bicyclic nucleic acid (BNA)
  source: /note="3' tri-ethylene glycol (TEG)"
aagauggca

SEQ ID NO: 16907 - RNA, 8 nt, Artificial Sequence
  source: /note="Description of Artificial Sequence: Synthetic oligonucleotide"
  source: /note="RNA"
  modified_base (1)..(1): bicyclic nucleic acid (BNA)
  modified_base (8)..(8): 5-methyl bicyclic nucleic acid
  source: /note="3' tri-ethylene glycol (TEG)"
aagauggc

SEQ ID NO: 16908 - RNA, 15 nt, Artificial Sequence
  source: /note="Description of Artificial Sequence: Synthetic oligonucleotide"
  source: /note="RNA"
  modified_base (1)..(1): bicyclic nucleic acid (BNA)
  modified_base (7)..(7): 5-methyl modified nucleotide
  modified_base (12)..(12): 5-methyl modified nucleotide
  modified_base (15)..(15): bicyclic nucleic acid (BNA)
  source: /note="3' tri-ethylene glycol (TEG)"
agauggcauuucuag

SEQ ID NO: 16909 - RNA, 14 nt, Artificial Sequence
  source: /note="Description of Artificial Sequence: Synthetic oligonucleotide"
  source: /note="RNA"
  modified_base (1)..(1): bicyclic nucleic acid (BNA)
  modified_base (7)..(7): 5-methyl modified nucleotide
  modified_base (12)..(12): 5-methyl modified nucleotide
  modified_base (14)..(14): bicyclic nucleic acid (BNA)
  source: /note="3' tri-ethylene glycol (TEG)"
agauggcauuucua

SEQ ID NO: 16910 - DNA, 13 bp, Artificial Sequence
  source: /note="Description of Artificial Sequence: Synthetic oligonucleotide"
  source: /note="Description of Combined DNA/RNA Molecule: Synthetic oligonucleotide"
  source: /note="DNA/RNA"
  modified_base (1)..(1): bicyclic nucleic acid (BNA)
  modified_base (7)..(7): 5-methyl modified nucleotide
  modified_base (12)..(12): 5-methyl modified nucleotide
  modified_base (13)..(13): bicyclic nucleic acid (BNA)
  source: /note="3' tri-ethylene glycol (TEG)"
agauggcauuuct

SEQ ID NO: 16911 - RNA, 12 nt, Artificial Sequence
  source: /note="Description of Artificial Sequence: Synthetic oligonucleotide"
  source: /note="RNA"
  modified_base (1)..(1): bicyclic nucleic acid (BNA)
  modified_base (7)..(7): 5-methyl modified nucleotide
  modified_base (12)..(12): 5-methyl bicyclic nucleic acid
  source: /note="3' tri-ethylene glycol (TEG)"
agauggcauuuc

SEQ ID NO: 16912 - DNA, 11 bp, Artificial Sequence
  source: /note="Description of Artificial Sequence: Synthetic oligonucleotide"
  source: /note="Description of Combined DNA/RNA Molecule: Synthetic oligonucleotide"
  source: /note="DNA/RNA"
  modified_base (1)..(1): bicyclic nucleic acid (BNA)
  modified_base (7)..(7): 5-methyl modified nucleotide
  modified_base (11)..(11): bicyclic nucleic acid (BNA)
  source: /note="3' tri-ethylene glycol (TEG)"
agauggcauut

SEQ ID NO: 16913 - DNA, 10 bp, Artificial Sequence
  source: /note="Description of Artificial Sequence: Synthetic oligonucleotide"
  source: /note="Description of Combined DNA/RNA Molecule: Synthetic oligonucleotide"
  source: /note="DNA/RNA"
  modified_base (1)..(1): bicyclic nucleic acid (BNA)
  modified_base (7)..(7): 5-methyl modified nucleotide
  modified_base (10)..(10): bicyclic nucleic acid (BNA)
  source: /note="3' tri-ethylene glycol (TEG)"
agauggcaut

SEQ ID NO: 16914 - DNA, 9 bp, Artificial Sequence
  source: /note="Description of Artificial Sequence: Synthetic oligonucleotide"
  source: /note="Description of Combined DNA/RNA Molecule: Synthetic oligonucleotide"
  source: /note="DNA/RNA"
  modified_base (1)..(1): bicyclic nucleic acid (BNA)
  modified_base (7)..(7): 5-methyl modified nucleotide
  modified_base (9)..(9): bicyclic nucleic acid (BNA)
  source: /note="3' tri-ethylene glycol (TEG)"
agauggcat

SEQ ID NO: 16915 - RNA, 8 nt, Artificial Sequence
  source: /note="Description of Artificial Sequence: Synthetic oligonucleotide"
  source: /note="RNA"
  modified_base (1)..(1): bicyclic nucleic acid (BNA)
  modified_base (7)..(7): 5-methyl modified nucleotide
  modified_base (8)..(8): bicyclic nucleic acid (BNA)
  source: /note="3' tri-ethylene glycol (TEG)"
agauggca

SEQ ID NO: 16916 - RNA, 30 nt, Artificial Sequence; identical to SEQ ID NO: 284
  source: /note="Description of Artificial Sequence: Synthetic oligonucleotide"
  source: /note="RNA"
  modified_base (1)..(1): 5-methyl bicyclic nucleic acid
  modified_base (3)..(3): 5-methyl modified nucleotide
  modified_base (4)..(4): 5-methyl modified nucleotide
  modified_base (7)..(7): 5-methyl modified nucleotide
  modified_base (10)..(10): 5-methyl modified nucleotide
  modified_base (22)..(22): 5-methyl modified nucleotide
  modified_base (27)..(27): 5-methyl modified nucleotide
  modified_base (30)..(30): bicyclic nucleic acid (BNA)
  source: /note="3' tri-ethylene glycol (TEG)"

SEQ ID NO: 16917 - RNA, 29 nt, Artificial Sequence
  source: /note="Description of Artificial Sequence: Synthetic oligonucleotide"
  source: /note="RNA"
  modified_base (1)..(1): 5-methyl bicyclic nucleic acid
  modified_base (3)..(3): 5-methyl modified nucleotide
  modified_base (4)..(4): 5-methyl modified nucleotide
  modified_base (7)..(7): 5-methyl modified nucleotide
  modified_base (10)..(10): 5-methyl modified nucleotide
  modified_base (22)..(22): 5-methyl modified nucleotide
  modified_base (27)..(27): 5-methyl modified nucleotide
  modified_base (29)..(29): bicyclic nucleic acid (BNA)
  source: /note="3' tri-ethylene glycol (TEG)"
cuccaacaucaaggaagauggcauuucua

SEQ ID NO: 16918 - DNA, 28 bp, Artificial Sequence
  source: /note="Description of Artificial Sequence: Synthetic oligonucleotide"
  source: /note="Description of Combined DNA/RNA Molecule: Synthetic oligonucleotide"
  source: /note="DNA/RNA"
  modified_base (1)..(1): 5-methyl bicyclic nucleic acid
  modified_base (3)..(3): 5-methyl modified nucleotide
  modified_base (4)..(4): 5-methyl modified nucleotide
  modified_base (7)..(7): 5-methyl modified nucleotide
  modified_base (10)..(10): 5-methyl modified nucleotide
  modified_base (22)..(22): 5-methyl modified nucleotide
  modified_base (27)..(27): 5-methyl modified nucleotide
  modified_base (28)..(28): bicyclic nucleic acid (BNA)
  source: /note="3' tri-ethylene glycol (TEG)"
cuccaacaucaaggaagauggcauuuct

SEQ ID NO: 16919 - RNA, 27 nt, Artificial Sequence
  source: /note="Description of Artificial Sequence: Synthetic oligonucleotide"
  source: /note="RNA"
  modified_base (1)..(1): 5-methyl bicyclic nucleic acid
  modified_base (3)..(3): 5-methyl modified nucleotide
  modified_base (4)..(4): 5-methyl modified nucleotide
  modified_base (7)..(7): 5-methyl modified nucleotide
  modified_base (10)..(10): 5-methyl modified nucleotide
  modified_base (22)..(22): 5-methyl modified nucleotide
  modified_base (27)..(27): 5-methyl bicyclic nucleic acid
  source: /note="3' tri-ethylene glycol (TEG)"
cuccaacaucaaggaagauggcauuuc

SEQ ID NO: 16920 - DNA, 26 bp, Artificial Sequence
  source: /note="Description of Artificial Sequence: Synthetic oligonucleotide"
  source: /note="Description of Combined DNA/RNA Molecule: Synthetic oligonucleotide"
  source: /note="DNA/RNA"
  modified_base (1)..(1): 5-methyl bicyclic nucleic acid
  modified_base (3)..(3): 5-methyl modified nucleotide
  modified_base (4)..(4): 5-methyl modified nucleotide
  modified_base (7)..(7): 5-methyl modified nucleotide
  modified_base (10)..(10): 5-methyl modified nucleotide
  modified_base (22)..(22): 5-methyl modified nucleotide
  modified_base (26)..(26): bicyclic nucleic acid (BNA)
  source: /note="3' tri-ethylene glycol (TEG)"
cuccaacaucaaggaagauggcauut

SEQ ID NO: 16921 - DNA, 25 bp, Artificial Sequence
  source: /note="Description of Artificial Sequence: Synthetic oligonucleotide"
  source: /note="Description of Combined DNA/RNA Molecule: Synthetic oligonucleotide"
  source: /note="DNA/RNA"
  modified_base (1)..(1): 5-methyl bicyclic nucleic acid
  modified_base (3)..(3): 5-methyl modified nucleotide
  modified_base (4)..(4): 5-methyl modified nucleotide
  modified_base (7)..(7): 5-methyl modified nucleotide
  modified_base (10)..(10): 5-methyl modified nucleotide
  modified_base (22)..(22): 5-methyl modified nucleotide
  modified_base (25)..(25): bicyclic nucleic acid (BNA)
  source: /note="3' tri-ethylene glycol (TEG)"
cuccaacaucaaggaagauggcaut

SEQ ID NO: 16922 - DNA, 24 bp, Artificial Sequence
  source: /note="Description of Artificial Sequence: Synthetic oligonucleotide"
  source: /note="Description of Combined DNA/RNA Molecule: Synthetic oligonucleotide"
  source: /note="DNA/RNA"
  modified_base (1)..(1): 5-methyl bicyclic nucleic acid
  modified_base (3)..(3): 5-methyl modified nucleotide
  modified_base (4)..(4): 5-methyl modified nucleotide
  modified_base (7)..(7): 5-methyl modified nucleotide
  modified_base (10)..(10): 5-methyl modified nucleotide
  modified_base (22)..(22): 5-methyl modified nucleotide
  modified_base (24)..(24): bicyclic nucleic acid (BNA)
  source: /note="3' tri-ethylene glycol (TEG)"
cuccaacaucaaggaagauggcat

SEQ ID NO: 16923 - RNA, 23 nt, Artificial Sequence
  source: /note="Description of Artificial Sequence: Synthetic oligonucleotide"
  source: /note="RNA"
  modified_base (1)..(1): 5-methyl bicyclic nucleic acid
  modified_base (3)..(3): 5-methyl modified nucleotide
  modified_base (4)..(4): 5-methyl modified nucleotide
  modified_base (7)..(7): 5-methyl modified nucleotide
  modified_base (10)..(10): 5-methyl modified nucleotide
  modified_base (22)..(22): 5-methyl modified nucleotide
  modified_base (23)..(23): bicyclic nucleic acid (BNA)
  source: /note="3' tri-ethylene glycol (TEG)"
cuccaacaucaaggaagauggca

SEQ ID NO: 16924 - RNA, 22 nt, Artificial Sequence
  source: /note="Description of Artificial Sequence: Synthetic oligonucleotide"
  source: /note="RNA"
  modified_base (1)..(1): 5-methyl bicyclic nucleic acid
  modified_base (3)..(3): 5-methyl modified nucleotide
  modified_base (4)..(4): 5-methyl modified nucleotide
  modified_base (7)..(7): 5-methyl modified nucleotide
  modified_base (10)..(10): 5-methyl modified nucleotide
  modified_base (22)..(22): 5-methyl bicyclic nucleic acid
  source: /note="3' tri-ethylene glycol (TEG)"
cuccaacaucaaggaagauggc

SEQ ID NO: 16925 - RNA, 21 nt, Artificial Sequence
  source: /note="Description of Artificial Sequence: Synthetic oligonucleotide"
  source: /note="RNA"
  modified_base (1)..(1): 5-methyl bicyclic nucleic acid
  modified_base (3)..(3): 5-methyl modified nucleotide
  modified_base (4)..(4): 5-methyl modified nucleotide
  modified_base (7)..(7): 5-methyl modified nucleotide
  modified_base (10)..(10): 5-methyl modified nucleotide
  modified_base (21)..(21): bicyclic nucleic acid (BNA)
  source: /note="3' tri-ethylene glycol (TEG)"
cuccaacaucaaggaagaugg

SEQ ID NO: 16926 - RNA, 20 nt, Artificial Sequence
  source: /note="Description of Artificial Sequence: Synthetic oligonucleotide"
  source: /note="RNA"
  modified_base (1)..(1): 5-methyl bicyclic nucleic acid
  modified_base (3)..(3): 5-methyl modified nucleotide
  modified_base (4)..(4): 5-methyl modified nucleotide
  modified_base (7)..(7): 5-methyl modified nucleotide
  modified_base (10)..(10): 5-methyl modified nucleotide
  modified_base (20)..(20): bicyclic nucleic acid (BNA)
  source: /note="3' tri-ethylene glycol (TEG)"
cuccaacaucaaggaagaug

SEQ ID NO: 16927 - DNA, 19 bp, Artificial Sequence
  source: /note="Description of Artificial Sequence: Synthetic oligonucleotide"
  source: /note="Description of Combined DNA/RNA Molecule: Synthetic oligonucleotide"
  source: /note="DNA/RNA"
  modified_base (1)..(1): 5-methyl bicyclic nucleic acid
  modified_base (3)..(3): 5-methyl modified nucleotide
  modified_base (4)..(4): 5-methyl modified nucleotide
  modified_base (7)..(7): 5-methyl modified nucleotide
  modified_base (10)..(10): 5-methyl modified nucleotide
  modified_base (19)..(19): bicyclic nucleic acid (BNA)
  source: /note="3' tri-ethylene glycol (TEG)"
cuccaacaucaaggaagat

SEQ ID NO: 16928 - RNA, 18 nt, Artificial Sequence
  source: /note="Description of Artificial Sequence: Synthetic oligonucleotide"
  source: /note="RNA"
  modified_base (1)..(1): 5-methyl bicyclic nucleic acid
  modified_base (3)..(3): 5-methyl modified nucleotide
  modified_base (4)..(4): 5-methyl modified nucleotide
  modified_base (7)..(7): 5-methyl modified nucleotide
  modified_base (10)..(10): 5-methyl modified nucleotide
  modified_base (18)..(18): bicyclic nucleic acid (BNA)
  source: /note="3' tri-ethylene glycol (TEG)"
cuccaacaucaaggaaga

SEQ ID NO: 16929 - RNA, 17 nt, Artificial Sequence
  source: /note="Description of Artificial Sequence: Synthetic oligonucleotide"
  source: /note="RNA"
  modified_base (1)..(1): 5-methyl bicyclic nucleic acid
  modified_base (3)..(3): 5-methyl modified nucleotide
  modified_base (4)..(4): 5-methyl modified nucleotide
  modified_base (7)..(7): 5-methyl modified nucleotide
  modified_base (10)..(10): 5-methyl modified nucleotide
  modified_base (17)..(17): bicyclic nucleic acid (BNA)
  source: /note="3' tri-ethylene glycol (TEG)"
cuccaacaucaaggaag

SEQ ID NO: 16930 - DNA, 29 bp, Artificial Sequence
  source: /note="Description of Artificial Sequence: Synthetic oligonucleotide"
  source: /note="Description of Combined DNA/RNA Molecule: Synthetic oligonucleotide"
  source: /note="DNA/RNA"
  modified_base (1)..(1): bicyclic nucleic acid (BNA)
  modified_base (2)..(2): 5-methyl modified nucleotide
  modified_base (3)..(3): 5-methyl modified nucleotide
  modified_base (6)..(6): 5-methyl modified nucleotide
  modified_base (9)..(9): 5-methyl modified nucleotide
  modified_base (21)..(21): 5-methyl modified nucleotide
  modified_base (26)..(26): 5-methyl modified nucleotide
  modified_base (29)..(29): bicyclic nucleic acid (BNA)
  source: /note="3' tri-ethylene glycol (TEG)"
tccaacaucaaggaagauggcauuucuag

SEQ ID NO: 16931 - DNA, 28 bp, Artificial Sequence
  source: /note="Description of Artificial Sequence: Synthetic oligonucleotide"
  source: /note="Description of Combined DNA/RNA Molecule: Synthetic oligonucleotide"
  source: /note="DNA/RNA"
  modified_base (1)..(1): bicyclic nucleic acid (BNA)
  modified_base (2)..(2): 5-methyl modified nucleotide
  modified_base (3)..(3): 5-methyl modified nucleotide
  modified_base (6)..(6): 5-methyl modified nucleotide
  modified_base (9)..(9): 5-methyl modified nucleotide
  modified_base (21)..(21): 5-methyl modified nucleotide
  modified_base (26)..(26): 5-methyl modified nucleotide
  modified_base (28)..(28): bicyclic nucleic acid (BNA)
  source: /note="3' tri-ethylene glycol (TEG)"
tccaacaucaaggaagauggcauuucua

SEQ ID NO: 16932 - DNA, 27 bp, Artificial Sequence
  source: /note="Description of Artificial Sequence: Synthetic oligonucleotide"
  source: /note="Description of Combined DNA/RNA Molecule: Synthetic oligonucleotide"
  source: /note="DNA/RNA"
  modified_base (1)..(1): bicyclic nucleic acid (BNA)
  modified_base (2)..(2): 5-methyl modified nucleotide
  modified_base (3)..(3): 5-methyl modified nucleotide
  modified_base (6)..(6): 5-methyl modified nucleotide
  modified_base (9)..(9): 5-methyl modified nucleotide
  modified_base (21)..(21): 5-methyl modified nucleotide
  modified_base (26)..(26): 5-methyl modified nucleotide
  modified_base (27)..(27): bicyclic nucleic acid (BNA)
  source: /note="3' tri-ethylene glycol (TEG)"
tccaacaucaaggaagauggcauuuct

SEQ ID NO: 16933 - DNA, 26 bp, Artificial Sequence
  source: /note="Description of Artificial Sequence: Synthetic oligonucleotide"
  source: /note="Description of Combined DNA/RNA Molecule: Synthetic oligonucleotide"
  source: /note="DNA/RNA"
  modified_base (1)..(1): bicyclic nucleic acid (BNA)
  modified_base (2)..(2): 5-methyl modified nucleotide
  modified_base (3)..(3): 5-methyl modified nucleotide
  modified_base (6)..(6): 5-methyl modified nucleotide
  modified_base (9)..(9): 5-methyl modified nucleotide
  modified_base (21)..(21): 5-methyl modified nucleotide
  modified_base (26)..(26): 5-methyl bicyclic nucleic acid
  source: /note="3' tri-ethylene glycol (TEG)"
tccaacaucaaggaagauggcauuuc

SEQ ID NO: 16934 - DNA, 25 bp, Artificial Sequence
  source: /note="Description of Artificial Sequence: Synthetic oligonucleotide"
  source: /note="Description of Combined DNA/RNA Molecule: Synthetic oligonucleotide"
  source: /note="DNA/RNA"
  modified_base (1)..(1): bicyclic nucleic acid (BNA)
  modified_base (2)..(2): 5-methyl modified nucleotide
  modified_base (3)..(3): 5-methyl modified nucleotide
  modified_base (6)..(6): 5-methyl modified nucleotide
  modified_base (9)..(9): 5-methyl modified nucleotide
  modified_base (21)..(21): 5-methyl modified nucleotide
  modified_base (25)..(25): bicyclic nucleic acid (BNA)
  source: /note="3' tri-ethylene glycol (TEG)"
tccaacaucaaggaagauggcauut

SEQ ID NO: 16935 - DNA, 24 bp, Artificial Sequence
  source: /note="Description of Artificial Sequence: Synthetic oligonucleotide"
  source: /note="Description of Combined DNA/RNA Molecule: Synthetic oligonucleotide"
  source: /note="DNA/RNA"
  modified_base (1)..(1): bicyclic nucleic acid (BNA)
  modified_base (2)..(2): 5-methyl modified nucleotide
  modified_base (3)..(3): 5-methyl modified nucleotide
  modified_base (6)..(6): 5-methyl modified nucleotide
  modified_base (9)..(9): 5-methyl modified nucleotide
  modified_base (21)..(21): 5-methyl modified nucleotide
  modified_base (24)..(24): bicyclic nucleic acid (BNA)
  source: /note="3' tri-ethylene glycol (TEG)"
tccaacaucaaggaagauggcaut

SEQ ID NO: 16936 - DNA, 23 bp, Artificial Sequence
  source: /note="Description of Artificial Sequence: Synthetic oligonucleotide"
  source: /note="Description of Combined DNA/RNA Molecule: Synthetic oligonucleotide"
  source: /note="DNA/RNA"
  modified_base (1)..(1): bicyclic nucleic acid (BNA)
  modified_base (2)..(2): 5-methyl modified nucleotide
  modified_base (3)..(3): 5-methyl modified nucleotide
  modified_base (6)..(6): 5-methyl modified nucleotide
  modified_base (9)..(9): 5-methyl modified nucleotide
  modified_base (21)..(21): 5-methyl modified nucleotide
  modified_base (23)..(23): bicyclic nucleic acid (BNA)
  source: /note="3' tri-ethylene glycol (TEG)"
tccaacaucaaggaagauggcat

SEQ ID NO: 16937 - DNA, 22 bp, Artificial Sequence
  source: /note="Description of Artificial Sequence: Synthetic oligonucleotide"
  source: /note="Description of Combined DNA/RNA Molecule: Synthetic oligonucleotide"
  source: /note="DNA/RNA"
  modified_base (1)..(1): bicyclic nucleic acid (BNA)
  modified_base (2)..(2): 5-methyl modified nucleotide
  modified_base (3)..(3): 5-methyl modified nucleotide
  modified_base (6)..(6): 5-methyl modified nucleotide
  modified_base (9)..(9): 5-methyl modified nucleotide
  modified_base (21)..(21): 5-methyl modified nucleotide
  modified_base (22)..(22): bicyclic nucleic acid (BNA)
  source: /note="3' tri-ethylene glycol (TEG)"
tccaacaucaaggaagauggca

SEQ ID NO: 16938 - DNA, 21 bp, Artificial Sequence
  source: /note="Description of Artificial Sequence: Synthetic oligonucleotide"
  source: /note="Description of Combined DNA/RNA Molecule: Synthetic oligonucleotide"
  source: /note="DNA/RNA"
  modified_base (1)..(1): bicyclic nucleic acid (BNA)
  modified_base (2)..(2): 5-methyl modified nucleotide
  modified_base (3)..(3): 5-methyl modified nucleotide
  modified_base (6)..(6): 5-methyl modified nucleotide
  modified_base (9)..(9): 5-methyl modified nucleotide
  modified_base (21)..(21): 5-methyl bicyclic nucleic acid
  source: /note="3' tri-ethylene glycol (TEG)"
tccaacaucaaggaagauggc

SEQ ID NO: 16939 - DNA, 20 bp, Artificial Sequence
  source: /note="Description of Artificial Sequence: Synthetic oligonucleotide"
  source: /note="Description of Combined DNA/RNA Molecule: Synthetic oligonucleotide"
  source: /note="DNA/RNA"
  modified_base (1)..(1): bicyclic nucleic acid (BNA)
  modified_base (2)..(2): 5-methyl modified nucleotide
  modified_base (3)..(3): 5-methyl modified nucleotide
  modified_base (6)..(6): 5-methyl modified nucleotide
  modified_base (9)..(9): 5-methyl modified nucleotide
  modified_base (20)..(20): bicyclic nucleic acid (BNA)
  source: /note="3' tri-ethylene glycol (TEG)"
tccaacaucaaggaagaugg

SEQ ID NO: 16940 - DNA, 19 bp, Artificial Sequence
  source: /note="Description of Artificial Sequence: Synthetic oligonucleotide"
  source: /note="Description of Combined DNA/RNA Molecule: Synthetic oligonucleotide"
  source: /note="DNA/RNA"
  modified_base (1)..(1): bicyclic nucleic acid (BNA)
  modified_base (2)..(2): 5-methyl modified nucleotide
  modified_base (3)..(3): 5-methyl modified nucleotide
  modified_base (6)..(6): 5-methyl modified nucleotide
  modified_base (9)..(9): 5-methyl modified nucleotide
  modified_base (19)..(19): bicyclic nucleic acid (BNA)
  source: /note="3' tri-ethylene glycol (TEG)"
tccaacaucaaggaagaug

SEQ ID NO: 16941 - DNA, 18 bp, Artificial Sequence
  source: /note="Description of Artificial Sequence: Synthetic oligonucleotide"
  source: /note="Description of Combined DNA/RNA Molecule: Synthetic oligonucleotide"
  source: /note="DNA/RNA"
  modified_base (1)..(1): bicyclic nucleic acid (BNA)
  modified_base (2)..(2): 5-methyl modified nucleotide
  modified_base (3)..(3): 5-methyl modified nucleotide
  modified_base (6)..(6): 5-methyl modified nucleotide
  modified_base (9)..(9): 5-methyl modified nucleotide
  modified_base (18)..(18): bicyclic nucleic acid (BNA)
  source: /note="3' tri-ethylene glycol (TEG)"
tccaacaucaaggaagat

SEQ ID NO: 16942 - DNA, 17 bp, Artificial Sequence
  source: /note="Description of Artificial Sequence: Synthetic oligonucleotide"
  source: /note="Description of Combined DNA/RNA Molecule: Synthetic oligonucleotide"
  source: /note="DNA/RNA"
  modified_base (1)..(1): bicyclic nucleic acid (BNA)
  modified_base (2)..(2): 5-methyl modified nucleotide
  modified_base (3)..(3): 5-methyl modified nucleotide
  modified_base (6)..(6): 5-methyl modified nucleotide
  modified_base (9)..(9): 5-methyl modified nucleotide
  modified_base (17)..(17): bicyclic nucleic acid (BNA)
  source: /note="3' tri-ethylene glycol (TEG)"
tccaacaucaaggaaga

SEQ ID NO: 16943 - DNA, 16 bp, Artificial Sequence
  source: /note="Description of Artificial Sequence: Synthetic oligonucleotide"
  source: /note="Description of Combined DNA/RNA Molecule: Synthetic oligonucleotide"
  source: /note="DNA/RNA"
  modified_base (1)..(1): bicyclic nucleic acid (BNA)
  modified_base (2)..(2): 5-methyl modified nucleotide
  modified_base (3)..(3): 5-methyl modified nucleotide
  modified_base (6)..(6): 5-methyl modified nucleotide
  modified_base (9)..(9): 5-methyl modified nucleotide
  modified_base (16)..(16): bicyclic nucleic acid (BNA)
  source: /note="3' tri-ethylene glycol (TEG)"
tccaacaucaaggaag

SEQ ID NO: 16944 - RNA, 28 nt, Artificial Sequence
  source: /note="Description of Artificial Sequence: Synthetic oligonucleotide"
  source: /note="RNA"
  modified_base (1)..(1): 5-methyl bicyclic nucleic acid
  modified_base (2)..(2): 5-methyl modified nucleotide
  modified_base (5)..(5): 5-methyl modified nucleotide
  modified_base (8)..(8): 5-methyl modified nucleotide
  modified_base (20)..(20): 5-methyl modified nucleotide
  modified_base (25)..(25): 5-methyl modified nucleotide
  modified_base (28)..(28): bicyclic nucleic acid (BNA)
  source: /note="3' tri-ethylene glycol (TEG)"
ccaacaucaaggaagauggcauuucuag

SEQ ID NO: 16945 - RNA, 27 nt, Artificial Sequence
  source: /note="Description of Artificial Sequence: Synthetic oligonucleotide"
  source: /note="RNA"
  modified_base (1)..(1): 5-methyl bicyclic nucleic acid
  modified_base (2)..(2): 5-methyl modified nucleotide
  modified_base (5)..(5): 5-methyl modified nucleotide
  modified_base (8)..(8): 5-methyl modified nucleotide
  modified_base (20)..(20): 5-methyl modified nucleotide
  modified_base (25)..(25): 5-methyl modified nucleotide
  modified_base (27)..(27): bicyclic nucleic acid (BNA)
  source: /note="3' tri-ethylene glycol (TEG)"
ccaacaucaaggaagauggcauuucua

SEQ ID NO: 16946 - DNA, 26 bp, Artificial Sequence
  source: /note="Description of Artificial Sequence: Synthetic oligonucleotide"
  source: /note="Description of Combined DNA/RNA Molecule: Synthetic oligonucleotide"
  source: /note="DNA/RNA"
  modified_base (1)..(1): 5-methyl bicyclic nucleic acid
  modified_base (2)..(2): 5-methyl modified nucleotide
  modified_base (5)..(5): 5-methyl modified nucleotide
  modified_base (8)..(8): 5-methyl modified nucleotide
  modified_base (20)..(20): 5-methyl modified nucleotide
  modified_base (25)..(25): 5-methyl modified nucleotide
  modified_base (26)..(26): bicyclic nucleic acid (BNA)
  source: /note="3' tri-ethylene glycol (TEG)"
ccaacaucaaggaagauggcauuuct

SEQ ID NO: 16947 - RNA, 25 nt, Artificial Sequence
  source: /note="Description of Artificial Sequence: Synthetic oligonucleotide"
  source: /note="RNA"
  modified_base (1)..(1): 5-methyl bicyclic nucleic acid
  modified_base (2)..(2): 5-methyl modified nucleotide
  modified_base (5)..(5): 5-methyl modified nucleotide
  modified_base (8)..(8): 5-methyl modified nucleotide
  modified_base (20)..(20): 5-methyl modified nucleotide
  modified_base (25)..(25): 5-methyl bicyclic nucleic acid
  source: /note="3' tri-ethylene glycol (TEG)"
ccaacaucaaggaagauggcauuuc

SEQ ID NO: 16948 - DNA, 24 bp, Artificial Sequence
  source: /note="Description of Artificial Sequence: Synthetic oligonucleotide"
  source: /note="Description of Combined DNA/RNA Molecule: Synthetic oligonucleotide"
  source: /note="DNA/RNA"
  modified_base (1)..(1): 5-methyl bicyclic nucleic acid
  modified_base (2)..(2): 5-methyl modified nucleotide
  modified_base (5)..(5): 5-methyl modified nucleotide
  modified_base (8)..(8): 5-methyl modified nucleotide
  modified_base (20)..(20): 5-methyl modified nucleotide
  modified_base (24)..(24): bicyclic nucleic acid (BNA)
  source: /note="3' tri-ethylene glycol (TEG)"
ccaacaucaaggaagauggcauut

SEQ ID NO: 16949 - DNA, 23 bp, Artificial Sequence
  source: /note="Description of Artificial Sequence: Synthetic oligonucleotide"
  source: /note="Description of Combined DNA/RNA Molecule: Synthetic oligonucleotide"
  source: /note="DNA/RNA"
  modified_base (1)..(1): 5-methyl bicyclic nucleic acid
  modified_base (2)..(2): 5-methyl modified nucleotide
  modified_base (5)..(5): 5-methyl modified nucleotide
  modified_base (8)..(8): 5-methyl modified nucleotide
  modified_base (20)..(20): 5-methyl modified nucleotide
  modified_base (23)..(23): bicyclic nucleic acid (BNA)
  source: /note="3' tri-ethylene glycol (TEG)"
ccaacaucaaggaagauggcaut

SEQ ID NO: 16950 - DNA, 22 bp, Artificial Sequence
  source: /note="Description of Artificial Sequence: Synthetic oligonucleotide"
  source: /note="Description of Combined DNA/RNA Molecule: Synthetic oligonucleotide"
  source: /note="DNA/RNA"
  modified_base (1)..(1): 5-methyl bicyclic nucleic acid
  modified_base (2)..(2): 5-methyl modified nucleotide
  modified_base (5)..(5): 5-methyl modified nucleotide
  modified_base (8)..(8): 5-methyl modified nucleotide
  modified_base (20)..(20): 5-methyl modified nucleotide
  modified_base (22)..(22): bicyclic nucleic acid (BNA)
  source: /note="3' tri-ethylene glycol (TEG)"
ccaacaucaaggaagauggcat

SEQ ID NO: 16951 - RNA, 21 nt, Artificial Sequence
  source: /note="Description of Artificial Sequence: Synthetic oligonucleotide"
  source: /note="RNA"
  modified_base (1)..(1): 5-methyl bicyclic nucleic acid
  modified_base (2)..(2): 5-methyl modified nucleotide
  modified_base (5)..(5): 5-methyl modified nucleotide
  modified_base (8)..(8): 5-methyl modified nucleotide
  modified_base (20)..(20): 5-methyl modified nucleotide
  modified_base (21)..(21): bicyclic nucleic acid (BNA)
  source: /note="3' tri-ethylene glycol (TEG)"
ccaacaucaaggaagauggca

SEQ ID NO: 16952 - RNA, 20 nt, Artificial Sequence
  source: /note="Description of Artificial Sequence: Synthetic oligonucleotide"
  source: /note="RNA"
  modified_base (1)..(1): 5-methyl bicyclic nucleic acid
  modified_base (2)..(2): 5-methyl modified nucleotide
  modified_base (5)..(5): 5-methyl modified nucleotide
  modified_base (8)..(8): 5-methyl modified nucleotide
  modified_base (20)..(20): 5-methyl bicyclic nucleic acid
  source: /note="3' tri-ethylene glycol (TEG)"
ccaacaucaaggaagauggc

SEQ ID NO: 16953 - RNA, 19 nt, Artificial Sequence
  source: /note="Description of Artificial Sequence: Synthetic oligonucleotide"
  source: /note="RNA"
  modified_base (1)..(1): 5-methyl bicyclic nucleic acid
  modified_base (2)..(2): 5-methyl modified nucleotide
  modified_base (5)..(5): 5-methyl modified nucleotide
  modified_base (8)..(8): 5-methyl modified nucleotide
  modified_base (19)..(19): bicyclic nucleic acid (BNA)
  source: /note="3' tri-ethylene glycol (TEG)"
ccaacaucaaggaagaugg

SEQ ID NO: 16954 - RNA, 18 nt, Artificial Sequence
  source: /note="Description of Artificial Sequence: Synthetic oligonucleotide"
  source: /note="RNA"
  modified_base (1)..(1): 5-methyl bicyclic nucleic acid
  modified_base (2)..(2): 5-methyl modified nucleotide
  modified_base (5)..(5): 5-methyl modified nucleotide
  modified_base (8)..(8): 5-methyl modified nucleotide
  modified_base (18)..(18): bicyclic nucleic acid (BNA)
  source: /note="3' tri-ethylene glycol (TEG)"
ccaacaucaaggaagaug

SEQ ID NO: 16955 - DNA, 17 bp, Artificial Sequence
  source: /note="Description of Artificial Sequence: Synthetic oligonucleotide"
  source: /note="Description of Combined DNA/RNA Molecule: Synthetic oligonucleotide"
  source: /note="DNA/RNA"
  modified_base (1)..(1): 5-methyl bicyclic nucleic acid
  modified_base (2)..(2): 5-methyl modified nucleotide
  modified_base (5)..(5): 5-methyl modified nucleotide
  modified_base (8)..(8): 5-methyl modified nucleotide
  modified_base (17)..(17): bicyclic nucleic acid (BNA)
  source: /note="3' tri-ethylene glycol (TEG)"
ccaacaucaaggaagat

SEQ ID NO: 16956 - RNA, 16 nt, Artificial Sequence
  source: /note="Description of Artificial Sequence: Synthetic oligonucleotide"
  source: /note="RNA"
  modified_base (1)..(1): 5-methyl bicyclic nucleic acid
  modified_base (2)..(2): 5-methyl modified nucleotide
  modified_base (5)..(5): 5-methyl modified nucleotide
  modified_base (8)..(8): 5-methyl modified nucleotide
  modified_base (16)..(16): bicyclic nucleic acid (BNA)
  source: /note="3' tri-ethylene glycol (TEG)"
ccaacaucaaggaaga

SEQ ID NO: 16957 - RNA, 15 nt, Artificial Sequence
  source: /note="Description of Artificial Sequence: Synthetic oligonucleotide"
  source: /note="RNA"
  modified_base (1)..(1): 5-methyl bicyclic nucleic acid
  modified_base (2)..(2): 5-methyl modified nucleotide
  modified_base (5)..(5): 5-methyl modified nucleotide
  modified_base (8)..(8): 5-methyl modified nucleotide
  modified_base (15)..(15): bicyclic nucleic acid (BNA)
  source: /note="3' tri-ethylene glycol (TEG)"
ccaacaucaaggaag

SEQ ID NO: 16958 - RNA, 27 nt, Artificial Sequence
  source: /note="Description of Artificial Sequence: Synthetic oligonucleotide"
  source: /note="RNA"
  modified_base (1)..(1): 5-methyl bicyclic nucleic acid
  modified_base (4)..(4): 5-methyl modified nucleotide
  modified_base (7)..(7): 5-methyl modified nucleotide
  modified_base (19)..(19): 5-methyl modified nucleotide
  modified_base (24)..(24): 5-methyl modified nucleotide
  modified_base (27)..(27): bicyclic nucleic acid (BNA)
  source: /note="3' tri-ethylene glycol (TEG)"
caacaucaaggaagauggcauuucuag

SEQ ID NO: 16959 - RNA, 26 nt, Artificial Sequence
  source: /note="Description of Artificial Sequence: Synthetic oligonucleotide"
  source: /note="RNA"
  modified_base (1)..(1): 5-methyl bicyclic nucleic acid
  modified_base (4)..(4): 5-methyl modified nucleotide
  modified_base (7)..(7): 5-methyl modified nucleotide
  modified_base (19)..(19): 5-methyl modified nucleotide
  modified_base (24)..(24): 5-methyl modified nucleotide
  modified_base (26)..(26): bicyclic nucleic acid (BNA)
  source: /note="3' tri-ethylene glycol (TEG)"
caacaucaaggaagauggcauuucua

SEQ ID NO: 16960 - DNA, 25 bp, Artificial Sequence
  source: /note="Description of Artificial Sequence: Synthetic oligonucleotide"
  source: /note="Description of Combined DNA/RNA Molecule: Synthetic oligonucleotide"
  source: /note="DNA/RNA"
  modified_base (1)..(1): 5-methyl bicyclic nucleic acid
  modified_base (4)..(4): 5-methyl modified nucleotide
  modified_base (7)..(7): 5-methyl modified nucleotide
  modified_base (19)..(19): 5-methyl modified nucleotide
  modified_base (24)..(24): 5-methyl modified nucleotide
  modified_base (25)..(25): bicyclic nucleic acid (BNA)
  source: /note="3' tri-ethylene glycol (TEG)"
caacaucaaggaagauggcauuuct

SEQ ID NO: 16961 - RNA, 24 nt, Artificial Sequence
  source: /note="Description of Artificial Sequence: Synthetic oligonucleotide"
  source: /note="RNA"
  modified_base (1)..(1): 5-methyl bicyclic nucleic acid
  modified_base (4)..(4): 5-methyl modified nucleotide
  modified_base (7)..(7): 5-methyl modified nucleotide
  modified_base (19)..(19): 5-methyl modified nucleotide
  modified_base (24)..(24): 5-methyl bicyclic nucleic acid
  source: /note="3' tri-ethylene glycol (TEG)"
caacaucaaggaagauggcauuuc

SEQ ID NO: 16962 - DNA, 23 bp, Artificial Sequence
  source: /note="Description of Artificial Sequence: Synthetic oligonucleotide"
  source: /note="Description of Combined DNA/RNA Molecule: Synthetic oligonucleotide"
  source: /note="DNA/RNA"
  modified_base (1)..(1): 5-methyl bicyclic nucleic acid
  modified_base (4)..(4): 5-methyl modified nucleotide
  modified_base (7)..(7): 5-methyl modified nucleotide
  modified_base (19)..(19): 5-methyl modified nucleotide
  modified_base (23)..(23): bicyclic nucleic acid (BNA)
  source: /note="3' tri-ethylene glycol (TEG)"
caacaucaaggaagauggcauut

SEQ ID NO: 16963 - DNA, 22 bp, Artificial Sequence
  source: /note="Description of Artificial Sequence: Synthetic oligonucleotide"
  source: /note="Description of Combined DNA/RNA Molecule: Synthetic oligonucleotide"
  source: /note="DNA/RNA"
  modified_base (1)..(1): 5-methyl bicyclic nucleic acid
  modified_base (4)..(4): 5-methyl modified nucleotide
  modified_base (7)..(7): 5-methyl modified nucleotide
  modified_base (19)..(19): 5-methyl modified nucleotide
  modified_base (22)..(22): bicyclic nucleic acid (BNA)
  source: /note="3' tri-ethylene glycol (TEG)"
caacaucaaggaagauggcaut

SEQ ID NO: 16964 - DNA, 21 bp, Artificial Sequence
  source: /note="Description of Artificial Sequence: Synthetic oligonucleotide"
  source: /note="Description of Combined DNA/RNA Molecule: Synthetic oligonucleotide"
  source: /note="DNA/RNA"
  modified_base (1)..(1): 5-methyl bicyclic nucleic acid
  modified_base (4)..(4): 5-methyl modified nucleotide
  modified_base (7)..(7): 5-methyl modified nucleotide
  modified_base (19)..(19): 5-methyl modified nucleotide
  modified_base (21)..(21): bicyclic nucleic acid (BNA)
  source: /note="3' tri-ethylene glycol (TEG)"
caacaucaaggaagauggcat

SEQ ID NO: 16965 - RNA, 20 nt, Artificial Sequence
  source: /note="Description of Artificial Sequence: Synthetic oligonucleotide"
  source: /note="RNA"
  modified_base (1)..(1): 5-methyl bicyclic nucleic acid
  modified_base (4)..(4): 5-methyl modified nucleotide
  modified_base (7)..(7): 5-methyl modified nucleotide
  modified_base (19)..(19): 5-methyl modified nucleotide
  modified_base (20)..(20): bicyclic nucleic acid (BNA)
  source: /note="3' tri-ethylene glycol (TEG)"
caacaucaaggaagauggca

SEQ ID NO: 16966 - RNA, 19 nt, Artificial Sequence
  source: /note="Description of Artificial Sequence: Synthetic oligonucleotide"
  source: /note="RNA"
  modified_base (1)..(1): 5-methyl bicyclic nucleic acid
  modified_base (4)..(4): 5-methyl modified nucleotide
  modified_base (7)..(7): 5-methyl modified nucleotide
  modified_base (19)..(19): 5-methyl bicyclic nucleic acid
  source: /note="3' tri-ethylene glycol (TEG)"
caacaucaaggaagauggc

SEQ ID NO: 16967 - RNA, 18 nt, Artificial Sequence
  source: /note="Description of Artificial Sequence: Synthetic oligonucleotide"
  source: /note="RNA"
  modified_base (1)..(1): 5-methyl bicyclic nucleic acid
  modified_base (4)..(4): 5-methyl modified nucleotide
  modified_base (7)..(7): 5-methyl modified nucleotide
  modified_base (18)..(18): bicyclic nucleic acid (BNA)
  source: /note="3' tri-ethylene glycol (TEG)"
caacaucaaggaagaugg

SEQ ID NO: 16968 - RNA, 17 nt, Artificial Sequence
  source: /note="Description of Artificial Sequence: Synthetic oligonucleotide"
  source: /note="RNA"
  modified_base (1)..(1): 5-methyl bicyclic nucleic acid
  modified_base (4)..(4): 5-methyl modified nucleotide
  modified_base (7)..(7): 5-methyl modified nucleotide
  modified_base (17)..(17): bicyclic nucleic acid (BNA)
  source: /note="3' tri-ethylene glycol (TEG)"
caacaucaaggaagaug

SEQ ID NO: 16969 - DNA, 16 bp, Artificial Sequence
  source: /note="Description of Artificial Sequence: Synthetic oligonucleotide"
  source: /note="Description of Combined DNA/RNA Molecule: Synthetic oligonucleotide"
  source: /note="DNA/RNA"
  modified_base (1)..(1): 5-methyl bicyclic nucleic acid
  modified_base (4)..(4): 5-methyl modified nucleotide
  modified_base (7)..(7): 5-methyl modified nucleotide
  modified_base (16)..(16): bicyclic nucleic acid (BNA)
  source: /note="3' tri-ethylene glycol (TEG)"
caacaucaaggaagat

SEQ ID NO: 16970 - RNA, 15 nt, Artificial Sequence
  source: /note="Description of Artificial Sequence: Synthetic oligonucleotide"
  source: /note="RNA"
  modified_base (1)..(1): 5-methyl bicyclic nucleic acid
  modified_base (4)..(4): 5-methyl modified nucleotide
  modified_base (7)..(7): 5-methyl modified nucleotide
  modified_base (15)..(15): bicyclic nucleic acid (BNA)
  source: /note="3' tri-ethylene glycol (TEG)"
caacaucaaggaaga

SEQ ID NO: 16971 - RNA, 14 nt, Artificial Sequence
  source: /note="Description of Artificial Sequence: Synthetic oligonucleotide"
  source: /note="RNA"
  modified_base (1)..(1): 5-methyl bicyclic nucleic acid
  modified_base (4)..(4): 5-methyl modified nucleotide
  modified_base (7)..(7): 5-methyl modified nucleotide
  modified_base (14)..(14): bicyclic nucleic acid (BNA)
  source: /note="3' tri-ethylene glycol (TEG)"
caacaucaaggaag

SEQ ID NO: 16972 - RNA, 26 nt, Artificial Sequence
  source: /note="Description of Artificial Sequence: Synthetic oligonucleotide"
  source: /note="RNA"
  modified_base (1)..(1): bicyclic nucleic acid (BNA)
  modified_base (3)..(3): 5-methyl modified nucleotide
  modified_base (6)..(6): 5-methyl modified nucleotide
  modified_base (18)..(18): 5-methyl modified nucleotide
  modified_base (23)..(23): 5-methyl modified nucleotide
  modified_base (26)..(26): bicyclic nucleic acid (BNA)
  source: /note="3' tri-ethylene glycol (TEG)"
aacaucaaggaagauggcauuucuag

SEQ ID NO: 16973 - RNA, 25 nt, Artificial Sequence
  source: /note="Description of Artificial Sequence: Synthetic oligonucleotide"
  source: /note="RNA"
  modified_base (1)..(1): bicyclic nucleic acid (BNA)
  modified_base (3)..(3): 5-methyl modified nucleotide
  modified_base (6)..(6): 5-methyl modified nucleotide
  modified_base (18)..(18): 5-methyl modified nucleotide
  modified_base (23)..(23): 5-methyl modified nucleotide
  modified_base (25)..(25): bicyclic nucleic acid (BNA)
  source: /note="3' tri-ethylene glycol (TEG)"
aacaucaaggaagauggcauuucua

SEQ ID NO: 16974 - DNA, 24 bp, Artificial Sequence
  source: /note="Description of Artificial Sequence: Synthetic oligonucleotide"
  source: /note="Description of Combined DNA/RNA Molecule: Synthetic oligonucleotide"
  source: /note="DNA/RNA"
  modified_base (1)..(1): bicyclic nucleic acid (BNA)
  modified_base (3)..(3): 5-methyl modified nucleotide
  modified_base (6)..(6): 5-methyl modified nucleotide
  modified_base (18)..(18): 5-methyl modified nucleotide
  modified_base (23)..(23): 5-methyl modified nucleotide
  modified_base (24)..(24): bicyclic nucleic acid (BNA)
  source: /note="3' tri-ethylene glycol (TEG)"
aacaucaaggaagauggcauuuct

SEQ ID NO: 16975 - RNA, 23 nt, Artificial Sequence
  source: /note="Description of Artificial Sequence: Synthetic oligonucleotide"
  source: /note="RNA"
  modified_base (1)..(1): bicyclic nucleic acid (BNA)
  modified_base (3)..(3): 5-methyl modified nucleotide
  modified_base (6)..(6): 5-methyl modified nucleotide
  modified_base (18)..(18): 5-methyl modified nucleotide
  modified_base (23)..(23): 5-methyl bicyclic nucleic acid
  source: /note="3' tri-ethylene glycol (TEG)"
aacaucaaggaagauggcauuuc

SEQ ID NO: 16976 - DNA, 22 bp, Artificial Sequence
  source: /note="Description of Artificial Sequence: Synthetic oligonucleotide"
  source: /note="Description of Combined DNA/RNA Molecule: Synthetic oligonucleotide"
  source: /note="DNA/RNA"
  modified_base (1)..(1): bicyclic nucleic acid (BNA)
  modified_base (3)..(3): 5-methyl modified nucleotide
  modified_base (6)..(6): 5-methyl modified nucleotide
  modified_base (18)..(18): 5-methyl modified nucleotide
  modified_base (22)..(22): bicyclic nucleic acid (BNA)
  source: /note="3' tri-ethylene glycol (TEG)"
aacaucaaggaagauggcauut

SEQ ID NO: 16977 - DNA, 21 bp, Artificial Sequence
  source: /note="Description of Artificial Sequence: Synthetic oligonucleotide"
  source: /note="Description of Combined DNA/RNA Molecule: Synthetic oligonucleotide"
  source: /note="DNA/RNA"
  modified_base (1)..(1): bicyclic nucleic acid (BNA)
  modified_base (3)..(3): 5-methyl modified nucleotide
  modified_base (6)..(6): 5-methyl modified nucleotide
  modified_base (18)..(18): 5-methyl modified nucleotide
  modified_base (21)..(21): bicyclic nucleic acid (BNA)
  source: /note="3' tri-ethylene glycol (TEG)"
aacaucaaggaagauggcaut

SEQ ID NO: 16978 - DNA, 20 bp, Artificial Sequence
  source: /note="Description of Artificial Sequence: Synthetic oligonucleotide"
  source: /note="Description of Combined DNA/RNA Molecule: Synthetic oligonucleotide"
  source: /note="DNA/RNA"
  modified_base (1)..(1): bicyclic nucleic acid (BNA)
  modified_base (3)..(3): 5-methyl modified nucleotide
  modified_base (6)..(6): 5-methyl modified nucleotide
  modified_base (18)..(18): 5-methyl modified nucleotide
  modified_base (20)..(20): bicyclic nucleic acid (BNA)
  source: /note="3' tri-ethylene glycol (TEG)"
aacaucaaggaagauggcat

SEQ ID NO: 16979 - RNA, 19 nt, Artificial Sequence
  source: /note="Description of Artificial Sequence: Synthetic oligonucleotide"
  source: /note="RNA"
  modified_base (1)..(1): bicyclic nucleic acid (BNA)
  modified_base (3)..(3): 5-methyl modified nucleotide
  modified_base (6)..(6): 5-methyl modified nucleotide
  modified_base (18)..(18): 5-methyl modified nucleotide
  modified_base (19)..(19): bicyclic nucleic acid (BNA)
  source: /note="3' tri-ethylene glycol (TEG)"
aacaucaaggaagauggca

SEQ ID NO: 16980 - RNA, 18 nt, Artificial Sequence
  source: /note="Description of Artificial Sequence: Synthetic oligonucleotide"
  source: /note="RNA"
  modified_base (1)..(1): bicyclic nucleic acid (BNA)
  modified_base (3)..(3): 5-methyl modified nucleotide
  modified_base (6)..(6): 5-methyl modified nucleotide
  modified_base (18)..(18): 5-methyl bicyclic nucleic acid
  source: /note="3' tri-ethylene glycol (TEG)"
aacaucaaggaagauggc

SEQ ID NO: 16981 - RNA, 17 nt, Artificial Sequence
  source: /note="Description of Artificial Sequence: Synthetic oligonucleotide"
  source: /note="RNA"
  modified_base (1)..(1): bicyclic nucleic acid (BNA)
  modified_base (3)..(3): 5-methyl modified nucleotide
  modified_base (6)..(6): 5-methyl modified nucleotide
  modified_base (17)..(17): bicyclic nucleic acid (BNA)
  source: /note="3' tri-ethylene glycol (TEG)"
aacaucaaggaagaugg

SEQ ID NO: 16982 - RNA, 16 nt, Artificial Sequence
  source: /note="Description of Artificial Sequence: Synthetic oligonucleotide"
  source: /note="RNA"
  modified_base (1)..(1): bicyclic nucleic acid (BNA)
  modified_base (3)..(3): 5-methyl modified nucleotide
  modified_base (6)..(6): 5-methyl modified nucleotide
  modified_base (16)..(16): bicyclic nucleic acid (BNA)
  source: /note="3' tri-ethylene glycol (TEG)"
aacaucaaggaagaug

SEQ ID NO: 16983 - DNA, 15 bp, Artificial Sequence
  source: /note="Description of Artificial Sequence: Synthetic oligonucleotide"
  source: /note="Description of Combined DNA/RNA Molecule: Synthetic oligonucleotide"
  source: /note="DNA/RNA"
  modified_base (1)..(1): bicyclic nucleic acid (BNA)
  modified_base (3)..(3): 5-methyl modified nucleotide
  modified_base (6)..(6): 5-methyl modified nucleotide
  modified_base (15)..(15): bicyclic nucleic acid (BNA)
  source: /note="3' tri-ethylene glycol (TEG)"
aacaucaaggaagat

SEQ ID NO: 16984 - RNA, 14 nt, Artificial Sequence
  source: /note="Description of Artificial Sequence: Synthetic oligonucleotide"
  source: /note="RNA"
  modified_base (1)..(1): bicyclic nucleic acid (BNA)
  modified_base (3)..(3): 5-methyl modified nucleotide
  modified_base (6)..(6): 5-methyl modified nucleotide
  modified_base (14)..(14): bicyclic nucleic acid (BNA)
  source: /note="3' tri-ethylene glycol (TEG)"
aacaucaaggaaga

SEQ ID NO: 16985 - RNA, 13 nt, Artificial Sequence
  source: /note="Description of Artificial Sequence: Synthetic oligonucleotide"
  source: /note="RNA"
  modified_base (1)..(1): bicyclic nucleic acid (BNA)
  modified_base (3)..(3): 5-methyl modified nucleotide
  modified_base (6)..(6): 5-methyl modified nucleotide
  modified_base (13)..(13): bicyclic nucleic acid (BNA)
  source: /note="3' tri-ethylene glycol (TEG)"
aacaucaaggaag

SEQ ID NO: 16986 - RNA, 25 nt, Artificial Sequence
  source: /note="Description of Artificial Sequence: Synthetic oligonucleotide"
  source: /note="RNA"
  modified_base (1)..(1): bicyclic nucleic acid (BNA)
  modified_base (2)..(2): 5-methyl modified nucleotide
  modified_base (5)..(5): 5-methyl modified nucleotide
  modified_base (17)..(17): 5-methyl modified nucleotide
  modified_base (22)..(22): 5-methyl modified nucleotide
  modified_base (25)..(25): bicyclic nucleic acid (BNA)
  source: /note="3' tri-ethylene glycol (TEG)"
acaucaaggaagauggcauuucuag

SEQ ID NO: 16987 - RNA, 24 nt, Artificial Sequence
  source: /note="Description of Artificial Sequence: Synthetic oligonucleotide"
  source: /note="RNA"
  modified_base (1)..(1): bicyclic nucleic acid (BNA)
  modified_base (2)..(2): 5-methyl modified nucleotide
  modified_base (5)..(5): 5-methyl modified nucleotide
  modified_base (17)..(17): 5-methyl modified nucleotide
  modified_base (22)..(22): 5-methyl modified nucleotide
  modified_base (24)..(24): bicyclic nucleic acid (BNA)
  source: /note="3' tri-ethylene glycol (TEG)"
acaucaaggaagauggcauuucua

SEQ ID NO: 16988 - DNA, 23 bp, Artificial Sequence
  source: /note="Description of Artificial Sequence: Synthetic oligonucleotide"
  source: /note="Description of Combined DNA/RNA Molecule: Synthetic oligonucleotide"
  source: /note="DNA/RNA"
  modified_base (1)..(1): bicyclic nucleic acid (BNA)
  modified_base (2)..(2): 5-methyl modified nucleotide
  modified_base (5)..(5): 5-methyl modified nucleotide
  modified_base (17)..(17): 5-methyl modified nucleotide
  modified_base (22)..(22): 5-methyl modified nucleotide
  modified_base (23)..(23): bicyclic nucleic acid (BNA)
  source: /note="3' tri-ethylene glycol (TEG)"
acaucaaggaagauggcauuuct

SEQ ID NO: 16989 - RNA, 22 nt, Artificial Sequence
  source: /note="Description of Artificial Sequence: Synthetic oligonucleotide"
  source: /note="RNA"
  modified_base (1)..(1): bicyclic nucleic acid (BNA)
  modified_base (2)..(2): 5-methyl modified nucleotide
  modified_base (5)..(5): 5-methyl modified nucleotide
  modified_base (17)..(17): 5-methyl modified nucleotide
  modified_base (22)..(22): 5-methyl bicyclic nucleic acid
  source: /note="3' tri-ethylene glycol (TEG)"
acaucaaggaagauggcauuuc

SEQ ID NO: 16990 - DNA, 21 bp, Artificial Sequence
  source: /note="Description of Artificial Sequence: Synthetic oligonucleotide"
  source: /note="Description of Combined DNA/RNA Molecule: Synthetic oligonucleotide"
  source: /note="DNA/RNA"
  modified_base (1)..(1): bicyclic nucleic acid (BNA)
  modified_base (2)..(2): 5-methyl modified nucleotide
  modified_base (5)..(5): 5-methyl modified nucleotide
  modified_base (17)..(17): 5-methyl modified nucleotide
  modified_base (21)..(21): bicyclic nucleic acid (BNA)
  source: /note="3' tri-ethylene glycol (TEG)"
acaucaaggaagauggcauut

SEQ ID NO: 16991 - DNA, 20 bp, Artificial Sequence
  source: /note="Description of Artificial Sequence: Synthetic oligonucleotide"
  source: /note="Description of Combined DNA/RNA Molecule: Synthetic oligonucleotide"
  source: /note="DNA/RNA"
  modified_base (1)..(1): bicyclic nucleic acid (BNA)
  modified_base (2)..(2): 5-methyl modified nucleotide
  modified_base (5)..(5): 5-methyl modified nucleotide
  modified_base (17)..(17): 5-methyl modified nucleotide
  modified_base (20)..(20): bicyclic nucleic acid (BNA)
  source: /note="3' tri-ethylene glycol (TEG)"
acaucaaggaagauggcaut

SEQ ID NO: 16992 - DNA, 19 bp, Artificial Sequence
  source: /note="Description of Artificial Sequence: Synthetic oligonucleotide"
  source: /note="Description of Combined DNA/RNA Molecule: Synthetic oligonucleotide"
  source: /note="DNA/RNA"
  modified_base (1)..(1): bicyclic nucleic acid (BNA)
  modified_base (2)..(2): 5-methyl modified nucleotide
  modified_base (5)..(5): 5-methyl modified nucleotide
  modified_base (17)..(17): 5-methyl modified nucleotide
  modified_base (19)..(19): bicyclic nucleic acid (BNA)
  source: /note="3' tri-ethylene glycol (TEG)"
acaucaaggaagauggcat

SEQ ID NO: 16993 - RNA, 18 nt, Artificial Sequence
  source: /note="Description of Artificial Sequence: Synthetic oligonucleotide"
  source: /note="RNA"
  modified_base (1)..(1): bicyclic nucleic acid (BNA)
  modified_base (2)..(2): 5-methyl modified nucleotide
  modified_base (5)..(5): 5-methyl modified nucleotide
  modified_base (17)..(17): 5-methyl modified nucleotide
  modified_base (18)..(18): bicyclic nucleic acid (BNA)
  source: /note="3' tri-ethylene glycol (TEG)"
acaucaaggaagauggca

SEQ ID NO: 16994 - RNA, 17 nt, Artificial Sequence
  source: /note="Description of Artificial Sequence: Synthetic oligonucleotide"
  source: /note="RNA"
  modified_base (1)..(1): bicyclic nucleic acid (BNA)
  modified_base (2)..(2): 5-methyl modified nucleotide
  modified_base (5)..(5): 5-methyl modified nucleotide
  modified_base (17)..(17): 5-methyl bicyclic nucleic acid
  source: /note="3' tri-ethylene glycol (TEG)"
acaucaaggaagauggc

SEQ ID NO: 16995 - RNA, 16 nt, Artificial Sequence
  source: /note="Description of Artificial Sequence: Synthetic oligonucleotide"
  source: /note="RNA"
  modified_base (1)..(1): bicyclic nucleic acid (BNA)
  modified_base (2)..(2): 5-methyl modified nucleotide
  modified_base (5)..(5): 5-methyl modified nucleotide
  modified_base (16)..(16): bicyclic nucleic acid (BNA)
  source: /note="3' tri-ethylene glycol (TEG)"
acaucaaggaagaugg

SEQ ID NO: 16996 - RNA, 15 nt, Artificial Sequence
  source: /note="Description of Artificial Sequence: Synthetic oligonucleotide"
  source: /note="RNA"
  modified_base (1)..(1): bicyclic nucleic acid (BNA)
  modified_base (2)..(2): 5-methyl modified nucleotide
  modified_base (5)..(5): 5-methyl modified nucleotide
  modified_base (15)..(15): bicyclic nucleic acid (BNA)
  source: /note="3' tri-ethylene glycol (TEG)"
acaucaaggaagaug

SEQ ID NO: 16997 - DNA, 14 bp, Artificial Sequence
  source: /note="Description of Artificial Sequence: Synthetic oligonucleotide"
  source: /note="Description of Combined DNA/RNA Molecule: Synthetic oligonucleotide"
  source: /note="DNA/RNA"
  modified_base (1)..(1): bicyclic nucleic acid (BNA)
  modified_base (2)..(2): 5-methyl modified nucleotide
  modified_base (5)..(5): 5-methyl modified nucleotide
  modified_base (14)..(14): bicyclic nucleic acid (BNA)
  source: /note="3' tri-ethylene glycol (TEG)"
acaucaaggaagat

SEQ ID NO: 16998 - RNA, 13 nt, Artificial Sequence
  source: /note="Description of Artificial Sequence: Synthetic oligonucleotide"
  source: /note="RNA"
  modified_base (1)..(1): bicyclic nucleic acid (BNA)
  modified_base (2)..(2): 5-methyl modified nucleotide
  modified_base (5)..(5): 5-methyl modified nucleotide
  modified_base (13)..(13): bicyclic nucleic acid (BNA)
  source: /note="3' tri-ethylene glycol (TEG)"
acaucaaggaaga

SEQ ID NO: 16999 - RNA, 12 nt, Artificial Sequence
  source: /note="Description of Artificial Sequence: Synthetic oligonucleotide"
  source: /note="RNA"
  modified_base (1)..(1): bicyclic nucleic acid (BNA)
  modified_base (2)..(2): 5-methyl modified nucleotide
  modified_base (5)..(5): 5-methyl modified nucleotide
  modified_base (12)..(12): bicyclic nucleic acid (BNA)
  source: /note="3' tri-ethylene glycol (TEG)"
acaucaaggaag

SEQ ID NO: 17000 - RNA, 24 nt, Artificial Sequence
  source: /note="Description of Artificial Sequence: Synthetic oligonucleotide"
  source: /note="RNA"
  modified_base (1)..(1): 5-methyl bicyclic nucleic acid
  modified_base (4)..(4): 5-methyl modified nucleotide
  modified_base (16)..(16): 5-methyl modified nucleotide
  modified_base (21)..(21): 5-methyl modified nucleotide
  modified_base (24)..(24): bicyclic nucleic acid (BNA)
  source: /note="3' tri-ethylene glycol (TEG)"
caucaaggaagauggcauuucuag

SEQ ID NO: 17001 - RNA, 23 nt, Artificial Sequence
  source: /note="Description of Artificial Sequence: Synthetic oligonucleotide"
  source: /note="RNA"
  modified_base (1)..(1): 5-methyl bicyclic nucleic acid
  modified_base (4)..(4): 5-methyl modified nucleotide
  modified_base (16)..(16): 5-methyl modified nucleotide
  modified_base (21)..(21): 5-methyl modified nucleotide
  modified_base (23)..(23): bicyclic nucleic acid (BNA)
  source: /note="3' tri-ethylene glycol (TEG)"
caucaaggaagauggcauuucua

SEQ ID NO: 17002 - DNA, 22 bp, Artificial Sequence
  source: /note="Description of Artificial Sequence: Synthetic oligonucleotide"
  source: /note="Description of Combined DNA/RNA Molecule: Synthetic oligonucleotide"
  source: /note="DNA/RNA"
  modified_base (1)..(1): 5-methyl bicyclic nucleic acid
  modified_base (4)..(4): 5-methyl modified nucleotide
  modified_base (16)..(16): 5-methyl modified nucleotide
  modified_base (21)..(21): 5-methyl modified nucleotide
  modified_base (22)..(22): bicyclic nucleic acid (BNA)
  source: /note="3' tri-ethylene glycol (TEG)"
caucaaggaagauggcauuuct

SEQ ID NO: 17003 - RNA, 21 nt, Artificial Sequence
  source: /note="Description of Artificial Sequence: Synthetic oligonucleotide"
  source: /note="RNA"
  modified_base (1)..(1): 5-methyl bicyclic nucleic acid
  modified_base (4)..(4): 5-methyl modified nucleotide
  modified_base (16)..(16): 5-methyl modified nucleotide
  modified_base (21)..(21): 5-methyl bicyclic nucleic acid
  source: /note="3' tri-ethylene glycol (TEG)"
caucaaggaagauggcauuuc

SEQ ID NO: 17004 - DNA, 20 bp, Artificial Sequence
  source: /note="Description of Artificial Sequence: Synthetic oligonucleotide"
  source: /note="Description of Combined DNA/RNA Molecule: Synthetic oligonucleotide"
  source: /note="DNA/RNA"
  modified_base (1)..(1): 5-methyl bicyclic nucleic acid
  modified_base (4)..(4): 5-methyl modified nucleotide
  modified_base (16)..(16): 5-methyl modified nucleotide
  modified_base (20)..(20): bicyclic nucleic acid (BNA)
  source: /note="3' tri-ethylene glycol (TEG)"
caucaaggaagauggcauut

SEQ ID NO: 17005 - DNA, 19 bp, Artificial Sequence
  source: /note="Description of Artificial Sequence: Synthetic oligonucleotide"
  source: /note="Description of Combined DNA/RNA Molecule: Synthetic oligonucleotide"
  source: /note="DNA/RNA"
  modified_base (1)..(1): 5-methyl bicyclic nucleic acid
  modified_base (4)..(4): 5-methyl modified nucleotide
  modified_base (16)..(16): 5-methyl modified nucleotide
  modified_base (19)..(19): bicyclic nucleic acid (BNA)
  source: /note="3' tri-ethylene glycol (TEG)"
caucaaggaagauggcaut

SEQ ID NO: 17006 - DNA, 18 bp, Artificial Sequence
  source: /note="Description of Artificial Sequence: Synthetic oligonucleotide"
  source: /note="Description of Combined DNA/RNA Molecule: Synthetic oligonucleotide"
  source: /note="DNA/RNA"
  modified_base (1)..(1): 5-methyl bicyclic nucleic acid
  modified_base (4)..(4): 5-methyl modified nucleotide
  modified_base (16)..(16): 5-methyl modified nucleotide
  modified_base (18)..(18): bicyclic nucleic acid (BNA)
  source: /note="3' tri-ethylene glycol (TEG)"
caucaaggaagauggcat

SEQ ID NO: 17007 - RNA, 17 nt, Artificial Sequence
  source: /note="Description of Artificial Sequence: Synthetic oligonucleotide"
  source: /note="RNA"
  modified_base (1)..(1): 5-methyl bicyclic nucleic acid
  modified_base (4)..(4): 5-methyl modified nucleotide
  modified_base (16)..(16): 5-methyl modified nucleotide
  modified_base (17)..(17): bicyclic nucleic acid (BNA)
  source: /note="3' tri-ethylene glycol (TEG)"
caucaaggaagauggca

SEQ ID NO: 17008 - RNA, 16 nt, Artificial Sequence
  source: /note="Description of Artificial Sequence: Synthetic oligonucleotide"
  source: /note="RNA"
  modified_base (1)..(1): 5-methyl bicyclic nucleic acid
  modified_base (4)..(4): 5-methyl modified nucleotide
  modified_base (16)..(16): 5-methyl bicyclic nucleic acid
  source: /note="3' tri-ethylene glycol (TEG)"
caucaaggaagauggc

SEQ ID NO: 17009 - RNA, 15 nt, Artificial Sequence
  source: /note="Description of Artificial Sequence: Synthetic oligonucleotide"
  source: /note="RNA"
  modified_base (1)..(1): 5-methyl bicyclic nucleic acid
  modified_base (4)..(4): 5-methyl modified nucleotide
  modified_base (15)..(15): bicyclic nucleic acid (BNA)
  source: /note="3' tri-ethylene glycol (TEG)"
caucaaggaagaugg

SEQ ID NO: 17010 - RNA, 14 nt, Artificial Sequence
  source: /note="Description of Artificial Sequence: Synthetic oligonucleotide"
  source: /note="RNA"
  modified_base (1)..(1): 5-methyl bicyclic nucleic acid
  modified_base (4)..(4): 5-methyl modified nucleotide
  modified_base (14)..(14): bicyclic nucleic acid (BNA)
  source: /note="3' tri-ethylene glycol (TEG)"
caucaaggaagaug

SEQ ID NO: 17011 - DNA, 13 bp, Artificial Sequence
  source: /note="Description of Artificial Sequence: Synthetic oligonucleotide"
  source: /note="Description of Combined DNA/RNA Molecule: Synthetic oligonucleotide"
  source: /note="DNA/RNA"
  modified_base (1)..(1): 5-methyl bicyclic nucleic acid
  modified_base (4)..(4): 5-methyl modified nucleotide
  modified_base (13)..(13): bicyclic nucleic acid (BNA)
  source: /note="3' tri-ethylene glycol (TEG)"
caucaaggaagat

SEQ ID NO: 17012 - RNA, 12 nt, Artificial Sequence
  source: /note="Description of Artificial Sequence: Synthetic oligonucleotide"
  source: /note="RNA"
  modified_base (1)..(1): 5-methyl bicyclic nucleic acid
  modified_base (4)..(4): 5-methyl modified nucleotide
  modified_base (12)..(12): bicyclic nucleic acid (BNA)
  source: /note="3' tri-ethylene glycol (TEG)"
caucaaggaaga

SEQ ID NO: 17013 - RNA, 11 nt, Artificial Sequence
  source: /note="Description of Artificial Sequence: Synthetic oligonucleotide"
  source: /note="RNA"
  modified_base (1)..(1): 5-methyl bicyclic nucleic acid
  modified_base (4)..(4): 5-methyl modified nucleotide
  modified_base (11)..(11): bicyclic nucleic acid (BNA)
  source: /note="3' tri-ethylene glycol (TEG)"
caucaaggaag

SEQ ID NO: 17014 - RNA, 23 nt, Artificial Sequence
  source: /note="Description of Artificial Sequence: Synthetic oligonucleotide"
  source: /note="RNA"
  modified_base (1)..(1): bicyclic nucleic acid (BNA)
  modified_base (3)..(3): 5-methyl modified nucleotide
  modified_base (15)..(15): 5-methyl modified nucleotide
  modified_base (20)..(20): 5-methyl modified nucleotide
  modified_base (23)..(23): bicyclic nucleic acid (BNA)
  source: /note="3' tri-ethylene glycol (TEG)"
aucaaggaagauggcauuucuag

SEQ ID NO: 17015 - RNA, 22 nt, Artificial Sequence
  source: /note="Description of Artificial Sequence: Synthetic oligonucleotide"
  source: /note="RNA"
  modified_base (1)..(1): bicyclic nucleic acid (BNA)
  modified_base (3)..(3): 5-methyl modified nucleotide
  modified_base (15)..(15): 5-methyl modified nucleotide
  modified_base (20)..(20): 5-methyl modified nucleotide
  modified_base (22)..(22): bicyclic nucleic acid (BNA)
  source: /note="3' tri-ethylene glycol (TEG)"
aucaaggaagauggcauuucua

SEQ ID NO: 17016 - DNA, 21 bp, Artificial Sequence
  source: /note="Description of Artificial Sequence: Synthetic oligonucleotide"
  source: /note="Description of Combined DNA/RNA Molecule: Synthetic oligonucleotide"
  source: /note="DNA/RNA"
  modified_base (1)..(1): bicyclic nucleic acid (BNA)
  modified_base (3)..(3): 5-methyl modified nucleotide
  modified_base (15)..(15): 5-methyl modified nucleotide
  modified_base (20)..(20): 5-methyl modified nucleotide
  modified_base (21)..(21): bicyclic nucleic acid (BNA)
  source: /note="3' tri-ethylene glycol (TEG)"
aucaaggaagauggcauuuct

SEQ ID NO: 17017 - RNA, 20 nt, Artificial Sequence
  source: /note="Description of Artificial Sequence: Synthetic oligonucleotide"
  source: /note="RNA"
  modified_base (1)..(1): bicyclic nucleic acid (BNA)
  modified_base (3)..(3): 5-methyl modified nucleotide
  modified_base (15)..(15): 5-methyl modified nucleotide
  modified_base (20)..(20): 5-methyl bicyclic nucleic acid
  source: /note="3' tri-ethylene glycol (TEG)"
aucaaggaagauggcauuuc

SEQ ID NO: 17018 - DNA, 19 bp, Artificial Sequence
  source: /note="Description of Artificial Sequence: Synthetic oligonucleotide"
  source: /note="Description of Combined DNA/RNA Molecule: Synthetic oligonucleotide"
  source: /note="DNA/RNA"
  modified_base (1)..(1): bicyclic nucleic acid (BNA)
  modified_base (3)..(3): 5-methyl modified nucleotide
  modified_base (15)..(15): 5-methyl modified nucleotide
  modified_base (19)..(19): bicyclic nucleic acid (BNA)
  source: /note="3' tri-ethylene glycol (TEG)"
aucaaggaagauggcauut

SEQ ID NO: 17019 - DNA, 18 bp, Artificial Sequence
  source: /note="Description of Artificial Sequence: Synthetic oligonucleotide"
  source: /note="Description of Combined DNA/RNA Molecule: Synthetic oligonucleotide"
  source: /note="DNA/RNA"
  modified_base (1)..(1): bicyclic nucleic acid (BNA)
  modified_base (3)..(3): 5-methyl modified nucleotide
  modified_base (15)..(15): 5-methyl modified nucleotide
  modified_base (18)..(18): bicyclic nucleic acid (BNA)
  source: /note="3' tri-ethylene glycol (TEG)"
aucaaggaagauggcaut

SEQ ID NO: 17020 - DNA, 17 bp, Artificial Sequence
  source: /note="Description of Artificial Sequence: Synthetic oligonucleotide"
  source: /note="Description of Combined DNA/RNA Molecule: Synthetic oligonucleotide"
  source: /note="DNA/RNA"
  modified_base (1)..(1): bicyclic nucleic acid (BNA)
  modified_base (3)..(3): 5-methyl modified nucleotide
  modified_base (15)..(15): 5-methyl modified nucleotide
  modified_base (17)..(17): bicyclic nucleic acid (BNA)
  source: /note="3' tri-ethylene glycol (TEG)"
aucaaggaagauggcat

SEQ ID NO: 17021 - RNA, 16 nt, Artificial Sequence
  source: /note="Description of Artificial Sequence: Synthetic oligonucleotide"
  source: /note="RNA"
  modified_base (1)..(1): bicyclic nucleic acid (BNA)
  modified_base (3)..(3): 5-methyl modified nucleotide
  modified_base (15)..(15): 5-methyl modified nucleotide
  modified_base (16)..(16): bicyclic nucleic acid (BNA)
  source: /note="3' tri-ethylene glycol (TEG)"
aucaaggaagauggca

SEQ ID NO: 17022 - RNA, 15 nt, Artificial Sequence
  source: /note="Description of Artificial Sequence: Synthetic oligonucleotide"
  source: /note="RNA"
  modified_base (1)..(1): bicyclic nucleic acid (BNA)
  modified_base (3)..(3): 5-methyl modified nucleotide
  modified_base (15)..(15): 5-methyl bicyclic nucleic acid
  source: /note="3' tri-ethylene glycol (TEG)"
aucaaggaagauggc

SEQ ID NO: 17023 - RNA, 14 nt, Artificial Sequence
  source: /note="Description of Artificial Sequence: Synthetic oligonucleotide"
  source: /note="RNA"
  modified_base (1)..(1): bicyclic nucleic acid (BNA)
  modified_base (3)..(3): 5-methyl modified nucleotide
  modified_base (14)..(14): bicyclic nucleic acid (BNA)
  source: /note="3' tri-ethylene glycol (TEG)"
aucaaggaagaugg

SEQ ID NO: 17024 - RNA, 13 nt, Artificial Sequence
  source: /note="Description of Artificial Sequence: Synthetic oligonucleotide"
  source: /note="RNA"
  modified_base (1)..(1): bicyclic nucleic acid (BNA)
  modified_base (3)..(3): 5-methyl modified nucleotide
  modified_base (13)..(13): bicyclic nucleic acid (BNA)
  source: /note="3' tri-ethylene glycol (TEG)"
aucaaggaagaug

SEQ ID NO: 17025 - DNA, 12 bp, Artificial Sequence
  source: /note="Description of Artificial Sequence: Synthetic oligonucleotide"
  source: /note="Description of Combined DNA/RNA Molecule: Synthetic oligonucleotide"
  source: /note="DNA/RNA"
  modified_base (1)..(1): bicyclic nucleic acid (BNA)
  modified_base (3)..(3): 5-methyl modified nucleotide
  modified_base (12)..(12): bicyclic nucleic acid (BNA)
  source: /note="3' tri-ethylene glycol (TEG)"
aucaaggaagat

SEQ ID NO: 17026 - RNA, 11 nt, Artificial Sequence
  source: /note="Description of Artificial Sequence: Synthetic oligonucleotide"
  source: /note="RNA"
  modified_base (1)..(1): bicyclic nucleic acid (BNA)
  modified_base (3)..(3): 5-methyl modified nucleotide
  modified_base (11)..(11): bicyclic nucleic acid (BNA)
  source: /note="3' tri-ethylene glycol (TEG)"
aucaaggaaga

SEQ ID NO: 17027 - RNA, 10 nt, Artificial Sequence
  source: /note="Description of Artificial Sequence: Synthetic oligonucleotide"
  source: /note="RNA"
  modified_base (1)..(1): bicyclic nucleic acid (BNA)
  modified_base (3)..(3): 5-methyl modified nucleotide
  modified_base (10)..(10): bicyclic nucleic acid (BNA)
  source: /note="3' tri-ethylene glycol (TEG)"
aucaaggaag

SEQ ID NO: 17028 - RNA, 23 nt, Artificial Sequence
  source: /note="Description of Artificial Sequence: Synthetic oligonucleotide"
  source: /note="RNA"
  modified_base (1)..(1): 5-methyl bicyclic nucleic acid
  modified_base (2)..(2): 5-methyl modified nucleotide
  modified_base (7)..(7): 5-methyl modified nucleotide
  modified_base (13)..(13): 5-methyl modified nucleotide
  modified_base (14)..(14): 5-methyl modified nucleotide
  modified_base (16)..(16): 5-methyl modified nucleotide
  modified_base (17)..(17): 5-methyl modified nucleotide
  modified_base (20)..(20): 5-methyl modified nucleotide
  modified_base (23)..(23): 5-methyl bicyclic nucleic acid
  source: /note="3' tri-ethylene glycol (TEG)"
ccagagcagguaccuccaacauc

SEQ ID NO: 17029 - RNA, 18 nt, Artificial Sequence
  source: /note="Description of Artificial Sequence: Synthetic oligonucleotide"
  source: /note="RNA"
  modified_base (1)..(1): 5-methyl bicyclic nucleic acid
  modified_base (2)..(2): 5-methyl modified nucleotide
  modified_base (7)..(7): 5-methyl modified nucleotide
  modified_base (13)..(13): 5-methyl modified nucleotide
  modified_base (14)..(14): 5-methyl modified nucleotide
  modified_base (16)..(16): 5-methyl modified nucleotide
  modified_base (17)..(17): 5-methyl modified nucleotide
  modified_base (18)..(18): bicyclic nucleic acid (BNA)
  source: /note="3' tri-ethylene glycol (TEG)"
ccagagcagguaccucca

SEQ ID NO: 17030 - DNA, 23 bp, Artificial Sequence
  source: /note="Description of Artificial Sequence: Synthetic oligonucleotide"
  source: /note="Description of Combined DNA/RNA Molecule: Synthetic oligonucleotide"
  source: /note="DNA/RNA"
  modified_base (1)..(1): 5-methyl bicyclic nucleic acid
  modified_base (2)..(2): 5-methyl modified nucleotide
  modified_base (4)..(4): 5-methyl modified nucleotide
  modified_base (18)..(18): 5-methyl modified nucleotide
  modified_base (23)..(23): bicyclic nucleic acid (BNA)
  source: /note="3' tri-ethylene glycol (TEG)"
ccucugugauuuuauaacuugat

SEQ ID NO: 17031 - DNA, 17 bp, Artificial Sequence
  source: /note="Description of Artificial Sequence: Synthetic oligonucleotide"
  source: /note="Description of Combined DNA/RNA Molecule: Synthetic oligonucleotide"
  source: /note="DNA/RNA"
  modified_base (1)..(1): bicyclic nucleic acid (BNA)
  modified_base (2)..(2): 5-methyl modified nucleotide
  modified_base (4)..(4): 5-methyl modified nucleotide
  modified_base (5)..(5): 5-methyl modified nucleotide
  modified_base (6)..(6): 5-methyl modified nucleotide
  modified_base (8)..(8): 5-methyl modified nucleotide
  modified_base (9)..(9): 5-methyl modified nucleotide
  modified_base (12)..(12): 5-methyl modified nucleotide
  modified_base (14)..(14): 5-methyl modified nucleotide
  modified_base (15)..(15): 5-methyl modified nucleotide
  modified_base (16)..(16): 5-methyl modified nucleotide
  modified_base (17)..(17): bicyclic nucleic acid (BNA)
  source: /note="3' tri-ethylene glycol (TEG)"
tcacccaccaucaccct

SEQ ID NO: 17032 - DNA, 20 bp, Artificial Sequence
  source: /note="Description of Artificial Sequence: Synthetic oligonucleotide"
  source: /note="Description of Combined DNA/RNA Molecule: Synthetic oligonucleotide"
  source: /note="DNA/RNA"
  modified_base (1)..(1): bicyclic nucleic acid (BNA)
  modified_base (7)..(7): 5-methyl modified nucleotide
  modified_base (8)..(8): 5-methyl modified nucleotide
  modified_base (10)..(10): 5-methyl modified nucleotide
  modified_base (16)..(16): 5-methyl modified nucleotide
  modified_base (18)..(18): 5-methyl modified nucleotide
  modified_base (19)..(19): 5-methyl modified nucleotide
  modified_base (20)..(20): 5-methyl bicyclic nucleic acid
  source: /note="3' tri-ethylene glycol (TEG)"
tgauauccucaaggucaccc

SEQ ID NO: 17033 - RNA, 22 nt, Artificial Sequence
  source: /note="Description of Artificial Sequence: Synthetic oligonucleotide"
  source: /note="RNA"
  modified_base (1)..(1): 5-methyl bicyclic nucleic acid
  modified_base (4)..(4): 5-methyl modified nucleotide
  modified_base (13)..(13): 5-methyl modified nucleotide
  modified_base (16)..(16): 5-methyl modified nucleotide
  modified_base (18)..(18): 5-methyl modified nucleotide
  modified_base (22)..(22): bicyclic nucleic acid (BNA)
  source: /note="3' tri-ethylene glycol (TEG)"
cugcuugaugaucaucucguug

SEQ ID NO: 17034 - RNA, 18 nt, Artificial Sequence
  source: /note="Description of Artificial Sequence: Synthetic oligonucleotide"
  source: /note="RNA"
  modified_base (1)..(1): 5-methyl bicyclic nucleic acid
  modified_base (4)..(4): 5-methyl modified nucleotide
  modified_base (13)..(13): 5-methyl modified nucleotide
  modified_base (16)..(16): 5-methyl modified nucleotide
  modified_base (18)..(18): 5-methyl bicyclic nucleic acid
  source: /note="3' tri-ethylene glycol (TEG)"
cugcuugaugaucaucuc

SEQ ID NO: 17035 - RNA, 19 nt, Artificial Sequence
  source: /note="Description of Artificial Sequence: Synthetic oligonucleotide"
  source: /note="RNA"
  modified_base (1)..(1): bicyclic nucleic acid (BNA)
  modified_base (5)..(5): 5-methyl modified nucleotide
  modified_base (6)..(6): 5-methyl modified nucleotide
  modified_base (14)..(14): 5-methyl modified nucleotide
  modified_base (15)..(15): 5-methyl modified nucleotide
  modified_base (17)..(17): 5-methyl modified nucleotide
  modified_base (19)..(19): bicyclic nucleic acid (BNA)
  source: /note="3' tri-ethylene glycol (TEG)"
guuuccuuaguaaccacag

SEQ ID NO: 17036 - RNA, 17 nt, Artificial Sequence
  source: /note="Description of Artificial Sequence: Synthetic oligonucleotide"
  source: /note="RNA"
  modified_base (1)..(1): bicyclic nucleic acid (BNA)
  modified_base (5)..(5): 5-methyl modified nucleotide
  modified_base (6)..(6): 5-methyl modified nucleotide
  modified_base (14)..(14): 5-methyl modified nucleotide
  modified_base (15)..(15): 5-methyl modified nucleotide
  modified_base (17)..(17): 5-methyl bicyclic nucleic acid
  source: /note="3' tri-ethylene glycol (TEG)"
guuuccuuaguaaccac

SEQ ID NO: 17037 - DNA, 20 bp, Artificial Sequence
  source: /note="Description of Artificial Sequence: Synthetic oligonucleotide"
  source: /note="Description of Combined DNA/RNA Molecule: Synthetic oligonucleotide"
  source: /note="DNA/RNA"
  source: /note="5' tri-ethylene glycol (TEG)"
  modified_base (1)..(1): bicyclic nucleic acid (BNA)
  modified_base (2)..(2): 5-methyl modified nucleotide
  modified_base (14)..(14): 5-methyl modified nucleotide
  modified_base (19)..(19): 5-methyl modified nucleotide
  modified_base (20)..(20): bicyclic nucleic acid (BNA)
  source: /note="3' tri-ethylene glycol (TEG)"
tcaaggaagauggcauuuct

SEQ ID NO: 17038 - DNA, 22 bp, Artificial Sequence
  source: /note="Description of Artificial Sequence: Synthetic oligonucleotide"
  source: /note="Description of Combined DNA/RNA Molecule: Synthetic oligonucleotide"
  source: /note="DNA/RNA"
  source: /note="5' tri-ethylene glycol (TEG)"
  modified_base (1)..(1): bicyclic nucleic acid (BNA)
  modified_base (2)..(2): 5-methyl modified nucleotide
  modified_base (14)..(14): 5-methyl modified nucleotide
  modified_base (19)..(19): 5-methyl modified nucleotide
  modified_base (22)..(22): bicyclic nucleic acid (BNA)
  source: /note="3' tri-ethylene glycol (TEG)"
tcaaggaagauggcauuucuag

SEQ ID NO: 17039 - RNA, 18 nt, Artificial Sequence
  source: /note="Description of Artificial Sequence: Synthetic oligonucleotide"
  source: /note="RNA"
  source: /note="5' tri-ethylene glycol (TEG)"
  modified_base (1)..(1): bicyclic nucleic acid (BNA)
  modified_base (9)..(9): 5-methyl modified nucleotide
  modified_base (13)..(13): 5-methyl modified nucleotide
  modified_base (14)..(14): 5-methyl modified nucleotide
  modified_base (18)..(18): 5-methyl bicyclic nucleic acid
  source: /note="3' tri-ethylene glycol (TEG)"
gguaaguucuguccaagc

SEQ ID NO: 17040 - RNA, 18 nt, Artificial Sequence
  source: /note="Description of Artificial Sequence: Synthetic oligonucleotide"
  source: /note="RNA"
  source: /note="5' tri-ethylene glycol (TEG)"
  modified_base (1)..(1): bicyclic nucleic acid (BNA)
  modified_base (8)..(8): 5-methyl modified nucleotide
  modified_base (12)..(12): 5-methyl modified nucleotide
  modified_base (13)..(13): 5-methyl modified nucleotide
  modified_base (17)..(17): 5-methyl modified nucleotide
  modified_base (18)..(18): 5-methyl bicyclic nucleic acid
  source: /note="3' tri-ethylene glycol (TEG)"
guaaguucuguccaagcc

SEQ ID NO: 17041 - RNA, 18 nt, Artificial Sequence
  source: /note="Description of Artificial Sequence: Synthetic oligonucleotide"
  source: /note="RNA"
  source: /note="5' tri-ethylene glycol (TEG)"
  modified_base (1)..(1): bicyclic nucleic acid (BNA)
  modified_base (4)..(4): 5-methyl modified nucleotide
  modified_base (13)..(13): 5-methyl modified nucleotide
  modified_base (17)..(17): 5-methyl modified nucleotide
  modified_base (18)..(18): 5-methyl bicyclic nucleic acid
  source: /note="3' tri-ethylene glycol (TEG)"
agucgguaaguucugucc

SEQ ID NO: 17042 - RNA, 18 nt, Artificial Sequence
  source: /note="Description of Artificial Sequence: Synthetic oligonucleotide"
  source: /note="RNA"
  source: /note="5' tri-ethylene glycol (TEG)"
  modified_base (1)..(1): 5-methyl bicyclic nucleic acid
  modified_base (5)..(5): 5-methyl modified nucleotide
  modified_base (6)..(6): 5-methyl modified nucleotide
  modified_base (10)..(10): 5-methyl modified nucleotide
  modified_base (11)..(11): 5-methyl modified nucleotide
  modified_base (12)..(12): 5-methyl modified nucleotide
  modified_base (18)..(18): bicyclic nucleic acid (BNA)
  source: /note="3' tri-ethylene glycol (TEG)"
cuguccaagcccgguuga

SEQ ID NO: 17043 - DNA, 15 bp, Artificial Sequence
  source: /note="Description of Artificial Sequence: Synthetic oligonucleotide"
  source: /note="Description of Combined DNA/RNA Molecule: Synthetic oligonucleotide"
  source: /note="DNA/RNA"
  source: /note="5' tri-ethylene glycol (TEG)"
  modified_base (1)..(1): bicyclic nucleic acid (BNA)
  modified_base (7)..(7): 5-methyl modified nucleotide
  modified_base (11)..(11): 5-methyl modified nucleotide
  modified_base (12)..(12): 5-methyl modified nucleotide
  modified_base (15)..(15): bicyclic nucleic acid (BNA)
  source: /note="3' tri-ethylene glycol (TEG)"
taaguucuguccaag

SEQ ID NO: 17044 - DNA, 20 bp, Artificial Sequence
  source: /note="Description of Artificial Sequence: Synthetic oligonucleotide"
  source: /note="Description of Combined DNA/RNA Molecule: Synthetic oligonucleotide"
  source: /note="DNA/RNA"
  source: /note="5' tri-ethylene glycol (TEG)"
  modified_base (1)..(1): bicyclic nucleic acid (BNA)
  modified_base (3)..(3): 5-methyl modified nucleotide
  modified_base (7)..(7): 5-methyl modified nucleotide
  modified_base (8)..(8): 5-methyl modified nucleotide
  modified_base (12)..(12): 5-methyl modified nucleotide
  modified_base (13)..(13): 5-methyl modified nucleotide
  modified_base (14)..(14): 5-methyl modified nucleotide
  modified_base (20)..(20): bicyclic nucleic acid (BNA)
  source: /note="3' tri-ethylene glycol (TEG)"
tucuguccaagcccgguuga

SEQ ID NO: 17045 - DNA, 19 bp, Artificial Sequence
  source: /note="Description of Artificial Sequence: Synthetic oligonucleotide"
  source: /note="Description of Combined DNA/RNA Molecule: Synthetic oligonucleotide"
  source: /note="DNA/RNA"
  source: /note="5' tri-ethylene glycol (TEG)"
  modified_base (1)..(1): bicyclic nucleic acid (BNA)
  modified_base (3)..(3): 5-methyl modified nucleotide
  modified_base (7)..(7): 5-methyl modified nucleotide
  modified_base (8)..(8): 5-methyl modified nucleotide
  modified_base (12)..(12): 5-methyl modified nucleotide
  modified_base (13)..(13): 5-methyl modified nucleotide
  modified_base (14)..(14): 5-methyl modified nucleotide
  modified_base (19)..(19): bicyclic nucleic acid (BNA)
  source: /note="3' tri-ethylene glycol (TEG)"
tucuguccaagcccgguug

SEQ ID NO: 17046 - DNA, 18 bp, Artificial Sequence
  source: /note="Description of Artificial Sequence: Synthetic oligonucleotide"
  source: /note="Description of Combined DNA/RNA Molecule: Synthetic oligonucleotide"
  source: /note="DNA/RNA"
  source: /note="5' tri-ethylene glycol (TEG)"
  modified_base (1)..(1): bicyclic nucleic acid (BNA)
  modified_base (3)..(3): 5-methyl modified nucleotide
  modified_base (7)..(7): 5-methyl modified nucleotide
  modified_base (8)..(8): 5-methyl modified nucleotide
  modified_base (12)..(12): 5-methyl modified nucleotide
  modified_base (13)..(13): 5-methyl modified nucleotide
  modified_base (14)..(14): 5-methyl modified nucleotide
  modified_base (18)..(18): bicyclic nucleic acid (BNA)
  source: /note="3' tri-ethylene glycol (TEG)"
tucuguccaagcccggut

SEQ ID NO: 17047 - DNA, 17 bp, Artificial Sequence
  source: /note="Description of Artificial Sequence: Synthetic oligonucleotide"
  source: /note="Description of Combined DNA/RNA Molecule: Synthetic oligonucleotide"
  source: /note="DNA/RNA"
  source: /note="5' tri-ethylene glycol (TEG)"
  modified_base (1)..(1): bicyclic nucleic acid (BNA)
  modified_base (3)..(3): 5-methyl modified nucleotide
  modified_base (7)..(7): 5-methyl modified nucleotide
  modified_base (8)..(8): 5-methyl modified nucleotide
  modified_base (12)..(12): 5-methyl modified nucleotide
  modified_base (13)..(13): 5-methyl modified nucleotide
  modified_base (14)..(14): 5-methyl modified nucleotide
  modified_base (17)..(17): bicyclic nucleic acid (BNA)
  source: /note="3' tri-ethylene glycol (TEG)"
tucuguccaagcccggt

SEQ ID NO: 17048 - DNA, 16 bp, Artificial Sequence
  source: /note="Description of Artificial Sequence: Synthetic oligonucleotide"
  source: /note="Description of Combined DNA/RNA Molecule: Synthetic oligonucleotide"
  source: /note="DNA/RNA"
  source: /note="5' tri-ethylene glycol (TEG)"
  modified_base (1)..(1): bicyclic nucleic acid (BNA)
  modified_base (3)..(3): 5-methyl modified nucleotide
  modified_base (7)..(7): 5-methyl modified nucleotide
  modified_base (8)..(8): 5-methyl modified nucleotide
  modified_base (12)..(12): 5-methyl modified nucleotide
  modified_base (13)..(13): 5-methyl modified nucleotide
  modified_base (14)..(14): 5-methyl modified nucleotide
  modified_base (16)..(16): bicyclic nucleic acid (BNA)
  source: /note="3' tri-ethylene glycol (TEG)"
tucuguccaagcccgg

SEQ ID NO: 17049 - DNA, 15 bp, Artificial Sequence
  source: /note="Description of Artificial Sequence: Synthetic oligonucleotide"
  source: /note="Description of Combined DNA/RNA Molecule: Synthetic oligonucleotide"
  source: /note="DNA/RNA"
  source: /note="5' tri-ethylene glycol (TEG)"
  modified_base (1)..(1): bicyclic nucleic acid (BNA)
  modified_base (3)..(3): 5-methyl modified nucleotide
  modified_base (7)..(7): 5-methyl modified nucleotide
  modified_base (8)..(8): 5-methyl modified nucleotide
  modified_base (12)..(12): 5-methyl modified nucleotide
  modified_base (13)..(13): 5-methyl modified nucleotide
  modified_base (14)..(14): 5-methyl modified nucleotide
  modified_base (15)..(15): bicyclic nucleic acid (BNA)
  source: /note="3' tri-ethylene glycol (TEG)"
tucuguccaagcccg

SEQ ID NO: 17050 - DNA, 14 bp, Artificial Sequence
  source: /note="Description of Artificial Sequence: Synthetic oligonucleotide"
  source: /note="Description of Combined DNA/RNA Molecule: Synthetic oligonucleotide"
  source: /note="DNA/RNA"
  source: /note="5' tri-ethylene glycol (TEG)"
  modified_base (1)..(1): bicyclic nucleic acid (BNA)
  modified_base (3)..(3): 5-methyl modified nucleotide
  modified_base (7)..(7): 5-methyl modified nucleotide
  modified_base (8)..(8): 5-methyl modified nucleotide
  modified_base (12)..(12): 5-methyl modified nucleotide
  modified_base (13)..(13): 5-methyl modified nucleotide
  modified_base (14)..(14): 5-methyl bicyclic nucleic acid
  source: /note="3' tri-ethylene glycol (TEG)"
tucuguccaagccc

SEQ ID NO: 17051 - DNA, 13 bp, Artificial Sequence
  source: /note="Description of Artificial Sequence: Synthetic oligonucleotide"
  source: /note="Description of Combined DNA/RNA Molecule: Synthetic oligonucleotide"
  source: /note="DNA/RNA"
  source: /note="5' tri-ethylene glycol (TEG)"
  modified_base (1)..(1): bicyclic nucleic acid (BNA)
  modified_base (3)..(3): 5-methyl modified nucleotide
  modified_base (7)..(7): 5-methyl modified nucleotide
  modified_base (8)..(8): 5-methyl modified nucleotide
  modified_base (12)..(12): 5-methyl modified nucleotide
  modified_base (13)..(13): 5-methyl bicyclic nucleic acid
  source: /note="3' tri-ethylene glycol (TEG)"
tucuguccaagcc

SEQ ID NO: 17052 - DNA, 12 bp, Artificial Sequence
  source: /note="Description of Artificial Sequence: Synthetic oligonucleotide"
  source: /note="Description of Combined DNA/RNA Molecule: Synthetic oligonucleotide"
  source: /note="DNA/RNA"
  source: /note="5' tri-ethylene glycol (TEG)"
  modified_base (1)..(1): bicyclic nucleic acid (BNA)
  modified_base (3)..(3): 5-methyl modified nucleotide
  modified_base (7)..(7): 5-methyl modified nucleotide
  modified_base (8)..(8): 5-methyl modified nucleotide
  modified_base (12)..(12): 5-methyl bicyclic nucleic acid
  source: /note="3' tri-ethylene glycol (TEG)"
tucuguccaagc

SEQ ID NO: 17053 - DNA, 11 bp, Artificial Sequence
  source: /note="Description of Artificial Sequence: Synthetic oligonucleotide"
  source: /note="Description of Combined DNA/RNA Molecule: Synthetic oligonucleotide"
  source: /note="DNA/RNA"
  source: /note="5' tri-ethylene glycol (TEG)"
  modified_base (1)..(1): bicyclic nucleic acid (BNA)
  modified_base (3)..(3): 5-methyl modified nucleotide
  modified_base (7)..(7): 5-methyl modified nucleotide
  modified_base (8)..(8): 5-methyl modified nucleotide
  modified_base (11)..(11): bicyclic nucleic acid (BNA)
  source: /note="3' tri-ethylene glycol (TEG)"
tucuguccaag

SEQ ID NO: 17054 - DNA, 10 bp, Artificial Sequence
  source: /note="Description of Artificial Sequence: Synthetic oligonucleotide"
  source: /note="Description of Combined DNA/RNA Molecule: Synthetic oligonucleotide"
  source: /note="DNA/RNA"
  source: /note="5' tri-ethylene glycol (TEG)"
  modified_base (1)..(1): bicyclic nucleic acid (BNA)
  modified_base (3)..(3): 5-methyl modified nucleotide
  modified_base (7)..(7): 5-methyl modified nucleotide
  modified_base (8)..(8): 5-methyl modified nucleotide
  modified_base (10)..(10): bicyclic nucleic acid (BNA)
  source: /note="3' tri-ethylene glycol (TEG)"
tucuguccaa

SEQ ID NO: 17055 - DNA, 9 bp, Artificial Sequence
  source: /note="Description of Artificial Sequence: Synthetic oligonucleotide"
  source: /note="Description of Combined DNA/RNA Molecule: Synthetic oligonucleotide"
  source: /note="DNA/RNA"
  source: /note="5' tri-ethylene glycol (TEG)"
  modified_base (1)..(1): bicyclic nucleic acid (BNA)
  modified_base (3)..(3): 5-methyl modified nucleotide
  modified_base (7)..(7): 5-methyl modified nucleotide
  modified_base (8)..(8): 5-methyl modified nucleotide
  modified_base (9)..(9): bicyclic nucleic acid (BNA)
  source: /note="3' tri-ethylene glycol (TEG)"
tucugucca

SEQ ID NO: 17056 - DNA, 8 bp, Artificial Sequence
  source: /note="Description of Artificial Sequence: Synthetic oligonucleotide"
  source: /note="Description of Combined DNA/RNA Molecule: Synthetic oligonucleotide"
  source: /note="DNA/RNA"
  source: /note="5' tri-ethylene glycol (TEG)"
  modified_base (1)..(1): bicyclic nucleic acid (BNA)
  modified_base (3)..(3): 5-methyl modified nucleotide
  modified_base (7)..(7): 5-methyl modified nucleotide
  modified_base (8)..(8): 5-methyl bicyclic nucleic acid
  source: /note="3' tri-ethylene glycol (TEG)"
tucugucc

SEQ ID NO: 17057 - DNA, 19 bp, Artificial Sequence
  source: /note="Description of Artificial Sequence: Synthetic oligonucleotide"
  source: /note="Description of Combined DNA/RNA Molecule: Synthetic oligonucleotide"
  source: /note="DNA/RNA"
  source: /note="5' tri-ethylene glycol (TEG)"
  modified_base (1)..(1): bicyclic nucleic acid (BNA)
  modified_base (2)..(2): 5-methyl modified nucleotide
  modified_base (6)..(6): 5-methyl modified nucleotide
  modified_base (7)..(7): 5-methyl modified nucleotide
  modified_base (11)..(11): 5-methyl modified nucleotide
  modified_base (12)..(12): 5-methyl modified nucleotide
  modified_base (13)..(13): 5-methyl modified nucleotide
  modified_base (19)..(19): bicyclic nucleic acid (BNA)
  source: /note="3' tri-ethylene glycol (TEG)"
tcuguccaagcccgguuga

SEQ ID NO: 17058 - DNA, 18 bp, Artificial Sequence
  source: /note="Description of Artificial Sequence: Synthetic oligonucleotide"
  source: /note="Description of Combined DNA/RNA Molecule: Synthetic oligonucleotide"
  source: /note="DNA/RNA"
  source: /note="5' tri-ethylene glycol (TEG)"
  modified_base (1)..(1): bicyclic nucleic acid (BNA)
  modified_base (2)..(2): 5-methyl modified nucleotide
  modified_base (6)..(6): 5-methyl modified nucleotide
  modified_base (7)..(7): 5-methyl modified nucleotide
  modified_base (11)..(11): 5-methyl modified nucleotide
  modified_base (12)..(12): 5-methyl modified nucleotide
  modified_base (13)..(13): 5-methyl modified nucleotide
  modified_base (18)..(18): bicyclic nucleic acid (BNA)
  source: /note="3' tri-ethylene glycol (TEG)"
tcuguccaagcccgguug

SEQ ID NO: 17059 - DNA, 17 bp, Artificial Sequence
  source: /note="Description of Artificial Sequence: Synthetic oligonucleotide"
  source: /note="Description of Combined DNA/RNA Molecule: Synthetic oligonucleotide"
  source: /note="DNA/RNA"
  source: /note="5' tri-ethylene glycol (TEG)"
  modified_base (1)..(1): bicyclic nucleic acid (BNA)
  modified_base (2)..(2): 5-methyl modified nucleotide
  modified_base (6)..(6): 5-methyl modified nucleotide
  modified_base (7)..(7): 5-methyl modified nucleotide
  modified_base (11)..(11): 5-methyl modified nucleotide
  modified_base (12)..(12): 5-methyl modified nucleotide
  modified_base (13)..(13): 5-methyl modified nucleotide
  modified_base (17)..(17): bicyclic nucleic acid (BNA)
  source: /note="3' tri-ethylene glycol (TEG)"
tcuguccaagcccggut

SEQ ID NO: 17060 - DNA, 16 bp, Artificial Sequence
  source: /note="Description of Artificial Sequence: Synthetic oligonucleotide"
  source: /note="Description of Combined DNA/RNA Molecule: Synthetic oligonucleotide"
  source: /note="DNA/RNA"
  source: /note="5' tri-ethylene glycol (TEG)"
  modified_base (1)..(1): bicyclic nucleic acid (BNA)
  modified_base (2)..(2): 5-methyl modified nucleotide
  modified_base (6)..(6): 5-methyl modified nucleotide
  modified_base (7)..(7): 5-methyl modified nucleotide
  modified_base (11)..(11): 5-methyl modified nucleotide
  modified_base (12)..(12): 5-methyl modified nucleotide
  modified_base (13)..(13): 5-methyl modified nucleotide
  modified_base (16)..(16): bicyclic nucleic acid (BNA)
  source: /note="3' tri-ethylene glycol (TEG)"
tcuguccaagcccggt

SEQ ID NO: 17061 - DNA, 15 bp, Artificial Sequence
  source: /note="Description of Artificial Sequence: Synthetic oligonucleotide"
  source: /note="Description of Combined DNA/RNA Molecule: Synthetic oligonucleotide"
  source: /note="DNA/RNA"
  source: /note="5' tri-ethylene glycol (TEG)"
  modified_base (1)..(1): bicyclic nucleic acid (BNA)
  modified_base (2)..(2): 5-methyl modified nucleotide
  modified_base (6)..(6): 5-methyl modified nucleotide
  modified_base (7)..(7): 5-methyl modified nucleotide
  modified_base (11)..(11): 5-methyl modified nucleotide
  modified_base (12)..(12): 5-methyl modified nucleotide
  modified_base (13)..(13): 5-methyl modified nucleotide
  modified_base (15)..(15): bicyclic nucleic acid (BNA)
  source: /note="3' tri-ethylene glycol (TEG)"
tcuguccaagcccgg

SEQ ID NO: 17062 - DNA, 14 bp, Artificial Sequence
  source: /note="Description of Artificial Sequence: Synthetic oligonucleotide"
  source: /note="Description of Combined DNA/RNA Molecule: Synthetic oligonucleotide"
  source: /note="DNA/RNA"
  source: /note="5' tri-ethylene glycol (TEG)"
  modified_base (1)..(1): bicyclic nucleic acid (BNA)
  modified_base (2)..(2): 5-methyl modified nucleotide
  modified_base (6)..(6): 5-methyl modified nucleotide
  modified_base (7)..(7): 5-methyl modified nucleotide
  modified_base (11)..(11): 5-methyl modified nucleotide
  modified_base (12)..(12): 5-methyl modified nucleotide
  modified_base (13)..(13): 5-methyl modified nucleotide
  modified_base (14)..(14): bicyclic nucleic acid (BNA)
  source: /note="3' tri-ethylene glycol (TEG)"
tcuguccaagcccg

SEQ ID NO: 17063 - DNA, 13 bp, Artificial Sequence
  source: /note="Description of Artificial Sequence: Synthetic oligonucleotide"
  source: /note="Description of Combined DNA/RNA Molecule: Synthetic oligonucleotide"
  source: /note="DNA/RNA"
  source: /note="5' tri-ethylene glycol (TEG)"
  modified_base (1)..(1): bicyclic nucleic acid (BNA)
  modified_base (2)..(2): 5-methyl modified nucleotide
  modified_base (6)..(6): 5-methyl modified nucleotide
  modified_base (7)..(7): 5-methyl modified nucleotide
  modified_base (11)..(11): 5-methyl modified nucleotide
  modified_base (12)..(12): 5-methyl modified nucleotide
  modified_base (13)..(13): 5-methyl bicyclic nucleic acid
  source: /note="3' tri-ethylene glycol (TEG)"
tcuguccaagccc

SEQ ID NO: 17064 - DNA, 12 bp, Artificial Sequence
  source: /note="Description of Artificial Sequence: Synthetic oligonucleotide"
  source: /note="Description of Combined DNA/RNA Molecule: Synthetic oligonucleotide"
  source: /note="DNA/RNA"
  source: /note="5' tri-ethylene glycol (TEG)"
  modified_base (1)..(1): bicyclic nucleic acid (BNA)
  modified_base (2)..(2): 5-methyl modified nucleotide
  modified_base (6)..(6): 5-methyl modified nucleotide
  modified_base (7)..(7): 5-methyl modified nucleotide
  modified_base (11)..(11): 5-methyl modified nucleotide
  modified_base (12)..(12): 5-methyl bicyclic nucleic acid
  source: /note="3' tri-ethylene glycol (TEG)"
tcuguccaagcc

SEQ ID NO: 17065 - DNA, 11 bp, Artificial Sequence
  source: /note="Description of Artificial Sequence: Synthetic oligonucleotide"
  source: /note="Description of Combined DNA/RNA Molecule: Synthetic oligonucleotide"
  source: /note="DNA/RNA"
  source: /note="5' tri-ethylene glycol (TEG)"
  modified_base (1)..(1): bicyclic nucleic acid (BNA)
  modified_base (2)..(2): 5-methyl modified nucleotide
  modified_base (6)..(6): 5-methyl modified nucleotide
  modified_base (7)..(7): 5-methyl modified nucleotide
  modified_base (11)..(11): 5-methyl bicyclic nucleic acid
  source: /note="3' tri-ethylene glycol (TEG)"
tcuguccaagc

SEQ ID NO: 17066 - DNA, 10 bp, Artificial Sequence
  source: /note="Description of Artificial Sequence: Synthetic oligonucleotide"
  source: /note="Description of Combined DNA/RNA Molecule: Synthetic oligonucleotide"
  source: /note="DNA/RNA"
  source: /note="5' tri-ethylene glycol (TEG)"
  modified_base (1)..(1): bicyclic nucleic acid (BNA)
  modified_base (2)..(2): 5-methyl modified nucleotide
  modified_base (6)..(6): 5-methyl modified nucleotide
  modified_base (7)..(7): 5-methyl modified nucleotide
  modified_base (10)..(10): bicyclic nucleic acid (BNA)
  source: /note="3' tri-ethylene glycol (TEG)"
tcuguccaag

SEQ ID NO: 17067 - DNA, 9 bp, Artificial Sequence
  source: /note="Description of Artificial Sequence: Synthetic oligonucleotide"
  source: /note="Description of Combined DNA/RNA Molecule: Synthetic oligonucleotide"
  source: /note="DNA/RNA"
  source: /note="5' tri-ethylene glycol (TEG)"
  modified_base (1)..(1): bicyclic nucleic acid (BNA)
  modified_base (2)..(2): 5-methyl modified nucleotide
  modified_base (6)..(6): 5-methyl modified nucleotide
  modified_base (7)..(7): 5-methyl modified nucleotide
  modified_base (9)..(9): bicyclic nucleic acid (BNA)
  source: /note="3' tri-ethylene glycol (TEG)"
tcuguccaa

SEQ ID NO: 17068 - DNA, 8 bp, Artificial Sequence
  source: /note="Description of Artificial Sequence: Synthetic oligonucleotide"
  source: /note="Description of Combined DNA/RNA Molecule: Synthetic oligonucleotide"
  source: /note="DNA/RNA"
  source: /note="5' tri-ethylene glycol (TEG)"
  modified_base (1)..(1): bicyclic nucleic acid (BNA)
  modified_base (2)..(2): 5-methyl modified nucleotide
  modified_base (6)..(6): 5-methyl modified nucleotide
  modified_base (7)..(7): 5-methyl modified nucleotide
  modified_base (8)..(8): bicyclic nucleic acid (BNA)
  source: /note="3' tri-ethylene glycol (TEG)"
tcugucca

SEQ ID NO: 17069 - RNA, 17 nt, Artificial Sequence
  source: /note="Description of Artificial Sequence: Synthetic oligonucleotide"
  source: /note="RNA"
  source: /note="5' tri-ethylene glycol (TEG)"
  modified_base (1)..(1): 5-methyl bicyclic nucleic acid
  modified_base (5)..(5): 5-methyl modified nucleotide
  modified_base (6)..(6): 5-methyl modified nucleotide
  modified_base (10)..(10): 5-methyl modified nucleotide
  modified_base (11)..(11): 5-methyl modified nucleotide
  modified_base (12)..(12): 5-methyl modified nucleotide
  modified_base (17)..(17): bicyclic nucleic acid (BNA)
  source: /note="3' tri-ethylene glycol (TEG)"
cuguccaagcccgguug

SEQ ID NO: 17070 - DNA, 16 bp, Artificial Sequence
  source: /note="Description of Artificial Sequence: Synthetic oligonucleotide"
  source: /note="Description of Combined DNA/RNA Molecule: Synthetic oligonucleotide"
  source: /note="DNA/RNA"
  source: /note="5' tri-ethylene glycol (TEG)"
  modified_base (1)..(1): 5-methyl bicyclic nucleic acid
  modified_base (5)..(5): 5-methyl modified nucleotide
  modified_base (6)..(6): 5-methyl modified nucleotide
  modified_base (10)..(10): 5-methyl modified nucleotide
  modified_base (11)..(11): 5-methyl modified nucleotide
  modified_base (12)..(12): 5-methyl modified nucleotide
  modified_base (16)..(16): bicyclic nucleic acid (BNA)
  source: /note="3' tri-ethylene glycol (TEG)"
cuguccaagcccggut

SEQ ID NO: 17071 - DNA, 15 bp, Artificial Sequence
  source: /note="Description of Artificial Sequence: Synthetic oligonucleotide"
  source: /note="Description of Combined DNA/RNA Molecule: Synthetic oligonucleotide"
  source: /note="DNA/RNA"
  source: /note="5' tri-ethylene glycol (TEG)"
  modified_base (1)..(1): 5-methyl bicyclic nucleic acid
  modified_base (5)..(5): 5-methyl modified nucleotide
  modified_base (6)..(6): 5-methyl modified nucleotide
  modified_base (10)..(10): 5-methyl modified nucleotide
  modified_base (11)..(11): 5-methyl modified nucleotide
  modified_base (12)..(12): 5-methyl modified nucleotide
  modified_base (15)..(15): bicyclic nucleic acid (BNA)
  source: /note="3' tri-ethylene glycol (TEG)"
cuguccaagcccggt

SEQ ID NO: 17072 - RNA, 14 nt, Artificial Sequence
  source: /note="Description of Artificial Sequence: Synthetic oligonucleotide"
  source: /note="RNA"
  source: /note="5' tri-ethylene glycol (TEG)"
  modified_base (1)..(1): 5-methyl bicyclic nucleic acid
  modified_base (5)..(5): 5-methyl modified nucleotide
  modified_base (6)..(6): 5-methyl modified nucleotide
  modified_base (10)..(10): 5-methyl modified nucleotide
  modified_base (11)..(11): 5-methyl modified nucleotide
  modified_base (12)..(12): 5-methyl modified nucleotide
  modified_base (14)..(14): bicyclic nucleic acid (BNA)
  source: /note="3' tri-ethylene glycol (TEG)"
cuguccaagcccgg

SEQ ID NO: 17073 - RNA, 13 nt, Artificial Sequence
  source: /note="Description of Artificial Sequence: Synthetic oligonucleotide"
  source: /note="RNA"
  source: /note="5' tri-ethylene glycol (TEG)"
  modified_base (1)..(1): 5-methyl bicyclic nucleic acid
  modified_base (5)..(5): 5-methyl modified nucleotide
  modified_base (6)..(6): 5-methyl modified nucleotide
  modified_base (10)..(10): 5-methyl modified nucleotide
  modified_base (11)..(11): 5-methyl modified nucleotide
  modified_base (12)..(12): 5-methyl modified nucleotide
  modified_base (13)..(13): bicyclic nucleic acid (BNA)
  source: /note="3' tri-ethylene glycol (TEG)"
cuguccaagcccg

SEQ ID NO: 17074 - RNA, 12 nt, Artificial Sequence
  source: /note="Description of Artificial Sequence: Synthetic oligonucleotide"
  source: /note="RNA"
  source: /note="5' tri-ethylene glycol (TEG)"
  modified_base (1)..(1): 5-methyl bicyclic nucleic acid
  modified_base (5)..(5): 5-methyl modified nucleotide
  modified_base (6)..(6): 5-methyl modified nucleotide
  modified_base (10)..(10): 5-methyl modified nucleotide
  modified_base (11)..(11): 5-methyl modified nucleotide
  modified_base (12)..(12): 5-methyl bicyclic nucleic acid
  source: /note="3' tri-ethylene glycol (TEG)"
cuguccaagccc

SEQ ID NO: 17075 - RNA, 11 nt, Artificial Sequence
  source: /note="Description of Artificial Sequence: Synthetic oligonucleotide"
  source: /note="RNA"
  source: /note="5' tri-ethylene glycol (TEG)"
  modified_base (1)..(1): 5-methyl bicyclic nucleic acid
  modified_base (5)..(5): 5-methyl modified nucleotide
  modified_base (6)..(6): 5-methyl modified nucleotide
  modified_base (10)..(10): 5-methyl modified nucleotide
  modified_base (11)..(11): 5-methyl bicyclic nucleic acid
  source: /note="3' tri-ethylene glycol (TEG)"
cuguccaagcc

SEQ ID NO: 17076 - RNA, 10 nt, Artificial Sequence
  source: /note="Description of Artificial Sequence: Synthetic oligonucleotide"
  source: /note="RNA"
  source: /note="5' tri-ethylene glycol (TEG)"
  modified_base (1)..(1): 5-methyl bicyclic nucleic acid
  modified_base (5)..(5): 5-methyl modified nucleotide
  modified_base (6)..(6): 5-methyl modified nucleotide
  modified_base (10)..(10): 5-methyl bicyclic nucleic acid
  source: /note="3' tri-ethylene glycol (TEG)"
cuguccaagc

SEQ ID NO: 17077 - RNA, 9 nt, Artificial Sequence
  source: /note="Description of Artificial Sequence: Synthetic oligonucleotide"
  source: /note="RNA"
  source: /note="5' tri-ethylene glycol (TEG)"
  modified_base (1)..(1): 5-methyl bicyclic nucleic acid
  modified_base (5)..(5): 5-methyl modified nucleotide
  modified_base (6)..(6): 5-methyl modified nucleotide
  modified_base (9)..(9): bicyclic nucleic acid (BNA)
  source: /note="3' tri-ethylene glycol (TEG)"
cuguccaag

SEQ ID NO: 17078 - RNA, 8 nt, Artificial Sequence
  source: /note="Description of Artificial Sequence: Synthetic oligonucleotide"
  source: /note="RNA"
  source: /note="5' tri-ethylene glycol (TEG)"
  modified_base (1)..(1): 5-methyl bicyclic nucleic acid
  modified_base (5)..(5): 5-methyl modified nucleotide
  modified_base (6)..(6): 5-methyl modified nucleotide
  modified_base (8)..(8): bicyclic nucleic acid (BNA)
  source: /note="3' tri-ethylene glycol (TEG)"
cuguccaa

SEQ ID NO: 17079 - RNA, 20 nt, Artificial Sequence
  source: /note="Description of Artificial Sequence: Synthetic oligonucleotide"
  source: /note="RNA"
  source: /note="5' tri-ethylene glycol (TEG)"
  modified_base (1)..(1): bicyclic nucleic acid (BNA)
  modified_base (4)..(4): 5-methyl modified nucleotide
  modified_base (8)..(8): 5-methyl modified nucleotide
  modified_base (9)..(9): 5-methyl modified nucleotide
  modified_base (13)..(13): 5-methyl modified nucleotide
  modified_base (14)..(14): 5-methyl modified nucleotide
  modified_base (15)..(15): 5-methyl modified nucleotide
  modified_base (20)..(20): bicyclic nucleic acid (BNA)
  source: /note="3' tri-ethylene glycol (TEG)"
guucuguccaagcccgguug

SEQ ID NO: 17080 - DNA, 19 bp, Artificial Sequence
  source: /note="Description of Artificial Sequence: Synthetic oligonucleotide"
  source: /note="Description of Combined DNA/RNA Molecule: Synthetic oligonucleotide"
  source: /note="DNA/RNA"
  source: /note="5' tri-ethylene glycol (TEG)"
  modified_base (1)..(1): bicyclic nucleic acid (BNA)
  modified_base (4)..(4): 5-methyl modified nucleotide
  modified_base (8)..(8): 5-methyl modified nucleotide
  modified_base (9)..(9): 5-methyl modified nucleotide
  modified_base (13)..(13): 5-methyl modified nucleotide
  modified_base (14)..(14): 5-methyl modified nucleotide
  modified_base (15)..(15): 5-methyl modified nucleotide
  modified_base (19)..(19): bicyclic nucleic acid (BNA)
  source: /note="3' tri-ethylene glycol (TEG)"
guucuguccaagcccggut

SEQ ID NO: 17081 - DNA, 18 bp, Artificial Sequence
  source: /note="Description of Artificial Sequence: Synthetic oligonucleotide"
  source: /note="Description of Combined DNA/RNA Molecule: Synthetic oligonucleotide"
  source: /note="DNA/RNA"
  source: /note="5' tri-ethylene glycol (TEG)"
  modified_base (1)..(1): bicyclic nucleic acid (BNA)
  modified_base (4)..(4): 5-methyl modified nucleotide
  modified_base (8)..(8): 5-methyl modified nucleotide
  modified_base (9)..(9): 5-methyl modified nucleotide
  modified_base (13)..(13): 5-methyl modified nucleotide
  modified_base (14)..(14): 5-methyl modified nucleotide
  modified_base (15)..(15): 5-methyl modified nucleotide
  modified_base (18)..(18): bicyclic nucleic acid (BNA)
  source: /note="3' tri-ethylene glycol (TEG)"
guucuguccaagcccggt

SEQ ID NO: 17082 - RNA, 17 nt, Artificial Sequence
  source: /note="Description of Artificial Sequence: Synthetic oligonucleotide"
  source: /note="RNA"
  source: /note="5' tri-ethylene glycol (TEG)"
  modified_base (1)..(1): bicyclic nucleic acid (BNA)
  modified_base (4)..(4): 5-methyl modified nucleotide
  modified_base (8)..(8): 5-methyl modified nucleotide
  modified_base (9)..(9): 5-methyl modified nucleotide
  modified_base (13)..(13): 5-methyl modified nucleotide
  modified_base (14)..(14): 5-methyl modified nucleotide
  modified_base (15)..(15): 5-methyl modified nucleotide
  modified_base (17)..(17): bicyclic nucleic acid (BNA)
  source: /note="3' tri-ethylene glycol (TEG)"
guucuguccaagcccgg

SEQ ID NO: 17083 - RNA, 16 nt, Artificial Sequence
  source: /note="Description of Artificial Sequence: Synthetic oligonucleotide"
  source: /note="RNA"
  source: /note="5' tri-ethylene glycol (TEG)"
  modified_base (1)..(1): bicyclic nucleic acid (BNA)
  modified_base (4)..(4): 5-methyl modified nucleotide
  modified_base (8)..(8): 5-methyl modified nucleotide
  modified_base (9)..(9): 5-methyl modified nucleotide
  modified_base (13)..(13): 5-methyl modified nucleotide
  modified_base (14)..(14): 5-methyl modified nucleotide
  modified_base (15)..(15): 5-methyl modified nucleotide
  modified_base (16)..(16): bicyclic nucleic acid (BNA)
  source: /note="3' tri-ethylene glycol (TEG)"
guucuguccaagcccg

SEQ ID NO: 17084 - RNA, 15 nt, Artificial Sequence
  source: /note="Description of Artificial Sequence: Synthetic oligonucleotide"
  source: /note="RNA"
  source: /note="5' tri-ethylene glycol (TEG)"
  modified_base (1)..(1): bicyclic nucleic acid (BNA)
  modified_base (4)..(4): 5-methyl modified nucleotide
  modified_base (8)..(8): 5-methyl modified nucleotide
  modified_base (9)..(9): 5-methyl modified nucleotide
  modified_base (13)..(13): 5-methyl modified nucleotide
  modified_base (14)..(14): 5-methyl modified nucleotide
  modified_base (15)..(15): 5-methyl bicyclic nucleic acid
  source: /note="3' tri-ethylene glycol (TEG)"
guucuguccaagccc

SEQ ID NO: 17085 - RNA, 14 nt, Artificial Sequence
  source: /note="Description of Artificial Sequence: Synthetic oligonucleotide"
  source: /note="RNA"
  source: /note="5' tri-ethylene glycol (TEG)"
  modified_base (1)..(1): bicyclic nucleic acid (BNA)
  modified_base (4)..(4): 5-methyl modified nucleotide
  modified_base (8)..(8): 5-methyl modified nucleotide
  modified_base (9)..(9): 5-methyl modified nucleotide
  modified_base (13)..(13): 5-methyl modified nucleotide
  modified_base (14)..(14): 5-methyl bicyclic nucleic acid
  source: /note="3' tri-ethylene glycol (TEG)"
guucuguccaagcc

SEQ ID NO: 17086 - RNA, 13 nt, Artificial Sequence
  source: /note="Description of Artificial Sequence: Synthetic oligonucleotide"
  source: /note="RNA"
  source: /note="5' tri-ethylene glycol (TEG)"
  modified_base (1)..(1): bicyclic nucleic acid (BNA)
  modified_base (4)..(4): 5-methyl modified nucleotide
  modified_base (8)..(8): 5-methyl modified nucleotide
  modified_base (9)..(9): 5-methyl modified nucleotide
  modified_base (13)..(13): 5-methyl bicyclic nucleic acid
  source: /note="3' tri-ethylene glycol (TEG)"
guucuguccaagc

SEQ ID NO: 17087 - RNA, 12 nt, Artificial Sequence
  source: /note="Description of Artificial Sequence: Synthetic oligonucleotide"
  source: /note="RNA"
  source: /note="5' tri-ethylene glycol (TEG)"
  modified_base (1)..(1): bicyclic nucleic acid (BNA)
  modified_base (4)..(4): 5-methyl modified nucleotide
  modified_base (8)..(8): 5-methyl modified nucleotide
  modified_base (9)..(9): 5-methyl modified nucleotide
  modified_base (12)..(12): bicyclic nucleic acid (BNA)
  source: /note="3' tri-ethylene glycol (TEG)"
guucuguccaag

SEQ ID NO: 17088 - RNA, 11 nt, Artificial Sequence
  source: /note="Description of Artificial Sequence: Synthetic oligonucleotide"
  source: /note="RNA"
  source: /note="5' tri-ethylene glycol (TEG)"
  modified_base (1)..(1): bicyclic nucleic acid (BNA)
  modified_base (4)..(4): 5-methyl modified nucleotide
  modified_base (8)..(8): 5-methyl modified nucleotide
  modified_base (9)..(9): 5-methyl modified nucleotide
  modified_base (11)..(11): bicyclic nucleic acid (BNA)
  source: /note="3' tri-ethylene glycol (TEG)"
guucuguccaa

SEQ ID NO: 17089 - RNA, 10 nt, Artificial Sequence
  source: /note="Description of Artificial Sequence: Synthetic oligonucleotide"
  source: /note="RNA"
  source: /note="5' tri-ethylene glycol (TEG)"
  modified_base (1)..(1): bicyclic nucleic acid (BNA)
  modified_base (4)..(4): 5-methyl modified nucleotide
  modified_base (8)..(8): 5-methyl modified nucleotide
  modified_base (9)..(9): 5-methyl modified nucleotide
  modified_base (10)..(10): bicyclic nucleic acid (BNA)
  source: /note="3' tri-ethylene glycol (TEG)"
guucugucca

SEQ ID NO: 17090 - RNA, 9 nt, Artificial Sequence
  source: /note="Description of Artificial Sequence: Synthetic oligonucleotide"
  source: /note="RNA"
  source: /note="5' tri-ethylene glycol (TEG)"
  modified_base (1)..(1): bicyclic nucleic acid (BNA)
  modified_base (4)..(4): 5-methyl modified nucleotide
  modified_base (8)..(8): 5-methyl modified nucleotide
  modified_base (9)..(9): 5-methyl bicyclic nucleic acid
  source: /note="3' tri-ethylene glycol (TEG)"
guucugucc

SEQ ID NO: 17091 - RNA, 8 nt, Artificial Sequence
  source: /note="Description of Artificial Sequence: Synthetic oligonucleotide"
  source: /note="RNA"
  source: /note="5' tri-ethylene glycol (TEG)"
  modified_base (1)..(1): bicyclic nucleic acid (BNA)
  modified_base (4)..(4): 5-methyl modified nucleotide
  modified_base (8)..(8): 5-methyl bicyclic nucleic acid
  source: /note="3' tri-ethylene glycol (TEG)"
guucuguc

SEQ ID NO: 17092 - DNA, 20 bp, Artificial Sequence
  source: /note="Description of Artificial Sequence: Synthetic oligonucleotide"
  source: /note="Description of Combined DNA/RNA Molecule: Synthetic oligonucleotide"
  source: /note="DNA/RNA"
  source: /note="5' tri-ethylene glycol (TEG)"
  modified_base (1)..(1): bicyclic nucleic acid (BNA)
  modified_base (5)..(5): 5-methyl modified nucleotide
  modified_base (9)..(9): 5-methyl modified nucleotide
  modified_base (10)..(10): 5-methyl modified nucleotide
  modified_base (14)..(14): 5-methyl modified nucleotide
  modified_base (15)..(15): 5-methyl modified nucleotide
  modified_base (16)..(16): 5-methyl modified nucleotide
  modified_base (20)..(20): bicyclic nucleic acid (BNA)
  source: /note="3' tri-ethylene glycol (TEG)"
aguucuguccaagcccggut

SEQ ID NO: 17093 - DNA, 19 bp, Artificial Sequence
  source: /note="Description of Artificial Sequence: Synthetic oligonucleotide"
  source: /note="Description of Combined DNA/RNA Molecule: Synthetic oligonucleotide"
  source: /note="DNA/RNA"
  source: /note="5' tri-ethylene glycol (TEG)"
  modified_base (1)..(1): bicyclic nucleic acid (BNA)
  modified_base (5)..(5): 5-methyl modified nucleotide
  modified_base (9)..(9): 5-methyl modified nucleotide
  modified_base (10)..(10): 5-methyl modified nucleotide
  modified_base (14)..(14): 5-methyl modified nucleotide
  modified_base (15)..(15): 5-methyl modified nucleotide
  modified_base (16)..(16): 5-methyl modified nucleotide
  modified_base (19)..(19): bicyclic nucleic acid (BNA)
  source: /note="3' tri-ethylene glycol (TEG)"
aguucuguccaagcccggt

SEQ ID NO: 17094 - RNA, 18 nt, Artificial Sequence
  source: /note="Description of Artificial Sequence: Synthetic oligonucleotide"
  source: /note="RNA"
  source: /note="5' tri-ethylene glycol (TEG)"
  modified_base (1)..(1): bicyclic nucleic acid (BNA)
  modified_base (5)..(5): 5-methyl modified nucleotide
  modified_base (9)..(9): 5-methyl modified nucleotide
  modified_base (10)..(10): 5-methyl modified nucleotide
  modified_base (14)..(14): 5-methyl modified nucleotide
  modified_base (15)..(15): 5-methyl modified nucleotide
  modified_base (16)..(16): 5-methyl modified nucleotide
  modified_base (18)..(18): bicyclic nucleic acid (BNA)
  source: /note="3' tri-ethylene glycol (TEG)"
aguucuguccaagcccgg

SEQ ID NO: 17095 - RNA, 17 nt, Artificial Sequence
  source: /note="Description of Artificial Sequence: Synthetic oligonucleotide"
  source: /note="RNA"
  source: /note="5' tri-ethylene glycol (TEG)"
  modified_base (1)..(1): bicyclic nucleic acid (BNA)
  modified_base (5)..(5): 5-methyl modified nucleotide
  modified_base (9)..(9): 5-methyl modified nucleotide
  modified_base (10)..(10): 5-methyl modified nucleotide
  modified_base (14)..(14): 5-methyl modified nucleotide
  modified_base (15)..(15): 5-methyl modified nucleotide
  modified_base (16)..(16): 5-methyl modified nucleotide
  modified_base (17)..(17): bicyclic nucleic acid (BNA)
  source: /note="3' tri-ethylene glycol (TEG)"
aguucuguccaagcccg

SEQ ID NO: 17096 - RNA, 16 nt, Artificial Sequence
  source: /note="Description of Artificial Sequence: Synthetic oligonucleotide"
  source: /note="RNA"
  source: /note="5' tri-ethylene glycol (TEG)"
  modified_base (1)..(1): bicyclic nucleic acid (BNA)
  modified_base (5)..(5): 5-methyl modified nucleotide
  modified_base (9)..(9): 5-methyl modified nucleotide
  modified_base (10)..(10): 5-methyl modified nucleotide
  modified_base (14)..(14): 5-methyl modified nucleotide
  modified_base (15)..(15): 5-methyl modified nucleotide
  modified_base (16)..(16): 5-methyl bicyclic nucleic acid
  source: /note="3' tri-ethylene glycol (TEG)"
aguucuguccaagccc

SEQ ID NO: 17097 - RNA, 15 nt, Artificial Sequence
  source: /note="Description of Artificial Sequence: Synthetic oligonucleotide"
  source: /note="RNA"
  source: /note="5' tri-ethylene glycol (TEG)"
  modified_base (1)..(1): bicyclic nucleic acid (BNA)
  modified_base (5)..(5): 5-methyl modified nucleotide
  modified_base (9)..(9): 5-methyl modified nucleotide
  modified_base (10)..(10): 5-methyl modified nucleotide
  modified_base (14)..(14): 5-methyl modified nucleotide
  modified_base (15)..(15): 5-methyl bicyclic nucleic acid
  source: /note="3' tri-ethylene glycol (TEG)"
aguucuguccaagcc

SEQ ID NO: 17098 - RNA, 14 nt, Artificial Sequence
  source: /note="Description of Artificial Sequence: Synthetic oligonucleotide"
  source: /note="RNA"
  source: /note="5' tri-ethylene glycol (TEG)"
  modified_base (1)..(1): bicyclic nucleic acid (BNA)
  modified_base (5)..(5): 5-methyl modified nucleotide
  modified_base (9)..(9): 5-methyl modified nucleotide
  modified_base (10)..(10): 5-methyl modified nucleotide
  modified_base (14)..(14): 5-methyl bicyclic nucleic acid
  source: /note="3' tri-ethylene glycol (TEG)"
aguucuguccaagc

SEQ ID NO: 17099 - RNA, 13 nt, Artificial Sequence
  source: /note="Description of Artificial Sequence: Synthetic oligonucleotide"
  source: /note="RNA"
  source: /note="5' tri-ethylene glycol (TEG)"
  modified_base (1)..(1): bicyclic nucleic acid (BNA)
  modified_base (5)..(5): 5-methyl modified nucleotide
  modified_base (9)..(9): 5-methyl modified nucleotide
  modified_base (10)..(10): 5-methyl modified nucleotide
  modified_base (13)..(13): bicyclic nucleic acid (BNA)
  source: /note="3' tri-ethylene glycol (TEG)"
aguucuguccaag

SEQ ID NO: 17100 - RNA, 12 nt, Artificial Sequence
  source: /note="Description of Artificial Sequence: Synthetic oligonucleotide"
  source: /note="RNA"
  source: /note="5' tri-ethylene glycol (TEG)"
  modified_base (1)..(1): bicyclic nucleic acid (BNA)
  modified_base (5)..(5): 5-methyl modified nucleotide
  modified_base (9)..(9): 5-methyl modified nucleotide
  modified_base (10)..(10): 5-methyl modified nucleotide
  modified_base (12)..(12): bicyclic nucleic acid (BNA)
  source: /note="3' tri-ethylene glycol (TEG)"
aguucuguccaa

SEQ ID NO: 17101 - RNA, 11 nt, Artificial Sequence
  source: /note="Description of Artificial Sequence: Synthetic oligonucleotide"
  source: /note="RNA"
  source: /note="5' tri-ethylene glycol (TEG)"
  modified_base (1)..(1): bicyclic nucleic acid (BNA)
  modified_base (5)..(5): 5-methyl modified nucleotide
  modified_base (9)..(9): 5-methyl modified nucleotide
  modified_base (10)..(10): 5-methyl modified nucleotide
  modified_base (11)..(11): bicyclic nucleic acid (BNA)
  source: /note="3' tri-ethylene glycol (TEG)"
aguucugucca

SEQ ID NO: 17102 - RNA, 10 nt, Artificial Sequence
  source: /note="Description of Artificial Sequence: Synthetic oligonucleotide"
  source: /note="RNA"
  source: /note="5' tri-ethylene glycol (TEG)"
  modified_base (1)..(1): bicyclic nucleic acid (BNA)
  modified_base (5)..(5): 5-methyl modified nucleotide
  modified_base (9)..(9): 5-methyl modified nucleotide
  modified_base (10)..(10): 5-methyl bicyclic nucleic acid
  source: /note="3' tri-ethylene glycol (TEG)"
aguucugucc

SEQ ID NO: 17103 - RNA, 9 nt, Artificial Sequence
  source: /note="Description of Artificial Sequence: Synthetic oligonucleotide"
  source: /note="RNA"
  source: /note="5' tri-ethylene glycol (TEG)"
  modified_base (1)..(1): bicyclic nucleic acid (BNA)
  modified_base (5)..(5): 5-methyl modified nucleotide
  modified_base (9)..(9): 5-methyl bicyclic nucleic acid
  source: /note="3' tri-ethylene glycol (TEG)"
aguucuguc

SEQ ID NO: 17104 - DNA, 8 bp, Artificial Sequence
  source: /note="Description of Artificial Sequence: Synthetic oligonucleotide"
  source: /note="Description of Combined DNA/RNA Molecule: Synthetic oligonucleotide"
  source: /note="DNA/RNA"
  source: /note="5' tri-ethylene glycol (TEG)"
  modified_base (1)..(1): bicyclic nucleic acid (BNA)
  modified_base (5)..(5): 5-methyl modified nucleotide
  modified_base (8)..(8): bicyclic nucleic acid (BNA)
  source: /note="3' tri-ethylene glycol (TEG)"
aguucugt

SEQ ID NO: 17105 - DNA, 20 bp, Artificial Sequence
  source: /note="Description of Artificial Sequence: Synthetic oligonucleotide"
  source: /note="Description of Combined DNA/RNA Molecule: Synthetic oligonucleotide"
  source: /note="DNA/RNA"
  source: /note="5' tri-ethylene glycol (TEG)"
  modified_base (1)..(1): bicyclic nucleic acid (BNA)
  modified_base (6)..(6): 5-methyl modified nucleotide
  modified_base (10)..(10): 5-methyl modified nucleotide
  modified_base (11)..(11): 5-methyl modified nucleotide
  modified_base (15)..(15): 5-methyl modified nucleotide
  modified_base (16)..(16): 5-methyl modified nucleotide
  modified_base (17)..(17): 5-methyl modified nucleotide
  modified_base (20)..(20): bicyclic nucleic acid (BNA)
  source: /note="3' tri-ethylene glycol (TEG)"
aaguucuguccaagcccggt

SEQ ID NO: 17106 - RNA, 19 nt, Artificial Sequence
  source: /note="Description of Artificial Sequence: Synthetic oligonucleotide"
  source: /note="RNA"
  source: /note="5' tri-ethylene glycol (TEG)"
  modified_base (1)..(1): bicyclic nucleic acid (BNA)
  modified_base (6)..(6): 5-methyl modified nucleotide
  modified_base (10)..(10): 5-methyl modified nucleotide
  modified_base (11)..(11): 5-methyl modified nucleotide
  modified_base (15)..(15): 5-methyl modified nucleotide
  modified_base (16)..(16): 5-methyl modified nucleotide
  modified_base (17)..(17): 5-methyl modified nucleotide
  modified_base (19)..(19): bicyclic nucleic acid (BNA)
  source: /note="3' tri-ethylene glycol (TEG)"
aaguucuguccaagcccgg

SEQ ID NO: 17107 - RNA, 18 nt, Artificial Sequence
  source: /note="Description of Artificial Sequence: Synthetic oligonucleotide"
  source: /note="RNA"
  source: /note="5' tri-ethylene glycol (TEG)"
  modified_base (1)..(1): bicyclic nucleic acid (BNA)
  modified_base (6)..(6): 5-methyl modified nucleotide
  modified_base (10)..(10): 5-methyl modified nucleotide
  modified_base (11)..(11): 5-methyl modified nucleotide
  modified_base (15)..(15): 5-methyl modified nucleotide
  modified_base (16)..(16): 5-methyl modified nucleotide
  modified_base (17)..(17): 5-methyl modified nucleotide
  modified_base (18)..(18): bicyclic nucleic acid (BNA)
  source: /note="3' tri-ethylene glycol (TEG)"
aaguucuguccaagcccg

SEQ ID NO: 17108 - RNA, 17 nt, Artificial Sequence
  source: /note="Description of Artificial Sequence: Synthetic oligonucleotide"
  source: /note="RNA"
  source: /note="5' tri-ethylene glycol (TEG)"
  modified_base (1)..(1): bicyclic nucleic acid (BNA)
  modified_base (6)..(6): 5-methyl modified nucleotide
  modified_base (10)..(10): 5-methyl modified nucleotide
  modified_base (11)..(11): 5-methyl modified nucleotide
  modified_base (15)..(15): 5-methyl modified nucleotide
  modified_base (16)..(16): 5-methyl modified nucleotide
  modified_base (17)..(17): 5-methyl bicyclic nucleic acid
  source: /note="3' tri-ethylene glycol (TEG)"
aaguucuguccaagccc

SEQ ID NO: 17109 - RNA, 16 nt, Artificial Sequence
  source: /note="Description of Artificial Sequence: Synthetic oligonucleotide"
  source: /note="RNA"
  source: /note="5' tri-ethylene glycol (TEG)"
  modified_base (1)..(1): bicyclic nucleic acid (BNA)
  modified_base (6)..(6): 5-methyl modified nucleotide
  modified_base (10)..(10): 5-methyl modified nucleotide
  modified_base (11)..(11): 5-methyl modified nucleotide
  modified_base (15)..(15): 5-methyl modified nucleotide
  modified_base (16)..(16): 5-methyl bicyclic nucleic acid
  source: /note="3' tri-ethylene glycol (TEG)"
aaguucuguccaagcc

SEQ ID NO: 17110 - RNA, 15 nt, Artificial Sequence
  source: /note="Description of Artificial Sequence: Synthetic oligonucleotide"
  source: /note="RNA"
  source: /note="5' tri-ethylene glycol (TEG)"
  modified_base (1)..(1): bicyclic nucleic acid (BNA)
  modified_base (6)..(6): 5-methyl modified nucleotide
  modified_base (10)..(10): 5-methyl modified nucleotide
  modified_base (11)..(11): 5-methyl modified nucleotide
  modified_base (15)..(15): 5-methyl bicyclic nucleic acid
  source: /note="3' tri-ethylene glycol (TEG)"
aaguucuguccaagc

SEQ ID NO: 17111 - RNA, 14 nt, Artificial Sequence
  source: /note="Description of Artificial Sequence: Synthetic oligonucleotide"
  source: /note="RNA"
  source: /note="5' tri-ethylene glycol (TEG)"
  modified_base (1)..(1): bicyclic nucleic acid (BNA)
  modified_base (6)..(6): 5-methyl modified nucleotide
  modified_base (10)..(10): 5-methyl modified nucleotide
  modified_base (11)..(11): 5-methyl modified nucleotide
  modified_base (14)..(14): bicyclic nucleic acid (BNA)
  source: /note="3' tri-ethylene glycol (TEG)"
aaguucuguccaag

SEQ ID NO: 17112 - RNA, 13 nt, Artificial Sequence
  source: /note="Description of Artificial Sequence: Synthetic oligonucleotide"
  source: /note="RNA"
  source: /note="5' tri-ethylene glycol (TEG)"
  modified_base (1)..(1): bicyclic nucleic acid (BNA)
  modified_base (6)..(6): 5-methyl modified nucleotide
  modified_base (10)..(10): 5-methyl modified nucleotide
  modified_base (11)..(11): 5-methyl modified nucleotide
  modified_base (13)..(13): bicyclic nucleic acid (BNA)
  source: /note="3' tri-ethylene glycol (TEG)"
aaguucuguccaa

SEQ ID NO: 17113 - RNA, 12 nt, Artificial Sequence
  source: /note="Description of Artificial Sequence: Synthetic oligonucleotide"
  source: /note="RNA"
  source: /note="5' tri-ethylene glycol (TEG)"
  modified_base (1)..(1): bicyclic nucleic acid (BNA)
  modified_base (6)..(6): 5-methyl modified nucleotide
  modified_base (10)..(10): 5-methyl modified nucleotide
  modified_base (11)..(11): 5-methyl modified nucleotide
  modified_base (12)..(12): bicyclic nucleic acid (BNA)
  source: /note="3' tri-ethylene glycol (TEG)"
aaguucugucca

SEQ ID NO: 17114 - RNA, 11 nt, Artificial Sequence
  source: /note="Description of Artificial Sequence: Synthetic oligonucleotide"
  source: /note="RNA"
  source: /note="5' tri-ethylene glycol (TEG)"
  modified_base (1)..(1): bicyclic nucleic acid (BNA)
  modified_base (6)..(6): 5-methyl modified nucleotide
  modified_base (10)..(10): 5-methyl modified nucleotide
  modified_base (11)..(11): 5-methyl bicyclic nucleic acid
  source: /note="3' tri-ethylene glycol (TEG)"
aaguucugucc

SEQ ID NO: 17115 - RNA, 10 nt, Artificial Sequence
  source: /note="Description of Artificial Sequence: Synthetic oligonucleotide"
  source: /note="RNA"
  source: /note="5' tri-ethylene glycol (TEG)"
  modified_base (1)..(1): bicyclic nucleic acid (BNA)
  modified_base (6)..(6): 5-methyl modified nucleotide
  modified_base (10)..(10): 5-methyl bicyclic nucleic acid
  source: /note="3' tri-ethylene glycol (TEG)"
aaguucuguc

SEQ ID NO: 17116 - DNA, 9 bp, Artificial Sequence
  source: /note="Description of Artificial Sequence: Synthetic oligonucleotide"
  source: /note="Description of Combined DNA/RNA Molecule: Synthetic oligonucleotide"
  source: /note="DNA/RNA"
  source: /note="5' tri-ethylene glycol (TEG)"
  modified_base (1)..(1): bicyclic nucleic acid (BNA)
  modified_base (6)..(6): 5-methyl modified nucleotide
  modified_base (9)..(9): bicyclic nucleic acid (BNA)
  source: /note="3' tri-ethylene glycol (TEG)"
aaguucugt

SEQ ID NO: 17117 - RNA, 8 nt, Artificial Sequence
  source: /note="Description of Artificial Sequence: Synthetic oligonucleotide"
  source: /note="RNA"
  source: /note="5' tri-ethylene glycol (TEG)"
  modified_base (1)..(1): bicyclic nucleic acid (BNA)
  modified_base (6)..(6): 5-methyl modified nucleotide
  modified_base (8)..(8): bicyclic nucleic acid (BNA)
  source: /note="3' tri-ethylene glycol (TEG)"
aaguucug

SEQ ID NO: 17118 - DNA, 20 bp, Artificial Sequence
  source: /note="Description of Artificial Sequence: Synthetic oligonucleotide"
  source: /note="Description of Combined DNA/RNA Molecule: Synthetic oligonucleotide"
  source: /note="DNA/RNA"
  source: /note="5' tri-ethylene glycol (TEG)"
  modified_base (1)..(1): bicyclic nucleic acid (BNA)
  modified_base (7)..(7): 5-methyl modified nucleotide
  modified_base (11)..(11): 5-methyl modified nucleotide
  modified_base (12)..(12): 5-methyl modified nucleotide
  modified_base (16)..(16): 5-methyl modified nucleotide
  modified_base (17)..(17): 5-methyl modified nucleotide
  modified_base (18)..(18): 5-methyl modified nucleotide
  modified_base (20)..(20): bicyclic nucleic acid (BNA)
  source: /note="3' tri-ethylene glycol (TEG)"
taaguucuguccaagcccgg

SEQ ID NO: 17119 - DNA, 19 bp, Artificial Sequence
  source: /note="Description of Artificial Sequence: Synthetic oligonucleotide"
  source: /note="Description of Combined DNA/RNA Molecule: Synthetic oligonucleotide"
  source: /note="DNA/RNA"
  source: /note="5' tri-ethylene glycol (TEG)"
  modified_base (1)..(1): bicyclic nucleic acid (BNA)
  modified_base (7)..(7): 5-methyl modified nucleotide
  modified_base (11)..(11): 5-methyl modified nucleotide
  modified_base (12)..(12): 5-methyl modified nucleotide
  modified_base (16)..(16): 5-methyl modified nucleotide
  modified_base (17)..(17): 5-methyl modified nucleotide
  modified_base (18)..(18): 5-methyl modified nucleotide
  modified_base (19)..(19): bicyclic nucleic acid (BNA)
  source: /note="3' tri-ethylene glycol (TEG)"
taaguucuguccaagcccg

SEQ ID NO: 17120 - DNA, 18 bp, Artificial Sequence
  source: /note="Description of Artificial Sequence: Synthetic oligonucleotide"
  source: /note="Description of Combined DNA/RNA Molecule: Synthetic oligonucleotide"
  source: /note="DNA/RNA"
  source: /note="5' tri-ethylene glycol (TEG)"
  modified_base (1)..(1): bicyclic nucleic acid (BNA)
  modified_base (7)..(7): 5-methyl modified nucleotide
  modified_base (11)..(11): 5-methyl modified nucleotide
  modified_base (12)..(12): 5-methyl modified nucleotide
  modified_base (16)..(16): 5-methyl modified nucleotide
  modified_base (17)..(17): 5-methyl modified nucleotide
  modified_base (18)..(18): 5-methyl bicyclic nucleic acid
  source: /note="3' tri-ethylene glycol (TEG)"
taaguucuguccaagccc

SEQ ID NO: 17121 - DNA, 17 bp, Artificial Sequence
  source: /note="Description of Artificial Sequence: Synthetic oligonucleotide"
  source: /note="Description of Combined DNA/RNA Molecule: Synthetic oligonucleotide"
  source: /note="DNA/RNA"
  source: /note="5' tri-ethylene glycol (TEG)"
  modified_base (1)..(1): bicyclic nucleic acid (BNA)
  modified_base (7)..(7): 5-methyl modified nucleotide
  modified_base (11)..(11): 5-methyl modified nucleotide
  modified_base (12)..(12): 5-methyl modified nucleotide
  modified_base (16)..(16): 5-methyl modified nucleotide
  modified_base (17)..(17): 5-methyl bicyclic nucleic acid
  source: /note="3' tri-ethylene glycol (TEG)"
taaguucuguccaagcc

SEQ ID NO: 17122 - DNA, 16 bp, Artificial Sequence
  source: /note="Description of Artificial Sequence: Synthetic oligonucleotide"
  source: /note="Description of Combined DNA/RNA Molecule: Synthetic oligonucleotide"
  source: /note="DNA/RNA"
  source: /note="5' tri-ethylene glycol (TEG)"
  modified_base (1)..(1): bicyclic nucleic acid (BNA)
  modified_base (7)..(7): 5-methyl modified nucleotide
  modified_base (11)..(11): 5-methyl modified nucleotide
  modified_base (12)..(12): 5-methyl modified nucleotide
  modified_base (16)..(16): 5-methyl bicyclic nucleic acid
  source: /note="3' tri-ethylene glycol (TEG)"
taaguucuguccaagc

SEQ ID NO: 17123 - DNA, 14 bp, Artificial Sequence
  source: /note="Description of Artificial Sequence: Synthetic oligonucleotide"
  source: /note="Description of Combined DNA/RNA Molecule: Synthetic oligonucleotide"
  source: /note="DNA/RNA"
  source: /note="5' tri-ethylene glycol (TEG)"
  modified_base (1)..(1): bicyclic nucleic acid (BNA)
  modified_base (7)..(7): 5-methyl modified nucleotide
  modified_base (11)..(11): 5-methyl modified nucleotide
  modified_base (12)..(12): 5-methyl modified nucleotide
  modified_base (14)..(14): bicyclic nucleic acid (BNA)
  source: /note="3' tri-ethylene glycol (TEG)"
taaguucuguccaa

SEQ ID NO: 17124 - DNA, 13 bp, Artificial Sequence
  source: /note="Description of Artificial Sequence: Synthetic oligonucleotide"
  source: /note="Description of Combined DNA/RNA Molecule: Synthetic oligonucleotide"
  source: /note="DNA/RNA"
  source: /note="5' tri-ethylene glycol (TEG)"
  modified_base (1)..(1): bicyclic nucleic acid (BNA)
  modified_base (7)..(7): 5-methyl modified nucleotide
  modified_base (11)..(11): 5-methyl modified nucleotide
  modified_base (12)..(12): 5-methyl modified nucleotide
  modified_base (13)..(13): bicyclic nucleic acid (BNA)
  source: /note="3' tri-ethylene glycol (TEG)"
taaguucugucca

SEQ ID NO: 17125 - DNA, 12 bp, Artificial Sequence
  source: /note="Description of Artificial Sequence: Synthetic oligonucleotide"
  source: /note="Description of Combined DNA/RNA Molecule: Synthetic oligonucleotide"
  source: /note="DNA/RNA"
  source: /note="5' tri-ethylene glycol (TEG)"
  modified_base (1)..(1): bicyclic nucleic acid (BNA)
  modified_base (7)..(7): 5-methyl modified nucleotide
  modified_base (11)..(11): 5-methyl modified nucleotide
  modified_base (12)..(12): 5-methyl bicyclic nucleic acid
  source: /note="3' tri-ethylene glycol (TEG)"
taaguucugucc

SEQ ID NO: 17126 - DNA, 11 bp, Artificial Sequence
  source: /note="Description of Artificial Sequence: Synthetic oligonucleotide"
  source: /note="Description of Combined DNA/RNA Molecule: Synthetic oligonucleotide"
  source: /note="DNA/RNA"
  source: /note="5' tri-ethylene glycol (TEG)"
  modified_base (1)..(1): bicyclic nucleic acid (BNA)
  modified_base (7)..(7): 5-methyl modified nucleotide
  modified_base (11)..(11): 5-methyl bicyclic nucleic acid
  source: /note="3' tri-ethylene glycol (TEG)"
taaguucuguc

SEQ ID NO: 17127 - DNA, 10 bp, Artificial Sequence
  source: /note="Description of Artificial Sequence: Synthetic oligonucleotide"
  source: /note="Description of Combined DNA/RNA Molecule: Synthetic oligonucleotide"
  source: /note="DNA/RNA"
  source: /note="5' tri-ethylene glycol (TEG)"
  modified_base (1)..(1): bicyclic nucleic acid (BNA)
  modified_base (7)..(7): 5-methyl modified nucleotide
  modified_base (10)..(10): bicyclic nucleic acid (BNA)
  source: /note="3' tri-ethylene glycol (TEG)"
taaguucugt

SEQ ID NO: 17128 - DNA, 9 bp, Artificial Sequence
  source: /note="Description of Artificial Sequence: Synthetic oligonucleotide"
  source: /note="Description of Combined DNA/RNA Molecule: Synthetic oligonucleotide"
  source: /note="DNA/RNA"
  source: /note="5' tri-ethylene glycol (TEG)"
  modified_base (1)..(1): bicyclic nucleic acid (BNA)
  modified_base (7)..(7): 5-methyl modified nucleotide
  modified_base (9)..(9): bicyclic nucleic acid (BNA)
  source: /note="3' tri-ethylene glycol (TEG)"
taaguucug

SEQ ID NO: 17129 - DNA, 8 bp, Artificial Sequence
  source: /note="Description of Artificial Sequence: Synthetic oligonucleotide"
  source: /note="Description of Combined DNA/RNA Molecule: Synthetic oligonucleotide"
  source: /note="DNA/RNA"
  source: /note="5' tri-ethylene glycol (TEG)"
  modified_base (1)..(1): bicyclic nucleic acid (BNA)
  modified_base (7)..(7): 5-methyl modified nucleotide
  modified_base (8)..(8): bicyclic nucleic acid (BNA)
  source: /note="3' tri-ethylene glycol (TEG)"
taaguuct

SEQ ID NO: 17130 - RNA, 20 nt, Artificial Sequence
  source: /note="Description of Artificial Sequence: Synthetic oligonucleotide"
  source: /note="RNA"
  source: /note="5' tri-ethylene glycol (TEG)"
  modified_base (1)..(1): bicyclic nucleic acid (BNA)
  modified_base (8)..(8): 5-methyl modified nucleotide
  modified_base (12)..(12): 5-methyl modified nucleotide
  modified_base (13)..(13): 5-methyl modified nucleotide
  modified_base (17)..(17): 5-methyl modified nucleotide
  modified_base (18)..(18): 5-methyl modified nucleotide
  modified_base (19)..(19): 5-methyl modified nucleotide
  modified_base (20)..(20): bicyclic nucleic acid (BNA)
  source: /note="3' tri-ethylene glycol (TEG)"
guaaguucuguccaagcccg

SEQ ID NO: 17131 - RNA, 19 nt, Artificial Sequence
  source: /note="Description of Artificial Sequence: Synthetic oligonucleotide"
  source: /note="RNA"
  source: /note="5' tri-ethylene glycol (TEG)"
  modified_base (1)..(1): bicyclic nucleic acid (BNA)
  modified_base (8)..(8): 5-methyl modified nucleotide
  modified_base (12)..(12): 5-methyl modified nucleotide
  modified_base (13)..(13): 5-methyl modified nucleotide
  modified_base (17)..(17): 5-methyl modified nucleotide
  modified_base (18)..(18): 5-methyl modified nucleotide
  modified_base (19)..(19): 5-methyl bicyclic nucleic acid
  source: /note="3' tri-ethylene glycol (TEG)"
guaaguucuguccaagccc

SEQ ID NO: 17132 - RNA, 17 nt, Artificial Sequence
  source: /note="Description of Artificial Sequence: Synthetic oligonucleotide"
  source: /note="RNA"
  source: /note="5' tri-ethylene glycol (TEG)"
  modified_base (1)..(1): bicyclic nucleic acid (BNA)
  modified_base (8)..(8): 5-methyl modified nucleotide
  modified_base (12)..(12): 5-methyl modified nucleotide
  modified_base (13)..(13): 5-methyl modified nucleotide
  modified_base (17)..(17): 5-methyl bicyclic nucleic acid
  source: /note="3' tri-ethylene glycol (TEG)"
guaaguucuguccaagc

SEQ ID NO: 17133 - RNA, 16 nt, Artificial Sequence
  source: /note="Description of Artificial Sequence: Synthetic oligonucleotide"
  source: /note="RNA"
  source: /note="5' tri-ethylene glycol (TEG)"
  modified_base (1)..(1): bicyclic nucleic acid (BNA)
  modified_base (8)..(8): 5-methyl modified nucleotide
  modified_base (12)..(12): 5-methyl modified nucleotide
  modified_base (13)..(13): 5-methyl modified nucleotide
  modified_base (16)..(16): bicyclic nucleic acid (BNA)
  source: /note="3' tri-ethylene glycol (TEG)"
guaaguucuguccaag

SEQ ID NO: 17134 - RNA, 15 nt, Artificial Sequence
  source: /note="Description of Artificial Sequence: Synthetic oligonucleotide"
  source: /note="RNA"
  source: /note="5' tri-ethylene glycol (TEG)"
  modified_base (1)..(1): bicyclic nucleic acid (BNA)
  modified_base (8)..(8): 5-methyl modified nucleotide
  modified_base (12)..(12): 5-methyl modified nucleotide
  modified_base (13)..(13): 5-methyl modified nucleotide
  modified_base (15)..(15): bicyclic nucleic acid (BNA)
  source: /note="3' tri-ethylene glycol (TEG)"
guaaguucuguccaa

SEQ ID NO: 17135 - RNA, 14 nt, Artificial Sequence
  source: /note="Description of Artificial Sequence: Synthetic oligonucleotide"
  source: /note="RNA"
  source: /note="5' tri-ethylene glycol (TEG)"
  modified_base (1)..(1): bicyclic nucleic acid (BNA)
  modified_base (8)..(8): 5-methyl modified nucleotide
  modified_base (12)..(12): 5-methyl modified nucleotide
  modified_base (13)..(13): 5-methyl modified nucleotide
  modified_base (14)..(14): bicyclic nucleic acid (BNA)
  source: /note="3' tri-ethylene glycol (TEG)"
guaaguucugucca

SEQ ID NO: 17136 - RNA, 13 nt, Artificial Sequence
  source: /note="Description of Artificial Sequence: Synthetic oligonucleotide"
  source: /note="RNA"
  source: /note="5' tri-ethylene glycol (TEG)"
  modified_base (1)..(1): bicyclic nucleic acid (BNA)
  modified_base (8)..(8): 5-methyl modified nucleotide
  modified_base (12)..(12): 5-methyl modified nucleotide
  modified_base (13)..(13): 5-methyl bicyclic nucleic acid
  source: /note="3' tri-ethylene glycol (TEG)"
guaaguucugucc

SEQ ID NO: 17137 - RNA, 12 nt, Artificial Sequence
  source: /note="Description of Artificial Sequence: Synthetic oligonucleotide"
  source: /note="RNA"
  source: /note="5' tri-ethylene glycol (TEG)"
  modified_base (1)..(1): bicyclic nucleic acid (BNA)
  modified_base (8)..(8): 5-methyl modified nucleotide
  modified_base (12)..(12): 5-methyl bicyclic nucleic acid
  source: /note="3' tri-ethylene glycol (TEG)"
guaaguucuguc

SEQ ID NO: 17138 - DNA, 11 bp, Artificial Sequence
  source: /note="Description of Artificial Sequence: Synthetic oligonucleotide"
  source: /note="Description of Combined DNA/RNA Molecule: Synthetic oligonucleotide"
  source: /note="DNA/RNA"
  source: /note="5' tri-ethylene glycol (TEG)"
  modified_base (1)..(1): bicyclic nucleic acid (BNA)
  modified_base (8)..(8): 5-methyl modified nucleotide
  modified_base (11)..(11): bicyclic nucleic acid (BNA)
  source: /note="3' tri-ethylene glycol (TEG)"
guaaguucugt

SEQ ID NO: 17139 - RNA, 10 nt, Artificial Sequence
  source: /note="Description of Artificial Sequence: Synthetic oligonucleotide"
  source: /note="RNA"
  source: /note="5' tri-ethylene glycol (TEG)"
  modified_base (1)..(1): bicyclic nucleic acid (BNA)
  modified_base (8)..(8): 5-methyl modified nucleotide
  modified_base (10)..(10): bicyclic nucleic acid (BNA)
  source: /note="3' tri-ethylene glycol (TEG)"
guaaguucug

SEQ ID NO: 17140 - DNA, 9 bp, Artificial Sequence
  source: /note="Description of Artificial Sequence: Synthetic oligonucleotide"
  source: /note="Description of Combined DNA/RNA Molecule: Synthetic oligonucleotide"
  source: /note="DNA/RNA"
  source: /note="5' tri-ethylene glycol (TEG)"
  modified_base (1)..(1): bicyclic nucleic acid (BNA)
  modified_base (8)..(8): 5-methyl modified nucleotide
  modified_base (9)..(9): bicyclic nucleic acid (BNA)
  source: /note="3' tri-ethylene glycol (TEG)"
guaaguuct

SEQ ID NO: 17141 - RNA, 8 nt, Artificial Sequence
  source: /note="Description of Artificial Sequence: Synthetic oligonucleotide"
  source: /note="RNA"
  source: /note="5' tri-ethylene glycol (TEG)"
  modified_base (1)..(1): bicyclic nucleic acid (BNA)
  modified_base (8)..(8): 5-methyl bicyclic nucleic acid
  source: /note="3' tri-ethylene glycol (TEG)"
guaaguuc

SEQ ID NO: 17142 - RNA, 20 nt, Artificial Sequence
  source: /note="Description of Artificial Sequence: Synthetic oligonucleotide"
  source: /note="RNA"
  source: /note="5' tri-ethylene glycol (TEG)"
  modified_base (1)..(1): bicyclic nucleic acid (BNA)
  modified_base (9)..(9): 5-methyl modified nucleotide
  modified_base (13)..(13): 5-methyl modified nucleotide
  modified_base (14)..(14): 5-methyl modified nucleotide
  modified_base (18)..(18): 5-methyl modified nucleotide
  modified_base (19)..(19): 5-methyl modified nucleotide
  modified_base (20)..(20): 5-methyl bicyclic nucleic acid
  source: /note="3' tri-ethylene glycol (TEG)"
gguaaguucuguccaagccc

SEQ ID NO: 17143 - RNA, 19 nt, Artificial Sequence
  source: /note="Description of Artificial Sequence: Synthetic oligonucleotide"
  source: /note="RNA"
  source: /note="5' tri-ethylene glycol (TEG)"
  modified_base (1)..(1): bicyclic nucleic acid (BNA)
  modified_base (9)..(9): 5-methyl modified nucleotide
  modified_base (13)..(13): 5-methyl modified nucleotide
  modified_base (14)..(14): 5-methyl modified nucleotide
  modified_base (18)..(18): 5-methyl modified nucleotide
  modified_base (19)..(19): 5-methyl bicyclic nucleic acid
  source: /note="3' tri-ethylene glycol (TEG)"
gguaaguucuguccaagcc

SEQ ID NO: 17144 - RNA, 17 nt, Artificial Sequence
  source: /note="Description of Artificial Sequence: Synthetic oligonucleotide"
  source: /note="RNA"
  source: /note="5' tri-ethylene glycol (TEG)"
  modified_base (1)..(1): bicyclic nucleic acid (BNA)
  modified_base (9)..(9): 5-methyl modified nucleotide
  modified_base (13)..(13): 5-methyl modified nucleotide
  modified_base (14)..(14): 5-methyl modified nucleotide
  modified_base (17)..(17): bicyclic nucleic acid (BNA)
  source: /note="3' tri-ethylene glycol (TEG)"
gguaaguucuguccaag

SEQ ID NO: 17145 - RNA, 16 nt, Artificial Sequence
  source: /note="Description of Artificial Sequence: Synthetic oligonucleotide"
  source: /note="RNA"
  source: /note="5' tri-ethylene glycol (TEG)"
  modified_base (1)..(1): bicyclic nucleic acid (BNA)
  modified_base (9)..(9): 5-methyl modified nucleotide
  modified_base (13)..(13): 5-methyl modified nucleotide
  modified_base (14)..(14): 5-methyl modified nucleotide
  modified_base (16)..(16): bicyclic nucleic acid (BNA)
  source: /note="3' tri-ethylene glycol (TEG)"
gguaaguucuguccaa

SEQ ID NO: 17146 - RNA, 15 nt, Artificial Sequence
  source: /note="Description of Artificial Sequence: Synthetic oligonucleotide"
  source: /note="RNA"
  source: /note="5' tri-ethylene glycol (TEG)"
  modified_base (1)..(1): bicyclic nucleic acid (BNA)
  modified_base (9)..(9): 5-methyl modified nucleotide
  modified_base (13)..(13): 5-methyl modified nucleotide
  modified_base (14)..(14): 5-methyl modified nucleotide
  modified_base (15)..(15): bicyclic nucleic acid (BNA)
  source: /note="3' tri-ethylene glycol (TEG)"
gguaaguucugucca

SEQ ID NO: 17147 - RNA, 14 nt, Artificial Sequence
  source: /note="Description of Artificial Sequence: Synthetic oligonucleotide"
  source: /note="RNA"
  source: /note="5' tri-ethylene glycol (TEG)"
  modified_base (1)..(1): bicyclic nucleic acid (BNA)
  modified_base (9)..(9): 5-methyl modified nucleotide
  modified_base (13)..(13): 5-methyl modified nucleotide
  modified_base (14)..(14): 5-methyl bicyclic nucleic acid
  source: /note="3' tri-ethylene glycol (TEG)"
gguaaguucugucc

SEQ ID NO: 17148 - RNA, 13 nt, Artificial Sequence
  source: /note="Description of Artificial Sequence: Synthetic oligonucleotide"
  source: /note="RNA"
  source: /note="5' tri-ethylene glycol (TEG)"
  modified_base (1)..(1): bicyclic nucleic acid (BNA)
  modified_base (9)..(9): 5-methyl modified nucleotide
  modified_base (13)..(13): 5-methyl bicyclic nucleic acid
  source: /note="3' tri-ethylene glycol (TEG)"
gguaaguucuguc

SEQ ID NO: 17149 - DNA, 12 bp, Artificial Sequence
  source: /note="Description of Artificial Sequence: Synthetic oligonucleotide"
  source: /note="Description of Combined DNA/RNA Molecule: Synthetic oligonucleotide"
  source: /note="DNA/RNA"
  source: /note="5' tri-ethylene glycol (TEG)"
  modified_base (1)..(1): bicyclic nucleic acid (BNA)
  modified_base (9)..(9): 5-methyl modified nucleotide
  modified_base (12)..(12): bicyclic nucleic acid (BNA)
  source: /note="3' tri-ethylene glycol (TEG)"
gguaaguucugt

SEQ ID NO: 17150 - RNA, 11 nt, Artificial Sequence
  source: /note="Description of Artificial Sequence: Synthetic oligonucleotide"
  source: /note="RNA"
  source: /note="5' tri-ethylene glycol (TEG)"
  modified_base (1)..(1): bicyclic nucleic acid (BNA)
  modified_base (9)..(9): 5-methyl modified nucleotide
  modified_base (11)..(11): bicyclic nucleic acid (BNA)
  source: /note="3' tri-ethylene glycol (TEG)"
gguaaguucug

SEQ ID NO: 17151 - DNA, 10 bp, Artificial Sequence
  source: /note="Description of Artificial Sequence: Synthetic oligonucleotide"
  source: /note="Description of Combined DNA/RNA Molecule: Synthetic oligonucleotide"
  source: /note="DNA/RNA"
  source: /note="5' tri-ethylene glycol (TEG)"
  modified_base (1)..(1): bicyclic nucleic acid (BNA)
  modified_base (9)..(9): 5-methyl modified nucleotide
  modified_base (10)..(10): bicyclic nucleic acid (BNA)
  source: /note="3' tri-ethylene glycol (TEG)"
gguaaguuct

SEQ ID NO: 17152 - RNA, 9 nt, Artificial Sequence
  source: /note="Description of Artificial Sequence: Synthetic oligonucleotide"
  source: /note="RNA"
  source: /note="5' tri-ethylene glycol (TEG)"
  modified_base (1)..(1): bicyclic nucleic acid (BNA)
  modified_base (9)..(9): 5-methyl bicyclic nucleic acid
  source: /note="3' tri-ethylene glycol (TEG)"
gguaaguuc

SEQ ID NO: 17153 - DNA, 8 bp, Artificial Sequence
  source: /note="Description of Artificial Sequence: Synthetic oligonucleotide"
  source: /note="Description of Combined DNA/RNA Molecule: Synthetic oligonucleotide"
  source: /note="DNA/RNA"
  source: /note="5' tri-ethylene glycol (TEG)"
  modified_base (1)..(1): bicyclic nucleic acid (BNA)
  modified_base (8)..(8): bicyclic nucleic acid (BNA)
  source: /note="3' tri-ethylene glycol (TEG)"
gguaagut

SEQ ID NO: 17154 - RNA, 20 nt, Artificial Sequence
  source: /note="Description of Artificial Sequence: Synthetic oligonucleotide"
  source: /note="RNA"
  source: /note="5' tri-ethylene glycol (TEG)"
  modified_base (1)..(1): 5-methyl bicyclic nucleic acid
  modified_base (10)..(10): 5-methyl modified nucleotide
  modified_base (14)..(14): 5-methyl modified nucleotide
  modified_base (15)..(15): 5-methyl modified nucleotide
  modified_base (19)..(19): 5-methyl modified nucleotide
  modified_base (20)..(20): 5-methyl bicyclic nucleic acid
  source: /note="3' tri-ethylene glycol (TEG)"
cgguaaguucuguccaagcc

SEQ ID NO: 17155 - RNA, 19 nt, Artificial Sequence
  source: /note="Description of Artificial Sequence: Synthetic oligonucleotide"
  source: /note="RNA"
  source: /note="5' tri-ethylene glycol (TEG)"
  modified_base (1)..(1): 5-methyl bicyclic nucleic acid
  modified_base (10)..(10): 5-methyl modified nucleotide
  modified_base (14)..(14): 5-methyl modified nucleotide
  modified_base (15)..(15): 5-methyl modified nucleotide
  modified_base (19)..(19): 5-methyl bicyclic nucleic acid
  source: /note="3' tri-ethylene glycol (TEG)"
cgguaaguucuguccaagc

SEQ ID NO: 17156 - RNA, 18 nt, Artificial Sequence
  source: /note="Description of Artificial Sequence: Synthetic oligonucleotide"
  source: /note="RNA"
  source: /note="5' tri-ethylene glycol (TEG)"
  modified_base (1)..(1): 5-methyl bicyclic nucleic acid
  modified_base (10)..(10): 5-methyl modified nucleotide
  modified_base (14)..(14): 5-methyl modified nucleotide
  modified_base (15)..(15): 5-methyl modified nucleotide
  modified_base (18)..(18): bicyclic nucleic acid (BNA)
  source: /note="3' tri-ethylene glycol (TEG)"
cgguaaguucuguccaag

SEQ ID NO: 17157 - RNA, 17 nt, Artificial Sequence
  source: /note="Description of Artificial Sequence: Synthetic oligonucleotide"
  source: /note="RNA"
  source: /note="5' tri-ethylene glycol (TEG)"
  modified_base (1)..(1): 5-methyl bicyclic nucleic acid
  modified_base (10)..(10): 5-methyl modified nucleotide
  modified_base (14)..(14): 5-methyl modified nucleotide
  modified_base (15)..(15): 5-methyl modified nucleotide
  modified_base (17)..(17): bicyclic nucleic acid (BNA)
  source: /note="3' tri-ethylene glycol (TEG)"
cgguaaguucuguccaa

SEQ ID NO: 17158 - RNA, 16 nt, Artificial Sequence
  source: /note="Description of Artificial Sequence: Synthetic oligonucleotide"
  source: /note="RNA"
  source: /note="5' tri-ethylene glycol (TEG)"
  modified_base (1)..(1): 5-methyl bicyclic nucleic acid
  modified_base (10)..(10): 5-methyl modified nucleotide
  modified_base (14)..(14): 5-methyl modified nucleotide
  modified_base (15)..(15): 5-methyl modified nucleotide
  modified_base (16)..(16): bicyclic nucleic acid (BNA)
  source: /note="3' tri-ethylene glycol (TEG)"
cgguaaguucugucca

SEQ ID NO: 17159 - RNA, 15 nt, Artificial Sequence
  source: /note="Description of Artificial Sequence: Synthetic oligonucleotide"
  source: /note="RNA"
  source: /note="5' tri-ethylene glycol (TEG)"
  modified_base (1)..(1): 5-methyl bicyclic nucleic acid
  modified_base (10)..(10): 5-methyl modified nucleotide
  modified_base (14)..(14): 5-methyl modified nucleotide
  modified_base (15)..(15): 5-methyl bicyclic nucleic acid
  source: /note="3' tri-ethylene glycol (TEG)"
cgguaaguucugucc

SEQ ID NO: 17160 - RNA, 14 nt, Artificial Sequence
  source: /note="Description of Artificial Sequence: Synthetic oligonucleotide"
  source: /note="RNA"
  source: /note="5' tri-ethylene glycol (TEG)"
  modified_base (1)..(1): 5-methyl bicyclic nucleic acid
  modified_base (10)..(10): 5-methyl modified nucleotide
  modified_base (14)..(14): 5-methyl bicyclic nucleic acid
  source: /note="3' tri-ethylene glycol (TEG)"
cgguaaguucuguc

SEQ ID NO: 17161 - DNA, 13 bp, Artificial Sequence
  source: /note="Description of Artificial Sequence: Synthetic oligonucleotide"
  source: /note="Description of Combined DNA/RNA Molecule: Synthetic oligonucleotide"
  source: /note="DNA/RNA"
  source: /note="5' tri-ethylene glycol (TEG)"
  modified_base (1)..(1): 5-methyl bicyclic nucleic acid
  modified_base (10)..(10): 5-methyl modified nucleotide
  modified_base (13)..(13): bicyclic nucleic acid (BNA)
  source: /note="3' tri-ethylene glycol (TEG)"
cgguaaguucugt

SEQ ID NO: 17162 - RNA, 12 nt, Artificial Sequence
  source: /note="Description of Artificial Sequence: Synthetic oligonucleotide"
  source: /note="RNA"
  source: /note="5' tri-ethylene glycol (TEG)"
  modified_base (1)..(1): 5-methyl bicyclic nucleic acid
  modified_base (10)..(10): 5-methyl modified nucleotide
  modified_base (12)..(12): bicyclic nucleic acid (BNA)
  source: /note="3' tri-ethylene glycol (TEG)"
cgguaaguucug

SEQ ID NO: 17163 - DNA, 11 bp, Artificial Sequence
  source: /note="Description of Artificial Sequence: Synthetic oligonucleotide"
  source: /note="Description of Combined DNA/RNA Molecule: Synthetic oligonucleotide"
  source: /note="DNA/RNA"
  source: /note="5' tri-ethylene glycol (TEG)"
  modified_base (1)..(1): 5-methyl bicyclic nucleic acid
  modified_base (10)..(10): 5-methyl modified nucleotide
  modified_base (11)..(11): bicyclic nucleic acid (BNA)
  source: /note="3' tri-ethylene glycol (TEG)"
cgguaaguuct

SEQ ID NO: 17164 - RNA, 10 nt, Artificial Sequence
  source: /note="Description of Artificial Sequence: Synthetic oligonucleotide"
  source: /note="RNA"
  source: /note="5' tri-ethylene glycol (TEG)"
  modified_base (1)..(1): 5-methyl bicyclic nucleic acid
  modified_base (10)..(10): 5-methyl bicyclic nucleic acid
  source: /note="3' tri-ethylene glycol (TEG)"
cgguaaguuc

SEQ ID NO: 17165 - DNA, 9 bp, Artificial Sequence
  source: /note="Description of Artificial Sequence: Synthetic oligonucleotide"
  source: /note="Description of Combined DNA/RNA Molecule: Synthetic oligonucleotide"
  source: /note="DNA/RNA"
  source: /note="5' tri-ethylene glycol (TEG)"
  modified_base (1)..(1): 5-methyl bicyclic nucleic acid
  modified_base (9)..(9): bicyclic nucleic acid (BNA)
  source: /note="3' tri-ethylene glycol (TEG)"
cgguaagut

SEQ ID NO: 17166 - DNA, 8 bp, Artificial Sequence
  source: /note="Description of Artificial Sequence: Synthetic oligonucleotide"
  source: /note="Description of Combined DNA/RNA Molecule: Synthetic oligonucleotide"
  source: /note="DNA/RNA"
  source: /note="5' tri-ethylene glycol (TEG)"
  modified_base (1)..(1): 5-methyl bicyclic nucleic acid
  modified_base (8)..(8): bicyclic nucleic acid (BNA)
  source: /note="3' tri-ethylene glycol (TEG)"
cgguaagt

SEQ ID NO: 17167 - DNA, 20 bp, Artificial Sequence
  source: /note="Description of Artificial Sequence: Synthetic oligonucleotide"
  source: /note="Description of Combined DNA/RNA Molecule: Synthetic oligonucleotide"
  source: /note="DNA/RNA"
  source: /note="5' tri-ethylene glycol (TEG)"
  modified_base (1)..(1): bicyclic nucleic acid (BNA)
  modified_base (2)..(2): 5-methyl modified nucleotide
  modified_base (11)..(11): 5-methyl modified nucleotide
  modified_base (15)..(15): 5-methyl modified nucleotide
  modified_base (16)..(16): 5-methyl modified nucleotide
  modified_base (20)..(20): 5-methyl bicyclic nucleic acid
  source: /note="3' tri-ethylene glycol (TEG)"
tcgguaaguucuguccaagc

SEQ ID NO: 17168 - DNA, 19 bp, Artificial Sequence
  source: /note="Description of Artificial Sequence: Synthetic oligonucleotide"
  source: /note="Description of Combined DNA/RNA Molecule: Synthetic oligonucleotide"
  source: /note="DNA/RNA"
  source: /note="5' tri-ethylene glycol (TEG)"
  modified_base (1)..(1): bicyclic nucleic acid (BNA)
  modified_base (2)..(2): 5-methyl modified nucleotide
  modified_base (11)..(11): 5-methyl modified nucleotide
  modified_base (15)..(15): 5-methyl modified nucleotide
  modified_base (16)..(16): 5-methyl modified nucleotide
  modified_base (19)..(19): bicyclic nucleic acid (BNA)
  source: /note="3' tri-ethylene glycol (TEG)"
tcgguaaguucuguccaag

SEQ ID NO: 17169 - DNA, 18 bp, Artificial Sequence
  source: /note="Description of Artificial Sequence: Synthetic oligonucleotide"
  source: /note="Description of Combined DNA/RNA Molecule: Synthetic oligonucleotide"
  source: /note="DNA/RNA"
  source: /note="5' tri-ethylene glycol (TEG)"
  modified_base (1)..(1): bicyclic nucleic acid (BNA)
  modified_base (2)..(2): 5-methyl modified nucleotide
  modified_base (11)..(11): 5-methyl modified nucleotide
  modified_base (15)..(15): 5-methyl modified nucleotide
  modified_base (16)..(16): 5-methyl modified nucleotide
  modified_base (18)..(18): bicyclic nucleic acid (BNA)
  source: /note="3' tri-ethylene glycol (TEG)"
tcgguaaguucuguccaa

SEQ ID NO: 17170 - DNA, 17 bp, Artificial Sequence
  source: /note="Description of Artificial Sequence: Synthetic oligonucleotide"
  source: /note="Description of Combined DNA/RNA Molecule: Synthetic oligonucleotide"
  source: /note="DNA/RNA"
  source: /note="5' tri-ethylene glycol (TEG)"
  modified_base (1)..(1): bicyclic nucleic acid (BNA)
  modified_base (2)..(2): 5-methyl modified nucleotide
  modified_base (11)..(11): 5-methyl modified nucleotide
  modified_base (15)..(15): 5-methyl modified nucleotide
  modified_base (16)..(16): 5-methyl modified nucleotide
  modified_base (17)..(17): bicyclic nucleic acid (BNA)
  source: /note="3' tri-ethylene glycol (TEG)"
tcgguaaguucugucca

SEQ ID NO: 17171 - DNA, 16 bp, Artificial Sequence
  source: /note="Description of Artificial Sequence: Synthetic oligonucleotide"
  source: /note="Description of Combined DNA/RNA Molecule: Synthetic oligonucleotide"
  source: /note="DNA/RNA"
  source: /note="5' tri-ethylene glycol (TEG)"
  modified_base (1)..(1): bicyclic nucleic acid (BNA)
  modified_base (2)..(2): 5-methyl modified nucleotide
  modified_base (11)..(11): 5-methyl modified nucleotide
  modified_base (15)..(15): 5-methyl modified nucleotide
  modified_base (16)..(16): 5-methyl bicyclic nucleic acid
  source: /note="3' tri-ethylene glycol (TEG)"
tcgguaaguucugucc

SEQ ID NO: 17172 - DNA, 15 bp, Artificial Sequence
  source: /note="Description of Artificial Sequence: Synthetic oligonucleotide"
  source: /note="Description of Combined DNA/RNA Molecule: Synthetic oligonucleotide"
  source: /note="DNA/RNA"
  source: /note="5' tri-ethylene glycol (TEG)"
  modified_base (1)..(1): bicyclic nucleic acid (BNA)
  modified_base (2)..(2): 5-methyl modified nucleotide
  modified_base (11)..(11): 5-methyl modified nucleotide
  modified_base (15)..(15): 5-methyl bicyclic nucleic acid
  source: /note="3' tri-ethylene glycol (TEG)"
tcgguaaguucuguc

SEQ ID NO: 17173 - DNA, 14 bp, Artificial Sequence
  source: /note="Description of Artificial Sequence: Synthetic oligonucleotide"
  source: /note="Description of Combined DNA/RNA Molecule: Synthetic oligonucleotide"
  source: /note="DNA/RNA"
  source: /note="5' tri-ethylene glycol (TEG)"
  modified_base (1)..(1): bicyclic nucleic acid (BNA)
  modified_base (2)..(2): 5-methyl modified nucleotide
  modified_base (11)..(11): 5-methyl modified nucleotide
  modified_base (14)..(14): bicyclic nucleic acid (BNA)
  source: /note="3' tri-ethylene glycol (TEG)"
tcgguaaguucugt

SEQ ID NO: 17174 - DNA, 13 bp, Artificial Sequence
  source: /note="Description of Artificial Sequence: Synthetic oligonucleotide"
  source: /note="Description of Combined DNA/RNA Molecule: Synthetic oligonucleotide"
  source: /note="DNA/RNA"
  source: /note="5' tri-ethylene glycol (TEG)"
  modified_base (1)..(1): bicyclic nucleic acid (BNA)
  modified_base (2)..(2): 5-methyl modified nucleotide
  modified_base (11)..(11): 5-methyl modified nucleotide
  modified_base (13)..(13): bicyclic nucleic acid (BNA)
  source: /note="3' tri-ethylene glycol (TEG)"
tcgguaaguucug

SEQ ID NO: 17175 - DNA, 12 bp, Artificial Sequence
  source: /note="Description of Artificial Sequence: Synthetic oligonucleotide"
  source: /note="Description of Combined DNA/RNA Molecule: Synthetic oligonucleotide"
  source: /note="DNA/RNA"
  source: /note="5' tri-ethylene glycol (TEG)"
  modified_base (1)..(1): bicyclic nucleic acid (BNA)
  modified_base (2)..(2): 5-methyl modified nucleotide
  modified_base (11)..(11): 5-methyl modified nucleotide
  modified_base (12)..(12): bicyclic nucleic acid (BNA)
  source: /note="3' tri-ethylene glycol (TEG)"
tcgguaaguuct

SEQ ID NO: 17176 - DNA, 11 bp, Artificial Sequence
  source: /note="Description of Artificial Sequence: Synthetic oligonucleotide"
  source: /note="Description of Combined DNA/RNA Molecule: Synthetic oligonucleotide"
  source: /note="DNA/RNA"
  source: /note="5' tri-ethylene glycol (TEG)"
  modified_base (1)..(1): bicyclic nucleic acid (BNA)
  modified_base (2)..(2): 5-methyl modified nucleotide
  modified_base (11)..(11): 5-methyl bicyclic nucleic acid
  source: /note="3' tri-ethylene glycol (TEG)"
tcgguaaguuc

SEQ ID NO: 17177 - DNA, 10 bp, Artificial Sequence
  source: /note="Description of Artificial Sequence: Synthetic oligonucleotide"
  source: /note="Description of Combined DNA/RNA Molecule: Synthetic oligonucleotide"
  source: /note="DNA/RNA"
  source: /note="5' tri-ethylene glycol (TEG)"
  modified_base (1)..(1): bicyclic nucleic acid (BNA)
  modified_base (2)..(2): 5-methyl modified nucleotide
  modified_base (10)..(10): bicyclic nucleic acid (BNA)
  source: /note="3' tri-ethylene glycol (TEG)"
tcgguaagut

SEQ ID NO: 17178 - DNA, 9 bp, Artificial Sequence
  source: /note="Description of Artificial Sequence: Synthetic oligonucleotide"
  source: /note="Description of Combined DNA/RNA Molecule: Synthetic oligonucleotide"
  source: /note="DNA/RNA"
  source: /note="5' tri-ethylene glycol (TEG)"
  modified_base (1)..(1): bicyclic nucleic acid (BNA)
  modified_base (2)..(2): 5-methyl modified nucleotide
  modified_base (9)..(9): bicyclic nucleic acid (BNA)
  source: /note="3' tri-ethylene glycol (TEG)"
tcgguaagt

SEQ ID NO: 17179 - RNA, 20 nt, Artificial Sequence
  source: /note="Description of Artificial Sequence: Synthetic oligonucleotide"
  source: /note="RNA"
  source: /note="5' tri-ethylene glycol (TEG)"
  modified_base (1)..(1): bicyclic nucleic acid (BNA)
  modified_base (3)..(3): 5-methyl modified nucleotide
  modified_base (12)..(12): 5-methyl modified nucleotide
  modified_base (16)..(16): 5-methyl modified nucleotide
  modified_base (17)..(17): 5-methyl modified nucleotide
  modified_base (20)..(20): bicyclic nucleic acid (BNA)
  source: /note="3' tri-ethylene glycol (TEG)"
gucgguaaguucuguccaag

SEQ ID NO: 17180 - RNA, 19 nt, Artificial Sequence
  source: /note="Description of Artificial Sequence: Synthetic oligonucleotide"
  source: /note="RNA"
  source: /note="5' tri-ethylene glycol (TEG)"
  modified_base (1)..(1): bicyclic nucleic acid (BNA)
  modified_base (3)..(3): 5-methyl modified nucleotide
  modified_base (12)..(12): 5-methyl modified nucleotide
  modified_base (16)..(16): 5-methyl modified nucleotide
  modified_base (17)..(17): 5-methyl modified nucleotide
  modified_base (19)..(19): bicyclic nucleic acid (BNA)
  source: /note="3' tri-ethylene glycol (TEG)"
gucgguaaguucuguccaa

SEQ ID NO: 17181 - RNA, 18 nt, Artificial Sequence
  source: /note="Description of Artificial Sequence: Synthetic oligonucleotide"
  source: /note="RNA"
  source: /note="5' tri-ethylene glycol (TEG)"
  modified_base (1)..(1): bicyclic nucleic acid (BNA)
  modified_base (3)..(3): 5-methyl modified nucleotide
  modified_base (12)..(12): 5-methyl modified nucleotide
  modified_base (16)..(16): 5-methyl modified nucleotide
  modified_base (17)..(17): 5-methyl modified nucleotide
  modified_base (18)..(18): bicyclic nucleic acid (BNA)
  source: /note="3' tri-ethylene glycol (TEG)"
gucgguaaguucugucca

SEQ ID NO: 17182 - RNA, 17 nt, Artificial Sequence
  source: /note="Description of Artificial Sequence: Synthetic oligonucleotide"
  source: /note="RNA"
  source: /note="5' tri-ethylene glycol (TEG)"
  modified_base (1)..(1): bicyclic nucleic acid (BNA)
  modified_base (3)..(3): 5-methyl modified nucleotide
  modified_base (12)..(12): 5-methyl modified nucleotide
  modified_base (16)..(16): 5-methyl modified nucleotide
  modified_base (17)..(17): 5-methyl bicyclic nucleic acid
  source: /note="3' tri-ethylene glycol (TEG)"
gucgguaaguucugucc

SEQ ID NO: 17183 - RNA, 16 nt, Artificial Sequence
  source: /note="Description of Artificial Sequence: Synthetic oligonucleotide"
  source: /note="RNA"
  source: /note="5' tri-ethylene glycol (TEG)"
  modified_base (1)..(1): bicyclic nucleic acid (BNA)
  modified_base (3)..(3): 5-methyl modified nucleotide
  modified_base (12)..(12): 5-methyl modified nucleotide
  modified_base (16)..(16): 5-methyl bicyclic nucleic acid
  source: /note="3' tri-ethylene glycol (TEG)"
gucgguaaguucuguc

SEQ ID NO: 17184 - DNA, 15 bp, Artificial Sequence
  source: /note="Description of Artificial Sequence: Synthetic oligonucleotide"
  source: /note="Description of Combined DNA/RNA Molecule: Synthetic oligonucleotide"
  source: /note="DNA/RNA"
  source: /note="5' tri-ethylene glycol (TEG)"
  modified_base (1)..(1): bicyclic nucleic acid (BNA)
  modified_base (3)..(3): 5-methyl modified nucleotide
  modified_base (12)..(12): 5-methyl modified nucleotide
  modified_base (15)..(15): bicyclic nucleic acid (BNA)
  source: /note="3' tri-ethylene glycol (TEG)"
gucgguaaguucugt

SEQ ID NO: 17185 - RNA, 14 nt, Artificial Sequence
  source: /note="Description of Artificial Sequence: Synthetic oligonucleotide"
  source: /note="RNA"
  source: /note="5' tri-ethylene glycol (TEG)"
  modified_base (1)..(1): bicyclic nucleic acid (BNA)
  modified_base (3)..(3): 5-methyl modified nucleotide
  modified_base (12)..(12): 5-methyl modified nucleotide
  modified_base (14)..(14): bicyclic nucleic acid (BNA)
  source: /note="3' tri-ethylene glycol (TEG)"
gucgguaaguucug

SEQ ID NO: 17186 - DNA, 13 bp, Artificial Sequence
  source: /note="Description of Artificial Sequence: Synthetic oligonucleotide"
  source: /note="Description of Combined DNA/RNA Molecule: Synthetic oligonucleotide"
  source: /note="DNA/RNA"
  source: /note="5' tri-ethylene glycol (TEG)"
  modified_base (1)..(1): bicyclic nucleic acid (BNA)
  modified_base (3)..(3): 5-methyl modified nucleotide
  modified_base (12)..(12): 5-methyl modified nucleotide
  modified_base (13)..(13): bicyclic nucleic acid (BNA)
  source: /note="3' tri-ethylene glycol (TEG)"
gucgguaaguuct

SEQ ID NO: 17187 - RNA, 12 nt, Artificial Sequence
  source: /note="Description of Artificial Sequence: Synthetic oligonucleotide"
  source: /note="RNA"
  source: /note="5' tri-ethylene glycol (TEG)"
  modified_base (1)..(1): bicyclic nucleic acid (BNA)
  modified_base (3)..(3): 5-methyl modified nucleotide
  modified_base (12)..(12): 5-methyl bicyclic nucleic acid
  source: /note="3' tri-ethylene glycol (TEG)"
gucgguaaguuc

SEQ ID NO: 17188 - DNA, 11 bp, Artificial Sequence
  source: /note="Description of Artificial Sequence: Synthetic oligonucleotide"
  source: /note="Description of Combined DNA/RNA Molecule: Synthetic oligonucleotide"
  source: /note="DNA/RNA"
  source: /note="5' tri-ethylene glycol (TEG)"
  modified_base (1)..(1): bicyclic nucleic acid (BNA)
  modified_base (3)..(3): 5-methyl modified nucleotide
  modified_base (11)..(11): bicyclic nucleic acid (BNA)
  source: /note="3' tri-ethylene glycol (TEG)"
gucgguaagut

SEQ ID NO: 17189 - DNA, 10 bp, Artificial Sequence
  source: /note="Description of Artificial Sequence: Synthetic oligonucleotide"
  source: /note="Description of Combined DNA/RNA Molecule: Synthetic oligonucleotide"
  source: /note="DNA/RNA"
  source: /note="5' tri-ethylene glycol (TEG)"
  modified_base (1)..(1): bicyclic nucleic acid (BNA)
  modified_base (3)..(3): 5-methyl modified nucleotide
  modified_base (10)..(10): bicyclic nucleic acid (BNA)
  source: /note="3' tri-ethylene glycol (TEG)"
gucgguaagt

SEQ ID NO: 17190 - RNA, 20 nt, Artificial Sequence
  source: /note="Description of Artificial Sequence: Synthetic oligonucleotide"
  source: /note="RNA"
  source: /note="5' tri-ethylene glycol (TEG)"
  modified_base (1)..(1): bicyclic nucleic acid (BNA)
  modified_base (4)..(4): 5-methyl modified nucleotide
  modified_base (13)..(13): 5-methyl modified nucleotide
  modified_base (17)..(17): 5-methyl modified nucleotide
  modified_base (18)..(18): 5-methyl modified nucleotide
  modified_base (20)..(20): bicyclic nucleic acid (BNA)
  source: /note="3' tri-ethylene glycol (TEG)"
agucgguaaguucuguccaa

SEQ ID NO: 17191 - RNA, 19 nt, Artificial Sequence
  source: /note="Description of Artificial Sequence: Synthetic oligonucleotide"
  source: /note="RNA"
  source: /note="5' tri-ethylene glycol (TEG)"
  modified_base (1)..(1): bicyclic nucleic acid (BNA)
  modified_base (4)..(4): 5-methyl modified nucleotide
  modified_base (13)..(13): 5-methyl modified nucleotide
  modified_base (17)..(17): 5-methyl modified nucleotide
  modified_base (18)..(18): 5-methyl modified nucleotide
  modified_base (19)..(19): bicyclic nucleic acid (BNA)
  source: /note="3' tri-ethylene glycol (TEG)"
agucgguaaguucugucca

SEQ ID NO: 17192 - RNA, 17 nt, Artificial Sequence
  source: /note="Description of Artificial Sequence: Synthetic oligonucleotide"
  source: /note="RNA"
  source: /note="5' tri-ethylene glycol (TEG)"
  modified_base (1)..(1): bicyclic nucleic acid (BNA)
  modified_base (4)..(4): 5-methyl modified nucleotide
  modified_base (13)..(13): 5-methyl modified nucleotide
  modified_base (17)..(17): 5-methyl bicyclic nucleic acid
  source: /note="3' tri-ethylene glycol (TEG)"
agucgguaaguucuguc

SEQ ID NO: 17193 - DNA, 16 bp, Artificial Sequence
  source: /note="Description of Artificial Sequence: Synthetic oligonucleotide"
  source: /note="Description of Combined DNA/RNA Molecule: Synthetic oligonucleotide"
  source: /note="DNA/RNA"
  source: /note="5' tri-ethylene glycol (TEG)"
  modified_base (1)..(1): bicyclic nucleic acid (BNA)
  modified_base (4)..(4): 5-methyl modified nucleotide
  modified_base (13)..(13): 5-methyl modified nucleotide
  modified_base (16)..(16): bicyclic nucleic acid (BNA)
  source: /note="3' tri-ethylene glycol (TEG)"
agucgguaaguucugt

SEQ ID NO: 17194 - RNA, 15 nt, Artificial Sequence
  source: /note="Description of Artificial Sequence: Synthetic oligonucleotide"
  source: /note="RNA"
  source: /note="5' tri-ethylene glycol (TEG)"
  modified_base (1)..(1): bicyclic nucleic acid (BNA)
  modified_base (4)..(4): 5-methyl modified nucleotide
  modified_base (13)..(13): 5-methyl modified nucleotide
  modified_base (15)..(15): bicyclic nucleic acid (BNA)
  source: /note="3' tri-ethylene glycol (TEG)"
agucgguaaguucug

SEQ ID NO: 17195 - DNA, 14 bp, Artificial Sequence
  source: /note="Description of Artificial Sequence: Synthetic oligonucleotide"
  source: /note="Description of Combined DNA/RNA Molecule: Synthetic oligonucleotide"
  source: /note="DNA/RNA"
  source: /note="5' tri-ethylene glycol (TEG)"
  modified_base (1)..(1): bicyclic nucleic acid (BNA)
  modified_base (4)..(4): 5-methyl modified nucleotide
  modified_base (13)..(13): 5-methyl modified nucleotide
  modified_base (14)..(14): bicyclic nucleic acid (BNA)
  source: /note="3' tri-ethylene glycol (TEG)"
agucgguaaguuct

SEQ ID NO: 17196 - RNA, 13 nt, Artificial Sequence
  source: /note="Description of Artificial Sequence: Synthetic oligonucleotide"
  source: /note="RNA"
  source: /note="5' tri-ethylene glycol (TEG)"
  modified_base (1)..(1): bicyclic nucleic acid (BNA)
  modified_base (4)..(4): 5-methyl modified nucleotide
  modified_base (13)..(13): 5-methyl bicyclic nucleic acid
  source: /note="3' tri-ethylene glycol (TEG)"
agucgguaaguuc

SEQ ID NO: 17197 - DNA, 12 bp, Artificial Sequence
  source: /note="Description of Artificial Sequence: Synthetic oligonucleotide"
  source: /note="Description of Combined DNA/RNA Molecule: Synthetic oligonucleotide"
  source: /note="DNA/RNA"
  source: /note="5' tri-ethylene glycol (TEG)"
  modified_base (1)..(1): bicyclic nucleic acid (BNA)
  modified_base (4)..(4): 5-methyl modified nucleotide
  modified_base (12)..(12): bicyclic nucleic acid (BNA)
  source: /note="3' tri-ethylene glycol (TEG)"
agucgguaagut

SEQ ID NO: 17198 - DNA, 11 bp, Artificial Sequence
  source: /note="Description of Artificial Sequence: Synthetic oligonucleotide"
  source: /note="Description of Combined DNA/RNA Molecule: Synthetic oligonucleotide"
  source: /note="DNA/RNA"
  source: /note="5' tri-ethylene glycol (TEG)"
  modified_base (1)..(1): bicyclic nucleic acid (BNA)
  modified_base (4)..(4): 5-methyl modified nucleotide
  modified_base (11)..(11): bicyclic nucleic acid (BNA)
  source: /note="3' tri-ethylene glycol (TEG)"
agucgguaagt

SEQ ID NO: 17199 - RNA, 20 nt, Artificial Sequence
  source: /note="Description of Artificial Sequence: Synthetic oligonucleotide"
  source: /note="RNA"
  source: /note="5' tri-ethylene glycol (TEG)"
  modified_base (1)..(1): 5-methyl bicyclic nucleic acid
  modified_base (5)..(5): 5-methyl modified nucleotide
  modified_base (14)..(14): 5-methyl modified nucleotide
  modified_base (18)..(18): 5-methyl modified nucleotide
  modified_base (19)..(19): 5-methyl modified nucleotide
  modified_base (20)..(20): bicyclic nucleic acid (BNA)
  source: /note="3' tri-ethylene glycol (TEG)"
cagucgguaaguucugucca

SEQ ID NO: 17200 - RNA, 19 nt, Artificial Sequence
  source: /note="Description of Artificial Sequence: Synthetic oligonucleotide"
  source: /note="RNA"
  source: /note="5' tri-ethylene glycol (TEG)"
  modified_base (1)..(1): 5-methyl bicyclic nucleic acid
  modified_base (5)..(5): 5-methyl modified nucleotide
  modified_base (14)..(14): 5-methyl modified nucleotide
  modified_base (18)..(18): 5-methyl modified nucleotide
  modified_base (19)..(19): 5-methyl bicyclic nucleic acid
  source: /note="3' tri-ethylene glycol (TEG)"
cagucgguaaguucugucc

SEQ ID NO: 17201 - RNA, 18 nt, Artificial Sequence
  source: /note="Description of Artificial Sequence: Synthetic oligonucleotide"
  source: /note="RNA"
  source: /note="5' tri-ethylene glycol (TEG)"
  modified_base (1)..(1): 5-methyl bicyclic nucleic acid
  modified_base (5)..(5): 5-methyl modified nucleotide
  modified_base (14)..(14): 5-methyl modified nucleotide
  modified_base (18)..(18): 5-methyl bicyclic nucleic acid
  source: /note="3' tri-ethylene glycol (TEG)"
cagucgguaaguucuguc

SEQ ID NO: 17202 - DNA, 17 bp, Artificial Sequence
  source: /note="Description of Artificial Sequence: Synthetic oligonucleotide"
  source: /note="Description of Combined DNA/RNA Molecule: Synthetic oligonucleotide"
  source: /note="DNA/RNA"
  source: /note="5' tri-ethylene glycol (TEG)"
  modified_base (1)..(1): 5-methyl bicyclic nucleic acid
  modified_base (5)..(5): 5-methyl modified nucleotide
  modified_base (14)..(14): 5-methyl modified nucleotide
  modified_base (17)..(17): bicyclic nucleic acid (BNA)
  source: /note="3' tri-ethylene glycol (TEG)"
cagucgguaaguucugt

SEQ ID NO: 17203 - RNA, 16 nt, Artificial Sequence
  source: /note="Description of Artificial Sequence: Synthetic oligonucleotide"
  source: /note="RNA"
  source: /note="5' tri-ethylene glycol (TEG)"
  modified_base (1)..(1): 5-methyl bicyclic nucleic acid
  modified_base (5)..(5): 5-methyl modified nucleotide
  modified_base (14)..(14): 5-methyl modified nucleotide
  modified_base (16)..(16): bicyclic nucleic acid (BNA)
  source: /note="3' tri-ethylene glycol (TEG)"
cagucgguaaguucug

SEQ ID NO: 17204 - DNA, 15 bp, Artificial Sequence
  source: /note="Description of Artificial Sequence: Synthetic oligonucleotide"
  source: /note="Description of Combined DNA/RNA Molecule: Synthetic oligonucleotide"
  source: /note="DNA/RNA"
  source: /note="5' tri-ethylene glycol (TEG)"
  modified_base (1)..(1): 5-methyl bicyclic nucleic acid
  modified_base (5)..(5): 5-methyl modified nucleotide
  modified_base (14)..(14): 5-methyl modified nucleotide
  modified_base (15)..(15): bicyclic nucleic acid (BNA)
  source: /note="3' tri-ethylene glycol (TEG)"
cagucgguaaguuct

SEQ ID NO: 17205 - RNA, 14 nt, Artificial Sequence
  source: /note="Description of Artificial Sequence: Synthetic oligonucleotide"
  source: /note="RNA"
  source: /note="5' tri-ethylene glycol (TEG)"
  modified_base (1)..(1): 5-methyl bicyclic nucleic acid
  modified_base (5)..(5): 5-methyl modified nucleotide
  modified_base (14)..(14): 5-methyl bicyclic nucleic acid
  source: /note="3' tri-ethylene glycol (TEG)"
cagucgguaaguuc

SEQ ID NO: 17206 - DNA, 13 bp, Artificial Sequence
  source: /note="Description of Artificial Sequence: Synthetic oligonucleotide"
  source: /note="Description of Combined DNA/RNA Molecule: Synthetic oligonucleotide"
  source: /note="DNA/RNA"
  source: /note="5' tri-ethylene glycol (TEG)"
  modified_base (1)..(1): 5-methyl bicyclic nucleic acid
  modified_base (5)..(5): 5-methyl modified nucleotide
  modified_base (13)..(13): bicyclic nucleic acid (BNA)
  source: /note="3' tri-ethylene glycol (TEG)"
cagucgguaagut

SEQ ID NO: 17207 - DNA, 12 bp, Artificial Sequence
  source: /note="Description of Artificial Sequence: Synthetic oligonucleotide"
  source: /note="Description of Combined DNA/RNA Molecule: Synthetic oligonucleotide"
  source: /note="DNA/RNA"
  source: /note="5' tri-ethylene glycol (TEG)"
  modified_base (1)..(1): 5-methyl bicyclic nucleic acid
  modified_base (5)..(5): 5-methyl modified nucleotide
  modified_base (12)..(12): bicyclic nucleic acid (BNA)
  source: /note="3' tri-ethylene glycol (TEG)"
cagucgguaagt

SEQ ID NO: 17208 - RNA, 20 nt, Artificial Sequence
  source: /note="Description of Artificial Sequence: Synthetic oligonucleotide"
  source: /note="RNA"
  source: /note="5' tri-ethylene glycol (TEG)"
  modified_base (1)..(1): 5-methyl bicyclic nucleic acid
  modified_base (2)..(2): 5-methyl modified nucleotide
  modified_base (6)..(6): 5-methyl modified nucleotide
  modified_base (15)..(15): 5-methyl modified nucleotide
  modified_base (19)..(19): 5-methyl modified nucleotide
  modified_base (20)..(20): 5-methyl bicyclic nucleic acid
  source: /note="3' tri-ethylene glycol (TEG)"
ccagucgguaaguucugucc

SEQ ID NO: 17209 - RNA, 19 nt, Artificial Sequence
  source: /note="Description of Artificial Sequence: Synthetic oligonucleotide"
  source: /note="RNA"
  source: /note="5' tri-ethylene glycol (TEG)"
  modified_base (1)..(1): 5-methyl bicyclic nucleic acid
  modified_base (2)..(2): 5-methyl modified nucleotide
  modified_base (6)..(6): 5-methyl modified nucleotide
  modified_base (15)..(15): 5-methyl modified nucleotide
  modified_base (19)..(19): 5-methyl bicyclic nucleic acid
  source: /note="3' tri-ethylene glycol (TEG)"
ccagucgguaaguucuguc

SEQ ID NO: 17210 - DNA, 18 bp, Artificial Sequence
  source: /note="Description of Artificial Sequence: Synthetic oligonucleotide"
  source: /note="Description of Combined DNA/RNA Molecule: Synthetic oligonucleotide"
  source: /note="DNA/RNA"
  source: /note="5' tri-ethylene glycol (TEG)"
  modified_base (1)..(1): 5-methyl bicyclic nucleic acid
  modified_base (2)..(2): 5-methyl modified nucleotide
  modified_base (6)..(6): 5-methyl modified nucleotide
  modified_base (15)..(15): 5-methyl modified nucleotide
  modified_base (18)..(18): bicyclic nucleic acid (BNA)
  source: /note="3' tri-ethylene glycol (TEG)"
ccagucgguaaguucugt

SEQ ID NO: 17211 - RNA, 17 nt, Artificial Sequence
  source: /note="Description of Artificial Sequence: Synthetic oligonucleotide"
  source: /note="RNA"
  source: /note="5' tri-ethylene glycol (TEG)"
  modified_base (1)..(1): 5-methyl bicyclic nucleic acid
  modified_base (2)..(2): 5-methyl modified nucleotide
  modified_base (6)..(6): 5-methyl modified nucleotide
  modified_base (15)..(15): 5-methyl modified nucleotide
  modified_base (17)..(17): bicyclic nucleic acid (BNA)
  source: /note="3' tri-ethylene glycol (TEG)"
ccagucgguaaguucug

SEQ ID NO: 17212 - DNA, 16 bp, Artificial Sequence
  source: /note="Description of Artificial Sequence: Synthetic oligonucleotide"
  source: /note="Description of Combined DNA/RNA Molecule: Synthetic oligonucleotide"
  source: /note="DNA/RNA"
  source: /note="5' tri-ethylene glycol (TEG)"
  modified_base (1)..(1): 5-methyl bicyclic nucleic acid
  modified_base (2)..(2): 5-methyl modified nucleotide
  modified_base (6)..(6): 5-methyl modified nucleotide
  modified_base (15)..(15): 5-methyl modified nucleotide
  modified_base (16)..(16): bicyclic nucleic acid (BNA)
  source: /note="3' tri-ethylene glycol (TEG)"
ccagucgguaaguuct

SEQ ID NO: 17213 - RNA, 15 nt, Artificial Sequence
  source: /note="Description of Artificial Sequence: Synthetic oligonucleotide"
  source: /note="RNA"
  source: /note="5' tri-ethylene glycol (TEG)"
  modified_base (1)..(1): 5-methyl bicyclic nucleic acid
  modified_base (2)..(2): 5-methyl modified nucleotide
  modified_base (6)..(6): 5-methyl modified nucleotide
  modified_base (15)..(15): 5-methyl bicyclic nucleic acid
  source: /note="3' tri-ethylene glycol (TEG)"
ccagucgguaaguuc

SEQ ID NO: 17214 - DNA, 14 bp, Artificial Sequence
  source: /note="Description of Artificial Sequence: Synthetic oligonucleotide"
  source: /note="Description of Combined DNA/RNA Molecule: Synthetic oligonucleotide"
  source: /note="DNA/RNA"
  source: /note="5' tri-ethylene glycol (TEG)"
  modified_base (1)..(1): 5-methyl bicyclic nucleic acid
  modified_base (2)..(2): 5-methyl modified nucleotide
  modified_base (6)..(6): 5-methyl modified nucleotide
  modified_base (14)..(14): bicyclic nucleic acid (BNA)
  source: /note="3' tri-ethylene glycol (TEG)"
ccagucgguaagut

SEQ ID NO: 17215 - DNA, 13 bp, Artificial Sequence
  source: /note="Description of Artificial Sequence: Synthetic oligonucleotide"
  source: /note="Description of Combined DNA/RNA Molecule: Synthetic oligonucleotide"
  source: /note="DNA/RNA"
  source: /note="5' tri-ethylene glycol (TEG)"
  modified_base (1)..(1): 5-methyl bicyclic nucleic acid
  modified_base (2)..(2): 5-methyl modified nucleotide
  modified_base (6)..(6): 5-methyl modified nucleotide
  modified_base (13)..(13): bicyclic nucleic acid (BNA)
  source: /note="3' tri-ethylene glycol (TEG)"
ccagucgguaagt

SEQ ID NO: 17216 - RNA, 20 nt, Artificial Sequence
  source: /note="Description of Artificial Sequence: Synthetic oligonucleotide"
  source: /note="RNA"
  source: /note="5' tri-ethylene glycol (TEG)"
  modified_base (1)..(1): bicyclic nucleic acid (BNA)
  modified_base (2)..(2): 5-methyl modified nucleotide
  modified_base (3)..(3): 5-methyl modified nucleotide
  modified_base (7)..(7): 5-methyl modified nucleotide
  modified_base (16)..(16): 5-methyl modified nucleotide
  modified_base (20)..(20): 5-methyl bicyclic nucleic acid
  source: /note="3' tri-ethylene glycol (TEG)"
gccagucgguaaguucuguc

SEQ ID NO: 17217 - DNA, 19 bp, Artificial Sequence
  source: /note="Description of Artificial Sequence: Synthetic oligonucleotide"
  source: /note="Description of Combined DNA/RNA Molecule: Synthetic oligonucleotide"
  source: /note="DNA/RNA"
  source: /note="5' tri-ethylene glycol (TEG)"
  modified_base (1)..(1): bicyclic nucleic acid (BNA)
  modified_base (2)..(2): 5-methyl modified nucleotide
  modified_base (3)..(3): 5-methyl modified nucleotide
  modified_base (7)..(7): 5-methyl modified nucleotide
  modified_base (16)..(16): 5-methyl modified nucleotide
  modified_base (19)..(19): bicyclic nucleic acid (BNA)
  source: /note="3' tri-ethylene glycol (TEG)"
gccagucgguaaguucugt

SEQ ID NO: 17218 - RNA, 18 nt, Artificial Sequence
  source: /note="Description of Artificial Sequence: Synthetic oligonucleotide"
  source: /note="RNA"
  source: /note="5' tri-ethylene glycol (TEG)"
  modified_base (1)..(1): bicyclic nucleic acid (BNA)
  modified_base (2)..(2): 5-methyl modified nucleotide
  modified_base (3)..(3): 5-methyl modified nucleotide
  modified_base (7)..(7): 5-methyl modified nucleotide
  modified_base (16)..(16): 5-methyl modified nucleotide
  modified_base (18)..(18): bicyclic nucleic acid (BNA)
  source: /note="3' tri-ethylene glycol (TEG)"
gccagucgguaaguucug

SEQ ID NO: 17219 - DNA, 17 bp, Artificial Sequence
  source: /note="Description of Artificial Sequence: Synthetic oligonucleotide"
  source: /note="Description of Combined DNA/RNA Molecule: Synthetic oligonucleotide"
  source: /note="DNA/RNA"
  source: /note="5' tri-ethylene glycol (TEG)"
  modified_base (1)..(1): bicyclic nucleic acid (BNA)
  modified_base (2)..(2): 5-methyl modified nucleotide
  modified_base (3)..(3): 5-methyl modified nucleotide
  modified_base (7)..(7): 5-methyl modified nucleotide
  modified_base (16)..(16): 5-methyl modified nucleotide
  modified_base (17)..(17): bicyclic nucleic acid (BNA)
  source: /note="3' tri-ethylene glycol (TEG)"
gccagucgguaaguuct

SEQ ID NO: 17220 - RNA, 16 nt, Artificial Sequence
  source: /note="Description of Artificial Sequence: Synthetic oligonucleotide"
  source: /note="RNA"
  source: /note="5' tri-ethylene glycol (TEG)"
  modified_base (1)..(1): bicyclic nucleic acid (BNA)
  modified_base (2)..(2): 5-methyl modified nucleotide
  modified_base (3)..(3): 5-methyl modified nucleotide
  modified_base (7)..(7): 5-methyl modified nucleotide
  modified_base (16)..(16): 5-methyl bicyclic nucleic acid
  source: /note="3' tri-ethylene glycol (TEG)"
gccagucgguaaguuc

SEQ ID NO: 17221 - DNA, 15 bp, Artificial Sequence
  source: /note="Description of Artificial Sequence: Synthetic oligonucleotide"
  source: /note="Description of Combined DNA/RNA Molecule: Synthetic oligonucleotide"
  source: /note="DNA/RNA"
  source: /note="5' tri-ethylene glycol (TEG)"
  modified_base (1)..(1): bicyclic nucleic acid (BNA)
  modified_base (2)..(2): 5-methyl modified nucleotide
  modified_base (3)..(3): 5-methyl modified nucleotide
  modified_base (7)..(7): 5-methyl modified nucleotide
  modified_base (15)..(15): bicyclic nucleic acid (BNA)
  source: /note="3' tri-ethylene glycol (TEG)"
gccagucgguaagut

SEQ ID NO: 17222 - DNA, 14 bp, Artificial Sequence
  source: /note="Description of Artificial Sequence: Synthetic oligonucleotide"
  source: /note="Description of Combined DNA/RNA Molecule: Synthetic oligonucleotide"
  source: /note="DNA/RNA"
  source: /note="5' tri-ethylene glycol (TEG)"
  modified_base (1)..(1): bicyclic nucleic acid (BNA)
  modified_base (2)..(2): 5-methyl modified nucleotide
  modified_base (3)..(3): 5-methyl modified nucleotide
  modified_base (7)..(7): 5-methyl modified nucleotide
  modified_base (14)..(14): bicyclic nucleic acid (BNA)
  source: /note="3' tri-ethylene glycol (TEG)"
gccagucgguaagt

SEQ ID NO: 17223 - DNA, 20 bp, Artificial Sequence
  source: /note="Description of Artificial Sequence: Synthetic oligonucleotide"
  source: /note="Description of Combined DNA/RNA Molecule: Synthetic oligonucleotide"
  source: /note="DNA/RNA"
  source: /note="5' tri-ethylene glycol (TEG)"
  modified_base (1)..(1): bicyclic nucleic acid (BNA)
  modified_base (2)..(2): 5-methyl modified nucleotide
  modified_base (14)..(14): 5-methyl modified nucleotide
  modified_base (19)..(19): 5-methyl modified nucleotide
  modified_base (20)..(20): bicyclic nucleic acid (BNA)
  source: /note="3' tri-ethylene glycol (TEG)"
tcaaggaagauggcauuuct

SEQ ID NO: 17224 - DNA, 22 bp, Artificial Sequence
  source: /note="Description of Artificial Sequence: Synthetic oligonucleotide"
  source: /note="Description of Combined DNA/RNA Molecule: Synthetic oligonucleotide"
  source: /note="DNA/RNA"
  source: /note="5' tri-ethylene glycol (TEG)"
  modified_base (1)..(1): bicyclic nucleic acid (BNA)
  modified_base (2)..(2): 5-methyl modified nucleotide
  modified_base (14)..(14): 5-methyl modified nucleotide
  modified_base (19)..(19): 5-methyl modified nucleotide
  modified_base (22)..(22): bicyclic nucleic acid (BNA)
  source: /note="3' tri-ethylene glycol (TEG)"
tcaaggaagauggcauuucuag

SEQ ID NO: 17225 - DNA, 16 bp, Artificial Sequence
  source: /note="Description of Artificial Sequence: Synthetic oligonucleotide"
  source: /note="Description of Combined DNA/RNA Molecule: Synthetic oligonucleotide"
  source: /note="DNA/RNA"
  source: /note="5' tri-ethylene glycol (TEG)"
  modified_base (1)..(1): bicyclic nucleic acid (BNA)
  modified_base (2)..(2): 5-methyl modified nucleotide
  modified_base (14)..(14): 5-methyl modified nucleotide
  modified_base (16)..(16): bicyclic nucleic acid (BNA)
  source: /note="3' tri-ethylene glycol (TEG)"
tcaaggaagauggcat

SEQ ID NO: 17226 - DNA, 15 bp, Artificial Sequence
  source: /note="Description of Artificial Sequence: Synthetic oligonucleotide"
  source: /note="Description of Combined DNA/RNA Molecule: Synthetic oligonucleotide"
  source: /note="DNA/RNA"
  source: /note="5' tri-ethylene glycol (TEG)"
  modified_base (1)..(1): bicyclic nucleic acid (BNA)
  modified_base (9)..(9): 5-methyl modified nucleotide
  modified_base (14)..(14): 5-methyl modified nucleotide
  modified_base (15)..(15): bicyclic nucleic acid (BNA)
  source: /note="3' tri-ethylene glycol (TEG)"
gaagauggcauuuct

SEQ ID NO: 17227 - DNA, 21 bp, Artificial Sequence
  source: /note="Description of Artificial Sequence: Synthetic oligonucleotide"
  source: /note="Description of Combined DNA/RNA Molecule: Synthetic oligonucleotide"
  source: /note="DNA/RNA"
  source: /note="5' tri-ethylene glycol (TEG)"
  modified_base (1)..(1): bicyclic nucleic acid (BNA)
  modified_base (2)..(2): 5-methyl modified nucleotide
  modified_base (14)..(14): 5-methyl modified nucleotide
  modified_base (19)..(19): 5-methyl modified nucleotide
  modified_base (21)..(21): bicyclic nucleic acid (BNA)
  source: /note="3' tri-ethylene glycol (TEG)"
tcaaggaagauggcauuucua

SEQ ID NO: 17228 - DNA, 19 bp, Artificial Sequence
  source: /note="Description of Artificial Sequence: Synthetic oligonucleotide"
  source: /note="Description of Combined DNA/RNA Molecule: Synthetic oligonucleotide"
  source: /note="DNA/RNA"
  source: /note="5' tri-ethylene glycol (TEG)"
  modified_base (1)..(1): bicyclic nucleic acid (BNA)
  modified_base (2)..(2): 5-methyl modified nucleotide
  modified_base (14)..(14): 5-methyl modified nucleotide
  modified_base (19)..(19): 5-methyl bicyclic nucleic acid
  source: /note="3' tri-ethylene glycol (TEG)"
tcaaggaagauggcauuuc

SEQ ID NO: 17229 - DNA, 18 bp, Artificial Sequence
  source: /note="Description of Artificial Sequence: Synthetic oligonucleotide"
  source: /note="Description of Combined DNA/RNA Molecule: Synthetic oligonucleotide"
  source: /note="DNA/RNA"
  source: /note="5' tri-ethylene glycol (TEG)"
  modified_base (1)..(1): bicyclic nucleic acid (BNA)
  modified_base (2)..(2): 5-methyl modified nucleotide
  modified_base (14)..(14): 5-methyl modified nucleotide
  modified_base (18)..(18): bicyclic nucleic acid (BNA)
  source: /note="3' tri-ethylene glycol (TEG)"
tcaaggaagauggcauut

SEQ ID NO: 17230 - DNA, 17 bp, Artificial Sequence
  source: /note="Description of Artificial Sequence: Synthetic oligonucleotide"
  source: /note="Description of Combined DNA/RNA Molecule: Synthetic oligonucleotide"
  source: /note="DNA/RNA"
  source: /note="5' tri-ethylene glycol (TEG)"
  modified_base (1)..(1): bicyclic nucleic acid (BNA)
  modified_base (2)..(2): 5-methyl modified nucleotide
  modified_base (14)..(14): 5-methyl modified nucleotide
  modified_base (17)..(17): bicyclic nucleic acid (BNA)
  source: /note="3' tri-ethylene glycol (TEG)"
tcaaggaagauggcaut

SEQ ID NO: 17231 - DNA, 15 bp, Artificial Sequence
  source: /note="Description of Artificial Sequence: Synthetic oligonucleotide"
  source: /note="Description of Combined DNA/RNA Molecule: Synthetic oligonucleotide"
  source: /note="DNA/RNA"
  source: /note="5' tri-ethylene glycol (TEG)"
  modified_base (1)..(1): bicyclic nucleic acid (BNA)
  modified_base (2)..(2): 5-methyl modified nucleotide
  modified_base (14)..(14): 5-methyl modified nucleotide
  modified_base (15)..(15): bicyclic nucleic acid (BNA)
  source: /note="3' tri-ethylene glycol (TEG)"
tcaaggaagauggca

SEQ ID NO: 17232 - DNA, 14 bp, Artificial Sequence
  source: /note="Description of Artificial Sequence: Synthetic oligonucleotide"
  source: /note="Description of Combined DNA/RNA Molecule: Synthetic oligonucleotide"
  source: /note="DNA/RNA"
  source: /note="5' tri-ethylene glycol (TEG)"
  modified_base (1)..(1): bicyclic nucleic acid (BNA)
  modified_base (2)..(2): 5-methyl modified nucleotide
  modified_base (14)..(14): 5-methyl bicyclic nucleic acid
  source: /note="3' tri-ethylene glycol (TEG)"
tcaaggaagauggc

SEQ ID NO: 17233 - DNA, 13 bp, Artificial Sequence
  source: /note="Description of Artificial Sequence: Synthetic oligonucleotide"
  source: /note="Description of Combined DNA/RNA Molecule: Synthetic oligonucleotide"
  source: /note="DNA/RNA"
  source: /note="5' tri-ethylene glycol (TEG)"
  modified_base (1)..(1): bicyclic nucleic acid (BNA)
  modified_base (2)..(2): 5-methyl modified nucleotide
  modified_base (13)..(13): bicyclic nucleic acid (BNA)
  source: /note="3' tri-ethylene glycol (TEG)"
tcaaggaagaugg

SEQ ID NO: 17234 - DNA, 12 bp, Artificial Sequence
  source: /note="Description of Artificial Sequence: Synthetic oligonucleotide"
  source: /note="Description of Combined DNA/RNA Molecule: Synthetic oligonucleotide"
  source: /note="DNA/RNA"
  source: /note="5' tri-ethylene glycol (TEG)"
  modified_base (1)..(1): bicyclic nucleic acid (BNA)
  modified_base (2)..(2): 5-methyl modified nucleotide
  modified_base (12)..(12): bicyclic nucleic acid (BNA)
  source: /note="3' tri-ethylene glycol (TEG)"
tcaaggaagaug

SEQ ID NO: 17235 - DNA, 11 bp, Artificial Sequence
  source: /note="Description of Artificial Sequence: Synthetic oligonucleotide"
  source: /note="DNA/RNA"
  source: /note="5' tri-ethylene glycol (TEG)"
  modified_base (1)..(1): bicyclic nucleic acid (BNA)
  modified_base (2)..(2): 5-methyl modified nucleotide
  modified_base (11)..(11): bicyclic nucleic acid (BNA)
  source: /note="3' tri-ethylene glycol (TEG)"
tcaaggaagat

SEQ ID NO: 17236 - DNA, 10 bp, Artificial Sequence
  source: /note="Description of Artificial Sequence: Synthetic oligonucleotide"
  source: /note="DNA/RNA"
  source: /note="5' tri-ethylene glycol (TEG)"
  modified_base (1)..(1): bicyclic nucleic acid (BNA)
  modified_base (2)..(2): 5-methyl modified nucleotide
  modified_base (10)..(10): bicyclic nucleic acid (BNA)
  source: /note="3' tri-ethylene glycol (TEG)"
tcaaggaaga

SEQ ID NO: 17237 - DNA, 9 bp, Artificial Sequence
  source: /note="Description of Artificial Sequence: Synthetic oligonucleotide"
  source: /note="DNA/RNA"
  source: /note="5' tri-ethylene glycol (TEG)"
  modified_base (1)..(1): bicyclic nucleic acid (BNA)
  modified_base (2)..(2): 5-methyl modified nucleotide
  modified_base (9)..(9): bicyclic nucleic acid (BNA)
  source: /note="3' tri-ethylene glycol (TEG)"
tcaaggaag

SEQ ID NO: 17238 - RNA, 21 nt, Artificial Sequence
  source: /note="Description of Artificial Sequence: Synthetic oligonucleotide"
  source: /note="RNA"
  source: /note="5' tri-ethylene glycol (TEG)"
  modified_base (1)..(1): 5-methyl bicyclic nucleic acid
  modified_base (13)..(13): 5-methyl modified nucleotide
  modified_base (18)..(18): 5-methyl modified nucleotide
  modified_base (21)..(21): bicyclic nucleic acid (BNA)
  source: /note="3' tri-ethylene glycol (TEG)"
caaggaagauggcauuucuag

SEQ ID NO: 17239 - RNA, 20 nt, Artificial Sequence
  source: /note="Description of Artificial Sequence: Synthetic oligonucleotide"
  source: /note="RNA"
  source: /note="5' tri-ethylene glycol (TEG)"
  modified_base (1)..(1): 5-methyl bicyclic nucleic acid
  modified_base (13)..(13): 5-methyl modified nucleotide
  modified_base (18)..(18): 5-methyl modified nucleotide
  modified_base (20)..(20): bicyclic nucleic acid (BNA)
  source: /note="3' tri-ethylene glycol (TEG)"
caaggaagauggcauuucua

SEQ ID NO: 17240 - DNA, 19 bp, Artificial Sequence
  source: /note="Description of Artificial Sequence: Synthetic oligonucleotide"
  source: /note="Description of Combined DNA/RNA Molecule: Synthetic oligonucleotide"
  source: /note="DNA/RNA"
  source: /note="5' tri-ethylene glycol (TEG)"
  modified_base (1)..(1): 5-methyl bicyclic nucleic acid
  modified_base (13)..(13): 5-methyl modified nucleotide
  modified_base (18)..(18): 5-methyl modified nucleotide
  modified_base (19)..(19): bicyclic nucleic acid (BNA)
  source: /note="3' tri-ethylene glycol (TEG)"
caaggaagauggcauuuct

SEQ ID NO: 17241 - RNA, 18 nt, Artificial Sequence
  source: /note="Description of Artificial Sequence: Synthetic oligonucleotide"
  source: /note="RNA"
  source: /note="5' tri-ethylene glycol (TEG)"
  modified_base (1)..(1): 5-methyl bicyclic nucleic acid
  modified_base (13)..(13): 5-methyl modified nucleotide
  modified_base (18)..(18): 5-methyl bicyclic nucleic acid
  source: /note="3' tri-ethylene glycol (TEG)"
caaggaagauggcauuuc

SEQ ID NO: 17242 - DNA, 17 bp, Artificial Sequence
  source: /note="Description of Artificial Sequence: Synthetic oligonucleotide"
  source: /note="Description of Combined DNA/RNA Molecule: Synthetic oligonucleotide"
  source: /note="DNA/RNA"
  source: /note="5' tri-ethylene glycol (TEG)"
  modified_base (1)..(1): 5-methyl bicyclic nucleic acid
  modified_base (13)..(13): 5-methyl modified nucleotide
  modified_base (17)..(17): bicyclic nucleic acid (BNA)
  source: /note="3' tri-ethylene glycol (TEG)"
caaggaagauggcauut

SEQ ID NO: 17243 - DNA, 16 bp, Artificial Sequence
  source: /note="Description of Artificial Sequence: Synthetic oligonucleotide"
  source: /note="Description of Combined DNA/RNA Molecule: Synthetic oligonucleotide"
  source: /note="DNA/RNA"
  source: /note="5' tri-ethylene glycol (TEG)"
  modified_base (1)..(1): 5-methyl bicyclic nucleic acid
  modified_base (13)..(13): 5-methyl modified nucleotide
  modified_base (16)..(16): bicyclic nucleic acid (BNA)
  source: /note="3' tri-ethylene glycol (TEG)"
caaggaagauggcaut

SEQ ID NO: 17244 - DNA, 15 bp, Artificial Sequence
  source: /note="Description of Artificial Sequence: Synthetic oligonucleotide"
  source: /note="Description of Combined DNA/RNA Molecule: Synthetic oligonucleotide"
  source: /note="DNA/RNA"
  source: /note="5' tri-ethylene glycol (TEG)"
  modified_base (1)..(1): 5-methyl bicyclic nucleic acid
  modified_base (13)..(13): 5-methyl modified nucleotide
  modified_base (15)..(15): bicyclic nucleic acid (BNA)
  source: /note="3' tri-ethylene glycol (TEG)"
caaggaagauggcat

SEQ ID NO: 17245 - RNA, 14 nt, Artificial Sequence
  source: /note="Description of Artificial Sequence: Synthetic oligonucleotide"
  source: /note="RNA"
  source: /note="5' tri-ethylene glycol (TEG)"
  modified_base (1)..(1): 5-methyl bicyclic nucleic acid
  modified_base (13)..(13): 5-methyl modified nucleotide
  modified_base (14)..(14): bicyclic nucleic acid (BNA)
  source: /note="3' tri-ethylene glycol (TEG)"
caaggaagauggca

SEQ ID NO: 17246 - RNA, 13 nt, Artificial Sequence
  source: /note="Description of Artificial Sequence: Synthetic oligonucleotide"
  source: /note="RNA"
  source: /note="5' tri-ethylene glycol (TEG)"
  modified_base (1)..(1): 5-methyl bicyclic nucleic acid
  modified_base (13)..(13): 5-methyl bicyclic nucleic acid
  source: /note="3' tri-ethylene glycol (TEG)"
caaggaagauggc

SEQ ID NO: 17247 - RNA, 12 nt, Artificial Sequence
  source: /note="Description of Artificial Sequence: Synthetic oligonucleotide"
  source: /note="RNA"
  source: /note="5' tri-ethylene glycol (TEG)"
  modified_base (1)..(1): 5-methyl bicyclic nucleic acid
  modified_base (12)..(12): bicyclic nucleic acid (BNA)
  source: /note="3' tri-ethylene glycol (TEG)"
caaggaagaugg

SEQ ID NO: 17248 - RNA, 11 nt, Artificial Sequence
  source: /note="Description of Artificial Sequence: Synthetic oligonucleotide"
  source: /note="RNA"
  source: /note="5' tri-ethylene glycol (TEG)"
  modified_base (1)..(1): 5-methyl bicyclic nucleic acid
  modified_base (11)..(11): bicyclic nucleic acid (BNA)
  source: /note="3' tri-ethylene glycol (TEG)"
caaggaagaug

SEQ ID NO: 17249 - DNA, 10 bp, Artificial Sequence
  source: /note="Description of Artificial Sequence: Synthetic oligonucleotide"
  source: /note="DNA/RNA"
  source: /note="5' tri-ethylene glycol (TEG)"
  modified_base (1)..(1): 5-methyl bicyclic nucleic acid
  modified_base (10)..(10): bicyclic nucleic acid (BNA)
  source: /note="3' tri-ethylene glycol (TEG)"
caaggaagat

SEQ ID NO: 17250 - RNA, 9 nt, Artificial Sequence
  source: /note="Description of Artificial Sequence: Synthetic oligonucleotide"
  source: /note="RNA/Antisense Oligonucleotide"
  source: /note="5' tri-ethylene glycol (TEG)"
  modified_base (1)..(1): 5-methyl bicyclic nucleic acid
  modified_base (9)..(9): bicyclic nucleic acid (BNA)
  source: /note="3' tri-ethylene glycol (TEG)"
caaggaaga

SEQ ID NO: 17251 - RNA, 8 nt, Artificial Sequence
  source: /note="Description of Artificial Sequence: Synthetic oligonucleotide"
  source: /note="RNA/Antisense Oligonucleotide"
  source: /note="5' tri-ethylene glycol (TEG)"
  modified_base (1)..(1): 5-methyl bicyclic nucleic acid
  modified_base (8)..(8): bicyclic nucleic acid (BNA)
  source: /note="3' tri-ethylene glycol (TEG)"
caaggaag

SEQ ID NO: 17252 - RNA, 20 nt, Artificial Sequence
  source: /note="Description of Artificial Sequence: Synthetic oligonucleotide"
  source: /note="RNA"
  source: /note="5' tri-ethylene glycol (TEG)"
  modified_base (1)..(1): bicyclic nucleic acid (BNA)
  modified_base (12)..(12): 5-methyl modified nucleotide
  modified_base (17)..(17): 5-methyl modified nucleotide
  modified_base (20)..(20): bicyclic nucleic acid (BNA)
  source: /note="3' tri-ethylene glycol (TEG)"
aaggaagauggcauuucuag

SEQ ID NO: 17253 - RNA, 19 nt, Artificial Sequence
  source: /note="Description of Artificial Sequence: Synthetic oligonucleotide"
  source: /note="RNA"
  source: /note="5' tri-ethylene glycol (TEG)"
  modified_base (1)..(1): bicyclic nucleic acid (BNA)
  modified_base (12)..(12): 5-methyl modified nucleotide
  modified_base (17)..(17): 5-methyl modified nucleotide
  modified_base (19)..(19): bicyclic nucleic acid (BNA)
  source: /note="3' tri-ethylene glycol (TEG)"
aaggaagauggcauuucua

SEQ ID NO: 17254 - DNA, 18 bp, Artificial Sequence
  source: /note="Description of Artificial Sequence: Synthetic oligonucleotide"
  source: /note="Description of Combined DNA/RNA Molecule: Synthetic oligonucleotide"
  source: /note="DNA/RNA"
  source: /note="5' tri-ethylene glycol (TEG)"
  modified_base (1)..(1): bicyclic nucleic acid (BNA)
  modified_base (12)..(12): 5-methyl modified nucleotide
  modified_base (17)..(17): 5-methyl modified nucleotide
  modified_base (18)..(18): bicyclic nucleic acid (BNA)
  source: /note="3' tri-ethylene glycol (TEG)"
aaggaagauggcauuuct

SEQ ID NO: 17255 - RNA, 17 nt, Artificial Sequence
  source: /note="Description of Artificial Sequence: Synthetic oligonucleotide"
  source: /note="RNA"
  source: /note="5' tri-ethylene glycol (TEG)"
  modified_base (1)..(1): bicyclic nucleic acid (BNA)
  modified_base (12)..(12): 5-methyl modified nucleotide
  modified_base (17)..(17): 5-methyl bicyclic nucleic acid
  source: /note="3' tri-ethylene glycol (TEG)"
aaggaagauggcauuuc

SEQ ID NO: 17256 - DNA, 16 bp, Artificial Sequence
  source: /note="Description of Artificial Sequence: Synthetic oligonucleotide"
  source: /note="Description of Combined DNA/RNA Molecule: Synthetic oligonucleotide"
  source: /note="DNA/RNA"
  source: /note="5' tri-ethylene glycol (TEG)"
  modified_base (1)..(1): bicyclic nucleic acid (BNA)
  modified_base (12)..(12): 5-methyl modified nucleotide
  modified_base (16)..(16): bicyclic nucleic acid (BNA)
  source: /note="3' tri-ethylene glycol (TEG)"
aaggaagauggcauut

SEQ ID NO: 17257 - DNA, 15 bp, Artificial Sequence
  source: /note="Description of Artificial Sequence: Synthetic oligonucleotide"
  source: /note="Description of Combined DNA/RNA Molecule: Synthetic oligonucleotide"
  source: /note="DNA/RNA"
  source: /note="5' tri-ethylene glycol (TEG)"
  modified_base (1)..(1): bicyclic nucleic acid (BNA)
  modified_base (12)..(12): 5-methyl modified nucleotide
  modified_base (15)..(15): bicyclic nucleic acid (BNA)
  source: /note="3' tri-ethylene glycol (TEG)"
aaggaagauggcaut

SEQ ID NO: 17258 - DNA, 14 bp, Artificial Sequence
  source: /note="Description of Artificial Sequence: Synthetic oligonucleotide"
  source: /note="Description of Combined DNA/RNA Molecule: Synthetic oligonucleotide"
  source: /note="DNA/RNA"
  source: /note="5' tri-ethylene glycol (TEG)"
  modified_base (1)..(1): bicyclic nucleic acid (BNA)
  modified_base (12)..(12): 5-methyl modified nucleotide
  modified_base (14)..(14): bicyclic nucleic acid (BNA)
  source: /note="3' tri-ethylene glycol (TEG)"
aaggaagauggcat

SEQ ID NO: 17259 - RNA, 13 nt, Artificial Sequence
  source: /note="Description of Artificial Sequence: Synthetic oligonucleotide"
  source: /note="RNA"
  source: /note="5' tri-ethylene glycol (TEG)"
  modified_base (1)..(1): bicyclic nucleic acid (BNA)
  modified_base (12)..(12): 5-methyl modified nucleotide
  modified_base (13)..(13): bicyclic nucleic acid (BNA)
  source: /note="3' tri-ethylene glycol (TEG)"
aaggaagauggca

SEQ ID NO: 17260 - RNA, 12 nt, Artificial Sequence
  source: /note="Description of Artificial Sequence: Synthetic oligonucleotide"
  source: /note="RNA"
  source: /note="5' tri-ethylene glycol (TEG)"
  modified_base (1)..(1): bicyclic nucleic acid (BNA)
  modified_base (12)..(12): 5-methyl bicyclic nucleic acid
  source: /note="3' tri-ethylene glycol (TEG)"
aaggaagauggc

SEQ ID NO: 17261 - RNA, 11 nt, Artificial Sequence
  source: /note="Description of Artificial Sequence: Synthetic oligonucleotide"
  source: /note="RNA"
  source: /note="5' tri-ethylene glycol (TEG)"
  modified_base (1)..(1): bicyclic nucleic acid (BNA)
  modified_base (11)..(11): bicyclic nucleic acid (BNA)
  source: /note="3' tri-ethylene glycol (TEG)"
aaggaagaugg

SEQ ID NO: 17262 - RNA, 10 nt, Artificial Sequence
  source: /note="Description of Artificial Sequence: Synthetic oligonucleotide"
  source: /note="RNA"
  source: /note="5' tri-ethylene glycol (TEG)"
  modified_base (1)..(1): bicyclic nucleic acid (BNA)
  modified_base (10)..(10): bicyclic nucleic acid (BNA)
  source: /note="3' tri-ethylene glycol (TEG)"
aaggaagaug

SEQ ID NO: 17263 - DNA, 9 bp, Artificial Sequence
  source: /note="Description of Artificial Sequence: Synthetic oligonucleotide"
  source: /note="DNA/RNA"
  source: /note="5' tri-ethylene glycol (TEG)"
  modified_base (1)..(1): bicyclic nucleic acid (BNA)
  modified_base (9)..(9): bicyclic nucleic acid (BNA)
  source: /note="3' tri-ethylene glycol (TEG)"
aaggaagat

SEQ ID NO: 17264 - RNA, 8 nt, Artificial Sequence
  source: /note="Description of Artificial Sequence: Synthetic oligonucleotide"
  source: /note="RNA/Antisense Oligonucleotide"
  source: /note="5' tri-ethylene glycol (TEG)"
  modified_base (1)..(1): bicyclic nucleic acid (BNA)
  modified_base (8)..(8): bicyclic nucleic acid (BNA)
  source: /note="3' tri-ethylene glycol (TEG)"
aaggaaga

SEQ ID NO: 17265 - RNA, 19 nt, Artificial Sequence
  source: /note="Description of Artificial Sequence: Synthetic oligonucleotide"
  source: /note="RNA"
  source: /note="5' tri-ethylene glycol (TEG)"
  modified_base (1)..(1): bicyclic nucleic acid (BNA)
  modified_base (11)..(11): 5-methyl modified nucleotide
  modified_base (16)..(16): 5-methyl modified nucleotide
  modified_base (19)..(19): bicyclic nucleic acid (BNA)
  source: /note="3' tri-ethylene glycol (TEG)"
aggaagauggcauuucuag

SEQ ID NO: 17266 - RNA, 18 nt, Artificial Sequence
  source: /note="Description of Artificial Sequence: Synthetic oligonucleotide"
  source: /note="RNA"
  source: /note="5' tri-ethylene glycol (TEG)"
  modified_base (1)..(1): bicyclic nucleic acid (BNA)
  modified_base (11)..(11): 5-methyl modified nucleotide
  modified_base (16)..(16): 5-methyl modified nucleotide
  modified_base (18)..(18): bicyclic nucleic acid (BNA)
  source: /note="3' tri-ethylene glycol (TEG)"
aggaagauggcauuucua

SEQ ID NO: 17267 - DNA, 17 bp, Artificial Sequence
  source: /note="Description of Artificial Sequence: Synthetic oligonucleotide"
  source: /note="Description of Combined DNA/RNA Molecule: Synthetic oligonucleotide"
  source: /note="DNA/RNA"
  source: /note="5' tri-ethylene glycol (TEG)"
  modified_base (1)..(1): bicyclic nucleic acid (BNA)
  modified_base (11)..(11): 5-methyl modified nucleotide
  modified_base (16)..(16): 5-methyl modified nucleotide
  modified_base (17)..(17): bicyclic nucleic acid (BNA)
  source: /note="3' tri-ethylene glycol (TEG)"
aggaagauggcauuuct

SEQ ID NO: 17268 - RNA, 16 nt, Artificial Sequence
  source: /note="Description of Artificial Sequence: Synthetic oligonucleotide"
  source: /note="RNA"
  source: /note="5' tri-ethylene glycol (TEG)"
  modified_base (1)..(1): bicyclic nucleic acid (BNA)
  modified_base (11)..(11): 5-methyl modified nucleotide
  modified_base (16)..(16): 5-methyl bicyclic nucleic acid
  source: /note="3' tri-ethylene glycol (TEG)"
aggaagauggcauuuc

SEQ ID NO: 17269 - DNA, 15 bp, Artificial Sequence
  source: /note="Description of Artificial Sequence: Synthetic oligonucleotide"
  source: /note="Description of Combined DNA/RNA Molecule: Synthetic oligonucleotide"
  source: /note="DNA/RNA"
  source: /note="5' tri-ethylene glycol (TEG)"
  modified_base (1)..(1): bicyclic nucleic acid (BNA)
  modified_base (11)..(11): 5-methyl modified nucleotide
  modified_base (15)..(15): bicyclic nucleic acid (BNA)
  source: /note="3' tri-ethylene glycol (TEG)"
aggaagauggcauut

SEQ ID NO: 17270 - DNA, 14 bp, Artificial Sequence
  source: /note="Description of Artificial Sequence: Synthetic oligonucleotide"
  source: /note="Description of Combined DNA/RNA Molecule: Synthetic oligonucleotide"
  source: /note="DNA/RNA"
  source: /note="5' tri-ethylene glycol (TEG)"
  modified_base (1)..(1): bicyclic nucleic acid (BNA)
  modified_base (11)..(11): 5-methyl modified nucleotide
  modified_base (14)..(14): bicyclic nucleic acid (BNA)
  source: /note="3' tri-ethylene glycol (TEG)"
aggaagauggcaut

SEQ ID NO: 17271 - DNA, 13 bp, Artificial Sequence
  source: /note="Description of Artificial Sequence: Synthetic oligonucleotide"
  source: /note="Description of Combined DNA/RNA Molecule: Synthetic oligonucleotide"
  source: /note="DNA/RNA"
  source: /note="5' tri-ethylene glycol (TEG)"
  modified_base (1)..(1): bicyclic nucleic acid (BNA)
  modified_base (11)..(11): 5-methyl modified nucleotide
  modified_base (13)..(13): bicyclic nucleic acid (BNA)
  source: /note="3' tri-ethylene glycol (TEG)"
aggaagauggcat

SEQ ID NO: 17272 - RNA, 12 nt, Artificial Sequence
  source: /note="Description of Artificial Sequence: Synthetic oligonucleotide"
  source: /note="RNA"
  source: /note="5' tri-ethylene glycol (TEG)"
  modified_base (1)..(1): bicyclic nucleic acid (BNA)
  modified_base (11)..(11): 5-methyl modified nucleotide
  modified_base (12)..(12): bicyclic nucleic acid (BNA)
  source: /note="3' tri-ethylene glycol (TEG)"
aggaagauggca

SEQ ID NO: 17273 - RNA, 10 nt, Artificial Sequence
  source: /note="Description of Artificial Sequence: Synthetic oligonucleotide"
  source: /note="RNA"
  source: /note="5' tri-ethylene glycol (TEG)"
  modified_base (1)..(1): bicyclic nucleic acid (BNA)
  modified_base (10)..(10): bicyclic nucleic acid (BNA)
  source: /note="3' tri-ethylene glycol (TEG)"
aggaagaugg

SEQ ID NO: 17274 - RNA, 9 nt, Artificial Sequence
  source: /note="Description of Artificial Sequence: Synthetic oligonucleotide"
  source: /note="RNA"
  source: /note="5' tri-ethylene glycol (TEG)"
  modified_base (1)..(1): bicyclic nucleic acid (BNA)
  modified_base (9)..(9): bicyclic nucleic acid (BNA)
  source: /note="3' tri-ethylene glycol (TEG)"
aggaagaug

SEQ ID NO: 17275 - DNA, 8 bp, Artificial Sequence
  source: /note="Description of Artificial Sequence: Synthetic oligonucleotide"
  source: /note="DNA/RNA"
  source: /note="5' tri-ethylene glycol (TEG)"
  modified_base (1)..(1): bicyclic nucleic acid (BNA)
  modified_base (8)..(8): bicyclic nucleic acid (BNA)
  source: /note="3' tri-ethylene glycol (TEG)"
aggaagat

SEQ ID NO: 17276 - RNA, 18 nt, Artificial Sequence
  source: /note="Description of Artificial Sequence: Synthetic oligonucleotide"
  source: /note="RNA"
  source: /note="5' tri-ethylene glycol (TEG)"
  modified_base (1)..(1): bicyclic nucleic acid (BNA)
  modified_base (10)..(10): 5-methyl modified nucleotide
  modified_base (15)..(15): 5-methyl modified nucleotide
  modified_base (18)..(18): bicyclic nucleic acid (BNA)
  source: /note="3' tri-ethylene glycol (TEG)"
ggaagauggcauuucuag

SEQ ID NO: 17277 - RNA, 17 nt, Artificial Sequence
  source: /note="Description of Artificial Sequence: Synthetic oligonucleotide"
  source: /note="RNA"
  source: /note="5' tri-ethylene glycol (TEG)"
  modified_base (1)..(1): bicyclic nucleic acid (BNA)
  modified_base (10)..(10): 5-methyl modified nucleotide
  modified_base (15)..(15): 5-methyl modified nucleotide
  modified_base (17)..(17): bicyclic nucleic acid (BNA)
  source: /note="3' tri-ethylene glycol (TEG)"
ggaagauggcauuucua

SEQ ID NO: 17278 - DNA, 16 bp, Artificial Sequence
  source: /note="Description of Artificial Sequence: Synthetic oligonucleotide"
  source: /note="Description of Combined DNA/RNA Molecule: Synthetic oligonucleotide"
  source: /note="DNA/RNA"
  source: /note="5' tri-ethylene glycol (TEG)"
  modified_base (1)..(1): bicyclic nucleic acid (BNA)
  modified_base (10)..(10): 5-methyl modified nucleotide
  modified_base (15)..(15): 5-methyl modified nucleotide
  modified_base (16)..(16): bicyclic nucleic acid (BNA)
  source: /note="3' tri-ethylene glycol (TEG)"
ggaagauggcauuuct

SEQ ID NO: 17279 - RNA, 15 nt, Artificial Sequence
  source: /note="Description of Artificial Sequence: Synthetic oligonucleotide"
  source: /note="RNA"
  source: /note="5' tri-ethylene glycol (TEG)"
  modified_base (1)..(1): bicyclic nucleic acid (BNA)
  modified_base (10)..(10): 5-methyl modified nucleotide
  modified_base (15)..(15): 5-methyl bicyclic nucleic acid
  source: /note="3' tri-ethylene glycol (TEG)"
ggaagauggcauuuc

SEQ ID NO: 17280 - DNA, 14 bp, Artificial Sequence
  source: /note="Description of Artificial Sequence: Synthetic oligonucleotide"
  source: /note="Description of Combined DNA/RNA Molecule: Synthetic oligonucleotide"
  source: /note="DNA/RNA"
  source: /note="5' tri-ethylene glycol (TEG)"
  modified_base (1)..(1): bicyclic nucleic acid (BNA)
  modified_base (10)..(10): 5-methyl modified nucleotide
  modified_base (14)..(14): bicyclic nucleic acid (BNA)
  source: /note="3' tri-ethylene glycol (TEG)"
ggaagauggcauut

SEQ ID NO: 17281 - DNA, 13 bp, Artificial Sequence
  source: /note="Description of Artificial Sequence: Synthetic oligonucleotide"
  source: /note="Description of Combined DNA/RNA Molecule: Synthetic oligonucleotide"
  source: /note="DNA/RNA"
  source: /note="5' tri-ethylene glycol (TEG)"
  modified_base (1)..(1): bicyclic nucleic acid (BNA)
  modified_base (10)..(10): 5-methyl modified nucleotide
  modified_base (13)..(13): bicyclic nucleic acid (BNA)
  source: /note="3' tri-ethylene glycol (TEG)"
ggaagauggcaut

SEQ ID NO: 17282 - DNA, 12 bp, Artificial Sequence
  source: /note="Description of Artificial Sequence: Synthetic oligonucleotide"
  source: /note="Description of Combined DNA/RNA Molecule: Synthetic oligonucleotide"
  source: /note="DNA/RNA"
  source: /note="5' tri-ethylene glycol (TEG)"
  modified_base (1)..(1): bicyclic nucleic acid (BNA)
  modified_base (10)..(10): 5-methyl modified nucleotide
  modified_base (12)..(12): bicyclic nucleic acid (BNA)
  source: /note="3' tri-ethylene glycol (TEG)"
ggaagauggcat

SEQ ID NO: 17283 - RNA, 11 nt, Artificial Sequence
  source: /note="Description of Artificial Sequence: Synthetic oligonucleotide"
  source: /note="RNA"
  source: /note="5' tri-ethylene glycol (TEG)"
  modified_base (1)..(1): bicyclic nucleic acid (BNA)
  modified_base (10)..(10): 5-methyl modified nucleotide
  modified_base (11)..(11): bicyclic nucleic acid (BNA)
  source: /note="3' tri-ethylene glycol (TEG)"
ggaagauggca

SEQ ID NO: 17284 - RNA, 10 nt, Artificial Sequence
  source: /note="Description of Artificial Sequence: Synthetic oligonucleotide"
  source: /note="RNA"
  source: /note="5' tri-ethylene glycol (TEG)"
  modified_base (1)..(1): bicyclic nucleic acid (BNA)
  modified_base (10)..(10): 5-methyl bicyclic nucleic acid
  source: /note="3' tri-ethylene glycol (TEG)"
ggaagauggc

SEQ ID NO: 17285 - RNA, 8 nt, Artificial Sequence
  source: /note="Description of Artificial Sequence: Synthetic oligonucleotide"
  source: /note="RNA"
  source: /note="5' tri-ethylene glycol (TEG)"
  modified_base (1)..(1): bicyclic nucleic acid (BNA)
  modified_base (8)..(8): bicyclic nucleic acid (BNA)
  source: /note="3' tri-ethylene glycol (TEG)"
ggaagaug

SEQ ID NO: 17286 - RNA, 17 nt, Artificial Sequence
  source: /note="Description of Artificial Sequence: Synthetic oligonucleotide"
  source: /note="RNA"
  source: /note="5' tri-ethylene glycol (TEG)"
  modified_base (1)..(1): bicyclic nucleic acid (BNA)
  modified_base (9)..(9): 5-methyl modified nucleotide
  modified_base (14)..(14): 5-methyl modified nucleotide
  modified_base (17)..(17): bicyclic nucleic acid (BNA)
  source: /note="3' tri-ethylene glycol (TEG)"
gaagauggcauuucuag

SEQ ID NO: 17287 - RNA, 16 nt, Artificial Sequence
  source: /note="Description of Artificial Sequence: Synthetic oligonucleotide"
  source: /note="RNA"
  source: /note="5' tri-ethylene glycol (TEG)"
  modified_base (1)..(1): bicyclic nucleic acid (BNA)
  modified_base (9)..(9): 5-methyl modified nucleotide
  modified_base (14)..(14): 5-methyl modified nucleotide
  modified_base (16)..(16): bicyclic nucleic acid (BNA)
  source: /note="3' tri-ethylene glycol (TEG)"
gaagauggcauuucua

SEQ ID NO: 17288 - RNA, 14 nt, Artificial Sequence
  source: /note="Description of Artificial Sequence: Synthetic oligonucleotide"
  source: /note="RNA"
  source: /note="5' tri-ethylene glycol (TEG)"
  modified_base (1)..(1): bicyclic nucleic acid (BNA)
  modified_base (9)..(9): 5-methyl modified nucleotide
  modified_base (14)..(14): 5-methyl bicyclic nucleic acid
  source: /note="3' tri-ethylene glycol (TEG)"
gaagauggcauuuc

SEQ ID NO: 17289 - DNA, 13 bp, Artificial Sequence
  source: /note="Description of Artificial Sequence: Synthetic oligonucleotide"
  source: /note="Description of Combined DNA/RNA Molecule: Synthetic oligonucleotide"
  source: /note="DNA/RNA"
  source: /note="5' tri-ethylene glycol (TEG)"
  modified_base (1)..(1): bicyclic nucleic acid (BNA)
  modified_base (9)..(9): 5-methyl modified nucleotide
  modified_base (13)..(13): bicyclic nucleic acid (BNA)
  source: /note="3' tri-ethylene glycol (TEG)"
gaagauggcauut

SEQ ID NO: 17290 - DNA, 12 bp, Artificial Sequence
  source: /note="Description of Artificial Sequence: Synthetic oligonucleotide"
  source: /note="Description of Combined DNA/RNA Molecule: Synthetic oligonucleotide"
  source: /note="DNA/RNA"
  source: /note="5' tri-ethylene glycol (TEG)"
  modified_base (1)..(1): bicyclic nucleic acid (BNA)
  modified_base (9)..(9): 5-methyl modified nucleotide
  modified_base (12)..(12): bicyclic nucleic acid (BNA)
  source: /note="3' tri-ethylene glycol (TEG)"
gaagauggcaut

SEQ ID NO: 17291 - DNA, 11 bp, Artificial Sequence
  source: /note="Description of Artificial Sequence: Synthetic oligonucleotide"
  source: /note="Description of Combined DNA/RNA Molecule: Synthetic oligonucleotide"
  source: /note="DNA/RNA"
  source: /note="5' tri-ethylene glycol (TEG)"
  modified_base (1)..(1): bicyclic nucleic acid (BNA)
  modified_base (9)..(9): 5-methyl modified nucleotide
  modified_base (11)..(11): bicyclic nucleic acid (BNA)
  source: /note="3' tri-ethylene glycol (TEG)"
gaagauggcat

SEQ ID NO: 17292 - RNA, 10 nt, Artificial Sequence
  source: /note="Description of Artificial Sequence: Synthetic oligonucleotide"
  source: /note="RNA"
  source: /note="5' tri-ethylene glycol (TEG)"
  modified_base (1)..(1): bicyclic nucleic acid (BNA)
  modified_base (9)..(9): 5-methyl modified nucleotide
  modified_base (10)..(10): bicyclic nucleic acid (BNA)
  source: /note="3' tri-ethylene glycol (TEG)"
gaagauggca

SEQ ID NO: 17293 - RNA, 9 nt, Artificial Sequence
  source: /note="Description of Artificial Sequence: Synthetic oligonucleotide"
  source: /note="RNA"
  source: /note="5' tri-ethylene glycol (TEG)"
  modified_base (1)..(1): bicyclic nucleic acid (BNA)
  modified_base (9)..(9): 5-methyl bicyclic nucleic acid
  source: /note="3' tri-ethylene glycol (TEG)"
gaagauggc

SEQ ID NO: 17294 - RNA, 8 nt, Artificial Sequence
  source: /note="Description of Artificial Sequence: Synthetic oligonucleotide"
  source: /note="RNA"
  source: /note="5' tri-ethylene glycol (TEG)"
  modified_base (1)..(1): bicyclic nucleic acid (BNA)
  modified_base (8)..(8): bicyclic nucleic acid (BNA)
  source: /note="3' tri-ethylene glycol (TEG)"
gaagaugg

SEQ ID NO: 17295 - RNA, 16 nt, Artificial Sequence
  source: /note="Description of Artificial Sequence: Synthetic oligonucleotide"
  source: /note="RNA"
  source: /note="5' tri-ethylene glycol (TEG)"
  modified_base (1)..(1): bicyclic nucleic acid (BNA)
  modified_base (8)..(8): 5-methyl modified nucleotide
  modified_base (13)..(13): 5-methyl modified nucleotide
  modified_base (16)..(16): bicyclic nucleic acid (BNA)
  source: /note="3' tri-ethylene glycol (TEG)"
aagauggcauuucuag

SEQ ID NO: 17296 - RNA, 15 nt, Artificial Sequence
  source: /note="Description of Artificial Sequence: Synthetic oligonucleotide"
  source: /note="RNA"
  source: /note="5' tri-ethylene glycol (TEG)"
  modified_base (1)..(1): bicyclic nucleic acid (BNA)
  modified_base (8)..(8): 5-methyl modified nucleotide
  modified_base (13)..(13): 5-methyl modified nucleotide
  modified_base (15)..(15): bicyclic nucleic acid (BNA)
  source: /note="3' tri-ethylene glycol (TEG)"
aagauggcauuucua

SEQ ID NO: 17297 - DNA, 14 bp, Artificial Sequence
  source: /note="Description of Artificial Sequence: Synthetic oligonucleotide"
  source: /note="Description of Combined DNA/RNA Molecule: Synthetic oligonucleotide"
  source: /note="DNA/RNA"
  source: /note="5' tri-ethylene glycol (TEG)"
  modified_base (1)..(1): bicyclic nucleic acid (BNA)
  modified_base (8)..(8): 5-methyl modified nucleotide
  modified_base (13)..(13): 5-methyl modified nucleotide
  modified_base (14)..(14): bicyclic nucleic acid (BNA)
  source: /note="3' tri-ethylene glycol (TEG)"
aagauggcauuuct

SEQ ID NO: 17298 - RNA, 13 nt, Artificial Sequence
  source: /note="Description of Artificial Sequence: Synthetic oligonucleotide"
  source: /note="RNA"
  source: /note="5' tri-ethylene glycol (TEG)"
  modified_base (1)..(1): bicyclic nucleic acid (BNA)
  modified_base (8)..(8): 5-methyl modified nucleotide
  modified_base (13)..(13): 5-methyl bicyclic nucleic acid
  source: /note="3' tri-ethylene glycol (TEG)"
aagauggcauuuc

SEQ ID NO: 17299 - DNA, 12 bp, Artificial Sequence
  source: /note="Description of Artificial Sequence: Synthetic oligonucleotide"
  source: /note="Description of Combined DNA/RNA Molecule: Synthetic oligonucleotide"
  source: /note="DNA/RNA"
  source: /note="5' tri-ethylene glycol (TEG)"
  modified_base (1)..(1): bicyclic nucleic acid (BNA)
  modified_base (8)..(8): 5-methyl modified nucleotide
  modified_base (12)..(12): bicyclic nucleic acid (BNA)
  source: /note="3' tri-ethylene glycol (TEG)"
aagauggcauut

SEQ ID NO: 17300 - DNA, 11 bp, Artificial Sequence
  source: /note="Description of Artificial Sequence: Synthetic oligonucleotide"
  source: /note="Description of Combined DNA/RNA Molecule: Synthetic oligonucleotide"
  source: /note="DNA/RNA"
  source: /note="5' tri-ethylene glycol (TEG)"
  modified_base (1)..(1): bicyclic nucleic acid (BNA)
  modified_base (8)..(8): 5-methyl modified nucleotide
  modified_base (11)..(11): bicyclic nucleic acid (BNA)
  source: /note="3' tri-ethylene glycol (TEG)"
aagauggcaut

SEQ ID NO: 17301 - DNA, 10 bp, Artificial Sequence
  source: /note="Description of Artificial Sequence: Synthetic oligonucleotide"
  source: /note="Description of Combined DNA/RNA Molecule: Synthetic oligonucleotide"
  source: /note="DNA/RNA"
  source: /note="5' tri-ethylene glycol (TEG)"
  modified_base (1)..(1): bicyclic nucleic acid (BNA)
  modified_base (8)..(8): 5-methyl modified nucleotide
  modified_base (10)..(10): bicyclic nucleic acid (BNA)
  source: /note="3' tri-ethylene glycol (TEG)"
aagauggcat

SEQ ID NO: 17302 - RNA, 9 nt, Artificial Sequence
  source: /note="Description of Artificial Sequence: Synthetic oligonucleotide"
  source: /note="RNA"
  source: /note="5' tri-ethylene glycol (TEG)"
  modified_base (1)..(1): bicyclic nucleic acid (BNA)
  modified_base (8)..(8): 5-methyl modified nucleotide
  modified_base (9)..(9): bicyclic nucleic acid (BNA)
  source: /note="3' tri-ethylene glycol (TEG)"
aagauggca

SEQ ID NO: 17303 - RNA, 8 nt, Artificial Sequence
  source: /note="Description of Artificial Sequence: Synthetic oligonucleotide"
  source: /note="RNA"
  source: /note="5' tri-ethylene glycol (TEG)"
  modified_base (1)..(1): bicyclic nucleic acid (BNA)
  modified_base (8)..(8): 5-methyl bicyclic nucleic acid
  source: /note="3' tri-ethylene glycol (TEG)"
aagauggc

SEQ ID NO: 17304 - RNA, 15 nt, Artificial Sequence
  source: /note="Description of Artificial Sequence: Synthetic oligonucleotide"
  source: /note="RNA"
  source: /note="5' tri-ethylene glycol (TEG)"
  modified_base (1)..(1): bicyclic nucleic acid (BNA)
  modified_base (7)..(7): 5-methyl modified nucleotide
  modified_base (12)..(12): 5-methyl modified nucleotide
  modified_base (15)..(15): bicyclic nucleic acid (BNA)
  source: /note="3' tri-ethylene glycol (TEG)"
agauggcauuucuag

SEQ ID NO: 17305 - RNA, 14 nt, Artificial Sequence
  source: /note="Description of Artificial Sequence: Synthetic oligonucleotide"
  source: /note="RNA"
  source: /note="5' tri-ethylene glycol (TEG)"
  modified_base (1)..(1): bicyclic nucleic acid (BNA)
  modified_base (7)..(7): 5-methyl modified nucleotide
  modified_base (12)..(12): 5-methyl modified nucleotide
  modified_base (14)..(14): bicyclic nucleic acid (BNA)
  source: /note="3' tri-ethylene glycol (TEG)"
agauggcauuucua

SEQ ID NO: 17306 - DNA, 13 bp, Artificial Sequence
  source: /note="Description of Artificial Sequence: Synthetic oligonucleotide"
  source: /note="Description of Combined DNA/RNA Molecule: Synthetic oligonucleotide"
  source: /note="DNA/RNA"
  source: /note="5' tri-ethylene glycol (TEG)"
  modified_base (1)..(1): bicyclic nucleic acid (BNA)
  modified_base (7)..(7): 5-methyl modified nucleotide
  modified_base (12)..(12): 5-methyl modified nucleotide
  modified_base (13)..(13): bicyclic nucleic acid (BNA)
  source: /note="3' tri-ethylene glycol (TEG)"
agauggcauuuct

SEQ ID NO: 17307 - RNA, 12 nt, Artificial Sequence
  source: /note="Description of Artificial Sequence: Synthetic oligonucleotide"
  source: /note="RNA"
  source: /note="5' tri-ethylene glycol (TEG)"
  modified_base (1)..(1): bicyclic nucleic acid (BNA)
  modified_base (7)..(7): 5-methyl modified nucleotide
  modified_base (12)..(12): 5-methyl bicyclic nucleic acid
  source: /note="3' tri-ethylene glycol (TEG)"
agauggcauuuc

SEQ ID NO: 17308 - DNA, 11 bp, Artificial Sequence
  source: /note="Description of Artificial Sequence: Synthetic oligonucleotide"
  source: /note="Description of Combined DNA/RNA Molecule: Synthetic oligonucleotide"
  source: /note="DNA/RNA"
  source: /note="5' tri-ethylene glycol (TEG)"
  modified_base (1)..(1): bicyclic nucleic acid (BNA)
  modified_base (7)..(7): 5-methyl modified nucleotide
  modified_base (11)..(11): bicyclic nucleic acid (BNA)
  source: /note="3' tri-ethylene glycol (TEG)"
agauggcauut

SEQ ID NO: 17309 - DNA, 10 bp, Artificial Sequence
  source: /note="Description of Artificial Sequence: Synthetic oligonucleotide"
  source: /note="Description of Combined DNA/RNA Molecule: Synthetic oligonucleotide"
  source: /note="DNA/RNA"
  source: /note="5' tri-ethylene glycol (TEG)"
  modified_base (1)..(1): bicyclic nucleic acid (BNA)
  modified_base (7)..(7): 5-methyl modified nucleotide
  modified_base (10)..(10): bicyclic nucleic acid (BNA)
  source: /note="3' tri-ethylene glycol (TEG)"
agauggcaut

SEQ ID NO: 17310 - DNA, 9 bp, Artificial Sequence
  source: /note="Description of Artificial Sequence: Synthetic oligonucleotide"
  source: /note="Description of Combined DNA/RNA Molecule: Synthetic oligonucleotide"
  source: /note="DNA/RNA"
  source: /note="5' tri-ethylene glycol (TEG)"
  modified_base (1)..(1): bicyclic nucleic acid (BNA)
  modified_base (7)..(7): 5-methyl modified nucleotide
  modified_base (9)..(9): bicyclic nucleic acid (BNA)
  source: /note="3' tri-ethylene glycol (TEG)"
agauggcat

SEQ ID NO: 17311 - RNA, 8 nt, Artificial Sequence
  source: /note="Description of Artificial Sequence: Synthetic oligonucleotide"
  source: /note="RNA"
  source: /note="5' tri-ethylene glycol (TEG)"
  modified_base (1)..(1): bicyclic nucleic acid (BNA)
  modified_base (7)..(7): 5-methyl modified nucleotide
  modified_base (8)..(8): bicyclic nucleic acid (BNA)
  source: /note="3' tri-ethylene glycol (TEG)"
agauggca

SEQ ID NO: 17312 - RNA, 30 nt, Artificial Sequence; identical to SEQ ID NO: 284
  source: /note="Description of Artificial Sequence: Synthetic oligonucleotide"
  source: /note="RNA"
  source: /note="5' tri-ethylene glycol (TEG)"
  modified_base (1)..(1): 5-methyl bicyclic nucleic acid
  modified_base (3)..(3): 5-methyl modified nucleotide
  modified_base (4)..(4): 5-methyl modified nucleotide
  modified_base (7)..(7): 5-methyl modified nucleotide
  modified_base (10)..(10): 5-methyl modified nucleotide
  modified_base (22)..(22): 5-methyl modified nucleotide
  modified_base (27)..(27): 5-methyl modified nucleotide
  modified_base (30)..(30): bicyclic nucleic acid (BNA)
  source: /note="3' tri-ethylene glycol (TEG)"

SEQ ID NO: 17313 - RNA, 29 nt, Artificial Sequence
  source: /note="Description of Artificial Sequence: Synthetic oligonucleotide"
  source: /note="RNA"
  source: /note="5' tri-ethylene glycol (TEG)"
  modified_base (1)..(1): 5-methyl bicyclic nucleic acid
  modified_base (3)..(3): 5-methyl modified nucleotide
  modified_base (4)..(4): 5-methyl modified nucleotide
  modified_base (7)..(7): 5-methyl modified nucleotide
  modified_base (10)..(10): 5-methyl modified nucleotide
  modified_base (22)..(22): 5-methyl modified nucleotide
  modified_base (27)..(27): 5-methyl modified nucleotide
  modified_base (29)..(29): bicyclic nucleic acid (BNA)
  source: /note="3' tri-ethylene glycol (TEG)"
cuccaacaucaaggaagauggcauuucua

SEQ ID NO: 17314 - DNA, 28 bp, Artificial Sequence
  source: /note="Description of Artificial Sequence: Synthetic oligonucleotide"
  source: /note="Description of Combined DNA/RNA Molecule: Synthetic oligonucleotide"
  source: /note="DNA/RNA"
  source: /note="5' tri-ethylene glycol (TEG)"
  modified_base (1)..(1): 5-methyl bicyclic nucleic acid
  modified_base (3)..(3): 5-methyl modified nucleotide
  modified_base (4)..(4): 5-methyl modified nucleotide
  modified_base (7)..(7): 5-methyl modified nucleotide
  modified_base (10)..(10): 5-methyl modified nucleotide
  modified_base (22)..(22): 5-methyl modified nucleotide
  modified_base (27)..(27): 5-methyl modified nucleotide
  modified_base (28)..(28): bicyclic nucleic acid (BNA)
  source: /note="3' tri-ethylene glycol (TEG)"
cuccaacaucaaggaagauggcauuuct

SEQ ID NO: 17315 - RNA, 27 nt, Artificial Sequence
  source: /note="Description of Artificial Sequence: Synthetic oligonucleotide"
  source: /note="RNA"
  source: /note="5' tri-ethylene glycol (TEG)"
  modified_base (1)..(1): 5-methyl bicyclic nucleic acid
  modified_base (3)..(3): 5-methyl modified nucleotide
  modified_base (4)..(4): 5-methyl modified nucleotide
  modified_base (7)..(7): 5-methyl modified nucleotide
  modified_base (10)..(10): 5-methyl modified nucleotide
  modified_base (22)..(22): 5-methyl modified nucleotide
  modified_base (27)..(27): 5-methyl bicyclic nucleic acid
  source: /note="3' tri-ethylene glycol (TEG)"
cuccaacaucaaggaagauggcauuuc

SEQ ID NO: 17316 - DNA, 26 bp, Artificial Sequence
  source: /note="Description of Artificial Sequence: Synthetic oligonucleotide"
  source: /note="Description of Combined DNA/RNA Molecule: Synthetic oligonucleotide"
  source: /note="DNA/RNA"
  source: /note="5' tri-ethylene glycol (TEG)"
  modified_base (1)..(1): 5-methyl bicyclic nucleic acid
  modified_base (3)..(3): 5-methyl modified nucleotide
  modified_base (4)..(4): 5-methyl modified nucleotide
  modified_base (7)..(7): 5-methyl modified nucleotide
  modified_base (10)..(10): 5-methyl modified nucleotide
  modified_base (22)..(22): 5-methyl modified nucleotide
  modified_base (26)..(26): bicyclic nucleic acid (BNA)
  source: /note="3' tri-ethylene glycol (TEG)"
cuccaacaucaaggaagauggcauut

SEQ ID NO: 17317 - DNA, 25 bp, Artificial Sequence
  source: /note="Description of Artificial Sequence: Synthetic oligonucleotide"
  source: /note="Description of Combined DNA/RNA Molecule: Synthetic oligonucleotide"
  source: /note="DNA/RNA"
  source: /note="5' tri-ethylene glycol (TEG)"
  modified_base (1)..(1): 5-methyl bicyclic nucleic acid
  modified_base (3)..(3): 5-methyl modified nucleotide
  modified_base (4)..(4): 5-methyl modified nucleotide
  modified_base (7)..(7): 5-methyl modified nucleotide
  modified_base (10)..(10): 5-methyl modified nucleotide
  modified_base (22)..(22): 5-methyl modified nucleotide
  modified_base (25)..(25): bicyclic nucleic acid (BNA)
  source: /note="3' tri-ethylene glycol (TEG)"
cuccaacaucaaggaagauggcaut

SEQ ID NO: 17318 - DNA, 24 bp, Artificial Sequence
  source: /note="Description of Artificial Sequence: Synthetic oligonucleotide"
  source: /note="Description of Combined DNA/RNA Molecule: Synthetic oligonucleotide"
  source: /note="DNA/RNA"
  source: /note="5' tri-ethylene glycol (TEG)"
  modified_base (1)..(1): 5-methyl bicyclic nucleic acid
  modified_base (3)..(3): 5-methyl modified nucleotide
  modified_base (4)..(4): 5-methyl modified nucleotide
  modified_base (7)..(7): 5-methyl modified nucleotide
  modified_base (10)..(10): 5-methyl modified nucleotide
  modified_base (22)..(22): 5-methyl modified nucleotide
  modified_base (24)..(24): bicyclic nucleic acid (BNA)
  source: /note="3' tri-ethylene glycol (TEG)"
cuccaacaucaaggaagauggcat

SEQ ID NO: 17319 - RNA, 23 nt, Artificial Sequence
  source: /note="Description of Artificial Sequence: Synthetic oligonucleotide"
  source: /note="RNA"
  source: /note="5' tri-ethylene glycol (TEG)"
  modified_base (1)..(1): 5-methyl bicyclic nucleic acid
  modified_base (3)..(3): 5-methyl modified nucleotide
  modified_base (4)..(4): 5-methyl modified nucleotide
  modified_base (7)..(7): 5-methyl modified nucleotide
  modified_base (10)..(10): 5-methyl modified nucleotide
  modified_base (22)..(22): 5-methyl modified nucleotide
  modified_base (23)..(23): bicyclic nucleic acid (BNA)
  source: /note="3' tri-ethylene glycol (TEG)"
cuccaacaucaaggaagauggca

SEQ ID NO: 17320 - RNA, 22 nt, Artificial Sequence
  source: /note="Description of Artificial Sequence: Synthetic oligonucleotide"
  source: /note="RNA"
  source: /note="5' tri-ethylene glycol (TEG)"
  modified_base (1)..(1): 5-methyl bicyclic nucleic acid
  modified_base (3)..(3): 5-methyl modified nucleotide
  modified_base (4)..(4): 5-methyl modified nucleotide
  modified_base (7)..(7): 5-methyl modified nucleotide
  modified_base (10)..(10): 5-methyl modified nucleotide
  modified_base (22)..(22): 5-methyl bicyclic nucleic acid
  source: /note="3' tri-ethylene glycol (TEG)"
cuccaacaucaaggaagauggc

SEQ ID NO: 17321 - RNA, 21 nt, Artificial Sequence
  source: /note="Description of Artificial Sequence: Synthetic oligonucleotide"
  source: /note="RNA"
  source: /note="5' tri-ethylene glycol (TEG)"
  modified_base (1)..(1): 5-methyl bicyclic nucleic acid
  modified_base (3)..(3): 5-methyl modified nucleotide
  modified_base (4)..(4): 5-methyl modified nucleotide
  modified_base (7)..(7): 5-methyl modified nucleotide
  modified_base (10)..(10): 5-methyl modified nucleotide
  modified_base (21)..(21): bicyclic nucleic acid (BNA)
  source: /note="3' tri-ethylene glycol (TEG)"
cuccaacaucaaggaagaugg

SEQ ID NO: 17322 - RNA, 20 nt, Artificial Sequence
  source: /note="Description of Artificial Sequence: Synthetic oligonucleotide"
  source: /note="RNA"
  source: /note="5' tri-ethylene glycol (TEG)"
  modified_base (1)..(1): 5-methyl bicyclic nucleic acid
  modified_base (3)..(3): 5-methyl modified nucleotide
  modified_base (4)..(4): 5-methyl modified nucleotide
  modified_base (7)..(7): 5-methyl modified nucleotide
  modified_base (10)..(10): 5-methyl modified nucleotide
  modified_base (20)..(20): bicyclic nucleic acid (BNA)
  source: /note="3' tri-ethylene glycol (TEG)"
cuccaacaucaaggaagaug

SEQ ID NO: 17323 - DNA, 19 bp, Artificial Sequence
  source: /note="Description of Artificial Sequence: Synthetic oligonucleotide"
  source: /note="Description of Combined DNA/RNA Molecule: Synthetic oligonucleotide"
  source: /note="DNA/RNA"
  source: /note="5' tri-ethylene glycol (TEG)"
  modified_base (1)..(1): 5-methyl bicyclic nucleic acid
  modified_base (3)..(3): 5-methyl modified nucleotide
  modified_base (4)..(4): 5-methyl modified nucleotide
  modified_base (7)..(7): 5-methyl modified nucleotide
  modified_base (10)..(10): 5-methyl modified nucleotide
  modified_base (19)..(19): bicyclic nucleic acid (BNA)
  source: /note="3' tri-ethylene glycol (TEG)"
cuccaacaucaaggaagat

SEQ ID NO: 17324 - RNA, 18 nt, Artificial Sequence
  source: /note="Description of Artificial Sequence: Synthetic oligonucleotide"
  source: /note="RNA"
  source: /note="5' tri-ethylene glycol (TEG)"
  modified_base (1)..(1): 5-methyl bicyclic nucleic acid
  modified_base (3)..(3): 5-methyl modified nucleotide
  modified_base (4)..(4): 5-methyl modified nucleotide
  modified_base (7)..(7): 5-methyl modified nucleotide
  modified_base (10)..(10): 5-methyl modified nucleotide
  modified_base (18)..(18): bicyclic nucleic acid (BNA)
  source: /note="3' tri-ethylene glycol (TEG)"
cuccaacaucaaggaaga

SEQ ID NO: 17325 - RNA, 17 nt, Artificial Sequence
  source: /note="Description of Artificial Sequence: Synthetic oligonucleotide"
  source: /note="RNA"
  source: /note="5' tri-ethylene glycol (TEG)"
  modified_base (1)..(1): 5-methyl bicyclic nucleic acid
  modified_base (3)..(3): 5-methyl modified nucleotide
  modified_base (4)..(4): 5-methyl modified nucleotide
  modified_base (7)..(7): 5-methyl modified nucleotide
  modified_base (10)..(10): 5-methyl modified nucleotide
  modified_base (17)..(17): bicyclic nucleic acid (BNA)
  source: /note="3' tri-ethylene glycol (TEG)"
cuccaacaucaaggaag

SEQ ID NO: 17326 - DNA, 29 bp, Artificial Sequence
  source: /note="Description of Artificial Sequence: Synthetic oligonucleotide"
  source: /note="Description of Combined DNA/RNA Molecule: Synthetic oligonucleotide"
  source: /note="DNA/RNA"
  source: /note="5' tri-ethylene glycol (TEG)"
  modified_base (1)..(1): bicyclic nucleic acid (BNA)
  modified_base (2)..(2): 5-methyl modified nucleotide
  modified_base (3)..(3): 5-methyl modified nucleotide
  modified_base (6)..(6): 5-methyl modified nucleotide
  modified_base (9)..(9): 5-methyl modified nucleotide
  modified_base (21)..(21): 5-methyl modified nucleotide
  modified_base (26)..(26): 5-methyl modified nucleotide
  modified_base (29)..(29): bicyclic nucleic acid (BNA)
  source: /note="3' tri-ethylene glycol (TEG)"
tccaacaucaaggaagauggcauuucuag

SEQ ID NO: 17327 - DNA, 28 bp, Artificial Sequence
  source: /note="Description of Artificial Sequence: Synthetic oligonucleotide"
  source: /note="Description of Combined DNA/RNA Molecule: Synthetic oligonucleotide"
  source: /note="DNA/RNA"
  source: /note="5' tri-ethylene glycol (TEG)"
  modified_base (1)..(1): bicyclic nucleic acid (BNA)
  modified_base (2)..(2): 5-methyl modified nucleotide
  modified_base (3)..(3): 5-methyl modified nucleotide
  modified_base (6)..(6): 5-methyl modified nucleotide
  modified_base (9)..(9): 5-methyl modified nucleotide
  modified_base (21)..(21): 5-methyl modified nucleotide
  modified_base (26)..(26): 5-methyl modified nucleotide
  modified_base (28)..(28): bicyclic nucleic acid (BNA)
  source: /note="3' tri-ethylene glycol (TEG)"
tccaacaucaaggaagauggcauuucua

SEQ ID NO: 17328 - DNA, 27 bp, Artificial Sequence
  source: /note="Description of Artificial Sequence: Synthetic oligonucleotide"
  source: /note="Description of Combined DNA/RNA Molecule: Synthetic oligonucleotide"
  source: /note="DNA/RNA"
  source: /note="5' tri-ethylene glycol (TEG)"
  modified_base (1)..(1): bicyclic nucleic acid (BNA)
  modified_base (2)..(2): 5-methyl modified nucleotide
  modified_base (3)..(3): 5-methyl modified nucleotide
  modified_base (6)..(6): 5-methyl modified nucleotide
  modified_base (9)..(9): 5-methyl modified nucleotide
  modified_base (21)..(21): 5-methyl modified nucleotide
  modified_base (26)..(26): 5-methyl modified nucleotide
  modified_base (27)..(27): bicyclic nucleic acid (BNA)
  source: /note="3' tri-ethylene glycol (TEG)"
tccaacaucaaggaagauggcauuuct

SEQ ID NO: 17329 - DNA, 26 bp, Artificial Sequence
  source: /note="Description of Artificial Sequence: Synthetic oligonucleotide"
  source: /note="Description of Combined DNA/RNA Molecule: Synthetic oligonucleotide"
  source: /note="DNA/RNA"
  source: /note="5' tri-ethylene glycol (TEG)"
  modified_base (1)..(1): bicyclic nucleic acid (BNA)
  modified_base (2)..(2): 5-methyl modified nucleotide
  modified_base (3)..(3): 5-methyl modified nucleotide
  modified_base (6)..(6): 5-methyl modified nucleotide
  modified_base (9)..(9): 5-methyl modified nucleotide
  modified_base (21)..(21): 5-methyl modified nucleotide
  modified_base (26)..(26): 5-methyl bicyclic nucleic acid
  source: /note="3' tri-ethylene glycol (TEG)"
tccaacaucaaggaagauggcauuuc

SEQ ID NO: 17330 - DNA, 25 bp, Artificial Sequence
  source: /note="Description of Artificial Sequence: Synthetic oligonucleotide"
  source: /note="Description of Combined DNA/RNA Molecule: Synthetic oligonucleotide"
  source: /note="DNA/RNA"
  source: /note="5' tri-ethylene glycol (TEG)"
  modified_base (1)..(1): bicyclic nucleic acid (BNA)
  modified_base (2)..(2): 5-methyl modified nucleotide
  modified_base (3)..(3): 5-methyl modified nucleotide
  modified_base (6)..(6): 5-methyl modified nucleotide
  modified_base (9)..(9): 5-methyl modified nucleotide
  modified_base (21)..(21): 5-methyl modified nucleotide
  modified_base (25)..(25): bicyclic nucleic acid (BNA)
  source: /note="3' tri-ethylene glycol (TEG)"
tccaacaucaaggaagauggcauut

SEQ ID NO: 17331 - DNA, 24 bp, Artificial Sequence
  source: /note="Description of Artificial Sequence: Synthetic oligonucleotide"
  source: /note="Description of Combined DNA/RNA Molecule: Synthetic oligonucleotide"
  source: /note="DNA/RNA"
  source: /note="5' tri-ethylene glycol (TEG)"
  modified_base (1)..(1): bicyclic nucleic acid (BNA)
  modified_base (2)..(2): 5-methyl modified nucleotide
  modified_base (3)..(3): 5-methyl modified nucleotide
  modified_base (6)..(6): 5-methyl modified nucleotide
  modified_base (9)..(9): 5-methyl modified nucleotide
  modified_base (21)..(21): 5-methyl modified nucleotide
  modified_base (24)..(24): bicyclic nucleic acid (BNA)
  source: /note="3' tri-ethylene glycol (TEG)"
tccaacaucaaggaagauggcaut

SEQ ID NO: 17332 - DNA, 23 bp, Artificial Sequence
  source: /note="Description of Artificial Sequence: Synthetic oligonucleotide"
  source: /note="Description of Combined DNA/RNA Molecule: Synthetic oligonucleotide"
  source: /note="DNA/RNA"
  source: /note="5' tri-ethylene glycol (TEG)"
  modified_base (1)..(1): bicyclic nucleic acid (BNA)
  modified_base (2)..(2): 5-methyl modified nucleotide
  modified_base (3)..(3): 5-methyl modified nucleotide
  modified_base (6)..(6): 5-methyl modified nucleotide
  modified_base (9)..(9): 5-methyl modified nucleotide
  modified_base (21)..(21): 5-methyl modified nucleotide
  modified_base (23)..(23): bicyclic nucleic acid (BNA)
  source: /note="3' tri-ethylene glycol (TEG)"
tccaacaucaaggaagauggcat

SEQ ID NO: 17333 - DNA, 22 bp, Artificial Sequence
  source: /note="Description of Artificial Sequence: Synthetic oligonucleotide"
  source: /note="Description of Combined DNA/RNA Molecule: Synthetic oligonucleotide"
  source: /note="DNA/RNA"
  source: /note="5' tri-ethylene glycol (TEG)"
  modified_base (1)..(1): bicyclic nucleic acid (BNA)
  modified_base (2)..(2): 5-methyl modified nucleotide
  modified_base (3)..(3): 5-methyl modified nucleotide
  modified_base (6)..(6): 5-methyl modified nucleotide
  modified_base (9)..(9): 5-methyl modified nucleotide
  modified_base (21)..(21): 5-methyl modified nucleotide
  modified_base (22)..(22): bicyclic nucleic acid (BNA)
  source: /note="3' tri-ethylene glycol (TEG)"
tccaacaucaaggaagauggca

SEQ ID NO: 17334 - DNA, 21 bp, Artificial Sequence
  source: /note="Description of Artificial Sequence: Synthetic oligonucleotide"
  source: /note="Description of Combined DNA/RNA Molecule: Synthetic oligonucleotide"
  source: /note="DNA/RNA"
  source: /note="5' tri-ethylene glycol (TEG)"
  modified_base (1)..(1): bicyclic nucleic acid (BNA)
  modified_base (2)..(2): 5-methyl modified nucleotide
  modified_base (3)..(3): 5-methyl modified nucleotide
  modified_base (6)..(6): 5-methyl modified nucleotide
  modified_base (9)..(9): 5-methyl modified nucleotide
  modified_base (21)..(21): 5-methyl bicyclic nucleic acid
  source: /note="3' tri-ethylene glycol (TEG)"
tccaacaucaaggaagauggc

SEQ ID NO: 17335 - DNA, 20 bp, Artificial Sequence
  source: /note="Description of Artificial Sequence: Synthetic oligonucleotide"
  source: /note="Description of Combined DNA/RNA Molecule: Synthetic oligonucleotide"
  source: /note="DNA/RNA"
  source: /note="5' tri-ethylene glycol (TEG)"
  modified_base (1)..(1): bicyclic nucleic acid (BNA)
  modified_base (2)..(2): 5-methyl modified nucleotide
  modified_base (3)..(3): 5-methyl modified nucleotide
  modified_base (6)..(6): 5-methyl modified nucleotide
  modified_base (9)..(9): 5-methyl modified nucleotide
  modified_base (20)..(20): bicyclic nucleic acid (BNA)
  source: /note="3' tri-ethylene glycol (TEG)"
tccaacaucaaggaagaugg

SEQ ID NO: 17336 - DNA, 19 bp, Artificial Sequence
  source: /note="Description of Artificial Sequence: Synthetic oligonucleotide"
  source: /note="Description of Combined DNA/RNA Molecule: Synthetic oligonucleotide"
  source: /note="DNA/RNA"
  source: /note="5' tri-ethylene glycol (TEG)"
  modified_base (1)..(1): bicyclic nucleic acid (BNA)
  modified_base (2)..(2): 5-methyl modified nucleotide
  modified_base (3)..(3): 5-methyl modified nucleotide
  modified_base (6)..(6): 5-methyl modified nucleotide
  modified_base (9)..(9): 5-methyl modified nucleotide
  modified_base (19)..(19): bicyclic nucleic acid (BNA)
  source: /note="3' tri-ethylene glycol (TEG)"
tccaacaucaaggaagaug

SEQ ID NO: 17337 - DNA, 18 bp, Artificial Sequence
  source: /note="Description of Artificial Sequence: Synthetic oligonucleotide"
  source: /note="Description of Combined DNA/RNA Molecule: Synthetic oligonucleotide"
  source: /note="DNA/RNA"
  source: /note="5' tri-ethylene glycol (TEG)"
  modified_base (1)..(1): bicyclic nucleic acid (BNA)
  modified_base (2)..(2): 5-methyl modified nucleotide
  modified_base (3)..(3): 5-methyl modified nucleotide
  modified_base (6)..(6): 5-methyl modified nucleotide
  modified_base (9)..(9): 5-methyl modified nucleotide
  modified_base (18)..(18): bicyclic nucleic acid (BNA)
  source: /note="3' tri-ethylene glycol (TEG)"
tccaacaucaaggaagat

SEQ ID NO: 17338 - DNA, 17 bp, Artificial Sequence
  source: /note="Description of Artificial Sequence: Synthetic oligonucleotide"
  source: /note="Description of Combined DNA/RNA Molecule: Synthetic oligonucleotide"
  source: /note="DNA/RNA"
  source: /note="5' tri-ethylene glycol (TEG)"
  modified_base (1)..(1): bicyclic nucleic acid (BNA)
  modified_base (2)..(2): 5-methyl modified nucleotide
  modified_base (3)..(3): 5-methyl modified nucleotide
  modified_base (6)..(6): 5-methyl modified nucleotide
  modified_base (9)..(9): 5-methyl modified nucleotide
  modified_base (17)..(17): bicyclic nucleic acid (BNA)
  source: /note="3' tri-ethylene glycol (TEG)"
tccaacaucaaggaaga

SEQ ID NO: 17339 - DNA, 16 bp, Artificial Sequence
  source: /note="Description of Artificial Sequence: Synthetic oligonucleotide"
  source: /note="Description of Combined DNA/RNA Molecule: Synthetic oligonucleotide"
  source: /note="DNA/RNA"
  source: /note="5' tri-ethylene glycol (TEG)"
  modified_base (1)..(1): bicyclic nucleic acid (BNA)
  modified_base (2)..(2): 5-methyl modified nucleotide
  modified_base (3)..(3): 5-methyl modified nucleotide
  modified_base (6)..(6): 5-methyl modified nucleotide
  modified_base (9)..(9): 5-methyl modified nucleotide
  modified_base (16)..(16): bicyclic nucleic acid (BNA)
  source: /note="3' tri-ethylene glycol (TEG)"
tccaacaucaaggaag

SEQ ID NO: 17340 - RNA, 28 nt, Artificial Sequence
  source: /note="Description of Artificial Sequence: Synthetic oligonucleotide"
  source: /note="RNA"
  source: /note="5' tri-ethylene glycol (TEG)"
  modified_base (1)..(1): 5-methyl bicyclic nucleic acid
  modified_base (2)..(2): 5-methyl modified nucleotide
  modified_base (5)..(5): 5-methyl modified nucleotide
  modified_base (8)..(8): 5-methyl modified nucleotide
  modified_base (20)..(20): 5-methyl modified nucleotide
  modified_base (25)..(25): 5-methyl modified nucleotide
  modified_base (28)..(28): bicyclic nucleic acid (BNA)
  source: /note="3' tri-ethylene glycol (TEG)"
ccaacaucaaggaagauggcauuucuag

SEQ ID NO: 17341 - RNA, 27 nt, Artificial Sequence
  source: /note="Description of Artificial Sequence: Synthetic oligonucleotide"
  source: /note="RNA"
  source: /note="5' tri-ethylene glycol (TEG)"
  modified_base (1)..(1): 5-methyl bicyclic nucleic acid
  modified_base (2)..(2): 5-methyl modified nucleotide
  modified_base (5)..(5): 5-methyl modified nucleotide
  modified_base (8)..(8): 5-methyl modified nucleotide
  modified_base (20)..(20): 5-methyl modified nucleotide
  modified_base (25)..(25): 5-methyl modified nucleotide
  modified_base (27)..(27): bicyclic nucleic acid (BNA)
  source: /note="3' tri-ethylene glycol (TEG)"
ccaacaucaaggaagauggcauuucua

SEQ ID NO: 17342 - DNA, 26 bp, Artificial Sequence
  source: /note="Description of Artificial Sequence: Synthetic oligonucleotide"
  source: /note="Description of Combined DNA/RNA Molecule: Synthetic oligonucleotide"
  source: /note="DNA/RNA"
  source: /note="5' tri-ethylene glycol (TEG)"
  modified_base (1)..(1): 5-methyl bicyclic nucleic acid
  modified_base (2)..(2): 5-methyl modified nucleotide
  modified_base (5)..(5): 5-methyl modified nucleotide
  modified_base (8)..(8): 5-methyl modified nucleotide
  modified_base (20)..(20): 5-methyl modified nucleotide
  modified_base (25)..(25): 5-methyl modified nucleotide
  modified_base (26)..(26): bicyclic nucleic acid (BNA)
  source: /note="3' tri-ethylene glycol (TEG)"
ccaacaucaaggaagauggcauuuct

SEQ ID NO: 17343 - RNA, 25 nt, Artificial Sequence
  source: /note="Description of Artificial Sequence: Synthetic oligonucleotide"
  source: /note="RNA"
  source: /note="5' tri-ethylene glycol (TEG)"
  modified_base (1)..(1): 5-methyl bicyclic nucleic acid
  modified_base (2)..(2): 5-methyl modified nucleotide
  modified_base (5)..(5): 5-methyl modified nucleotide
  modified_base (8)..(8): 5-methyl modified nucleotide
  modified_base (20)..(20): 5-methyl modified nucleotide
  modified_base (25)..(25): 5-methyl bicyclic nucleic acid
  source: /note="3' tri-ethylene glycol (TEG)"
ccaacaucaaggaagauggcauuuc

SEQ ID NO: 17344 - DNA, 24 bp, Artificial Sequence
  source: /note="Description of Artificial Sequence: Synthetic oligonucleotide"
  source: /note="Description of Combined DNA/RNA Molecule: Synthetic oligonucleotide"
  source: /note="DNA/RNA"
  source: /note="5' tri-ethylene glycol (TEG)"
  modified_base (1)..(1): 5-methyl bicyclic nucleic acid
  modified_base (2)..(2): 5-methyl modified nucleotide
  modified_base (5)..(5): 5-methyl modified nucleotide
  modified_base (8)..(8): 5-methyl modified nucleotide
  modified_base (20)..(20): 5-methyl modified nucleotide
  modified_base (24)..(24): bicyclic nucleic acid (BNA)
  source: /note="3' tri-ethylene glycol (TEG)"
ccaacaucaaggaagauggcauut

SEQ ID NO: 17345 - DNA, 23 bp, Artificial Sequence
  source: /note="Description of Artificial Sequence: Synthetic oligonucleotide"
  source: /note="Description of Combined DNA/RNA Molecule: Synthetic oligonucleotide"
  source: /note="DNA/RNA"
  source: /note="5' tri-ethylene glycol (TEG)"
  modified_base (1)..(1): 5-methyl bicyclic nucleic acid
  modified_base (2)..(2): 5-methyl modified nucleotide
  modified_base (5)..(5): 5-methyl modified nucleotide
  modified_base (8)..(8): 5-methyl modified nucleotide
  modified_base (20)..(20): 5-methyl modified nucleotide
  modified_base (23)..(23): bicyclic nucleic acid (BNA)
  source: /note="3' tri-ethylene glycol (TEG)"
ccaacaucaaggaagauggcaut

SEQ ID NO: 17346 - DNA, 22 bp, Artificial Sequence
  source: /note="Description of Artificial Sequence: Synthetic oligonucleotide"
  source: /note="Description of Combined DNA/RNA Molecule: Synthetic oligonucleotide"
  source: /note="DNA/RNA"
  source: /note="5' tri-ethylene glycol (TEG)"
  modified_base (1)..(1): 5-methyl bicyclic nucleic acid
  modified_base (2)..(2): 5-methyl modified nucleotide
  modified_base (5)..(5): 5-methyl modified nucleotide
  modified_base (8)..(8): 5-methyl modified nucleotide
  modified_base (20)..(20): 5-methyl modified nucleotide
  modified_base (22)..(22): bicyclic nucleic acid (BNA)
  source: /note="3' tri-ethylene glycol (TEG)"
ccaacaucaaggaagauggcat

SEQ ID NO: 17347 - RNA, 21 nt, Artificial Sequence
  source: /note="Description of Artificial Sequence: Synthetic oligonucleotide"
  source: /note="RNA"
  source: /note="5' tri-ethylene glycol (TEG)"
  modified_base (1)..(1): 5-methyl bicyclic nucleic acid
  modified_base (2)..(2): 5-methyl modified nucleotide
  modified_base (5)..(5): 5-methyl modified nucleotide
  modified_base (8)..(8): 5-methyl modified nucleotide
  modified_base (20)..(20): 5-methyl modified nucleotide
  modified_base (21)..(21): bicyclic nucleic acid (BNA)
  source: /note="3' tri-ethylene glycol (TEG)"
ccaacaucaaggaagauggca

SEQ ID NO: 17348 - RNA, 20 nt, Artificial Sequence
  source: /note="Description of Artificial Sequence: Synthetic oligonucleotide"
  source: /note="RNA"
  source: /note="5' tri-ethylene glycol (TEG)"
  modified_base (1)..(1): 5-methyl bicyclic nucleic acid
  modified_base (2)..(2): 5-methyl modified nucleotide
  modified_base (5)..(5): 5-methyl modified nucleotide
  modified_base (8)..(8): 5-methyl modified nucleotide
  modified_base (20)..(20): 5-methyl bicyclic nucleic acid
  source: /note="3' tri-ethylene glycol (TEG)"
ccaacaucaaggaagauggc

SEQ ID NO: 17349 - RNA, 19 nt, Artificial Sequence
  source: /note="Description of Artificial Sequence: Synthetic oligonucleotide"
  source: /note="RNA"
  source: /note="5' tri-ethylene glycol (TEG)"
  modified_base (1)..(1): 5-methyl bicyclic nucleic acid
  modified_base (2)..(2): 5-methyl modified nucleotide
  modified_base (5)..(5): 5-methyl modified nucleotide
  modified_base (8)..(8): 5-methyl modified nucleotide
  modified_base (19)..(19): bicyclic nucleic acid (BNA)
  source: /note="3' tri-ethylene glycol (TEG)"
ccaacaucaaggaagaugg

SEQ ID NO: 17350 - RNA, 18 nt, Artificial Sequence
  source: /note="Description of Artificial Sequence: Synthetic oligonucleotide"
  source: /note="RNA"
  source: /note="5' tri-ethylene glycol (TEG)"
  modified_base (1)..(1): 5-methyl bicyclic nucleic acid
  modified_base (2)..(2): 5-methyl modified nucleotide
  modified_base (5)..(5): 5-methyl modified nucleotide
  modified_base (8)..(8): 5-methyl modified nucleotide
  modified_base (18)..(18): bicyclic nucleic acid (BNA)
  source: /note="3' tri-ethylene glycol (TEG)"
ccaacaucaaggaagaug

SEQ ID NO: 17351 - DNA, 17 bp, Artificial Sequence
  source: /note="Description of Artificial Sequence: Synthetic oligonucleotide"
  source: /note="Description of Combined DNA/RNA Molecule: Synthetic oligonucleotide"
  source: /note="DNA/RNA"
  source: /note="5' tri-ethylene glycol (TEG)"
  modified_base (1)..(1): 5-methyl bicyclic nucleic acid
  modified_base (2)..(2): 5-methyl modified nucleotide
  modified_base (5)..(5): 5-methyl modified nucleotide
  modified_base (8)..(8): 5-methyl modified nucleotide
  modified_base (17)..(17): bicyclic nucleic acid (BNA)
  source: /note="3' tri-ethylene glycol (TEG)"
ccaacaucaaggaagat

SEQ ID NO: 17352 - RNA, 16 nt, Artificial Sequence
  source: /note="Description of Artificial Sequence: Synthetic oligonucleotide"
  source: /note="RNA"
  source: /note="5' tri-ethylene glycol (TEG)"
  modified_base (1)..(1): 5-methyl bicyclic nucleic acid
  modified_base (2)..(2): 5-methyl modified nucleotide
  modified_base (5)..(5): 5-methyl modified nucleotide
  modified_base (8)..(8): 5-methyl modified nucleotide
  modified_base (16)..(16): bicyclic nucleic acid (BNA)
  source: /note="3' tri-ethylene glycol (TEG)"
ccaacaucaaggaaga

SEQ ID NO: 17353 - RNA, 15 nt, Artificial Sequence
  source: /note="Description of Artificial Sequence: Synthetic oligonucleotide"
  source: /note="RNA"
  source: /note="5' tri-ethylene glycol (TEG)"
  modified_base (1)..(1): 5-methyl bicyclic nucleic acid
  modified_base (2)..(2): 5-methyl modified nucleotide
  modified_base (5)..(5): 5-methyl modified nucleotide
  modified_base (8)..(8): 5-methyl modified nucleotide
  modified_base (15)..(15): bicyclic nucleic acid (BNA)
  source: /note="3' tri-ethylene glycol (TEG)"
ccaacaucaaggaag

SEQ ID NO: 17354 - RNA, 27 nt, Artificial Sequence
  source: /note="Description of Artificial Sequence: Synthetic oligonucleotide"
  source: /note="RNA"
  source: /note="5' tri-ethylene glycol (TEG)"
  modified_base (1)..(1): 5-methyl bicyclic nucleic acid
  modified_base (4)..(4): 5-methyl modified nucleotide
  modified_base (7)..(7): 5-methyl modified nucleotide
  modified_base (19)..(19): 5-methyl modified nucleotide
  modified_base (24)..(24): 5-methyl modified nucleotide
  modified_base (27)..(27): bicyclic nucleic acid (BNA)
  source: /note="3' tri-ethylene glycol (TEG)"
caacaucaaggaagauggcauuucuag

SEQ ID NO: 17355 - RNA, 26 nt, Artificial Sequence
  source: /note="Description of Artificial Sequence: Synthetic oligonucleotide"
  source: /note="RNA"
  source: /note="5' tri-ethylene glycol (TEG)"
  modified_base (1)..(1): 5-methyl bicyclic nucleic acid
  modified_base (4)..(4): 5-methyl modified nucleotide
  modified_base (7)..(7): 5-methyl modified nucleotide
  modified_base (19)..(19): 5-methyl modified nucleotide
  modified_base (24)..(24): 5-methyl modified nucleotide
  modified_base (26)..(26): bicyclic nucleic acid (BNA)
  source: /note="3' tri-ethylene glycol (TEG)"
caacaucaaggaagauggcauuucua

SEQ ID NO: 17356 - DNA, 25 bp, Artificial Sequence
  source: /note="Description of Artificial Sequence: Synthetic oligonucleotide"
  source: /note="Description of Combined DNA/RNA Molecule: Synthetic oligonucleotide"
  source: /note="DNA/RNA"
  source: /note="5' tri-ethylene glycol (TEG)"
  modified_base (1)..(1): 5-methyl bicyclic nucleic acid
  modified_base (4)..(4): 5-methyl modified nucleotide
  modified_base (7)..(7): 5-methyl modified nucleotide
  modified_base (19)..(19): 5-methyl modified nucleotide
  modified_base (24)..(24): 5-methyl modified nucleotide
  modified_base (25)..(25): bicyclic nucleic acid (BNA)
  source: /note="3' tri-ethylene glycol (TEG)"
caacaucaaggaagauggcauuuct

SEQ ID NO: 17357 - RNA, 24 nt, Artificial Sequence
  source: /note="Description of Artificial Sequence: Synthetic oligonucleotide"
  source: /note="RNA"
  source: /note="5' tri-ethylene glycol (TEG)"
  modified_base (1)..(1): 5-methyl bicyclic nucleic acid
  modified_base (4)..(4): 5-methyl modified nucleotide
  modified_base (7)..(7): 5-methyl modified nucleotide
  modified_base (19)..(19): 5-methyl modified nucleotide
  modified_base (24)..(24): 5-methyl bicyclic nucleic acid
  source: /note="3' tri-ethylene glycol (TEG)"
caacaucaaggaagauggcauuuc

SEQ ID NO: 17358 - DNA, 23 bp, Artificial Sequence
  source: /note="Description of Artificial Sequence: Synthetic oligonucleotide"
  source: /note="Description of Combined DNA/RNA Molecule: Synthetic oligonucleotide"
  source: /note="DNA/RNA"
  source: /note="5' tri-ethylene glycol (TEG)"
  modified_base (1)..(1): 5-methyl bicyclic nucleic acid
  modified_base (4)..(4): 5-methyl modified nucleotide
  modified_base (7)..(7): 5-methyl modified nucleotide
  modified_base (19)..(19): 5-methyl modified nucleotide
  modified_base (23)..(23): bicyclic nucleic acid (BNA)
  source: /note="3' tri-ethylene glycol (TEG)"
caacaucaaggaagauggcauut

SEQ ID NO: 17359 - DNA, 22 bp, Artificial Sequence
  source: /note="Description of Artificial Sequence: Synthetic oligonucleotide"
  source: /note="Description of Combined DNA/RNA Molecule: Synthetic oligonucleotide"
  source: /note="DNA/RNA"
  source: /note="5' tri-ethylene glycol (TEG)"
  modified_base (1)..(1): 5-methyl bicyclic nucleic acid
  modified_base (4)..(4): 5-methyl modified nucleotide
  modified_base (7)..(7): 5-methyl modified nucleotide
  modified_base (19)..(19): 5-methyl modified nucleotide
  modified_base (22)..(22): bicyclic nucleic acid (BNA)
  source: /note="3' tri-ethylene glycol (TEG)"
caacaucaaggaagauggcaut

SEQ ID NO: 17360 - DNA, 21 bp, Artificial Sequence
  source: /note="Description of Artificial Sequence: Synthetic oligonucleotide"
  source: /note="Description of Combined DNA/RNA Molecule: Synthetic oligonucleotide"
  source: /note="DNA/RNA"
  source: /note="5' tri-ethylene glycol (TEG)"
  modified_base (1)..(1): 5-methyl bicyclic nucleic acid
  modified_base (4)..(4): 5-methyl modified nucleotide
  modified_base (7)..(7): 5-methyl modified nucleotide
  modified_base (19)..(19): 5-methyl modified nucleotide
  modified_base (21)..(21): bicyclic nucleic acid (BNA)
  source: /note="3' tri-ethylene glycol (TEG)"
caacaucaaggaagauggcat

SEQ ID NO: 17361 - RNA, 20 nt, Artificial Sequence
  source: /note="Description of Artificial Sequence: Synthetic oligonucleotide"
  source: /note="RNA"
  source: /note="5' tri-ethylene glycol (TEG)"
  modified_base (1)..(1): 5-methyl bicyclic nucleic acid
  modified_base (4)..(4): 5-methyl modified nucleotide
  modified_base (7)..(7): 5-methyl modified nucleotide
  modified_base (19)..(19): 5-methyl modified nucleotide
  modified_base (20)..(20): bicyclic nucleic acid (BNA)
  source: /note="3' tri-ethylene glycol (TEG)"
caacaucaaggaagauggca

SEQ ID NO: 17362 - RNA, 19 nt, Artificial Sequence
  source: /note="Description of Artificial Sequence: Synthetic oligonucleotide"
  source: /note="RNA"
  source: /note="5' tri-ethylene glycol (TEG)"
  modified_base (1)..(1): 5-methyl bicyclic nucleic acid
  modified_base (4)..(4): 5-methyl modified nucleotide
  modified_base (7)..(7): 5-methyl modified nucleotide
  modified_base (19)..(19): 5-methyl bicyclic nucleic acid
  source: /note="3' tri-ethylene glycol (TEG)"
caacaucaaggaagauggc

SEQ ID NO: 17363 - RNA, 18 nt, Artificial Sequence
  source: /note="Description of Artificial Sequence: Synthetic oligonucleotide"
  source: /note="RNA"
  source: /note="5' tri-ethylene glycol (TEG)"
  modified_base (1)..(1): 5-methyl bicyclic nucleic acid
  modified_base (4)..(4): 5-methyl modified nucleotide
  modified_base (7)..(7): 5-methyl modified nucleotide
  modified_base (18)..(18): bicyclic nucleic acid (BNA)
  source: /note="3' tri-ethylene glycol (TEG)"
caacaucaaggaagaugg

SEQ ID NO: 17364 - RNA, 17 nt, Artificial Sequence
  source: /note="Description of Artificial Sequence: Synthetic oligonucleotide"
  source: /note="RNA"
  source: /note="5' tri-ethylene glycol (TEG)"
  modified_base (1)..(1): 5-methyl bicyclic nucleic acid
  modified_base (4)..(4): 5-methyl modified nucleotide
  modified_base (7)..(7): 5-methyl modified nucleotide
  modified_base (17)..(17): bicyclic nucleic acid (BNA)
  source: /note="3' tri-ethylene glycol (TEG)"
caacaucaaggaagaug

SEQ ID NO: 17365 - DNA, 16 bp, Artificial Sequence
  source: /note="Description of Artificial Sequence: Synthetic oligonucleotide"
  source: /note="Description of Combined DNA/RNA Molecule: Synthetic oligonucleotide"
  source: /note="DNA/RNA"
  source: /note="5' tri-ethylene glycol (TEG)"
  modified_base (1)..(1): 5-methyl bicyclic nucleic acid
  modified_base (4)..(4): 5-methyl modified nucleotide
  modified_base (7)..(7): 5-methyl modified nucleotide
  modified_base (16)..(16): bicyclic nucleic acid (BNA)
  source: /note="3' tri-ethylene glycol (TEG)"
caacaucaaggaagat

SEQ ID NO: 17366 - RNA, 15 nt, Artificial Sequence
  source: /note="Description of Artificial Sequence: Synthetic oligonucleotide"
  source: /note="RNA"
  source: /note="5' tri-ethylene glycol (TEG)"
  modified_base (1)..(1): 5-methyl bicyclic nucleic acid
  modified_base (4)..(4): 5-methyl modified nucleotide
  modified_base (7)..(7): 5-methyl modified nucleotide
  modified_base (15)..(15): bicyclic nucleic acid (BNA)
  source: /note="3' tri-ethylene glycol (TEG)"
caacaucaaggaaga

SEQ ID NO: 17367 - RNA, 14 nt, Artificial Sequence
  source: /note="Description of Artificial Sequence: Synthetic oligonucleotide"
  source: /note="RNA"
  source: /note="5' tri-ethylene glycol (TEG)"
  modified_base (1)..(1): 5-methyl bicyclic nucleic acid
  modified_base (4)..(4): 5-methyl modified nucleotide
  modified_base (7)..(7): 5-methyl modified nucleotide
  modified_base (14)..(14): bicyclic nucleic acid (BNA)
  source: /note="3' tri-ethylene glycol (TEG)"
caacaucaaggaag

SEQ ID NO: 17368 - RNA, 26 nt, Artificial Sequence
  source: /note="Description of Artificial Sequence: Synthetic oligonucleotide"
  source: /note="RNA"
  source: /note="5' tri-ethylene glycol (TEG)"
  modified_base (1)..(1): bicyclic nucleic acid (BNA)
  modified_base (3)..(3): 5-methyl modified nucleotide
  modified_base (6)..(6): 5-methyl modified nucleotide
  modified_base (18)..(18): 5-methyl modified nucleotide
  modified_base (23)..(23): 5-methyl modified nucleotide
  modified_base (26)..(26): bicyclic nucleic acid (BNA)
  source: /note="3' tri-ethylene glycol (TEG)"
aacaucaaggaagauggcauuucuag

SEQ ID NO: 17369 - RNA, 25 nt, Artificial Sequence
  source: /note="Description of Artificial Sequence: Synthetic oligonucleotide"
  source: /note="RNA"
  source: /note="5' tri-ethylene glycol (TEG)"
  modified_base (1)..(1): bicyclic nucleic acid (BNA)
  modified_base (3)..(3): 5-methyl modified nucleotide
  modified_base (6)..(6): 5-methyl modified nucleotide
  modified_base (18)..(18): 5-methyl modified nucleotide
  modified_base (23)..(23): 5-methyl modified nucleotide
  modified_base (25)..(25): bicyclic nucleic acid (BNA)
  source: /note="3' tri-ethylene glycol (TEG)"
aacaucaaggaagauggcauuucua

SEQ ID NO: 17370 - DNA, 24 bp, Artificial Sequence
  source: /note="Description of Artificial Sequence: Synthetic oligonucleotide"
  source: /note="Description of Combined DNA/RNA Molecule: Synthetic oligonucleotide"
  source: /note="DNA/RNA"
  source: /note="5' tri-ethylene glycol (TEG)"
  modified_base (1)..(1): bicyclic nucleic acid (BNA)
  modified_base (3)..(3): 5-methyl modified nucleotide
  modified_base (6)..(6): 5-methyl modified nucleotide
  modified_base (18)..(18): 5-methyl modified nucleotide
  modified_base (23)..(23): 5-methyl modified nucleotide
  modified_base (24)..(24): bicyclic nucleic acid (BNA)
  source: /note="3' tri-ethylene glycol (TEG)"
aacaucaaggaagauggcauuuct

SEQ ID NO: 17371 - RNA, 23 nt, Artificial Sequence
  source: /note="Description of Artificial Sequence: Synthetic oligonucleotide"
  source: /note="RNA"
  source: /note="5' tri-ethylene glycol (TEG)"
  modified_base (1)..(1): bicyclic nucleic acid (BNA)
  modified_base (3)..(3): 5-methyl modified nucleotide
  modified_base (6)..(6): 5-methyl modified nucleotide
  modified_base (18)..(18): 5-methyl modified nucleotide
  modified_base (23)..(23): 5-methyl bicyclic nucleic acid
  source: /note="3' tri-ethylene glycol (TEG)"
aacaucaaggaagauggcauuuc

SEQ ID NO: 17372 - DNA, 22 bp, Artificial Sequence
  source: /note="Description of Artificial Sequence: Synthetic oligonucleotide"
  source: /note="Description of Combined DNA/RNA Molecule: Synthetic oligonucleotide"
  source: /note="DNA/RNA"
  source: /note="5' tri-ethylene glycol (TEG)"
  modified_base (1)..(1): bicyclic nucleic acid (BNA)
  modified_base (3)..(3): 5-methyl modified nucleotide
  modified_base (6)..(6): 5-methyl modified nucleotide
  modified_base (18)..(18): 5-methyl modified nucleotide
  modified_base (22)..(22): bicyclic nucleic acid (BNA)
  source: /note="3' tri-ethylene glycol (TEG)"
aacaucaaggaagauggcauut

SEQ ID NO: 17373 - DNA, 21 bp, Artificial Sequence
  source: /note="Description of Artificial Sequence: Synthetic oligonucleotide"
  source: /note="Description of Combined DNA/RNA Molecule: Synthetic oligonucleotide"
  source: /note="DNA/RNA"
  source: /note="5' tri-ethylene glycol (TEG)"
  modified_base (1)..(1): bicyclic nucleic acid (BNA)
  modified_base (3)..(3): 5-methyl modified nucleotide
  modified_base (6)..(6): 5-methyl modified nucleotide
  modified_base (18)..(18): 5-methyl modified nucleotide
  modified_base (21)..(21): bicyclic nucleic acid (BNA)
  source: /note="3' tri-ethylene glycol (TEG)"
aacaucaaggaagauggcaut

SEQ ID NO: 17374 - DNA, 20 bp, Artificial Sequence
  source: /note="Description of Artificial Sequence: Synthetic oligonucleotide"
  source: /note="Description of Combined DNA/RNA Molecule: Synthetic oligonucleotide"
  source: /note="DNA/RNA"
  source: /note="5' tri-ethylene glycol (TEG)"
  modified_base (1)..(1): bicyclic nucleic acid (BNA)
  modified_base (3)..(3): 5-methyl modified nucleotide
  modified_base (6)..(6): 5-methyl modified nucleotide
  modified_base (18)..(18): 5-methyl modified nucleotide
  modified_base (20)..(20): bicyclic nucleic acid (BNA)
  source: /note="3' tri-ethylene glycol (TEG)"
aacaucaaggaagauggcat

SEQ ID NO: 17375 - RNA, 19 nt, Artificial Sequence
  source: /note="Description of Artificial Sequence: Synthetic oligonucleotide"
  source: /note="RNA"
  source: /note="5' tri-ethylene glycol (TEG)"
  modified_base (1)..(1): bicyclic nucleic acid (BNA)
  modified_base (3)..(3): 5-methyl modified nucleotide
  modified_base (6)..(6): 5-methyl modified nucleotide
  modified_base (18)..(18): 5-methyl modified nucleotide
  modified_base (19)..(19): bicyclic nucleic acid (BNA)
  source: /note="3' tri-ethylene glycol (TEG)"
aacaucaaggaagauggca

SEQ ID NO: 17376 - RNA, 18 nt, Artificial Sequence
  source: /note="Description of Artificial Sequence: Synthetic oligonucleotide"
  source: /note="RNA"
  source: /note="5' tri-ethylene glycol (TEG)"
  modified_base (1)..(1): bicyclic nucleic acid (BNA)
  modified_base (3)..(3): 5-methyl modified nucleotide
  modified_base (6)..(6): 5-methyl modified nucleotide
  modified_base (18)..(18): 5-methyl bicyclic nucleic acid
  source: /note="3' tri-ethylene glycol (TEG)"
aacaucaaggaagauggc

SEQ ID NO: 17377 - RNA, 17 nt, Artificial Sequence
  source: /note="Description of Artificial Sequence: Synthetic oligonucleotide"
  source: /note="RNA"
  source: /note="5' tri-ethylene glycol (TEG)"
  modified_base (1)..(1): bicyclic nucleic acid (BNA)
  modified_base (3)..(3): 5-methyl modified nucleotide
  modified_base (6)..(6): 5-methyl modified nucleotide
  modified_base (17)..(17): bicyclic nucleic acid (BNA)
  source: /note="3' tri-ethylene glycol (TEG)"
aacaucaaggaagaugg

SEQ ID NO: 17378 - RNA, 16 nt, Artificial Sequence
  source: /note="Description of Artificial Sequence: Synthetic oligonucleotide"
  source: /note="RNA"
  source: /note="5' tri-ethylene glycol (TEG)"
  modified_base (1)..(1): bicyclic nucleic acid (BNA)
  modified_base (3)..(3): 5-methyl modified nucleotide
  modified_base (6)..(6): 5-methyl modified nucleotide
  modified_base (16)..(16): bicyclic nucleic acid (BNA)
  source: /note="3' tri-ethylene glycol (TEG)"
aacaucaaggaagaug

SEQ ID NO: 17379 - DNA, 15 bp, Artificial Sequence
  source: /note="Description of Artificial Sequence: Synthetic oligonucleotide"
  source: /note="Description of Combined DNA/RNA Molecule: Synthetic oligonucleotide"
  source: /note="DNA/RNA"
  source: /note="5' tri-ethylene glycol (TEG)"
  modified_base (1)..(1): bicyclic nucleic acid (BNA)
  modified_base (3)..(3): 5-methyl modified nucleotide
  modified_base (6)..(6): 5-methyl modified nucleotide
  modified_base (15)..(15): bicyclic nucleic acid (BNA)
  source: /note="3' tri-ethylene glycol (TEG)"
aacaucaaggaagat

SEQ ID NO: 17380 - RNA, 14 nt, Artificial Sequence
  source: /note="Description of Artificial Sequence: Synthetic oligonucleotide"
  source: /note="RNA"
  source: /note="5' tri-ethylene glycol (TEG)"
  modified_base (1)..(1): bicyclic nucleic acid (BNA)
  modified_base (3)..(3): 5-methyl modified nucleotide
  modified_base (6)..(6): 5-methyl modified nucleotide
  modified_base (14)..(14): bicyclic nucleic acid (BNA)
  source: /note="3' tri-ethylene glycol (TEG)"
aacaucaaggaaga

SEQ ID NO: 17381 - RNA, 13 nt, Artificial Sequence
  source: /note="Description of Artificial Sequence: Synthetic oligonucleotide"
  source: /note="RNA"
  source: /note="5' tri-ethylene glycol (TEG)"
  modified_base (1)..(1): bicyclic nucleic acid (BNA)
  modified_base (3)..(3): 5-methyl modified nucleotide
  modified_base (6)..(6): 5-methyl modified nucleotide
  modified_base (13)..(13): bicyclic nucleic acid (BNA)
  source: /note="3' tri-ethylene glycol (TEG)"
aacaucaaggaag

SEQ ID NO: 17382 - RNA, 25 nt, Artificial Sequence
  source: /note="Description of Artificial Sequence: Synthetic oligonucleotide"
  source: /note="RNA"
  source: /note="5' tri-ethylene glycol (TEG)"
  modified_base (1)..(1): bicyclic nucleic acid (BNA)
  modified_base (2)..(2): 5-methyl modified nucleotide
  modified_base (5)..(5): 5-methyl modified nucleotide
  modified_base (17)..(17): 5-methyl modified nucleotide
  modified_base (22)..(22): 5-methyl modified nucleotide
  modified_base (25)..(25): bicyclic nucleic acid (BNA)
  source: /note="3' tri-ethylene glycol (TEG)"
acaucaaggaagauggcauuucuag

SEQ ID NO: 17383 - RNA, 24 nt, Artificial Sequence
  source: /note="Description of Artificial Sequence: Synthetic oligonucleotide"
  source: /note="RNA"
  source: /note="5' tri-ethylene glycol (TEG)"
  modified_base (1)..(1): bicyclic nucleic acid (BNA)
  modified_base (2)..(2): 5-methyl modified nucleotide
  modified_base (5)..(5): 5-methyl modified nucleotide
  modified_base (17)..(17): 5-methyl modified nucleotide
  modified_base (22)..(22): 5-methyl modified nucleotide
  modified_base (24)..(24): bicyclic nucleic acid (BNA)
  source: /note="3' tri-ethylene glycol (TEG)"
acaucaaggaagauggcauuucua

SEQ ID NO: 17384 - DNA, 23 bp, Artificial Sequence
  source: /note="Description of Artificial Sequence: Synthetic oligonucleotide"
  source: /note="Description of Combined DNA/RNA Molecule: Synthetic oligonucleotide"
  source: /note="DNA/RNA"
  source: /note="5' tri-ethylene glycol (TEG)"
  modified_base (1)..(1): bicyclic nucleic acid (BNA)
  modified_base (2)..(2): 5-methyl modified nucleotide
  modified_base (5)..(5): 5-methyl modified nucleotide
  modified_base (17)..(17): 5-methyl modified nucleotide
  modified_base (22)..(22): 5-methyl modified nucleotide
  modified_base (23)..(23): bicyclic nucleic acid (BNA)
  source: /note="3' tri-ethylene glycol (TEG)"
acaucaaggaagauggcauuuct

SEQ ID NO: 17385 - RNA, 22 nt, Artificial Sequence
  source: /note="Description of Artificial Sequence: Synthetic oligonucleotide"
  source: /note="RNA"
  source: /note="5' tri-ethylene glycol (TEG)"
  modified_base (1)..(1): bicyclic nucleic acid (BNA)
  modified_base (2)..(2): 5-methyl modified nucleotide
  modified_base (5)..(5): 5-methyl modified nucleotide
  modified_base (17)..(17): 5-methyl modified nucleotide
  modified_base (22)..(22): 5-methyl bicyclic nucleic acid
  source: /note="3' tri-ethylene glycol (TEG)"
acaucaaggaagauggcauuuc

SEQ ID NO: 17386 - DNA, 21 bp, Artificial Sequence
  source: /note="Description of Artificial Sequence: Synthetic oligonucleotide"
  source: /note="Description of Combined DNA/RNA Molecule: Synthetic oligonucleotide"
  source: /note="DNA/RNA"
  source: /note="5' tri-ethylene glycol (TEG)"
  modified_base (1)..(1): bicyclic nucleic acid (BNA)
  modified_base (2)..(2): 5-methyl modified nucleotide
  modified_base (5)..(5): 5-methyl modified nucleotide
  modified_base (17)..(17): 5-methyl modified nucleotide
  modified_base (21)..(21): bicyclic nucleic acid (BNA)
  source: /note="3' tri-ethylene glycol (TEG)"
acaucaaggaagauggcauut

SEQ ID NO: 17387 - DNA, 20 bp, Artificial Sequence
  source: /note="Description of Artificial Sequence: Synthetic oligonucleotide"
  source: /note="Description of Combined DNA/RNA Molecule: Synthetic oligonucleotide"
  source: /note="DNA/RNA"
  source: /note="5' tri-ethylene glycol (TEG)"
  modified_base (1)..(1): bicyclic nucleic acid (BNA)
  modified_base (2)..(2): 5-methyl modified nucleotide
  modified_base (5)..(5): 5-methyl modified nucleotide
  modified_base (17)..(17): 5-methyl modified nucleotide
  modified_base (20)..(20): bicyclic nucleic acid (BNA)
  source: /note="3' tri-ethylene glycol (TEG)"
acaucaaggaagauggcaut

SEQ ID NO: 17388 - DNA, 19 bp, Artificial Sequence
  source: /note="Description of Artificial Sequence: Synthetic oligonucleotide"
  source: /note="Description of Combined DNA/RNA Molecule: Synthetic oligonucleotide"
  source: /note="DNA/RNA"
  source: /note="5' tri-ethylene glycol (TEG)"
  modified_base (1)..(1): bicyclic nucleic acid (BNA)
  modified_base (2)..(2): 5-methyl modified nucleotide
  modified_base (5)..(5): 5-methyl modified nucleotide
  modified_base (17)..(17): 5-methyl modified nucleotide
  modified_base (19)..(19): bicyclic nucleic acid (BNA)
  source: /note="3' tri-ethylene glycol (TEG)"
acaucaaggaagauggcat

SEQ ID NO: 17389 - RNA, 18 nt, Artificial Sequence
  source: /note="Description of Artificial Sequence: Synthetic oligonucleotide"
  source: /note="RNA"
  source: /note="5' tri-ethylene glycol (TEG)"
  modified_base (1)..(1): bicyclic nucleic acid (BNA)
  modified_base (2)..(2): 5-methyl modified nucleotide
  modified_base (5)..(5): 5-methyl modified nucleotide
  modified_base (17)..(17): 5-methyl modified nucleotide
  modified_base (18)..(18): bicyclic nucleic acid (BNA)
  source: /note="3' tri-ethylene glycol (TEG)"
acaucaaggaagauggca

SEQ ID NO: 17390 - RNA, 17 nt, Artificial Sequence
  source: /note="Description of Artificial Sequence: Synthetic oligonucleotide"
  source: /note="RNA"
  source: /note="5' tri-ethylene glycol (TEG)"
  modified_base (1)..(1): bicyclic nucleic acid (BNA)
  modified_base (2)..(2): 5-methyl modified nucleotide
  modified_base (5)..(5): 5-methyl modified nucleotide
  modified_base (17)..(17): 5-methyl bicyclic nucleic acid
  source: /note="3' tri-ethylene glycol (TEG)"
acaucaaggaagauggc

SEQ ID NO: 17391 - RNA, 16 nt, Artificial Sequence
  source: /note="Description of Artificial Sequence: Synthetic oligonucleotide"
  source: /note="RNA"
  source: /note="5' tri-ethylene glycol (TEG)"
  modified_base (1)..(1): bicyclic nucleic acid (BNA)
  modified_base (2)..(2): 5-methyl modified nucleotide
  modified_base (5)..(5): 5-methyl modified nucleotide
  modified_base (16)..(16): bicyclic nucleic acid (BNA)
  source: /note="3' tri-ethylene glycol (TEG)"
acaucaaggaagaugg

SEQ ID NO: 17392 - RNA, 15 nt, Artificial Sequence
  source: /note="Description of Artificial Sequence: Synthetic oligonucleotide"
  source: /note="RNA"
  source: /note="5' tri-ethylene glycol (TEG)"
  modified_base (1)..(1): bicyclic nucleic acid (BNA)
  modified_base (2)..(2): 5-methyl modified nucleotide
  modified_base (5)..(5): 5-methyl modified nucleotide
  modified_base (15)..(15): bicyclic nucleic acid (BNA)
  source: /note="3' tri-ethylene glycol (TEG)"
acaucaaggaagaug

SEQ ID NO: 17393 - DNA, 14 bp, Artificial Sequence
  source: /note="Description of Artificial Sequence: Synthetic oligonucleotide"
  source: /note="Description of Combined DNA/RNA Molecule: Synthetic oligonucleotide"
  source: /note="DNA/RNA"
  source: /note="5' tri-ethylene glycol (TEG)"
  modified_base (1)..(1): bicyclic nucleic acid (BNA)
  modified_base (2)..(2): 5-methyl modified nucleotide
  modified_base (5)..(5): 5-methyl modified nucleotide
  modified_base (14)..(14): bicyclic nucleic acid (BNA)
  source: /note="3' tri-ethylene glycol (TEG)"
acaucaaggaagat

SEQ ID NO: 17394 - RNA, 13 nt, Artificial Sequence
  source: /note="Description of Artificial Sequence: Synthetic oligonucleotide"
  source: /note="RNA"
  source: /note="5' tri-ethylene glycol (TEG)"
  modified_base (1)..(1): bicyclic nucleic acid (BNA)
  modified_base (2)..(2): 5-methyl modified nucleotide
  modified_base (5)..(5): 5-methyl modified nucleotide
  modified_base (13)..(13): bicyclic nucleic acid (BNA)
  source: /note="3' tri-ethylene glycol (TEG)"
acaucaaggaaga

SEQ ID NO: 17395 - RNA, 12 nt, Artificial Sequence
  source: /note="Description of Artificial Sequence: Synthetic oligonucleotide"
  source: /note="RNA"
  source: /note="5' tri-ethylene glycol (TEG)"
  modified_base (1)..(1): bicyclic nucleic acid (BNA)
  modified_base (2)..(2): 5-methyl modified nucleotide
  modified_base (5)..(5): 5-methyl modified nucleotide
  modified_base (12)..(12): bicyclic nucleic acid (BNA)
  source: /note="3' tri-ethylene glycol (TEG)"
acaucaaggaag

SEQ ID NO: 17396 - RNA, 24 nt, Artificial Sequence
  source: /note="Description of Artificial Sequence: Synthetic oligonucleotide"
  source: /note="RNA"
  source: /note="5' tri-ethylene glycol (TEG)"
  modified_base (1)..(1): 5-methyl bicyclic nucleic acid
  modified_base (4)..(4): 5-methyl modified nucleotide
  modified_base (16)..(16): 5-methyl modified nucleotide
  modified_base (21)..(21): 5-methyl modified nucleotide
  modified_base (24)..(24): bicyclic nucleic acid (BNA)
  source: /note="3' tri-ethylene glycol (TEG)"
caucaaggaagauggcauuucuag

SEQ ID NO: 17397 - RNA, 23 nt, Artificial Sequence
  source: /note="Description of Artificial Sequence: Synthetic oligonucleotide"
  source: /note="RNA"
  source: /note="5' tri-ethylene glycol (TEG)"
  modified_base (1)..(1): 5-methyl bicyclic nucleic acid
  modified_base (4)..(4): 5-methyl modified nucleotide
  modified_base (16)..(16): 5-methyl modified nucleotide
  modified_base (21)..(21): 5-methyl modified nucleotide
  modified_base (23)..(23): bicyclic nucleic acid (BNA)
  source: /note="3' tri-ethylene glycol (TEG)"
caucaaggaagauggcauuucua

SEQ ID NO: 17398 - DNA, 22 bp, Artificial Sequence
  source: /note="Description of Artificial Sequence: Synthetic oligonucleotide"
  source: /note="Description of Combined DNA/RNA Molecule: Synthetic oligonucleotide"
  source: /note="DNA/RNA"
  source: /note="5' tri-ethylene glycol (TEG)"
  modified_base (1)..(1): 5-methyl bicyclic nucleic acid
  modified_base (4)..(4): 5-methyl modified nucleotide
  modified_base (16)..(16): 5-methyl modified nucleotide
  modified_base (21)..(21): 5-methyl modified nucleotide
  modified_base (22)..(22): bicyclic nucleic acid (BNA)
  source: /note="3' tri-ethylene glycol (TEG)"
caucaaggaagauggcauuuct

SEQ ID NO: 17399 - RNA, 21 nt, Artificial Sequence
  source: /note="Description of Artificial Sequence: Synthetic oligonucleotide"
  source: /note="RNA"
  source: /note="5' tri-ethylene glycol (TEG)"
  modified_base (1)..(1): 5-methyl bicyclic nucleic acid
  modified_base (4)..(4): 5-methyl modified nucleotide
  modified_base (16)..(16): 5-methyl modified nucleotide
  modified_base (21)..(21): 5-methyl bicyclic nucleic acid
  source: /note="3' tri-ethylene glycol (TEG)"
caucaaggaagauggcauuuc

SEQ ID NO: 17400 - DNA, 20 bp, Artificial Sequence
  source: /note="Description of Artificial Sequence: Synthetic oligonucleotide"
  source: /note="Description of Combined DNA/RNA Molecule: Synthetic oligonucleotide"
  source: /note="DNA/RNA"
  source: /note="5' tri-ethylene glycol (TEG)"
  modified_base (1)..(1): 5-methyl bicyclic nucleic acid
  modified_base (4)..(4): 5-methyl modified nucleotide
  modified_base (16)..(16): 5-methyl modified nucleotide
  modified_base (20)..(20): bicyclic nucleic acid (BNA)
  source: /note="3' tri-ethylene glycol (TEG)"
caucaaggaagauggcauut

SEQ ID NO: 17401 - DNA, 19 bp, Artificial Sequence
  source: /note="Description of Artificial Sequence: Synthetic oligonucleotide"
  source: /note="Description of Combined DNA/RNA Molecule: Synthetic oligonucleotide"
  source: /note="DNA/RNA"
  source: /note="5' tri-ethylene glycol (TEG)"
  modified_base (1)..(1): 5-methyl bicyclic nucleic acid
  modified_base (4)..(4): 5-methyl modified nucleotide
  modified_base (16)..(16): 5-methyl modified nucleotide
  modified_base (19)..(19): bicyclic nucleic acid (BNA)
  source: /note="3' tri-ethylene glycol (TEG)"
caucaaggaagauggcaut

SEQ ID NO: 17402 - DNA, 18 bp, Artificial Sequence
  source: /note="Description of Artificial Sequence: Synthetic oligonucleotide"
  source: /note="Description of Combined DNA/RNA Molecule: Synthetic oligonucleotide"
  source: /note="DNA/RNA"
  source: /note="5' tri-ethylene glycol (TEG)"
  modified_base (1)..(1): 5-methyl bicyclic nucleic acid
  modified_base (4)..(4): 5-methyl modified nucleotide
  modified_base (16)..(16): 5-methyl modified nucleotide
  modified_base (18)..(18): bicyclic nucleic acid (BNA)
  source: /note="3' tri-ethylene glycol (TEG)"
caucaaggaagauggcat

SEQ ID NO: 17403 - RNA, 17 nt, Artificial Sequence
  source: /note="Description of Artificial Sequence: Synthetic oligonucleotide"
  source: /note="RNA"
  source: /note="5' tri-ethylene glycol (TEG)"
  modified_base (1)..(1): 5-methyl bicyclic nucleic acid
  modified_base (4)..(4): 5-methyl modified nucleotide
  modified_base (16)..(16): 5-methyl modified nucleotide
  modified_base (17)..(17): bicyclic nucleic acid (BNA)
  source: /note="3' tri-ethylene glycol (TEG)"
caucaaggaagauggca

SEQ ID NO: 17404 - RNA, 16 nt, Artificial Sequence
  source: /note="Description of Artificial Sequence: Synthetic oligonucleotide"
  source: /note="RNA"
  source: /note="5' tri-ethylene glycol (TEG)"
  modified_base (1)..(1): 5-methyl bicyclic nucleic acid
  modified_base (4)..(4): 5-methyl modified nucleotide
  modified_base (16)..(16): 5-methyl bicyclic nucleic acid
  source: /note="3' tri-ethylene glycol (TEG)"
caucaaggaagauggc

SEQ ID NO: 17405 - RNA, 15 nt, Artificial Sequence
  source: /note="Description of Artificial Sequence: Synthetic oligonucleotide"
  source: /note="RNA"
  source: /note="5' tri-ethylene glycol (TEG)"
  modified_base (1)..(1): 5-methyl bicyclic nucleic acid
  modified_base (4)..(4): 5-methyl modified nucleotide
  modified_base (15)..(15): bicyclic nucleic acid (BNA)
  source: /note="3' tri-ethylene glycol (TEG)"
caucaaggaagaugg

SEQ ID NO: 17406 - RNA, 14 nt, Artificial Sequence
  source: /note="Description of Artificial Sequence: Synthetic oligonucleotide"
  source: /note="RNA"
  source: /note="5' tri-ethylene glycol (TEG)"
  modified_base (1)..(1): 5-methyl bicyclic nucleic acid
  modified_base (4)..(4): 5-methyl modified nucleotide
  modified_base (14)..(14): bicyclic nucleic acid (BNA)
  source: /note="3' tri-ethylene glycol (TEG)"
caucaaggaagaug

SEQ ID NO: 17407 - DNA, 13 bp, Artificial Sequence
  source: /note="Description of Artificial Sequence: Synthetic oligonucleotide"
  source: /note="Description of Combined DNA/RNA Molecule: Synthetic oligonucleotide"
  source: /note="DNA/RNA"
  source: /note="5' tri-ethylene glycol (TEG)"
  modified_base (1)..(1): 5-methyl bicyclic nucleic acid
  modified_base (4)..(4): 5-methyl modified nucleotide
  modified_base (13)..(13): bicyclic nucleic acid (BNA)
  source: /note="3' tri-ethylene glycol (TEG)"
caucaaggaagat

SEQ ID NO: 17408 - RNA, 12 nt, Artificial Sequence
  source: /note="Description of Artificial Sequence: Synthetic oligonucleotide"
  source: /note="RNA"
  source: /note="5' tri-ethylene glycol (TEG)"
  modified_base (1)..(1): 5-methyl bicyclic nucleic acid
  modified_base (4)..(4): 5-methyl modified nucleotide
  modified_base (12)..(12): bicyclic nucleic acid (BNA)
  source: /note="3' tri-ethylene glycol (TEG)"
caucaaggaaga

SEQ ID NO: 17409 - RNA, 11 nt, Artificial Sequence
  source: /note="Description of Artificial Sequence: Synthetic oligonucleotide"
  source: /note="RNA"
  source: /note="5' tri-ethylene glycol (TEG)"
  modified_base (1)..(1): 5-methyl bicyclic nucleic acid
  modified_base (4)..(4): 5-methyl modified nucleotide
  modified_base (11)..(11): bicyclic nucleic acid (BNA)
  source: /note="3' tri-ethylene glycol (TEG)"
caucaaggaag

SEQ ID NO: 17410 - RNA, 23 nt, Artificial Sequence
  source: /note="Description of Artificial Sequence: Synthetic oligonucleotide"
  source: /note="RNA"
  source: /note="5' tri-ethylene glycol (TEG)"
  modified_base (1)..(1): bicyclic nucleic acid (BNA)
  modified_base (3)..(3): 5-methyl modified nucleotide
  modified_base (15)..(15): 5-methyl modified nucleotide
  modified_base (20)..(20): 5-methyl modified nucleotide
  modified_base (23)..(23): bicyclic nucleic acid (BNA)
  source: /note="3' tri-ethylene glycol (TEG)"
aucaaggaagauggcauuucuag

SEQ ID NO: 17411 - RNA, 22 nt, Artificial Sequence
  source: /note="Description of Artificial Sequence: Synthetic oligonucleotide"
  source: /note="RNA"
  source: /note="5' tri-ethylene glycol (TEG)"
  modified_base (1)..(1): bicyclic nucleic acid (BNA)
  modified_base (3)..(3): 5-methyl modified nucleotide
  modified_base (15)..(15): 5-methyl modified nucleotide
  modified_base (20)..(20): 5-methyl modified nucleotide
  modified_base (22)..(22): bicyclic nucleic acid (BNA)
  source: /note="3' tri-ethylene glycol (TEG)"
aucaaggaagauggcauuucua

SEQ ID NO: 17412 - DNA, 21 bp, Artificial Sequence
  source: /note="Description of Artificial Sequence: Synthetic oligonucleotide"
  source: /note="Description of Combined DNA/RNA Molecule: Synthetic oligonucleotide"
  source: /note="DNA/RNA"
  source: /note="5' tri-ethylene glycol (TEG)"
  modified_base (1)..(1): bicyclic nucleic acid (BNA)
  modified_base (3)..(3): 5-methyl modified nucleotide
  modified_base (15)..(15): 5-methyl modified nucleotide
  modified_base (20)..(20): 5-methyl modified nucleotide
  modified_base (21)..(21): bicyclic nucleic acid (BNA)
  source: /note="3' tri-ethylene glycol (TEG)"
aucaaggaagauggcauuuct

SEQ ID NO: 17413 - RNA, 20 nt, Artificial Sequence
  source: /note="Description of Artificial Sequence: Synthetic oligonucleotide"
  source: /note="RNA"
  source: /note="5' tri-ethylene glycol (TEG)"
  modified_base (1)..(1): bicyclic nucleic acid (BNA)
  modified_base (3)..(3): 5-methyl modified nucleotide
  modified_base (15)..(15): 5-methyl modified nucleotide
  modified_base (20)..(20): 5-methyl bicyclic nucleic acid
  source: /note="3' tri-ethylene glycol (TEG)"
aucaaggaagauggcauuuc

SEQ ID NO: 17414 - DNA, 19 bp, Artificial Sequence
  source: /note="Description of Artificial Sequence: Synthetic oligonucleotide"
  source: /note="Description of Combined DNA/RNA Molecule: Synthetic oligonucleotide"
  source: /note="DNA/RNA"
  source: /note="5' tri-ethylene glycol (TEG)"
  modified_base (1)..(1): bicyclic nucleic acid (BNA)
  modified_base (3)..(3): 5-methyl modified nucleotide
  modified_base (15)..(15): 5-methyl modified nucleotide
  modified_base (19)..(19): bicyclic nucleic acid (BNA)
  source: /note="3' tri-ethylene glycol (TEG)"
aucaaggaagauggcauut

SEQ ID NO: 17415 - DNA, 18 bp, Artificial Sequence
  source: /note="Description of Artificial Sequence: Synthetic oligonucleotide"
  source: /note="Description of Combined DNA/RNA Molecule: Synthetic oligonucleotide"
  source: /note="DNA/RNA"
  source: /note="5' tri-ethylene glycol (TEG)"
  modified_base (1)..(1): bicyclic nucleic acid (BNA)
  modified_base (3)..(3): 5-methyl modified nucleotide
  modified_base (15)..(15): 5-methyl modified nucleotide
  modified_base (18)..(18): bicyclic nucleic acid (BNA)
  source: /note="3' tri-ethylene glycol (TEG)"
aucaaggaagauggcaut

SEQ ID NO: 17416 - DNA, 17 bp, Artificial Sequence
  source: /note="Description of Artificial Sequence: Synthetic oligonucleotide"
  source: /note="Description of Combined DNA/RNA Molecule: Synthetic oligonucleotide"
  source: /note="DNA/RNA"
  source: /note="5' tri-ethylene glycol (TEG)"
  modified_base (1)..(1): bicyclic nucleic acid (BNA)
  modified_base (3)..(3): 5-methyl modified nucleotide
  modified_base (15)..(15): 5-methyl modified nucleotide
  modified_base (17)..(17): bicyclic nucleic acid (BNA)
  source: /note="3' tri-ethylene glycol (TEG)"
aucaaggaagauggcat

SEQ ID NO: 17417 - RNA, 16 nt, Artificial Sequence
  source: /note="Description of Artificial Sequence: Synthetic oligonucleotide"
  source: /note="RNA"
  source: /note="5' tri-ethylene glycol (TEG)"
  modified_base (1)..(1): bicyclic nucleic acid (BNA)
  modified_base (3)..(3): 5-methyl modified nucleotide
  modified_base (15)..(15): 5-methyl modified nucleotide
  modified_base (16)..(16): bicyclic nucleic acid (BNA)
  source: /note="3' tri-ethylene glycol (TEG)"
aucaaggaagauggca

SEQ ID NO: 17418 - RNA, 15 nt, Artificial Sequence
  source: /note="Description of Artificial Sequence: Synthetic oligonucleotide"
  source: /note="RNA"
  source: /note="5' tri-ethylene glycol (TEG)"
  modified_base (1)..(1): bicyclic nucleic acid (BNA)
  modified_base (3)..(3): 5-methyl modified nucleotide
  modified_base (15)..(15): 5-methyl bicyclic nucleic acid
  source: /note="3' tri-ethylene glycol (TEG)"
aucaaggaagauggc

SEQ ID NO: 17419 - RNA, 14 nt, Artificial Sequence
  source: /note="Description of Artificial Sequence: Synthetic oligonucleotide"
  source: /note="RNA"
  source: /note="5' tri-ethylene glycol (TEG)"
  modified_base (1)..(1): bicyclic nucleic acid (BNA)
  modified_base (3)..(3): 5-methyl modified nucleotide
  modified_base (14)..(14): bicyclic nucleic acid (BNA)
  source: /note="3' tri-ethylene glycol (TEG)"
aucaaggaagaugg

SEQ ID NO: 17420 - RNA, 13 nt, Artificial Sequence
  source: /note="Description of Artificial Sequence: Synthetic oligonucleotide"
  source: /note="RNA"
  source: /note="5' tri-ethylene glycol (TEG)"
  modified_base (1)..(1): bicyclic nucleic acid (BNA)
  modified_base (3)..(3): 5-methyl modified nucleotide
  modified_base (13)..(13): bicyclic nucleic acid (BNA)
  source: /note="3' tri-ethylene glycol (TEG)"
aucaaggaagaug

SEQ ID NO: 17421 - DNA, 12 bp, Artificial Sequence
  source: /note="Description of Artificial Sequence: Synthetic oligonucleotide"
  source: /note="Description of Combined DNA/RNA Molecule: Synthetic oligonucleotide"
  source: /note="DNA/RNA"
  source: /note="5' tri-ethylene glycol (TEG)"
  modified_base (1)..(1): bicyclic nucleic acid (BNA)
  modified_base (3)..(3): 5-methyl modified nucleotide
  modified_base (12)..(12): bicyclic nucleic acid (BNA)
  source: /note="3' tri-ethylene glycol (TEG)"
aucaaggaagat

SEQ ID NO: 17422 - RNA, 11 nt, Artificial Sequence
  source: /note="Description of Artificial Sequence: Synthetic oligonucleotide"
  source: /note="RNA"
  source: /note="5' tri-ethylene glycol (TEG)"
  modified_base (1)..(1): bicyclic nucleic acid (BNA)
  modified_base (3)..(3): 5-methyl modified nucleotide
  modified_base (11)..(11): bicyclic nucleic acid (BNA)
  source: /note="3' tri-ethylene glycol (TEG)"
aucaaggaaga

SEQ ID NO: 17423 - RNA, 10 nt, Artificial Sequence
  source: /note="Description of Artificial Sequence: Synthetic oligonucleotide"
  source: /note="RNA"
  source: /note="5' tri-ethylene glycol (TEG)"
  modified_base (1)..(1): bicyclic nucleic acid (BNA)
  modified_base (3)..(3): 5-methyl modified nucleotide
  modified_base (10)..(10): bicyclic nucleic acid (BNA)
  source: /note="3' tri-ethylene glycol (TEG)"
aucaaggaag

SEQ ID NO: 17424 - RNA, 23 nt, Artificial Sequence
  source: /note="Description of Artificial Sequence: Synthetic oligonucleotide"
  source: /note="RNA"
  source: /note="5' tri-ethylene glycol (TEG)"
  modified_base (1)..(1): 5-methyl bicyclic nucleic acid
  modified_base (2)..(2): 5-methyl modified nucleotide
  modified_base (7)..(7): 5-methyl modified nucleotide
  modified_base (13)..(13): 5-methyl modified nucleotide
  modified_base (14)..(14): 5-methyl modified nucleotide
  modified_base (16)..(16): 5-methyl modified nucleotide
  modified_base (17)..(17): 5-methyl modified nucleotide
  modified_base (20)..(20): 5-methyl modified nucleotide
  modified_base (23)..(23): 5-methyl bicyclic nucleic acid
  source: /note="3' tri-ethylene glycol (TEG)"
ccagagcagguaccuccaacauc

SEQ ID NO: 17425 - RNA, 18 nt, Artificial Sequence
  source: /note="Description of Artificial Sequence: Synthetic oligonucleotide"
  source: /note="RNA"
  source: /note="5' tri-ethylene glycol (TEG)"
  modified_base (1)..(1): 5-methyl bicyclic nucleic acid
  modified_base (2)..(2): 5-methyl modified nucleotide
  modified_base (7)..(7): 5-methyl modified nucleotide
  modified_base (13)..(13): 5-methyl modified nucleotide
  modified_base (14)..(14): 5-methyl modified nucleotide
  modified_base (16)..(16): 5-methyl modified nucleotide
  modified_base (17)..(17): 5-methyl modified nucleotide
  modified_base (18)..(18): bicyclic nucleic acid (BNA)
  source: /note="3' tri-ethylene glycol (TEG)"
ccagagcagguaccucca

SEQ ID NO: 17426 - DNA, 23 bp, Artificial Sequence
  source: /note="Description of Artificial Sequence: Synthetic oligonucleotide"
  source: /note="Description of Combined DNA/RNA Molecule: Synthetic oligonucleotide"
  source: /note="DNA/RNA"
  source: /note="5' tri-ethylene glycol (TEG)"
  modified_base (1)..(1): 5-methyl bicyclic nucleic acid
  modified_base (2)..(2): 5-methyl modified nucleotide
  modified_base (4)..(4): 5-methyl modified nucleotide
  modified_base (18)..(18): 5-methyl modified nucleotide
  modified_base (23)..(23): bicyclic nucleic acid (BNA)
  source: /note="3' tri-ethylene glycol (TEG)"
ccucugugauuuuauaacuugat

SEQ ID NO: 17427 - DNA, 17 bp, Artificial Sequence
  source: /note="Description of Artificial Sequence: Synthetic oligonucleotide"
  source: /note="Description of Combined DNA/RNA Molecule: Synthetic oligonucleotide"
  source: /note="DNA/RNA"
  source: /note="5' tri-ethylene glycol (TEG)"
  modified_base (1)..(1): bicyclic nucleic acid (BNA)
  modified_base (2)..(2): 5-methyl modified nucleotide
  modified_base (4)..(4): 5-methyl modified nucleotide
  modified_base (5)..(5): 5-methyl modified nucleotide
  modified_base (6)..(6): 5-methyl modified nucleotide
  modified_base (8)..(8): 5-methyl modified nucleotide
  modified_base (9)..(9): 5-methyl modified nucleotide
  modified_base (12)..(12): 5-methyl modified nucleotide
  modified_base (14)..(14): 5-methyl modified nucleotide
  modified_base (15)..(15): 5-methyl modified nucleotide
  modified_base (16)..(16): 5-methyl modified nucleotide
  modified_base (17)..(17): bicyclic nucleic acid (BNA)
  source: /note="3' tri-ethylene glycol (TEG)"
tcacccaccaucaccct

SEQ ID NO: 17428 - DNA, 20 bp, Artificial Sequence
  source: /note="Description of Artificial Sequence: Synthetic oligonucleotide"
  source: /note="Description of Combined DNA/RNA Molecule: Synthetic oligonucleotide"
  source: /note="DNA/RNA"
  source: /note="5' tri-ethylene glycol (TEG)"
  modified_base (1)..(1): bicyclic nucleic acid (BNA)
  modified_base (7)..(7): 5-methyl modified nucleotide
  modified_base (8)..(8): 5-methyl modified nucleotide
  modified_base (10)..(10): 5-methyl modified nucleotide
  modified_base (16)..(16): 5-methyl modified nucleotide
  modified_base (18)..(18): 5-methyl modified nucleotide
  modified_base (19)..(19): 5-methyl modified nucleotide
  modified_base (20)..(20): 5-methyl bicyclic nucleic acid
  source: /note="3' tri-ethylene glycol (TEG)"
tgauauccucaaggucaccc

SEQ ID NO: 17429 - RNA, 22 nt, Artificial Sequence
  source: /note="Description of Artificial Sequence: Synthetic oligonucleotide"
  source: /note="RNA"
  source: /note="5' tri-ethylene glycol (TEG)"
  modified_base (1)..(1): 5-methyl bicyclic nucleic acid
  modified_base (4)..(4): 5-methyl modified nucleotide
  modified_base (13)..(13): 5-methyl modified nucleotide
  modified_base (16)..(16): 5-methyl modified nucleotide
  modified_base (18)..(18): 5-methyl modified nucleotide
  modified_base (22)..(22): bicyclic nucleic acid (BNA)
  source: /note="3' tri-ethylene glycol (TEG)"
cugcuugaugaucaucucguug

SEQ ID NO: 17430 - RNA, 18 nt, Artificial Sequence
  source: /note="Description of Artificial Sequence: Synthetic oligonucleotide"
  source: /note="RNA"
  source: /note="5' tri-ethylene glycol (TEG)"
  modified_base (1)..(1): 5-methyl bicyclic nucleic acid
  modified_base (4)..(4): 5-methyl modified nucleotide
  modified_base (13)..(13): 5-methyl modified nucleotide
  modified_base (16)..(16): 5-methyl modified nucleotide
  modified_base (18)..(18): 5-methyl bicyclic nucleic acid
  source: /note="3' tri-ethylene glycol (TEG)"
cugcuugaugaucaucuc

SEQ ID NO: 17431 - RNA, 19 nt, Artificial Sequence
  source: /note="Description of Artificial Sequence: Synthetic oligonucleotide"
  source: /note="RNA"
  source: /note="5' tri-ethylene glycol (TEG)"
  modified_base (1)..(1): bicyclic nucleic acid (BNA)
  modified_base (5)..(5): 5-methyl modified nucleotide
  modified_base (6)..(6): 5-methyl modified nucleotide
  modified_base (14)..(14): 5-methyl modified nucleotide
  modified_base (15)..(15): 5-methyl modified nucleotide
  modified_base (17)..(17): 5-methyl modified nucleotide
  modified_base (19)..(19): bicyclic nucleic acid (BNA)
  source: /note="3' tri-ethylene glycol (TEG)"
guuuccuuaguaaccacag

SEQ ID NO: 17432 - RNA, 17 nt, Artificial Sequence
  source: /note="Description of Artificial Sequence: Synthetic oligonucleotide"
  source: /note="RNA"
  source: /note="5' tri-ethylene glycol (TEG)"
  modified_base (1)..(1): bicyclic nucleic acid (BNA)
  modified_base (5)..(5): 5-methyl modified nucleotide
  modified_base (6)..(6): 5-methyl modified nucleotide
  modified_base (14)..(14): 5-methyl modified nucleotide
  modified_base (15)..(15): 5-methyl modified nucleotide
  modified_base (17)..(17): 5-methyl bicyclic nucleic acid
  source: /note="3' tri-ethylene glycol (TEG)"
guuuccuuaguaaccac

SEQ ID NO: 17433 - DNA, 20 bp, Artificial Sequence
  source: /note="Description of Artificial Sequence: Synthetic oligonucleotide"
  source: /note="Description of Combined DNA/RNA Molecule: Synthetic oligonucleotide"
  source: /note="DNA/RNA"
  modified_base (1)..(1): bicyclic nucleic acid (BNA)
  modified_base (2)..(2): 5-methyl bicyclic nucleic acid
  modified_base (14)..(14): 5-methyl modified nucleotide
  modified_base (19)..(19): 5-methyl modified nucleotide
tcaaggaagauggcauuucu

SEQ ID NO: 17434 - DNA, 22 bp, Artificial Sequence
  source: /note="Description of Artificial Sequence: Synthetic oligonucleotide"
  source: /note="Description of Combined DNA/RNA Molecule: Synthetic oligonucleotide"
  source: /note="DNA/RNA"
  modified_base (1)..(1): bicyclic nucleic acid (BNA)
  modified_base (2)..(2): 5-methyl bicyclic nucleic acid
  modified_base (14)..(14): 5-methyl modified nucleotide
  modified_base (19)..(19): 5-methyl modified nucleotide
tcaaggaagauggcauuucuag

SEQ ID NO: 17435 - RNA, 18 nt, Artificial Sequence
  source: /note="Description of Artificial Sequence: Synthetic oligonucleotide"
  source: /note="RNA"
  modified_base (1)..(1): bicyclic nucleic acid (BNA)
  modified_base (2)..(2): bicyclic nucleic acid (BNA)
  modified_base (9)..(9): 5-methyl modified nucleotide
  modified_base (13)..(13): 5-methyl modified nucleotide
  modified_base (14)..(14): 5-methyl modified nucleotide
  modified_base (18)..(18): 5-methyl modified nucleotide
gguaaguucuguccaagc

SEQ ID NO: 17436 - DNA, 18 bp, Artificial Sequence
  source: /note="Description of Artificial Sequence: Synthetic oligonucleotide"
  source: /note="Description of Combined DNA/RNA Molecule: Synthetic oligonucleotide"
  source: /note="DNA/RNA"
  modified_base (1)..(1): bicyclic nucleic acid (BNA)
  modified_base (2)..(2): bicyclic nucleic acid (BNA)
  modified_base (8)..(8): 5-methyl modified nucleotide
  modified_base (12)..(12): 5-methyl modified nucleotide
  modified_base (13)..(13): 5-methyl modified nucleotide
  modified_base (17)..(17): 5-methyl modified nucleotide
  modified_base (18)..(18): 5-methyl modified nucleotide
gtaaguucuguccaagcc

SEQ ID NO: 17437 - RNA, 18 nt, Artificial Sequence
  source: /note="Description of Artificial Sequence: Synthetic oligonucleotide"
  source: /note="RNA"
  modified_base (1)..(1): bicyclic nucleic acid (BNA)
  modified_base (2)..(2): bicyclic nucleic acid (BNA)
  modified_base (4)..(4): 5-methyl modified nucleotide
  modified_base (13)..(13): 5-methyl modified nucleotide
  modified_base (17)..(17): 5-methyl modified nucleotide
  modified_base (18)..(18): 5-methyl modified nucleotide
agucgguaaguucugucc

SEQ ID NO: 17438 - DNA, 18 bp, Artificial Sequence
  source: /note="Description of Artificial Sequence: Synthetic oligonucleotide"
  source: /note="Description of Combined DNA/RNA Molecule: Synthetic oligonucleotide"
  source: /note="DNA/RNA"
  modified_base (1)..(1): 5-methyl bicyclic nucleic acid
  modified_base (2)..(2): bicyclic nucleic acid (BNA)
  modified_base (5)..(5): 5-methyl modified nucleotide
  modified_base (6)..(6): 5-methyl modified nucleotide
  modified_base (10)..(10): 5-methyl modified nucleotide
  modified_base (11)..(11): 5-methyl modified nucleotide
  modified_base (12)..(12): 5-methyl modified nucleotide
ctguccaagcccgguuga

SEQ ID NO: 17439 - DNA, 15 bp, Artificial Sequence
  source: /note="Description of Artificial Sequence: Synthetic oligonucleotide"
  source: /note="Description of Combined DNA/RNA Molecule: Synthetic oligonucleotide"
  source: /note="DNA/RNA"
  modified_base (1)..(1): bicyclic nucleic acid (BNA)
  modified_base (2)..(2): bicyclic nucleic acid (BNA)
  modified_base (7)..(7): 5-methyl modified nucleotide
  modified_base (11)..(11): 5-methyl modified nucleotide
  modified_base (12)..(12): 5-methyl modified nucleotide
taaguucuguccaag

SEQ ID NO: 17440 - DNA, 20 bp, Artificial Sequence
  source: /note="Description of Artificial Sequence: Synthetic oligonucleotide"
  source: /note="Description of Combined DNA/RNA Molecule: Synthetic oligonucleotide"
  source: /note="DNA/RNA"
  modified_base (1)..(1): bicyclic nucleic acid (BNA)
  modified_base (2)..(2): bicyclic nucleic acid (BNA)
  modified_base (3)..(3): 5-methyl modified nucleotide
  modified_base (7)..(7): 5-methyl modified nucleotide
  modified_base (8)..(8): 5-methyl modified nucleotide
  modified_base (12)..(12): 5-methyl modified nucleotide
  modified_base (13)..(13): 5-methyl modified nucleotide
  modified_base (14)..(14): 5-methyl modified nucleotide
ttcuguccaagcccgguuga

SEQ ID NO: 17441 - DNA, 19 bp, Artificial Sequence
  source: /note="Description of Artificial Sequence: Synthetic oligonucleotide"
  source: /note="Description of Combined DNA/RNA Molecule: Synthetic oligonucleotide"
  source: /note="DNA/RNA"
  modified_base (1)..(1): bicyclic nucleic acid (BNA)
  modified_base (2)..(2): bicyclic nucleic acid (BNA)
  modified_base (3)..(3): 5-methyl modified nucleotide
  modified_base (7)..(7): 5-methyl modified nucleotide
  modified_base (8)..(8): 5-methyl modified nucleotide
  modified_base (12)..(12): 5-methyl modified nucleotide
  modified_base (13)..(13): 5-methyl modified nucleotide
  modified_base (14)..(14): 5-methyl modified nucleotide
ttcuguccaagcccgguug

SEQ ID NO: 17442 - DNA, 18 bp, Artificial Sequence
  source: /note="Description of Artificial Sequence: Synthetic oligonucleotide"
  source: /note="Description of Combined DNA/RNA Molecule: Synthetic oligonucleotide"
  source: /note="DNA/RNA"
  modified_base (1)..(1): bicyclic nucleic acid (BNA)
  modified_base (2)..(2): bicyclic nucleic acid (BNA)
  modified_base (3)..(3): 5-methyl modified nucleotide
  modified_base (7)..(7): 5-methyl modified nucleotide
  modified_base (8)..(8): 5-methyl modified nucleotide
  modified_base (12)..(12): 5-methyl modified nucleotide
  modified_base (13)..(13): 5-methyl modified nucleotide
  modified_base (14)..(14): 5-methyl modified nucleotide
ttcuguccaagcccgguu

SEQ ID NO: 17443 - DNA, 17 bp, Artificial Sequence
  source: /note="Description of Artificial Sequence: Synthetic oligonucleotide"
  source: /note="Description of Combined DNA/RNA Molecule: Synthetic oligonucleotide"
  source: /note="DNA/RNA"
  modified_base (1)..(1): bicyclic nucleic acid (BNA)
  modified_base (2)..(2): bicyclic nucleic acid (BNA)
  modified_base (3)..(3): 5-methyl modified nucleotide
  modified_base (7)..(7): 5-methyl modified nucleotide
  modified_base (8)..(8): 5-methyl modified nucleotide
  modified_base (12)..(12): 5-methyl modified nucleotide
  modified_base (13)..(13): 5-methyl modified nucleotide
  modified_base (14)..(14): 5-methyl modified nucleotide
ttcuguccaagcccggu

SEQ ID NO: 17444 - DNA, 16 bp, Artificial Sequence
  source: /note="Description of Artificial Sequence: Synthetic oligonucleotide"
  source: /note="Description of Combined DNA/RNA Molecule: Synthetic oligonucleotide"
  source: /note="DNA/RNA"
  modified_base (1)..(1): bicyclic nucleic acid (BNA)
  modified_base (2)..(2): bicyclic nucleic acid (BNA)
  modified_base (3)..(3): 5-methyl modified nucleotide
  modified_base (7)..(7): 5-methyl modified nucleotide
  modified_base (8)..(8): 5-methyl modified nucleotide
  modified_base (12)..(12): 5-methyl modified nucleotide
  modified_base (13)..(13): 5-methyl modified nucleotide
  modified_base (14)..(14): 5-methyl modified nucleotide
ttcuguccaagcccgg

SEQ ID NO: 17445 - DNA, 15 bp, Artificial Sequence
  source: /note="Description of Artificial Sequence: Synthetic oligonucleotide"
  source: /note="Description of Combined DNA/RNA Molecule: Synthetic oligonucleotide"
  source: /note="DNA/RNA"
  modified_base (1)..(1): bicyclic nucleic acid (BNA)
  modified_base (2)..(2): bicyclic nucleic acid (BNA)
  modified_base (3)..(3): 5-methyl modified nucleotide
  modified_base (7)..(7): 5-methyl modified nucleotide
  modified_base (8)..(8): 5-methyl modified nucleotide
  modified_base (12)..(12): 5-methyl modified nucleotide
  modified_base (13)..(13): 5-methyl modified nucleotide
  modified_base (14)..(14): 5-methyl modified nucleotide
ttcuguccaagcccg

SEQ ID NO: 17446 - DNA, 14 bp, Artificial Sequence
  source: /note="Description of Artificial Sequence: Synthetic oligonucleotide"
  source: /note="Description of Combined DNA/RNA Molecule: Synthetic oligonucleotide"
  source: /note="DNA/RNA"
  modified_base (1)..(1): bicyclic nucleic acid (BNA)
  modified_base (2)..(2): bicyclic nucleic acid (BNA)
  modified_base (3)..(3): 5-methyl modified nucleotide
  modified_base (7)..(7): 5-methyl modified nucleotide
  modified_base (8)..(8): 5-methyl modified nucleotide
  modified_base (12)..(12): 5-methyl modified nucleotide
  modified_base (13)..(13): 5-methyl modified nucleotide
  modified_base (14)..(14): 5-methyl modified nucleotide
ttcuguccaagccc

SEQ ID NO: 17447 - DNA, 13 bp, Artificial Sequence
  source: /note="Description of Artificial Sequence: Synthetic oligonucleotide"
  source: /note="Description of Combined DNA/RNA Molecule: Synthetic oligonucleotide"
  source: /note="DNA/RNA"
  modified_base (1)..(1): bicyclic nucleic acid (BNA)
  modified_base (2)..(2): bicyclic nucleic acid (BNA)
  modified_base (3)..(3): 5-methyl modified nucleotide
  modified_base (7)..(7): 5-methyl modified nucleotide
  modified_base (8)..(8): 5-methyl modified nucleotide
  modified_base (12)..(12): 5-methyl modified nucleotide
  modified_base (13)..(13): 5-methyl modified nucleotide
ttcuguccaagcc

SEQ ID NO: 17448 - DNA, 12 bp, Artificial Sequence
  source: /note="Description of Artificial Sequence: Synthetic oligonucleotide"
  source: /note="Description of Combined DNA/RNA Molecule: Synthetic oligonucleotide"
  source: /note="DNA/RNA"
  modified_base (1)..(1): bicyclic nucleic acid (BNA)
  modified_base (2)..(2): bicyclic nucleic acid (BNA)
  modified_base (3)..(3): 5-methyl modified nucleotide
  modified_base (7)..(7): 5-methyl modified nucleotide
  modified_base (8)..(8): 5-methyl modified nucleotide
  modified_base (12)..(12): 5-methyl modified nucleotide
ttcuguccaagc

SEQ ID NO: 17449 - DNA, 11 bp, Artificial Sequence
  source: /note="Description of Artificial Sequence: Synthetic oligonucleotide"
  source: /note="Description of Combined DNA/RNA Molecule: Synthetic oligonucleotide"
  source: /note="DNA/RNA"
  modified_base (1)..(1): bicyclic nucleic acid (BNA)
  modified_base (2)..(2): bicyclic nucleic acid (BNA)
  modified_base (3)..(3): 5-methyl modified nucleotide
  modified_base (7)..(7): 5-methyl modified nucleotide
  modified_base (8)..(8): 5-methyl modified nucleotide
ttcuguccaag

SEQ ID NO: 17450 - DNA, 10 bp, Artificial Sequence
  source: /note="Description of Artificial Sequence: Synthetic oligonucleotide"
  source: /note="Description of Combined DNA/RNA Molecule: Synthetic oligonucleotide"
  source: /note="DNA/RNA"
  modified_base (1)..(1): bicyclic nucleic acid (BNA)
  modified_base (2)..(2): bicyclic nucleic acid (BNA)
  modified_base (3)..(3): 5-methyl modified nucleotide
  modified_base (7)..(7): 5-methyl modified nucleotide
  modified_base (8)..(8): 5-methyl modified nucleotide
ttcuguccaa

SEQ ID NO: 17451 - DNA, 9 bp, Artificial Sequence
  source: /note="Description of Artificial Sequence: Synthetic oligonucleotide"
  source: /note="Description of Combined DNA/RNA Molecule: Synthetic oligonucleotide"
  source: /note="DNA/RNA"
  modified_base (1)..(1): bicyclic nucleic acid (BNA)
  modified_base (2)..(2): bicyclic nucleic acid (BNA)
  modified_base (3)..(3): 5-methyl modified nucleotide
  modified_base (7)..(7): 5-methyl modified nucleotide
  modified_base (8)..(8): 5-methyl modified nucleotide
ttcugucca

SEQ ID NO: 17452 - DNA, 8 bp, Artificial Sequence
  source: /note="Description of Artificial Sequence: Synthetic oligonucleotide"
  source: /note="Description of Combined DNA/RNA Molecule: Synthetic oligonucleotide"
  source: /note="DNA/RNA"
  modified_base (1)..(1): bicyclic nucleic acid (BNA)
  modified_base (2)..(2): bicyclic nucleic acid (BNA)
  modified_base (3)..(3): 5-methyl modified nucleotide
  modified_base (7)..(7): 5-methyl modified nucleotide
  modified_base (8)..(8): 5-methyl modified nucleotide
ttcugucc

SEQ ID NO: 17453 - DNA, 19 bp, Artificial Sequence
  source: /note="Description of Artificial Sequence: Synthetic oligonucleotide"
  source: /note="Description of Combined DNA/RNA Molecule: Synthetic oligonucleotide"
  source: /note="DNA/RNA"
  modified_base (1)..(1): bicyclic nucleic acid (BNA)
  modified_base (2)..(2): 5-methyl bicyclic nucleic acid
  modified_base (6)..(6): 5-methyl modified nucleotide
  modified_base (7)..(7): 5-methyl modified nucleotide
  modified_base (11)..(11): 5-methyl modified nucleotide
  modified_base (12)..(12): 5-methyl modified nucleotide
  modified_base (13)..(13): 5-methyl modified nucleotide
tcuguccaagcccgguuga

SEQ ID NO: 17454 - DNA, 18 bp, Artificial Sequence
  source: /note="Description of Artificial Sequence: Synthetic oligonucleotide"
  source: /note="Description of Combined DNA/RNA Molecule: Synthetic oligonucleotide"
  source: /note="DNA/RNA"
  modified_base (1)..(1): bicyclic nucleic acid (BNA)
  modified_base (2)..(2): 5-methyl bicyclic nucleic acid
  modified_base (6)..(6): 5-methyl modified nucleotide
  modified_base (7)..(7): 5-methyl modified nucleotide
  modified_base (11)..(11): 5-methyl modified nucleotide
  modified_base (12)..(12): 5-methyl modified nucleotide
  modified_base (13)..(13): 5-methyl modified nucleotide
tcuguccaagcccgguug

SEQ ID NO: 17455 - DNA, 17 bp, Artificial Sequence
  source: /note="Description of Artificial Sequence: Synthetic oligonucleotide"
  source: /note="Description of Combined DNA/RNA Molecule: Synthetic oligonucleotide"
  source: /note="DNA/RNA"
  modified_base (1)..(1): bicyclic nucleic acid (BNA)
  modified_base (2)..(2): 5-methyl bicyclic nucleic acid
  modified_base (6)..(6): 5-methyl modified nucleotide
  modified_base (7)..(7): 5-methyl modified nucleotide
  modified_base (11)..(11): 5-methyl modified nucleotide
  modified_base (12)..(12): 5-methyl modified nucleotide
  modified_base (13)..(13): 5-methyl modified nucleotide
tcuguccaagcccgguu

SEQ ID NO: 17456 - DNA, 16 bp, Artificial Sequence
  source: /note="Description of Artificial Sequence: Synthetic oligonucleotide"
  source: /note="Description of Combined DNA/RNA Molecule: Synthetic oligonucleotide"
  source: /note="DNA/RNA"
  modified_base (1)..(1): bicyclic nucleic acid (BNA)
  modified_base (2)..(2): 5-methyl bicyclic nucleic acid
  modified_base (6)..(6): 5-methyl modified nucleotide
  modified_base (7)..(7): 5-methyl modified nucleotide
  modified_base (11)..(11): 5-methyl modified nucleotide
  modified_base (12)..(12): 5-methyl modified nucleotide
  modified_base (13)..(13): 5-methyl modified nucleotide
tcuguccaagcccggu

SEQ ID NO: 17457 - DNA, 15 bp, Artificial Sequence
  source: /note="Description of Artificial Sequence: Synthetic oligonucleotide"
  source: /note="Description of Combined DNA/RNA Molecule: Synthetic oligonucleotide"
  source: /note="DNA/RNA"
  modified_base (1)..(1): bicyclic nucleic acid (BNA)
  modified_base (2)..(2): 5-methyl bicyclic nucleic acid
  modified_base (6)..(6): 5-methyl modified nucleotide
  modified_base (7)..(7): 5-methyl modified nucleotide
  modified_base (11)..(11): 5-methyl modified nucleotide
  modified_base (12)..(12): 5-methyl modified nucleotide
  modified_base (13)..(13): 5-methyl modified nucleotide
tcuguccaagcccgg

SEQ ID NO: 17458 - DNA, 14 bp, Artificial Sequence
  source: /note="Description of Artificial Sequence: Synthetic oligonucleotide"
  source: /note="Description of Combined DNA/RNA Molecule: Synthetic oligonucleotide"
  source: /note="DNA/RNA"
  modified_base (1)..(1): bicyclic nucleic acid (BNA)
  modified_base (2)..(2): 5-methyl bicyclic nucleic acid
  modified_base (6)..(6): 5-methyl modified nucleotide
  modified_base (7)..(7): 5-methyl modified nucleotide
  modified_base (11)..(11): 5-methyl modified nucleotide
  modified_base (12)..(12): 5-methyl modified nucleotide
  modified_base (13)..(13): 5-methyl modified nucleotide
tcuguccaagcccg

SEQ ID NO: 17459 - DNA, 13 bp, Artificial Sequence
  source: /note="Description of Artificial Sequence: Synthetic oligonucleotide"
  source: /note="Description of Combined DNA/RNA Molecule: Synthetic oligonucleotide"
  source: /note="DNA/RNA"
  modified_base (1)..(1): bicyclic nucleic acid (BNA)
  modified_base (2)..(2): 5-methyl bicyclic nucleic acid
  modified_base (6)..(6): 5-methyl modified nucleotide
  modified_base (7)..(7): 5-methyl modified nucleotide
  modified_base (11)..(11): 5-methyl modified nucleotide
  modified_base (12)..(12): 5-methyl modified nucleotide
  modified_base (13)..(13): 5-methyl modified nucleotide
tcuguccaagccc

SEQ ID NO: 17460 - DNA, 12 bp, Artificial Sequence
  source: /note="Description of Artificial Sequence: Synthetic oligonucleotide"
  source: /note="Description of Combined DNA/RNA Molecule: Synthetic oligonucleotide"
  source: /note="DNA/RNA"
  modified_base (1)..(1): bicyclic nucleic acid (BNA)
  modified_base (2)..(2): 5-methyl bicyclic nucleic acid
  modified_base (6)..(6): 5-methyl modified nucleotide
  modified_base (7)..(7): 5-methyl modified nucleotide
  modified_base (11)..(11): 5-methyl modified nucleotide
  modified_base (12)..(12): 5-methyl modified nucleotide
tcuguccaagcc

SEQ ID NO: 17461 - DNA, 11 bp, Artificial Sequence
  source: /note="Description of Artificial Sequence: Synthetic oligonucleotide"
  source: /note="Description of Combined DNA/RNA Molecule: Synthetic oligonucleotide"
  source: /note="DNA/RNA"
  modified_base (1)..(1): bicyclic nucleic acid (BNA)
  modified_base (2)..(2): 5-methyl bicyclic nucleic acid
  modified_base (6)..(6): 5-methyl modified nucleotide
  modified_base (7)..(7): 5-methyl modified nucleotide
  modified_base (11)..(11): 5-methyl modified nucleotide
tcuguccaagc

SEQ ID NO: 17462 - DNA, 10 bp, Artificial Sequence
  source: /note="Description of Artificial Sequence: Synthetic oligonucleotide"
  source: /note="Description of Combined DNA/RNA Molecule: Synthetic oligonucleotide"
  source: /note="DNA/RNA"
  modified_base (1)..(1): bicyclic nucleic acid (BNA)
  modified_base (2)..(2): 5-methyl bicyclic nucleic acid
  modified_base (6)..(6): 5-methyl modified nucleotide
  modified_base (7)..(7): 5-methyl modified nucleotide
tcuguccaag

SEQ ID NO: 17463 - DNA, 9 bp, Artificial Sequence
  source: /note="Description of Artificial Sequence: Synthetic oligonucleotide"
  source: /note="Description of Combined DNA/RNA Molecule: Synthetic oligonucleotide"
  source: /note="DNA/RNA"
  modified_base (1)..(1): bicyclic nucleic acid (BNA)
  modified_base (2)..(2): 5-methyl bicyclic nucleic acid
  modified_base (6)..(6): 5-methyl modified nucleotide
  modified_base (7)..(7): 5-methyl modified nucleotide
tcuguccaa

SEQ ID NO: 17464 - DNA, 8 bp, Artificial Sequence
  source: /note="Description of Artificial Sequence: Synthetic oligonucleotide"
  source: /note="Description of Combined DNA/RNA Molecule: Synthetic oligonucleotide"
  source: /note="DNA/RNA"
  modified_base (1)..(1): bicyclic nucleic acid (BNA)
  modified_base (2)..(2): 5-methyl bicyclic nucleic acid
  modified_base (6)..(6): 5-methyl modified nucleotide
  modified_base (7)..(7): 5-methyl modified nucleotide
tcugucca

SEQ ID NO: 17465 - DNA, 17 bp, Artificial Sequence
  source: /note="Description of Artificial Sequence: Synthetic oligonucleotide"
  source: /note="Description of Combined DNA/RNA Molecule: Synthetic oligonucleotide"
  source: /note="DNA/RNA"
  modified_base (1)..(1): 5-methyl bicyclic nucleic acid
  modified_base (2)..(2): bicyclic nucleic acid (BNA)
  modified_base (5)..(5): 5-methyl modified nucleotide
  modified_base (6)..(6): 5-methyl modified nucleotide
  modified_base (10)..(10): 5-methyl modified nucleotide
  modified_base (11)..(11): 5-methyl modified nucleotide
  modified_base (12)..(12): 5-methyl modified nucleotide
ctguccaagcccgguug

SEQ ID NO: 17466 - DNA, 16 bp, Artificial Sequence
  source: /note="Description of Artificial Sequence: Synthetic oligonucleotide"
  source: /note="Description of Combined DNA/RNA Molecule: Synthetic oligonucleotide"
  source: /note="DNA/RNA"
  modified_base (1)..(1): 5-methyl bicyclic nucleic acid
  modified_base (2)..(2): bicyclic nucleic acid (BNA)
  modified_base (5)..(5): 5-methyl modified nucleotide
  modified_base (6)..(6): 5-methyl modified nucleotide
  modified_base (10)..(10): 5-methyl modified nucleotide
  modified_base (11)..(11): 5-methyl modified nucleotide
  modified_base (12)..(12): 5-methyl modified nucleotide
ctguccaagcccgguu

SEQ ID NO: 17467 - DNA, 15 bp, Artificial Sequence
  source: /note="Description of Artificial Sequence: Synthetic oligonucleotide"
  source: /note="Description of Combined DNA/RNA Molecule: Synthetic oligonucleotide"
  source: /note="DNA/RNA"
  modified_base (1)..(1): 5-methyl bicyclic nucleic acid
  modified_base (2)..(2): bicyclic nucleic acid (BNA)
  modified_base (5)..(5): 5-methyl modified nucleotide
  modified_base (6)..(6): 5-methyl modified nucleotide
  modified_base (10)..(10): 5-methyl modified nucleotide
  modified_base (11)..(11): 5-methyl modified nucleotide
  modified_base (12)..(12): 5-methyl modified nucleotide
ctguccaagcccggu

SEQ ID NO: 17468 - DNA, 14 bp, Artificial Sequence
  source: /note="Description of Artificial Sequence: Synthetic oligonucleotide"
  source: /note="Description of Combined DNA/RNA Molecule: Synthetic oligonucleotide"
  source: /note="DNA/RNA"
  modified_base (1)..(1): 5-methyl bicyclic nucleic acid
  modified_base (2)..(2): bicyclic nucleic acid (BNA)
  modified_base (5)..(5): 5-methyl modified nucleotide
  modified_base (6)..(6): 5-methyl modified nucleotide
  modified_base (10)..(10): 5-methyl modified nucleotide
  modified_base (11)..(11): 5-methyl modified nucleotide
  modified_base (12)..(12): 5-methyl modified nucleotide
ctguccaagcccgg

SEQ ID NO: 17469 - DNA, 13 bp, Artificial Sequence
  source: /note="Description of Artificial Sequence: Synthetic oligonucleotide"
  source: /note="Description of Combined DNA/RNA Molecule: Synthetic oligonucleotide"
  source: /note="DNA/RNA"
  modified_base (1)..(1): 5-methyl bicyclic nucleic acid
  modified_base (2)..(2): bicyclic nucleic acid (BNA)
  modified_base (5)..(5): 5-methyl modified nucleotide
  modified_base (6)..(6): 5-methyl modified nucleotide
  modified_base (10)..(10): 5-methyl modified nucleotide
  modified_base (11)..(11): 5-methyl modified nucleotide
  modified_base (12)..(12): 5-methyl modified nucleotide
ctguccaagcccg

SEQ ID NO: 17470 - DNA, 12 bp, Artificial Sequence
  source: /note="Description of Artificial Sequence: Synthetic oligonucleotide"
  source: /note="Description of Combined DNA/RNA Molecule: Synthetic oligonucleotide"
  source: /note="DNA/RNA"
  modified_base (1)..(1): 5-methyl bicyclic nucleic acid
  modified_base (2)..(2): bicyclic nucleic acid (BNA)
  modified_base (5)..(5): 5-methyl modified nucleotide
  modified_base (6)..(6): 5-methyl modified nucleotide
  modified_base (10)..(10): 5-methyl modified nucleotide
  modified_base (11)..(11): 5-methyl modified nucleotide
  modified_base (12)..(12): 5-methyl modified nucleotide
ctguccaagccc

SEQ ID NO: 17471 - DNA, 11 bp, Artificial Sequence
  source: /note="Description of Artificial Sequence: Synthetic oligonucleotide"
  source: /note="Description of Combined DNA/RNA Molecule: Synthetic oligonucleotide"
  source: /note="DNA/RNA"
  modified_base (1)..(1): 5-methyl bicyclic nucleic acid
  modified_base (2)..(2): bicyclic nucleic acid (BNA)
  modified_base (5)..(5): 5-methyl modified nucleotide
  modified_base (6)..(6): 5-methyl modified nucleotide
  modified_base (10)..(10): 5-methyl modified nucleotide
  modified_base (11)..(11): 5-methyl modified nucleotide
ctguccaagcc

SEQ ID NO: 17472 - DNA, 10 bp, Artificial Sequence
  source: /note="Description of Artificial Sequence: Synthetic oligonucleotide"
  source: /note="Description of Combined DNA/RNA Molecule: Synthetic oligonucleotide"
  source: /note="DNA/RNA"
  modified_base (1)..(1): 5-methyl bicyclic nucleic acid
  modified_base (2)..(2): bicyclic nucleic acid (BNA)
  modified_base (5)..(5): 5-methyl modified nucleotide
  modified_base (6)..(6): 5-methyl modified nucleotide
  modified_base (10)..(10): 5-methyl modified nucleotide
ctguccaagc

SEQ ID NO: 17473 - DNA, 9 bp, Artificial Sequence
  source: /note="Description of Artificial Sequence: Synthetic oligonucleotide"
  source: /note="Description of Combined DNA/RNA Molecule: Synthetic oligonucleotide"
  source: /note="DNA/RNA"
  modified_base (1)..(1): 5-methyl bicyclic nucleic acid
  modified_base (2)..(2): bicyclic nucleic acid (BNA)
  modified_base (5)..(5): 5-methyl modified nucleotide
  modified_base (6)..(6): 5-methyl modified nucleotide
ctguccaag

SEQ ID NO: 17474 - DNA, 8 bp, Artificial Sequence
  source: /note="Description of Artificial Sequence: Synthetic oligonucleotide"
  source: /note="Description of Combined DNA/RNA Molecule: Synthetic oligonucleotide"
  source: /note="DNA/RNA"
  modified_base (1)..(1): 5-methyl bicyclic nucleic acid
  modified_base (2)..(2): bicyclic nucleic acid (BNA)
  modified_base (5)..(5): 5-methyl modified nucleotide
  modified_base (6)..(6): 5-methyl modified nucleotide
ctguccaa

SEQ ID NO: 17475 - DNA, 20 bp, Artificial Sequence
  source: /note="Description of Artificial Sequence: Synthetic oligonucleotide"
  source: /note="Description of Combined DNA/RNA Molecule: Synthetic oligonucleotide"
  source: /note="DNA/RNA"
  modified_base (1)..(1): bicyclic nucleic acid (BNA)
  modified_base (2)..(2): bicyclic nucleic acid (BNA)
  modified_base (4)..(4): 5-methyl modified nucleotide
  modified_base (8)..(8): 5-methyl modified nucleotide
  modified_base (9)..(9): 5-methyl modified nucleotide
  modified_base (13)..(13): 5-methyl modified nucleotide
  modified_base (14)..(14): 5-methyl modified nucleotide
  modified_base (15)..(15): 5-methyl modified nucleotide
gtucuguccaagcccgguug

SEQ ID NO: 17476 - DNA, 19 bp, Artificial Sequence
  source: /note="Description of Artificial Sequence: Synthetic oligonucleotide"
  source: /note="Description of Combined DNA/RNA Molecule: Synthetic oligonucleotide"
  source: /note="DNA/RNA"
  modified_base (1)..(1): bicyclic nucleic acid (BNA)
  modified_base (2)..(2): bicyclic nucleic acid (BNA)
  modified_base (4)..(4): 5-methyl modified nucleotide
  modified_base (8)..(8): 5-methyl modified nucleotide
  modified_base (9)..(9): 5-methyl modified nucleotide
  modified_base (13)..(13): 5-methyl modified nucleotide
  modified_base (14)..(14): 5-methyl modified nucleotide
  modified_base (15)..(15): 5-methyl modified nucleotide
gtucuguccaagcccgguu

SEQ ID NO: 17477 - DNA, 18 bp, Artificial Sequence
  source: /note="Description of Artificial Sequence: Synthetic oligonucleotide"
  source: /note="Description of Combined DNA/RNA Molecule: Synthetic oligonucleotide"
  source: /note="DNA/RNA"
  modified_base (1)..(1): bicyclic nucleic acid (BNA)
  modified_base (2)..(2): bicyclic nucleic acid (BNA)
  modified_base (4)..(4): 5-methyl modified nucleotide
  modified_base (8)..(8): 5-methyl modified nucleotide
  modified_base (9)..(9): 5-methyl modified nucleotide
  modified_base (13)..(13): 5-methyl modified nucleotide
  modified_base (14)..(14): 5-methyl modified nucleotide
  modified_base (15)..(15): 5-methyl modified nucleotide
gtucuguccaagcccggu

SEQ ID NO: 17478 - DNA, 17 bp, Artificial Sequence
  source: /note="Description of Artificial Sequence: Synthetic oligonucleotide"
  source: /note="Description of Combined DNA/RNA Molecule: Synthetic oligonucleotide"
  source: /note="DNA/RNA"
  modified_base (1)..(1): bicyclic nucleic acid (BNA)
  modified_base (2)..(2): bicyclic nucleic acid (BNA)
  modified_base (4)..(4): 5-methyl modified nucleotide
  modified_base (8)..(8): 5-methyl modified nucleotide
  modified_base (9)..(9): 5-methyl modified nucleotide
  modified_base (13)..(13): 5-methyl modified nucleotide
  modified_base (14)..(14): 5-methyl modified nucleotide
  modified_base (15)..(15): 5-methyl modified nucleotide
gtucuguccaagcccgg

SEQ ID NO: 17479 - DNA, 16 bp, Artificial Sequence
  source: /note="Description of Artificial Sequence: Synthetic oligonucleotide"
  source: /note="Description of Combined DNA/RNA Molecule: Synthetic oligonucleotide"
  source: /note="DNA/RNA"
  modified_base (1)..(1): bicyclic nucleic acid (BNA)
  modified_base (2)..(2): bicyclic nucleic acid (BNA)
  modified_base (4)..(4): 5-methyl modified nucleotide
  modified_base (8)..(8): 5-methyl modified nucleotide
  modified_base (9)..(9): 5-methyl modified nucleotide
  modified_base (13)..(13): 5-methyl modified nucleotide
  modified_base (14)..(14): 5-methyl modified nucleotide
  modified_base (15)..(15): 5-methyl modified nucleotide
gtucuguccaagcccg

SEQ ID NO: 17480 - DNA, 15 bp, Artificial Sequence
  source: /note="Description of Artificial Sequence: Synthetic oligonucleotide"
  source: /note="Description of Combined DNA/RNA Molecule: Synthetic oligonucleotide"
  source: /note="DNA/RNA"
  modified_base (1)..(1): bicyclic nucleic acid (BNA)
  modified_base (2)..(2): bicyclic nucleic acid (BNA)
  modified_base (4)..(4): 5-methyl modified nucleotide
  modified_base (8)..(8): 5-methyl modified nucleotide
  modified_base (9)..(9): 5-methyl modified nucleotide
  modified_base (13)..(13): 5-methyl modified nucleotide
  modified_base (14)..(14): 5-methyl modified nucleotide
  modified_base (15)..(15): 5-methyl modified nucleotide
gtucuguccaagccc

SEQ ID NO: 17481 - DNA, 14 bp, Artificial Sequence
  source: /note="Description of Artificial Sequence: Synthetic oligonucleotide"
  source: /note="Description of Combined DNA/RNA Molecule: Synthetic oligonucleotide"
  source: /note="DNA/RNA"
  modified_base (1)..(1): bicyclic nucleic acid (BNA)
  modified_base (2)..(2): bicyclic nucleic acid (BNA)
  modified_base (4)..(4): 5-methyl modified nucleotide
  modified_base (8)..(8): 5-methyl modified nucleotide
  modified_base (9)..(9): 5-methyl modified nucleotide
  modified_base (13)..(13): 5-methyl modified nucleotide
  modified_base (14)..(14): 5-methyl modified nucleotide
gtucuguccaagcc

SEQ ID NO: 17482 - DNA, 13 bp, Artificial Sequence
  source: /note="Description of Artificial Sequence: Synthetic oligonucleotide"
  source: /note="Description of Combined DNA/RNA Molecule: Synthetic oligonucleotide"
  source: /note="DNA/RNA"
  modified_base (1)..(1): bicyclic nucleic acid (BNA)
  modified_base (2)..(2): bicyclic nucleic acid (BNA)
  modified_base (4)..(4): 5-methyl modified nucleotide
  modified_base (8)..(8): 5-methyl modified nucleotide
  modified_base (9)..(9): 5-methyl modified nucleotide
  modified_base (13)..(13): 5-methyl modified nucleotide
gtucuguccaagc

SEQ ID NO: 17483 - DNA, 12 bp, Artificial Sequence
  source: /note="Description of Artificial Sequence: Synthetic oligonucleotide"
  source: /note="Description of Combined DNA/RNA Molecule: Synthetic oligonucleotide"
  source: /note="DNA/RNA"
  modified_base (1)..(1): bicyclic nucleic acid (BNA)
  modified_base (2)..(2): bicyclic nucleic acid (BNA)
  modified_base (4)..(4): 5-methyl modified nucleotide
  modified_base (8)..(8): 5-methyl modified nucleotide
  modified_base (9)..(9): 5-methyl modified nucleotide
gtucuguccaag

SEQ ID NO: 17484 - DNA, 11 bp, Artificial Sequence
  source: /note="Description of Artificial Sequence: Synthetic oligonucleotide"
  source: /note="Description of Combined DNA/RNA Molecule: Synthetic oligonucleotide"
  source: /note="DNA/RNA"
  modified_base (1)..(1): bicyclic nucleic acid (BNA)
  modified_base (2)..(2): bicyclic nucleic acid (BNA)
  modified_base (4)..(4): 5-methyl modified nucleotide
  modified_base (8)..(8): 5-methyl modified nucleotide
  modified_base (9)..(9): 5-methyl modified nucleotide
gtucuguccaa

SEQ ID NO: 17485 - DNA, 10 bp, Artificial Sequence
  source: /note="Description of Artificial Sequence: Synthetic oligonucleotide"
  source: /note="Description of Combined DNA/RNA Molecule: Synthetic oligonucleotide"
  source: /note="DNA/RNA"
  modified_base (1)..(1): bicyclic nucleic acid (BNA)
  modified_base (2)..(2): bicyclic nucleic acid (BNA)
  modified_base (4)..(4): 5-methyl modified nucleotide
  modified_base (8)..(8): 5-methyl modified nucleotide
  modified_base (9)..(9): 5-methyl modified nucleotide
gtucugucca

SEQ ID NO: 17486 - DNA, 9 bp, Artificial Sequence
  source: /note="Description of Artificial Sequence: Synthetic oligonucleotide"
  source: /note="Description of Combined DNA/RNA Molecule: Synthetic oligonucleotide"
  source: /note="DNA/RNA"
  modified_base (1)..(1): bicyclic nucleic acid (BNA)
  modified_base (2)..(2): bicyclic nucleic acid (BNA)
  modified_base (4)..(4): 5-methyl modified nucleotide
  modified_base (8)..(8): 5-methyl modified nucleotide
  modified_base (9)..(9): 5-methyl modified nucleotide
gtucugucc

SEQ ID NO: 17487 - DNA, 8 bp, Artificial Sequence
  source: /note="Description of Artificial Sequence: Synthetic oligonucleotide"
  source: /note="Description of Combined DNA/RNA Molecule: Synthetic oligonucleotide"
  source: /note="DNA/RNA"
  modified_base (1)..(1): bicyclic nucleic acid (BNA)
  modified_base (2)..(2): bicyclic nucleic acid (BNA)
  modified_base (4)..(4): 5-methyl modified nucleotide
  modified_base (8)..(8): 5-methyl modified nucleotide
gtucuguc

SEQ ID NO: 17488 - RNA, 20 nt, Artificial Sequence
  source: /note="Description of Artificial Sequence: Synthetic oligonucleotide"
  source: /note="RNA"
  modified_base (1)..(1): bicyclic nucleic acid (BNA)
  modified_base (2)..(2): bicyclic nucleic acid (BNA)
  modified_base (5)..(5): 5-methyl modified nucleotide
  modified_base (9)..(9): 5-methyl modified nucleotide
  modified_base (10)..(10): 5-methyl modified nucleotide
  modified_base (14)..(14): 5-methyl modified nucleotide
  modified_base (15)..(15): 5-methyl modified nucleotide
  modified_base (16)..(16): 5-methyl modified nucleotide
aguucuguccaagcccgguu

SEQ ID NO: 17489 - RNA, 19 nt, Artificial Sequence
  source: /note="Description of Artificial Sequence: Synthetic oligonucleotide"
  source: /note="RNA"
  modified_base (1)..(1): bicyclic nucleic acid (BNA)
  modified_base (2)..(2): bicyclic nucleic acid (BNA)
  modified_base (5)..(5): 5-methyl modified nucleotide
  modified_base (9)..(9): 5-methyl modified nucleotide
  modified_base (10)..(10): 5-methyl modified nucleotide
  modified_base (14)..(14): 5-methyl modified nucleotide
  modified_base (15)..(15): 5-methyl modified nucleotide
  modified_base (16)..(16): 5-methyl modified nucleotide
aguucuguccaagcccggu

SEQ ID NO: 17490 - RNA, 18 nt, Artificial Sequence
  source: /note="Description of Artificial Sequence: Synthetic oligonucleotide"
  source: /note="RNA"
  modified_base (1)..(1): bicyclic nucleic acid (BNA)
  modified_base (2)..(2): bicyclic nucleic acid (BNA)
  modified_base (5)..(5): 5-methyl modified nucleotide
  modified_base (9)..(9): 5-methyl modified nucleotide
  modified_base (10)..(10): 5-methyl modified nucleotide
  modified_base (14)..(14): 5-methyl modified nucleotide
  modified_base (15)..(15): 5-methyl modified nucleotide
  modified_base (16)..(16): 5-methyl modified nucleotide
aguucuguccaagcccgg

SEQ ID NO: 17491 - RNA, 17 nt, Artificial Sequence
  source: /note="Description of Artificial Sequence: Synthetic oligonucleotide"
  source: /note="RNA"
  modified_base (1)..(1): bicyclic nucleic acid (BNA)
  modified_base (2)..(2): bicyclic nucleic acid (BNA)
  modified_base (5)..(5): 5-methyl modified nucleotide
  modified_base (9)..(9): 5-methyl modified nucleotide
  modified_base (10)..(10): 5-methyl modified nucleotide
  modified_base (14)..(14): 5-methyl modified nucleotide
  modified_base (15)..(15): 5-methyl modified nucleotide
  modified_base (16)..(16): 5-methyl modified nucleotide
aguucuguccaagcccg

SEQ ID NO: 17492 - RNA, 16 nt, Artificial Sequence
  source: /note="Description of Artificial Sequence: Synthetic oligonucleotide"
  source: /note="RNA"
  modified_base (1)..(1): bicyclic nucleic acid (BNA)
  modified_base (2)..(2): bicyclic nucleic acid (BNA)
  modified_base (5)..(5): 5-methyl modified nucleotide
  modified_base (9)..(9): 5-methyl modified nucleotide
  modified_base (10)..(10): 5-methyl modified nucleotide
  modified_base (14)..(14): 5-methyl modified nucleotide
  modified_base (15)..(15): 5-methyl modified nucleotide
  modified_base (16)..(16): 5-methyl modified nucleotide
aguucuguccaagccc

SEQ ID NO: 17493 - RNA, 15 nt, Artificial Sequence
  source: /note="Description of Artificial Sequence: Synthetic oligonucleotide"
  source: /note="RNA"
  modified_base (1)..(1): bicyclic nucleic acid (BNA)
  modified_base (2)..(2): bicyclic nucleic acid (BNA)
  modified_base (5)..(5): 5-methyl modified nucleotide
  modified_base (9)..(9): 5-methyl modified nucleotide
  modified_base (10)..(10): 5-methyl modified nucleotide
  modified_base (14)..(14): 5-methyl modified nucleotide
  modified_base (15)..(15): 5-methyl modified nucleotide
aguucuguccaagcc

SEQ ID NO: 17494 - RNA, 14 nt, Artificial Sequence
  source: /note="Description of Artificial Sequence: Synthetic oligonucleotide"
  source: /note="RNA"
  modified_base (1)..(1): bicyclic nucleic acid (BNA)
  modified_base (2)..(2): bicyclic nucleic acid (BNA)
  modified_base (5)..(5): 5-methyl modified nucleotide
  modified_base (9)..(9): 5-methyl modified nucleotide
  modified_base (10)..(10): 5-methyl modified nucleotide
  modified_base (14)..(14): 5-methyl modified nucleotide
aguucuguccaagc

SEQ ID NO: 17495 - RNA, 13 nt, Artificial Sequence
  source: /note="Description of Artificial Sequence: Synthetic oligonucleotide"
  source: /note="RNA"
  modified_base (1)..(1): bicyclic nucleic acid (BNA)
  modified_base (2)..(2): bicyclic nucleic acid (BNA)
  modified_base (5)..(5): 5-methyl modified nucleotide
  modified_base (9)..(9): 5-methyl modified nucleotide
  modified_base (10)..(10): 5-methyl modified nucleotide
aguucuguccaag

SEQ ID NO: 17496 - RNA, 12 nt, Artificial Sequence
  source: /note="Description of Artificial Sequence: Synthetic oligonucleotide"
  source: /note="RNA"
  modified_base (1)..(1): bicyclic nucleic acid (BNA)
  modified_base (2)..(2): bicyclic nucleic acid (BNA)
  modified_base (5)..(5): 5-methyl modified nucleotide
  modified_base (9)..(9): 5-methyl modified nucleotide
  modified_base (10)..(10): 5-methyl modified nucleotide
aguucuguccaa

SEQ ID NO: 17497 - RNA, 11 nt, Artificial Sequence
  source: /note="Description of Artificial Sequence: Synthetic oligonucleotide"
  source: /note="RNA"
  modified_base (1)..(1): bicyclic nucleic acid (BNA)
  modified_base (2)..(2): bicyclic nucleic acid (BNA)
  modified_base (5)..(5): 5-methyl modified nucleotide
  modified_base (9)..(9): 5-methyl modified nucleotide
  modified_base (10)..(10): 5-methyl modified nucleotide
aguucugucca

SEQ ID NO: 17498 - RNA, 10 nt, Artificial Sequence
  source: /note="Description of Artificial Sequence: Synthetic oligonucleotide"
  source: /note="RNA"
  modified_base (1)..(1): bicyclic nucleic acid (BNA)
  modified_base (2)..(2): bicyclic nucleic acid (BNA)
  modified_base (5)..(5): 5-methyl modified nucleotide
  modified_base (9)..(9): 5-methyl modified nucleotide
  modified_base (10)..(10): 5-methyl modified nucleotide
aguucugucc

SEQ ID NO: 17499 - RNA, 9 nt, Artificial Sequence
  source: /note="Description of Artificial Sequence: Synthetic oligonucleotide"
  source: /note="RNA"
  modified_base (1)..(1): bicyclic nucleic acid (BNA)
  modified_base (2)..(2): bicyclic nucleic acid (BNA)
  modified_base (5)..(5): 5-methyl modified nucleotide
  modified_base (9)..(9): 5-methyl modified nucleotide
aguucuguc

SEQ ID NO: 17500 - RNA, 8 nt, Artificial Sequence
  source: /note="Description of Artificial Sequence: Synthetic oligonucleotide"
  source: /note="RNA"
  modified_base (1)..(1): bicyclic nucleic acid (BNA)
  modified_base (2)..(2): bicyclic nucleic acid (BNA)
  modified_base (5)..(5): 5-methyl modified nucleotide
aguucugu

SEQ ID NO: 17501 - RNA, 20 nt, Artificial Sequence
  source: /note="Description of Artificial Sequence: Synthetic oligonucleotide"
  source: /note="RNA"
  modified_base (1)..(1): bicyclic nucleic acid (BNA)
  modified_base (2)..(2): bicyclic nucleic acid (BNA)
  modified_base (6)..(6): 5-methyl modified nucleotide
  modified_base (10)..(10): 5-methyl modified nucleotide
  modified_base (11)..(11): 5-methyl modified nucleotide
  modified_base (15)..(15): 5-methyl modified nucleotide
  modified_base (16)..(16): 5-methyl modified nucleotide
  modified_base (17)..(17): 5-methyl modified nucleotide
aaguucuguccaagcccggu

SEQ ID NO: 17502 - RNA, 19 nt, Artificial Sequence
  source: /note="Description of Artificial Sequence: Synthetic oligonucleotide"
  source: /note="RNA"
  modified_base (1)..(1): bicyclic nucleic acid (BNA)
  modified_base (2)..(2): bicyclic nucleic acid (BNA)
  modified_base (6)..(6): 5-methyl modified nucleotide
  modified_base (10)..(10): 5-methyl modified nucleotide
  modified_base (11)..(11): 5-methyl modified nucleotide
  modified_base (15)..(15): 5-methyl modified nucleotide
  modified_base (16)..(16): 5-methyl modified nucleotide
  modified_base (17)..(17): 5-methyl modified nucleotide
aaguucuguccaagcccgg

SEQ ID NO: 17503 - RNA, 18 nt, Artificial Sequence
  source: /note="Description of Artificial Sequence: Synthetic oligonucleotide"
  source: /note="RNA"
  modified_base (1)..(1): bicyclic nucleic acid (BNA)
  modified_base (2)..(2): bicyclic nucleic acid (BNA)
  modified_base (6)..(6): 5-methyl modified nucleotide
  modified_base (10)..(10): 5-methyl modified nucleotide
  modified_base (11)..(11): 5-methyl modified nucleotide
  modified_base (15)..(15): 5-methyl modified nucleotide
  modified_base (16)..(16): 5-methyl modified nucleotide
  modified_base (17)..(17): 5-methyl modified nucleotide
aaguucuguccaagcccg

SEQ ID NO: 17504 - RNA, 17 nt, Artificial Sequence
  source: /note="Description of Artificial Sequence: Synthetic oligonucleotide"
  source: /note="RNA"
  modified_base (1)..(1): bicyclic nucleic acid (BNA)
  modified_base (2)..(2): bicyclic nucleic acid (BNA)
  modified_base (6)..(6): 5-methyl modified nucleotide
  modified_base (10)..(10): 5-methyl modified nucleotide
  modified_base (11)..(11): 5-methyl modified nucleotide
  modified_base (15)..(15): 5-methyl modified nucleotide
  modified_base (16)..(16): 5-methyl modified nucleotide
  modified_base (17)..(17): 5-methyl modified nucleotide
aaguucuguccaagccc

SEQ ID NO: 17505 - RNA, 16 nt, Artificial Sequence
  source: /note="Description of Artificial Sequence: Synthetic oligonucleotide"
  source: /note="RNA"
  modified_base (1)..(1): bicyclic nucleic acid (BNA)
  modified_base (2)..(2): bicyclic nucleic acid (BNA)
  modified_base (6)..(6): 5-methyl modified nucleotide
  modified_base (10)..(10): 5-methyl modified nucleotide
  modified_base (11)..(11): 5-methyl modified nucleotide
  modified_base (15)..(15): 5-methyl modified nucleotide
  modified_base (16)..(16): 5-methyl modified nucleotide
aaguucuguccaagcc

SEQ ID NO: 17506 - RNA, 15 nt, Artificial Sequence
  source: /note="Description of Artificial Sequence: Synthetic oligonucleotide"
  source: /note="RNA"
  modified_base (1)..(1): bicyclic nucleic acid (BNA)
  modified_base (2)..(2): bicyclic nucleic acid (BNA)
  modified_base (6)..(6): 5-methyl modified nucleotide
  modified_base (10)..(10): 5-methyl modified nucleotide
  modified_base (11)..(11): 5-methyl modified nucleotide
  modified_base (15)..(15): 5-methyl modified nucleotide
aaguucuguccaagc

SEQ ID NO: 17507 - RNA, 14 nt, Artificial Sequence
  source: /note="Description of Artificial Sequence: Synthetic oligonucleotide"
  source: /note="RNA"
  modified_base (1)..(1): bicyclic nucleic acid (BNA)
  modified_base (2)..(2): bicyclic nucleic acid (BNA)
  modified_base (6)..(6): 5-methyl modified nucleotide
  modified_base (10)..(10): 5-methyl modified nucleotide
  modified_base (11)..(11): 5-methyl modified nucleotide
aaguucuguccaag

SEQ ID NO: 17508 - RNA, 13 nt, Artificial Sequence
  source: /note="Description of Artificial Sequence: Synthetic oligonucleotide"
  source: /note="RNA"
  modified_base (1)..(1): bicyclic nucleic acid (BNA)
  modified_base (2)..(2): bicyclic nucleic acid (BNA)
  modified_base (6)..(6): 5-methyl modified nucleotide
  modified_base (10)..(10): 5-methyl modified nucleotide
  modified_base (11)..(11): 5-methyl modified nucleotide
aaguucuguccaa

SEQ ID NO: 17509 - RNA, 12 nt, Artificial Sequence
  source: /note="Description of Artificial Sequence: Synthetic oligonucleotide"
  source: /note="RNA"
  modified_base (1)..(1): bicyclic nucleic acid (BNA)
  modified_base (2)..(2): bicyclic nucleic acid (BNA)
  modified_base (6)..(6): 5-methyl modified nucleotide
  modified_base (10)..(10): 5-methyl modified nucleotide
  modified_base (11)..(11): 5-methyl modified nucleotide
aaguucugucca

SEQ ID NO: 17510 - RNA, 11 nt, Artificial Sequence
  source: /note="Description of Artificial Sequence: Synthetic oligonucleotide"
  source: /note="RNA"
  modified_base (1)..(1): bicyclic nucleic acid (BNA)
  modified_base (2)..(2): bicyclic nucleic acid (BNA)
  modified_base (6)..(6): 5-methyl modified nucleotide
  modified_base (10)..(10): 5-methyl modified nucleotide
  modified_base (11)..(11): 5-methyl modified nucleotide
aaguucugucc

SEQ ID NO: 17511 - RNA, 10 nt, Artificial Sequence
  source: /note="Description of Artificial Sequence: Synthetic oligonucleotide"
  source: /note="RNA"
  modified_base (1)..(1): bicyclic nucleic acid (BNA)
  modified_base (2)..(2): bicyclic nucleic acid (BNA)
  modified_base (6)..(6): 5-methyl modified nucleotide
  modified_base (10)..(10): 5-methyl modified nucleotide
aaguucuguc

SEQ ID NO: 17512 - RNA, 9 nt, Artificial Sequence
  source: /note="Description of Artificial Sequence: Synthetic oligonucleotide"
  source: /note="RNA"
  modified_base (1)..(1): bicyclic nucleic acid (BNA)
  modified_base (2)..(2): bicyclic nucleic acid (BNA)
  modified_base (6)..(6): 5-methyl modified nucleotide
aaguucugu

SEQ ID NO: 17513 - RNA, 8 nt, Artificial Sequence
  source: /note="Description of Artificial Sequence: Synthetic oligonucleotide"
  source: /note="RNA"
  modified_base (1)..(1): bicyclic nucleic acid (BNA)
  modified_base (2)..(2): bicyclic nucleic acid (BNA)
  modified_base (6)..(6): 5-methyl modified nucleotide
aaguucug

SEQ ID NO: 17514 - DNA, 20 bp, Artificial Sequence
  source: /note="Description of Artificial Sequence: Synthetic oligonucleotide"
  source: /note="Description of Combined DNA/RNA Molecule: Synthetic oligonucleotide"
  source: /note="DNA/RNA"
  modified_base (1)..(1): bicyclic nucleic acid (BNA)
  modified_base (2)..(2): bicyclic nucleic acid (BNA)
  modified_base (7)..(7): 5-methyl modified nucleotide
  modified_base (11)..(11): 5-methyl modified nucleotide
  modified_base (12)..(12): 5-methyl modified nucleotide
  modified_base (16)..(16): 5-methyl modified nucleotide
  modified_base (17)..(17): 5-methyl modified nucleotide
  modified_base (18)..(18): 5-methyl modified nucleotide
taaguucuguccaagcccgg

SEQ ID NO: 17515 - DNA, 19 bp, Artificial Sequence
  source: /note="Description of Artificial Sequence: Synthetic oligonucleotide"
  source: /note="Description of Combined DNA/RNA Molecule: Synthetic oligonucleotide"
  source: /note="DNA/RNA"
  modified_base (1)..(1): bicyclic nucleic acid (BNA)
  modified_base (2)..(2): bicyclic nucleic acid (BNA)
  modified_base (7)..(7): 5-methyl modified nucleotide
  modified_base (11)..(11): 5-methyl modified nucleotide
  modified_base (12)..(12): 5-methyl modified nucleotide
  modified_base (16)..(16): 5-methyl modified nucleotide
  modified_base (17)..(17): 5-methyl modified nucleotide
  modified_base (18)..(18): 5-methyl modified nucleotide
taaguucuguccaagcccg

SEQ ID NO: 17516 - DNA, 18 bp, Artificial Sequence
  source: /note="Description of Artificial Sequence: Synthetic oligonucleotide"
  source: /note="Description of Combined DNA/RNA Molecule: Synthetic oligonucleotide"
  source: /note="DNA/RNA"
  modified_base (1)..(1): bicyclic nucleic acid (BNA)
  modified_base (2)..(2): bicyclic nucleic acid (BNA)
  modified_base (7)..(7): 5-methyl modified nucleotide
  modified_base (11)..(11): 5-methyl modified nucleotide
  modified_base (12)..(12): 5-methyl modified nucleotide
  modified_base (16)..(16): 5-methyl modified nucleotide
  modified_base (17)..(17): 5-methyl modified nucleotide
  modified_base (18)..(18): 5-methyl modified nucleotide
taaguucuguccaagccc

SEQ ID NO: 17517 - DNA, 17 bp, Artificial Sequence
  source: /note="Description of Artificial Sequence: Synthetic oligonucleotide"
  source: /note="Description of Combined DNA/RNA Molecule: Synthetic oligonucleotide"
  source: /note="DNA/RNA"
  modified_base (1)..(1): bicyclic nucleic acid (BNA)
  modified_base (2)..(2): bicyclic nucleic acid (BNA)
  modified_base (7)..(7): 5-methyl modified nucleotide
  modified_base (11)..(11): 5-methyl modified nucleotide
  modified_base (12)..(12): 5-methyl modified nucleotide
  modified_base (16)..(16): 5-methyl modified nucleotide
  modified_base (17)..(17): 5-methyl modified nucleotide
taaguucuguccaagcc

SEQ ID NO: 17518 - DNA, 16 bp, Artificial Sequence
  source: /note="Description of Artificial Sequence: Synthetic oligonucleotide"
  source: /note="Description of Combined DNA/RNA Molecule: Synthetic oligonucleotide"
  source: /note="DNA/RNA"
  modified_base (1)..(1): bicyclic nucleic acid (BNA)
  modified_base (2)..(2): bicyclic nucleic acid (BNA)
  modified_base (7)..(7): 5-methyl modified nucleotide
  modified_base (11)..(11): 5-methyl modified nucleotide
  modified_base (12)..(12): 5-methyl modified nucleotide
  modified_base (16)..(16): 5-methyl modified nucleotide
taaguucuguccaagc

SEQ ID NO: 17519 - DNA, 14 bp, Artificial Sequence
  source: /note="Description of Artificial Sequence: Synthetic oligonucleotide"
  source: /note="Description of Combined DNA/RNA Molecule: Synthetic oligonucleotide"
  source: /note="DNA/RNA"
  modified_base (1)..(1): bicyclic nucleic acid (BNA)
  modified_base (2)..(2): bicyclic nucleic acid (BNA)
  modified_base (7)..(7): 5-methyl modified nucleotide
  modified_base (11)..(11): 5-methyl modified nucleotide
  modified_base (12)..(12): 5-methyl modified nucleotide
taaguucuguccaa

SEQ ID NO: 17520 - DNA, 13 bp, Artificial Sequence
  source: /note="Description of Artificial Sequence: Synthetic oligonucleotide"
  source: /note="Description of Combined DNA/RNA Molecule: Synthetic oligonucleotide"
  source: /note="DNA/RNA"
  modified_base (1)..(1): bicyclic nucleic acid (BNA)
  modified_base (2)..(2): bicyclic nucleic acid (BNA)
  modified_base (7)..(7): 5-methyl modified nucleotide
  modified_base (11)..(11): 5-methyl modified nucleotide
  modified_base (12)..(12): 5-methyl modified nucleotide
taaguucugucca

SEQ ID NO: 17521 - DNA, 12 bp, Artificial Sequence
  source: /note="Description of Artificial Sequence: Synthetic oligonucleotide"
  source: /note="Description of Combined DNA/RNA Molecule: Synthetic oligonucleotide"
  source: /note="DNA/RNA"
  modified_base (1)..(1): bicyclic nucleic acid (BNA)
  modified_base (2)..(2): bicyclic nucleic acid (BNA)
  modified_base (7)..(7): 5-methyl modified nucleotide
  modified_base (11)..(11): 5-methyl modified nucleotide
  modified_base (12)..(12): 5-methyl modified nucleotide
taaguucugucc

SEQ ID NO: 17522 - DNA, 11 bp, Artificial Sequence
  source: /note="Description of Artificial Sequence: Synthetic oligonucleotide"
  source: /note="Description of Combined DNA/RNA Molecule: Synthetic oligonucleotide"
  source: /note="DNA/RNA"
  modified_base (1)..(1): bicyclic nucleic acid (BNA)
  modified_base (2)..(2): bicyclic nucleic acid (BNA)
  modified_base (7)..(7): 5-methyl modified nucleotide
  modified_base (11)..(11): 5-methyl modified nucleotide
taaguucuguc

SEQ ID NO: 17523 - DNA, 10 bp, Artificial Sequence
  source: /note="Description of Artificial Sequence: Synthetic oligonucleotide"
  source: /note="Description of Combined DNA/RNA Molecule: Synthetic oligonucleotide"
  source: /note="DNA/RNA"
  modified_base (1)..(1): bicyclic nucleic acid (BNA)
  modified_base (2)..(2): bicyclic nucleic acid (BNA)
  modified_base (7)..(7): 5-methyl modified nucleotide
taaguucugu

SEQ ID NO: 17524 - DNA, 9 bp, Artificial Sequence
  source: /note="Description of Artificial Sequence: Synthetic oligonucleotide"
  source: /note="Description of Combined DNA/RNA Molecule: Synthetic oligonucleotide"
  source: /note="DNA/RNA"
  modified_base (1)..(1): bicyclic nucleic acid (BNA)
  modified_base (2)..(2): bicyclic nucleic acid (BNA)
  modified_base (7)..(7): 5-methyl modified nucleotide
taaguucug

SEQ ID NO: 17525 - DNA, 8 bp, Artificial Sequence
  source: /note="Description of Artificial Sequence: Synthetic oligonucleotide"
  source: /note="Description of Combined DNA/RNA Molecule: Synthetic oligonucleotide"
  source: /note="DNA/RNA"
  modified_base (1)..(1): bicyclic nucleic acid (BNA)
  modified_base (2)..(2): bicyclic nucleic acid (BNA)
  modified_base (7)..(7): 5-methyl modified nucleotide
taaguucu

SEQ ID NO: 17526 - DNA, 20 bp, Artificial Sequence
  source: /note="Description of Artificial Sequence: Synthetic oligonucleotide"
  source: /note="Description of Combined DNA/RNA Molecule: Synthetic oligonucleotide"
  source: /note="DNA/RNA"
  modified_base (1)..(1): bicyclic nucleic acid (BNA)
  modified_base (2)..(2): bicyclic nucleic acid (BNA)
  modified_base (8)..(8): 5-methyl modified nucleotide
  modified_base (12)..(12): 5-methyl modified nucleotide
  modified_base (13)..(13): 5-methyl modified nucleotide
  modified_base (17)..(17): 5-methyl modified nucleotide
  modified_base (18)..(18): 5-methyl modified nucleotide
  modified_base (19)..(19): 5-methyl modified nucleotide
gtaaguucuguccaagcccg

SEQ ID NO: 17527 - DNA, 19 bp, Artificial Sequence
  source: /note="Description of Artificial Sequence: Synthetic oligonucleotide"
  source: /note="Description of Combined DNA/RNA Molecule: Synthetic oligonucleotide"
  source: /note="DNA/RNA"
  modified_base (1)..(1): bicyclic nucleic acid (BNA)
  modified_base (2)..(2): bicyclic nucleic acid (BNA)
  modified_base (8)..(8): 5-methyl modified nucleotide
  modified_base (12)..(12): 5-methyl modified nucleotide
  modified_base (13)..(13): 5-methyl modified nucleotide
  modified_base (17)..(17): 5-methyl modified nucleotide
  modified_base (18)..(18): 5-methyl modified nucleotide
  modified_base (19)..(19): 5-methyl modified nucleotide
gtaaguucuguccaagccc

SEQ ID NO: 17528 - DNA, 17 bp, Artificial Sequence
  source: /note="Description of Artificial Sequence: Synthetic oligonucleotide"
  source: /note="Description of Combined DNA/RNA Molecule: Synthetic oligonucleotide"
  source: /note="DNA/RNA"
  modified_base (1)..(1): bicyclic nucleic acid (BNA)
  modified_base (2)..(2): bicyclic nucleic acid (BNA)
  modified_base (8)..(8): 5-methyl modified nucleotide
  modified_base (12)..(12): 5-methyl modified nucleotide
  modified_base (13)..(13): 5-methyl modified nucleotide
  modified_base (17)..(17): 5-methyl modified nucleotide
gtaaguucuguccaagc

SEQ ID NO: 17529 - DNA, 16 bp, Artificial Sequence
  source: /note="Description of Artificial Sequence: Synthetic oligonucleotide"
  source: /note="Description of Combined DNA/RNA Molecule: Synthetic oligonucleotide"
  source: /note="DNA/RNA"
  modified_base (1)..(1): bicyclic nucleic acid (BNA)
  modified_base (2)..(2): bicyclic nucleic acid (BNA)
  modified_base (8)..(8): 5-methyl modified nucleotide
  modified_base (12)..(12): 5-methyl modified nucleotide
  modified_base (13)..(13): 5-methyl modified nucleotide
gtaaguucuguccaag

SEQ ID NO: 17530 - DNA, 15 bp, Artificial Sequence
  source: /note="Description of Artificial Sequence: Synthetic oligonucleotide"
  source: /note="Description of Combined DNA/RNA Molecule: Synthetic oligonucleotide"
  source: /note="DNA/RNA"
  modified_base (1)..(1): bicyclic nucleic acid (BNA)
  modified_base (2)..(2): bicyclic nucleic acid (BNA)
  modified_base (8)..(8): 5-methyl modified nucleotide
  modified_base (12)..(12): 5-methyl modified nucleotide
  modified_base (13)..(13): 5-methyl modified nucleotide
gtaaguucuguccaa

SEQ ID NO: 17531 - DNA, 14 bp, Artificial Sequence
  source: /note="Description of Artificial Sequence: Synthetic oligonucleotide"
  source: /note="Description of Combined DNA/RNA Molecule: Synthetic oligonucleotide"
  source: /note="DNA/RNA"
  modified_base (1)..(1): bicyclic nucleic acid (BNA)
  modified_base (2)..(2): bicyclic nucleic acid (BNA)
  modified_base (8)..(8): 5-methyl modified nucleotide
  modified_base (12)..(12): 5-methyl modified nucleotide
  modified_base (13)..(13): 5-methyl modified nucleotide
gtaaguucugucca

SEQ ID NO: 17532 - DNA, 13 bp, Artificial Sequence
  source: /note="Description of Artificial Sequence: Synthetic oligonucleotide"
  source: /note="Description of Combined DNA/RNA Molecule: Synthetic oligonucleotide"
  source: /note="DNA/RNA"
  modified_base (1)..(1): bicyclic nucleic acid (BNA)
  modified_base (2)..(2): bicyclic nucleic acid (BNA)
  modified_base (8)..(8): 5-methyl modified nucleotide
  modified_base (12)..(12): 5-methyl modified nucleotide
  modified_base (13)..(13): 5-methyl modified nucleotide
gtaaguucugucc

SEQ ID NO: 17533 - DNA, 12 bp, Artificial Sequence
  source: /note="Description of Artificial Sequence: Synthetic oligonucleotide"
  source: /note="Description of Combined DNA/RNA Molecule: Synthetic oligonucleotide"
  source: /note="DNA/RNA"
  modified_base (1)..(1): bicyclic nucleic acid (BNA)
  modified_base (2)..(2): bicyclic nucleic acid (BNA)
  modified_base (8)..(8): 5-methyl modified nucleotide
  modified_base (12)..(12): 5-methyl modified nucleotide
gtaaguucuguc

SEQ ID NO: 17534 - DNA, 11 bp, Artificial Sequence
  source: /note="Description of Artificial Sequence: Synthetic oligonucleotide"
  source: /note="Description of Combined DNA/RNA Molecule: Synthetic oligonucleotide"
  source: /note="DNA/RNA"
  modified_base (1)..(1): bicyclic nucleic acid (BNA)
  modified_base (2)..(2): bicyclic nucleic acid (BNA)
  modified_base (8)..(8): 5-methyl modified nucleotide
gtaaguucugu

SEQ ID NO: 17535 - DNA, 10 bp, Artificial Sequence
  source: /note="Description of Artificial Sequence: Synthetic oligonucleotide"
  source: /note="Description of Combined DNA/RNA Molecule: Synthetic oligonucleotide"
  source: /note="DNA/RNA"
  modified_base (1)..(1): bicyclic nucleic acid (BNA)
  modified_base (2)..(2): bicyclic nucleic acid (BNA)
  modified_base (8)..(8): 5-methyl modified nucleotide
gtaaguucug

SEQ ID NO: 17536 - DNA, 9 bp, Artificial Sequence
  source: /note="Description of Artificial Sequence: Synthetic oligonucleotide"
  source: /note="Description of Combined DNA/RNA Molecule: Synthetic oligonucleotide"
  source: /note="DNA/RNA"
  modified_base (1)..(1): bicyclic nucleic acid (BNA)
  modified_base (2)..(2): bicyclic nucleic acid (BNA)
  modified_base (8)..(8): 5-methyl modified nucleotide
gtaaguucu

SEQ ID NO: 17537 - DNA, 8 bp, Artificial Sequence
  source: /note="Description of Artificial Sequence: Synthetic oligonucleotide"
  source: /note="Description of Combined DNA/RNA Molecule: Synthetic oligonucleotide"
  source: /note="DNA/RNA"
  modified_base (1)..(1): bicyclic nucleic acid (BNA)
  modified_base (2)..(2): bicyclic nucleic acid (BNA)
  modified_base (8)..(8): 5-methyl modified nucleotide
gtaaguuc

SEQ ID NO: 17538 - RNA, 20 nt, Artificial Sequence
  source: /note="Description of Artificial Sequence: Synthetic oligonucleotide"
  source: /note="RNA"
  modified_base (1)..(1): bicyclic nucleic acid (BNA)
  modified_base (2)..(2): bicyclic nucleic acid (BNA)
  modified_base (9)..(9): 5-methyl modified nucleotide
  modified_base (13)..(13): 5-methyl modified nucleotide
  modified_base (14)..(14): 5-methyl modified nucleotide
  modified_base (18)..(18): 5-methyl modified nucleotide
  modified_base (19)..(19): 5-methyl modified nucleotide
  modified_base (20)..(20): 5-methyl modified nucleotide
gguaaguucuguccaagccc

SEQ ID NO: 17539 - RNA, 19 nt, Artificial Sequence
  source: /note="Description of Artificial Sequence: Synthetic oligonucleotide"
  source: /note="RNA"
  modified_base (1)..(1): bicyclic nucleic acid (BNA)
  modified_base (2)..(2): bicyclic nucleic acid (BNA)
  modified_base (9)..(9): 5-methyl modified nucleotide
  modified_base (13)..(13): 5-methyl modified nucleotide
  modified_base (14)..(14): 5-methyl modified nucleotide
  modified_base (18)..(18): 5-methyl modified nucleotide
  modified_base (19)..(19): 5-methyl modified nucleotide
gguaaguucuguccaagcc

SEQ ID NO: 17540 - RNA, 17 nt, Artificial Sequence
  source: /note="Description of Artificial Sequence: Synthetic oligonucleotide"
  source: /note="RNA"
  modified_base (1)..(1): bicyclic nucleic acid (BNA)
  modified_base (2)..(2): bicyclic nucleic acid (BNA)
  modified_base (9)..(9): 5-methyl modified nucleotide
  modified_base (13)..(13): 5-methyl modified nucleotide
  modified_base (14)..(14): 5-methyl modified nucleotide
gguaaguucuguccaag

SEQ ID NO: 17541 - RNA, 16 nt, Artificial Sequence
  source: /note="Description of Artificial Sequence: Synthetic oligonucleotide"
  source: /note="RNA"
  modified_base (1)..(1): bicyclic nucleic acid (BNA)
  modified_base (2)..(2): bicyclic nucleic acid (BNA)
  modified_base (9)..(9): 5-methyl modified nucleotide
  modified_base (13)..(13): 5-methyl modified nucleotide
  modified_base (14)..(14): 5-methyl modified nucleotide
gguaaguucuguccaa

SEQ ID NO: 17542 - RNA, 15 nt, Artificial Sequence
  source: /note="Description of Artificial Sequence: Synthetic oligonucleotide"
  source: /note="RNA"
  modified_base (1)..(1): bicyclic nucleic acid (BNA)
  modified_base (2)..(2): bicyclic nucleic acid (BNA)
  modified_base (9)..(9): 5-methyl modified nucleotide
  modified_base (13)..(13): 5-methyl modified nucleotide
  modified_base (14)..(14): 5-methyl modified nucleotide
gguaaguucugucca

SEQ ID NO: 17543 - RNA, 14 nt, Artificial Sequence
  source: /note="Description of Artificial Sequence: Synthetic oligonucleotide"
  source: /note="RNA"
  modified_base (1)..(1): bicyclic nucleic acid (BNA)
  modified_base (2)..(2): bicyclic nucleic acid (BNA)
  modified_base (9)..(9): 5-methyl modified nucleotide
  modified_base (13)..(13): 5-methyl modified nucleotide
  modified_base (14)..(14): 5-methyl modified nucleotide
gguaaguucugucc

SEQ ID NO: 17544 - RNA, 13 nt, Artificial Sequence
  source: /note="Description of Artificial Sequence: Synthetic oligonucleotide"
  source: /note="RNA"
  modified_base (1)..(1): bicyclic nucleic acid (BNA)
  modified_base (2)..(2): bicyclic nucleic acid (BNA)
  modified_base (9)..(9): 5-methyl modified nucleotide
  modified_base (13)..(13): 5-methyl modified nucleotide
gguaaguucuguc

SEQ ID NO: 17545 - RNA, 12 nt, Artificial Sequence
  source: /note="Description of Artificial Sequence: Synthetic oligonucleotide"
  source: /note="RNA"
  modified_base (1)..(1): bicyclic nucleic acid (BNA)
  modified_base (2)..(2): bicyclic nucleic acid (BNA)
  modified_base (9)..(9): 5-methyl modified nucleotide
gguaaguucugu

SEQ ID NO: 17546 - RNA, 11 nt, Artificial Sequence
  source: /note="Description of Artificial Sequence: Synthetic oligonucleotide"
  source: /note="RNA"
  modified_base (1)..(1): bicyclic nucleic acid (BNA)
  modified_base (2)..(2): bicyclic nucleic acid (BNA)
  modified_base (9)..(9): 5-methyl modified nucleotide
gguaaguucug

SEQ ID NO: 17547 - RNA, 10 nt, Artificial Sequence
  source: /note="Description of Artificial Sequence: Synthetic oligonucleotide"
  source: /note="RNA"
  modified_base (1)..(1): bicyclic nucleic acid (BNA)
  modified_base (2)..(2): bicyclic nucleic acid (BNA)
  modified_base (9)..(9): 5-methyl modified nucleotide
gguaaguucu

SEQ ID NO: 17548 - RNA, 9 nt, Artificial Sequence
  source: /note="Description of Artificial Sequence: Synthetic oligonucleotide"
  source: /note="RNA"
  modified_base (1)..(1): bicyclic nucleic acid (BNA)
  modified_base (2)..(2): bicyclic nucleic acid (BNA)
  modified_base (9)..(9): 5-methyl modified nucleotide
gguaaguuc

SEQ ID NO: 17549 - RNA, 8 nt, Artificial Sequence
  source: /note="Description of Artificial Sequence: Synthetic oligonucleotide"
  source: /note="RNA"
  modified_base (1)..(1): bicyclic nucleic acid (BNA)
  modified_base (2)..(2): bicyclic nucleic acid (BNA)
gguaaguu

SEQ ID NO: 17550 - RNA, 20 nt, Artificial Sequence
  source: /note="Description of Artificial Sequence: Synthetic oligonucleotide"
  source: /note="RNA"
  modified_base (1)..(1): 5-methyl bicyclic nucleic acid
  modified_base (2)..(2): bicyclic nucleic acid (BNA)
  modified_base (10)..(10): 5-methyl modified nucleotide
  modified_base (14)..(14): 5-methyl modified nucleotide
  modified_base (15)..(15): 5-methyl modified nucleotide
  modified_base (19)..(19): 5-methyl modified nucleotide
  modified_base (20)..(20): 5-methyl modified nucleotide
cgguaaguucuguccaagcc

SEQ ID NO: 17551 - RNA, 19 nt, Artificial Sequence
  source: /note="Description of Artificial Sequence: Synthetic oligonucleotide"
  source: /note="RNA"
  modified_base (1)..(1): 5-methyl bicyclic nucleic acid
  modified_base (2)..(2): bicyclic nucleic acid (BNA)
  modified_base (10)..(10): 5-methyl modified nucleotide
  modified_base (14)..(14): 5-methyl modified nucleotide
  modified_base (15)..(15): 5-methyl modified nucleotide
  modified_base (19)..(19): 5-methyl modified nucleotide
cgguaaguucuguccaagc

SEQ ID NO: 17552 - RNA, 18 nt, Artificial Sequence
  source: /note="Description of Artificial Sequence: Synthetic oligonucleotide"
  source: /note="RNA"
  modified_base (1)..(1): 5-methyl bicyclic nucleic acid
  modified_base (2)..(2): bicyclic nucleic acid (BNA)
  modified_base (10)..(10): 5-methyl modified nucleotide
  modified_base (14)..(14): 5-methyl modified nucleotide
  modified_base (15)..(15): 5-methyl modified nucleotide
cgguaaguucuguccaag

SEQ ID NO: 17553 - RNA, 17 nt, Artificial Sequence
  source: /note="Description of Artificial Sequence: Synthetic oligonucleotide"
  source: /note="RNA"
  modified_base (1)..(1): 5-methyl bicyclic nucleic acid
  modified_base (2)..(2): bicyclic nucleic acid (BNA)
  modified_base (10)..(10): 5-methyl modified nucleotide
  modified_base (14)..(14): 5-methyl modified nucleotide
  modified_base (15)..(15): 5-methyl modified nucleotide
cgguaaguucuguccaa

SEQ ID NO: 17554 - RNA, 16 nt, Artificial Sequence
  source: /note="Description of Artificial Sequence: Synthetic oligonucleotide"
  source: /note="RNA"
  modified_base (1)..(1): 5-methyl bicyclic nucleic acid
  modified_base (2)..(2): bicyclic nucleic acid (BNA)
  modified_base (10)..(10): 5-methyl modified nucleotide
  modified_base (14)..(14): 5-methyl modified nucleotide
  modified_base (15)..(15): 5-methyl modified nucleotide
cgguaaguucugucca

SEQ ID NO: 17555 - RNA, 15 nt, Artificial Sequence
  source: /note="Description of Artificial Sequence: Synthetic oligonucleotide"
  source: /note="RNA"
  modified_base (1)..(1): 5-methyl bicyclic nucleic acid
  modified_base (2)..(2): bicyclic nucleic acid (BNA)
  modified_base (10)..(10): 5-methyl modified nucleotide
  modified_base (14)..(14): 5-methyl modified nucleotide
  modified_base (15)..(15): 5-methyl modified nucleotide
cgguaaguucugucc

SEQ ID NO: 17556 - RNA, 14 nt, Artificial Sequence
  source: /note="Description of Artificial Sequence: Synthetic oligonucleotide"
  source: /note="RNA"
  modified_base (1)..(1): 5-methyl bicyclic nucleic acid
  modified_base (2)..(2): bicyclic nucleic acid (BNA)
  modified_base (10)..(10): 5-methyl modified nucleotide
  modified_base (14)..(14): 5-methyl modified nucleotide
cgguaaguucuguc

SEQ ID NO: 17557 - RNA, 13 nt, Artificial Sequence
  source: /note="Description of Artificial Sequence: Synthetic oligonucleotide"
  source: /note="RNA"
  modified_base (1)..(1): 5-methyl bicyclic nucleic acid
  modified_base (2)..(2): bicyclic nucleic acid (BNA)
  modified_base (10)..(10): 5-methyl modified nucleotide
cgguaaguucugu

SEQ ID NO: 17558 - RNA, 12 nt, Artificial Sequence
  source: /note="Description of Artificial Sequence: Synthetic oligonucleotide"
  source: /note="RNA"
  modified_base (1)..(1): 5-methyl bicyclic nucleic acid
  modified_base (2)..(2): bicyclic nucleic acid (BNA)
  modified_base (10)..(10): 5-methyl modified nucleotide
cgguaaguucug

SEQ ID NO: 17559 - RNA, 11 nt, Artificial Sequence
  source: /note="Description of Artificial Sequence: Synthetic oligonucleotide"
  source: /note="RNA"
  modified_base (1)..(1): 5-methyl bicyclic nucleic acid
  modified_base (2)..(2): bicyclic nucleic acid (BNA)
  modified_base (10)..(10): 5-methyl modified nucleotide
cgguaaguucu

SEQ ID NO: 17560 - RNA, 10 nt, Artificial Sequence
  source: /note="Description of Artificial Sequence: Synthetic oligonucleotide"
  source: /note="RNA"
  modified_base (1)..(1): 5-methyl bicyclic nucleic acid
  modified_base (2)..(2): bicyclic nucleic acid (BNA)
  modified_base (10)..(10): 5-methyl modified nucleotide
cgguaaguuc

SEQ ID NO: 17561 - RNA, 9 nt, Artificial Sequence
  source: /note="Description of Artificial Sequence: Synthetic oligonucleotide"
  source: /note="RNA"
  modified_base (1)..(1): 5-methyl bicyclic nucleic acid
  modified_base (2)..(2): bicyclic nucleic acid (BNA)
cgguaaguu

SEQ ID NO: 17562 - RNA, 8 nt, Artificial Sequence
  source: /note="Description of Artificial Sequence: Synthetic oligonucleotide"
  source: /note="RNA"
  modified_base (1)..(1): 5-methyl bicyclic nucleic acid
  modified_base (2)..(2): bicyclic nucleic acid (BNA)
cgguaagu

SEQ ID NO: 17563 - DNA, 20 bp, Artificial Sequence
  source: /note="Description of Artificial Sequence: Synthetic oligonucleotide"
  source: /note="Description of Combined DNA/RNA Molecule: Synthetic oligonucleotide"
  source: /note="DNA/RNA"
  modified_base (1)..(1): bicyclic nucleic acid (BNA)
  modified_base (2)..(2): 5-methyl bicyclic nucleic acid
  modified_base (11)..(11): 5-methyl modified nucleotide
  modified_base (15)..(15): 5-methyl modified nucleotide
  modified_base (16)..(16): 5-methyl modified nucleotide
  modified_base (20)..(20): 5-methyl modified nucleotide
tcgguaaguucuguccaagc

SEQ ID NO: 17564 - DNA, 19 bp, Artificial Sequence
  source: /note="Description of Artificial Sequence: Synthetic oligonucleotide"
  source: /note="Description of Combined DNA/RNA Molecule: Synthetic oligonucleotide"
  source: /note="DNA/RNA"
  modified_base (1)..(1): bicyclic nucleic acid (BNA)
  modified_base (2)..(2): 5-methyl bicyclic nucleic acid
  modified_base (11)..(11): 5-methyl modified nucleotide
  modified_base (15)..(15): 5-methyl modified nucleotide
  modified_base (16)..(16): 5-methyl modified nucleotide
tcgguaaguucuguccaag

SEQ ID NO: 17565 - DNA, 18 bp, Artificial Sequence
  source: /note="Description of Artificial Sequence: Synthetic oligonucleotide"
  source: /note="Description of Combined DNA/RNA Molecule: Synthetic oligonucleotide"
  source: /note="DNA/RNA"
  modified_base (1)..(1): bicyclic nucleic acid (BNA)
  modified_base (2)..(2): 5-methyl bicyclic nucleic acid
  modified_base (11)..(11): 5-methyl modified nucleotide
  modified_base (15)..(15): 5-methyl modified nucleotide
  modified_base (16)..(16): 5-methyl modified nucleotide
tcgguaaguucuguccaa

SEQ ID NO: 17566 - DNA, 17 bp, Artificial Sequence
  source: /note="Description of Artificial Sequence: Synthetic oligonucleotide"
  source: /note="Description of Combined DNA/RNA Molecule: Synthetic oligonucleotide"
  source: /note="DNA/RNA"
  modified_base (1)..(1): bicyclic nucleic acid (BNA)
  modified_base (2)..(2): 5-methyl bicyclic nucleic acid
  modified_base (11)..(11): 5-methyl modified nucleotide
  modified_base (15)..(15): 5-methyl modified nucleotide
  modified_base (16)..(16): 5-methyl modified nucleotide
tcgguaaguucugucca

SEQ ID NO: 17567 - DNA, 16 bp, Artificial Sequence
  source: /note="Description of Artificial Sequence: Synthetic oligonucleotide"
  source: /note="Description of Combined DNA/RNA Molecule: Synthetic oligonucleotide"
  source: /note="DNA/RNA"
  modified_base (1)..(1): bicyclic nucleic acid (BNA)
  modified_base (2)..(2): 5-methyl bicyclic nucleic acid
  modified_base (11)..(11): 5-methyl modified nucleotide
  modified_base (15)..(15): 5-methyl modified nucleotide
  modified_base (16)..(16): 5-methyl modified nucleotide
tcgguaaguucugucc

SEQ ID NO: 17568 - DNA, 15 bp, Artificial Sequence
  source: /note="Description of Artificial Sequence: Synthetic oligonucleotide"
  source: /note="Description of Combined DNA/RNA Molecule: Synthetic oligonucleotide"
  source: /note="DNA/RNA"
  modified_base (1)..(1): bicyclic nucleic acid (BNA)
  modified_base (2)..(2): 5-methyl bicyclic nucleic acid
  modified_base (11)..(11): 5-methyl modified nucleotide
  modified_base (15)..(15): 5-methyl modified nucleotide
tcgguaaguucuguc

SEQ ID NO: 17569 - DNA, 14 bp, Artificial Sequence
  source: /note="Description of Artificial Sequence: Synthetic oligonucleotide"
  source: /note="Description of Combined DNA/RNA Molecule: Synthetic oligonucleotide"
  source: /note="DNA/RNA"
  modified_base (1)..(1): bicyclic nucleic acid (BNA)
  modified_base (2)..(2): 5-methyl bicyclic nucleic acid
  modified_base (11)..(11): 5-methyl modified nucleotide
tcgguaaguucugu

SEQ ID NO: 17570 - DNA, 13 bp, Artificial Sequence
  source: /note="Description of Artificial Sequence: Synthetic oligonucleotide"
  source: /note="Description of Combined DNA/RNA Molecule: Synthetic oligonucleotide"
  source: /note="DNA/RNA"
  modified_base (1)..(1): bicyclic nucleic acid (BNA)
  modified_base (2)..(2): 5-methyl bicyclic nucleic acid
  modified_base (11)..(11): 5-methyl modified nucleotide
tcgguaaguucug

SEQ ID NO: 17571 - DNA, 12 bp, Artificial Sequence
  source: /note="Description of Artificial Sequence: Synthetic oligonucleotide"
  source: /note="Description of Combined DNA/RNA Molecule: Synthetic oligonucleotide"
  source: /note="DNA/RNA"
  modified_base (1)..(1): bicyclic nucleic acid (BNA)
  modified_base (2)..(2): 5-methyl bicyclic nucleic acid
  modified_base (11)..(11): 5-methyl modified nucleotide
tcgguaaguucu

SEQ ID NO: 17572 - DNA, 11 bp, Artificial Sequence
  source: /note="Description of Artificial Sequence: Synthetic oligonucleotide"
  source: /note="Description of Combined DNA/RNA Molecule: Synthetic oligonucleotide"
  source: /note="DNA/RNA"
  modified_base (1)..(1): bicyclic nucleic acid (BNA)
  modified_base (2)..(2): 5-methyl bicyclic nucleic acid
  modified_base (11)..(11): 5-methyl modified nucleotide
tcgguaaguuc

SEQ ID NO: 17573 - DNA, 10 bp, Artificial Sequence
  source: /note="Description of Artificial Sequence: Synthetic oligonucleotide"
  source: /note="Description of Combined DNA/RNA Molecule: Synthetic oligonucleotide"
  source: /note="DNA/RNA"
  modified_base (1)..(1): bicyclic nucleic acid (BNA)
  modified_base (2)..(2): 5-methyl bicyclic nucleic acid
tcgguaaguu

SEQ ID NO: 17574 - DNA, 9 bp, Artificial Sequence
  source: /note="Description of Artificial Sequence: Synthetic oligonucleotide"
  source: /note="Description of Combined DNA/RNA Molecule: Synthetic oligonucleotide"
  source: /note="DNA/RNA"
  modified_base (1)..(1): bicyclic nucleic acid (BNA)
  modified_base (2)..(2): 5-methyl bicyclic nucleic acid
tcgguaagu

SEQ ID NO: 17575 - DNA, 20 bp, Artificial Sequence
  source: /note="Description of Artificial Sequence: Synthetic oligonucleotide"
  source: /note="Description of Combined DNA/RNA Molecule: Synthetic oligonucleotide"
  source: /note="DNA/RNA"
  modified_base (1)..(1): bicyclic nucleic acid (BNA)
  modified_base (2)..(2): bicyclic nucleic acid (BNA)
  modified_base (3)..(3): 5-methyl modified nucleotide
  modified_base (12)..(12): 5-methyl modified nucleotide
  modified_base (16)..(16): 5-methyl modified nucleotide
  modified_base (17)..(17): 5-methyl modified nucleotide
gtcgguaaguucuguccaag

SEQ ID NO: 17576 - DNA, 19 bp, Artificial Sequence
  source: /note="Description of Artificial Sequence: Synthetic oligonucleotide"
  source: /note="Description of Combined DNA/RNA Molecule: Synthetic oligonucleotide"
  source: /note="DNA/RNA"
  modified_base (1)..(1): bicyclic nucleic acid (BNA)
  modified_base (2)..(2): bicyclic nucleic acid (BNA)
  modified_base (3)..(3): 5-methyl modified nucleotide
  modified_base (12)..(12): 5-methyl modified nucleotide
  modified_base (16)..(16): 5-methyl modified nucleotide
  modified_base (17)..(17): 5-methyl modified nucleotide
gtcgguaaguucuguccaa

SEQ ID NO: 17577 - DNA, 18 bp, Artificial Sequence
  source: /note="Description of Artificial Sequence: Synthetic oligonucleotide"
  source: /note="Description of Combined DNA/RNA Molecule: Synthetic oligonucleotide"
  source: /note="DNA/RNA"
  modified_base (1)..(1): bicyclic nucleic acid (BNA)
  modified_base (2)..(2): bicyclic nucleic acid (BNA)
  modified_base (3)..(3): 5-methyl modified nucleotide
  modified_base (12)..(12): 5-methyl modified nucleotide
  modified_base (16)..(16): 5-methyl modified nucleotide
  modified_base (17)..(17): 5-methyl modified nucleotide
gtcgguaaguucugucca

SEQ ID NO: 17578 - DNA, 17 bp, Artificial Sequence
  source: /note="Description of Artificial Sequence: Synthetic oligonucleotide"
  source: /note="Description of Combined DNA/RNA Molecule: Synthetic oligonucleotide"
  source: /note="DNA/RNA"
  modified_base (1)..(1): bicyclic nucleic acid (BNA)
  modified_base (2)..(2): bicyclic nucleic acid (BNA)
  modified_base (3)..(3): 5-methyl modified nucleotide
  modified_base (12)..(12): 5-methyl modified nucleotide
  modified_base (16)..(16): 5-methyl modified nucleotide
  modified_base (17)..(17): 5-methyl modified nucleotide
gtcgguaaguucugucc

SEQ ID NO: 17579 - DNA, 16 bp, Artificial Sequence
  source: /note="Description of Artificial Sequence: Synthetic oligonucleotide"
  source: /note="Description of Combined DNA/RNA Molecule: Synthetic oligonucleotide"
  source: /note="DNA/RNA"
  modified_base (1)..(1): bicyclic nucleic acid (BNA)
  modified_base (2)..(2): bicyclic nucleic acid (BNA)
  modified_base (3)..(3): 5-methyl modified nucleotide
  modified_base (12)..(12): 5-methyl modified nucleotide
  modified_base (16)..(16): 5-methyl modified nucleotide
gtcgguaaguucuguc

SEQ ID NO: 17580 - DNA, 15 bp, Artificial Sequence
  source: /note="Description of Artificial Sequence: Synthetic oligonucleotide"
  source: /note="Description of Combined DNA/RNA Molecule: Synthetic oligonucleotide"
  source: /note="DNA/RNA"
  modified_base (1)..(1): bicyclic nucleic acid (BNA)
  modified_base (2)..(2): bicyclic nucleic acid (BNA)
  modified_base (3)..(3): 5-methyl modified nucleotide
  modified_base (12)..(12): 5-methyl modified nucleotide
gtcgguaaguucugu

SEQ ID NO: 17581 - DNA, 14 bp, Artificial Sequence
  source: /note="Description of Artificial Sequence: Synthetic oligonucleotide"
  source: /note="Description of Combined DNA/RNA Molecule: Synthetic oligonucleotide"
  source: /note="DNA/RNA"
  modified_base (1)..(1): bicyclic nucleic acid (BNA)
  modified_base (2)..(2): bicyclic nucleic acid (BNA)
  modified_base (3)..(3): 5-methyl modified nucleotide
  modified_base (12)..(12): 5-methyl modified nucleotide
gtcgguaaguucug

SEQ ID NO: 17582 - DNA, 13 bp, Artificial Sequence
  source: /note="Description of Artificial Sequence: Synthetic oligonucleotide"
  source: /note="Description of Combined DNA/RNA Molecule: Synthetic oligonucleotide"
  source: /note="DNA/RNA"
  modified_base (1)..(1): bicyclic nucleic acid (BNA)
  modified_base (2)..(2): bicyclic nucleic acid (BNA)
  modified_base (3)..(3): 5-methyl modified nucleotide
  modified_base (12)..(12): 5-methyl modified nucleotide
gtcgguaaguucu

SEQ ID NO: 17583 - DNA, 12 bp, Artificial Sequence
  source: /note="Description of Artificial Sequence: Synthetic oligonucleotide"
  source: /note="Description of Combined DNA/RNA Molecule: Synthetic oligonucleotide"
  source: /note="DNA/RNA"
  modified_base (1)..(1): bicyclic nucleic acid (BNA)
  modified_base (2)..(2): bicyclic nucleic acid (BNA)
  modified_base (3)..(3): 5-methyl modified nucleotide
  modified_base (12)..(12): 5-methyl modified nucleotide
gtcgguaaguuc

SEQ ID NO: 17584 - DNA, 11 bp, Artificial Sequence
  source: /note="Description of Artificial Sequence: Synthetic oligonucleotide"
  source: /note="Description of Combined DNA/RNA Molecule: Synthetic oligonucleotide"
  source: /note="DNA/RNA"
  modified_base (1)..(1): bicyclic nucleic acid (BNA)
  modified_base (2)..(2): bicyclic nucleic acid (BNA)
  modified_base (3)..(3): 5-methyl modified nucleotide
gtcgguaaguu

SEQ ID NO: 17585 - DNA, 10 bp, Artificial Sequence
  source: /note="Description of Artificial Sequence: Synthetic oligonucleotide"
  source: /note="Description of Combined DNA/RNA Molecule: Synthetic oligonucleotide"
  source: /note="DNA/RNA"
  modified_base (1)..(1): bicyclic nucleic acid (BNA)
  modified_base (2)..(2): bicyclic nucleic acid (BNA)
  modified_base (3)..(3): 5-methyl modified nucleotide
gtcgguaagu

SEQ ID NO: 17586 - RNA, 20 nt, Artificial Sequence
  source: /note="Description of Artificial Sequence: Synthetic oligonucleotide"
  source: /note="RNA"
  modified_base (1)..(1): bicyclic nucleic acid (BNA)
  modified_base (2)..(2): bicyclic nucleic acid (BNA)
  modified_base (4)..(4): 5-methyl modified nucleotide
  modified_base (13)..(13): 5-methyl modified nucleotide
  modified_base (17)..(17): 5-methyl modified nucleotide
  modified_base (18)..(18): 5-methyl modified nucleotide
agucgguaaguucuguccaa

SEQ ID NO: 17587 - RNA, 19 nt, Artificial Sequence
  source: /note="Description of Artificial Sequence: Synthetic oligonucleotide"
  source: /note="RNA"
  modified_base (1)..(1): bicyclic nucleic acid (BNA)
  modified_base (2)..(2): bicyclic nucleic acid (BNA)
  modified_base (4)..(4): 5-methyl modified nucleotide
  modified_base (13)..(13): 5-methyl modified nucleotide
  modified_base (17)..(17): 5-methyl modified nucleotide
  modified_base (18)..(18): 5-methyl modified nucleotide
agucgguaaguucugucca

SEQ ID NO: 17588 - RNA, 17 nt, Artificial Sequence
  source: /note="Description of Artificial Sequence: Synthetic oligonucleotide"
  source: /note="RNA"
  modified_base (1)..(1): bicyclic nucleic acid (BNA)
  modified_base (2)..(2): bicyclic nucleic acid (BNA)
  modified_base (4)..(4): 5-methyl modified nucleotide
  modified_base (13)..(13): 5-methyl modified nucleotide
  modified_base (17)..(17): 5-methyl modified nucleotide
agucgguaaguucuguc

SEQ ID NO: 17589 - RNA, 16 nt, Artificial Sequence
  source: /note="Description of Artificial Sequence: Synthetic oligonucleotide"
  source: /note="RNA"
  modified_base (1)..(1): bicyclic nucleic acid (BNA)
  modified_base (2)..(2): bicyclic nucleic acid (BNA)
  modified_base (4)..(4): 5-methyl modified nucleotide
  modified_base (13)..(13): 5-methyl modified nucleotide
agucgguaaguucugu

SEQ ID NO: 17590 - RNA, 15 nt, Artificial Sequence
  source: /note="Description of Artificial Sequence: Synthetic oligonucleotide"
  source: /note="RNA"
  modified_base (1)..(1): bicyclic nucleic acid (BNA)
  modified_base (2)..(2): bicyclic nucleic acid (BNA)
  modified_base (4)..(4): 5-methyl modified nucleotide
  modified_base (13)..(13): 5-methyl modified nucleotide
agucgguaaguucug

SEQ ID NO: 17591 - RNA, 14 nt, Artificial Sequence
  source: /note="Description of Artificial Sequence: Synthetic oligonucleotide"
  source: /note="RNA"
  modified_base (1)..(1): bicyclic nucleic acid (BNA)
  modified_base (2)..(2): bicyclic nucleic acid (BNA)
  modified_base (4)..(4): 5-methyl modified nucleotide
  modified_base (13)..(13): 5-methyl modified nucleotide
agucgguaaguucu

SEQ ID NO: 17592 - RNA, 13 nt, Artificial Sequence
  source: /note="Description of Artificial Sequence: Synthetic oligonucleotide"
  source: /note="RNA"
  modified_base (1)..(1): bicyclic nucleic acid (BNA)
  modified_base (2)..(2): bicyclic nucleic acid (BNA)
  modified_base (4)..(4): 5-methyl modified nucleotide
  modified_base (13)..(13): 5-methyl modified nucleotide
agucgguaaguuc

SEQ ID NO: 17593 - RNA, 12 nt, Artificial Sequence
  source: /note="Description of Artificial Sequence: Synthetic oligonucleotide"
  source: /note="RNA"
  modified_base (1)..(1): bicyclic nucleic acid (BNA)
  modified_base (2)..(2): bicyclic nucleic acid (BNA)
  modified_base (4)..(4): 5-methyl modified nucleotide
agucgguaaguu

SEQ ID NO: 17594 - RNA, 11 nt, Artificial Sequence
  source: /note="Description of Artificial Sequence: Synthetic oligonucleotide"
  source: /note="RNA"
  modified_base (1)..(1): bicyclic nucleic acid (BNA)
  modified_base (2)..(2): bicyclic nucleic acid (BNA)
  modified_base (4)..(4): 5-methyl modified nucleotide
agucgguaagu

SEQ ID NO: 17595 - RNA, 20 nt, Artificial Sequence
  source: /note="Description of Artificial Sequence: Synthetic oligonucleotide"
  source: /note="RNA"
  modified_base (1)..(1): 5-methyl bicyclic nucleic acid
  modified_base (2)..(2): bicyclic nucleic acid (BNA)
  modified_base (5)..(5): 5-methyl modified nucleotide
  modified_base (14)..(14): 5-methyl modified nucleotide
  modified_base (18)..(18): 5-methyl modified nucleotide
  modified_base (19)..(19): 5-methyl modified nucleotide
cagucgguaaguucugucca

SEQ ID NO: 17596 - RNA, 19 nt, Artificial Sequence
  source: /note="Description of Artificial Sequence: Synthetic oligonucleotide"
  source: /note="RNA"
  modified_base (1)..(1): 5-methyl bicyclic nucleic acid
  modified_base (2)..(2): bicyclic nucleic acid (BNA)
  modified_base (5)..(5): 5-methyl modified nucleotide
  modified_base (14)..(14): 5-methyl modified nucleotide
  modified_base (18)..(18): 5-methyl modified nucleotide
  modified_base (19)..(19): 5-methyl modified nucleotide
cagucgguaaguucugucc

SEQ ID NO: 17597 - RNA, 18 nt, Artificial Sequence
  source: /note="Description of Artificial Sequence: Synthetic oligonucleotide"
  source: /note="RNA"
  modified_base (1)..(1): 5-methyl bicyclic nucleic acid
  modified_base (2)..(2): bicyclic nucleic acid (BNA)
  modified_base (5)..(5): 5-methyl modified nucleotide
  modified_base (14)..(14): 5-methyl modified nucleotide
  modified_base (18)..(18): 5-methyl modified nucleotide
cagucgguaaguucuguc

SEQ ID NO: 17598 - RNA, 17 nt, Artificial Sequence
  source: /note="Description of Artificial Sequence: Synthetic oligonucleotide"
  source: /note="RNA"
  modified_base (1)..(1): 5-methyl bicyclic nucleic acid
  modified_base (2)..(2): bicyclic nucleic acid (BNA)
  modified_base (5)..(5): 5-methyl modified nucleotide
  modified_base (14)..(14): 5-methyl modified nucleotide
cagucgguaaguucugu

SEQ ID NO: 17599 - RNA, 16 nt, Artificial Sequence
  source: /note="Description of Artificial Sequence: Synthetic oligonucleotide"
  source: /note="RNA"
  modified_base (1)..(1): 5-methyl bicyclic nucleic acid
  modified_base (2)..(2): bicyclic nucleic acid (BNA)
  modified_base (5)..(5): 5-methyl modified nucleotide
  modified_base (14)..(14): 5-methyl modified nucleotide
cagucgguaaguucug

SEQ ID NO: 17600 - RNA, 15 nt, Artificial Sequence
  source: /note="Description of Artificial Sequence: Synthetic oligonucleotide"
  source: /note="RNA"
  modified_base (1)..(1): 5-methyl bicyclic nucleic acid
  modified_base (2)..(2): bicyclic nucleic acid (BNA)
  modified_base (5)..(5): 5-methyl modified nucleotide
  modified_base (14)..(14): 5-methyl modified nucleotide
cagucgguaaguucu

SEQ ID NO: 17601 - RNA, 14 nt, Artificial Sequence
  source: /note="Description of Artificial Sequence: Synthetic oligonucleotide"
  source: /note="RNA"
  modified_base (1)..(1): 5-methyl bicyclic nucleic acid
  modified_base (2)..(2): bicyclic nucleic acid (BNA)
  modified_base (5)..(5): 5-methyl modified nucleotide
  modified_base (14)..(14): 5-methyl modified nucleotide
cagucgguaaguuc

SEQ ID NO: 17602 - RNA, 13 nt, Artificial Sequence
  source: /note="Description of Artificial Sequence: Synthetic oligonucleotide"
  source: /note="RNA"
  modified_base (1)..(1): 5-methyl bicyclic nucleic acid
  modified_base (2)..(2): bicyclic nucleic acid (BNA)
  modified_base (5)..(5): 5-methyl modified nucleotide
cagucgguaaguu

SEQ ID NO: 17603 - RNA, 12 nt, Artificial Sequence
  source: /note="Description of Artificial Sequence: Synthetic oligonucleotide"
  source: /note="RNA"
  modified_base (1)..(1): 5-methyl bicyclic nucleic acid
  modified_base (2)..(2): bicyclic nucleic acid (BNA)
  modified_base (5)..(5): 5-methyl modified nucleotide
cagucgguaagu

SEQ ID NO: 17604 - RNA, 20 nt, Artificial Sequence
  source: /note="Description of Artificial Sequence: Synthetic oligonucleotide"
  source: /note="RNA"
  modified_base (1)..(1): 5-methyl bicyclic nucleic acid
  modified_base (2)..(2): 5-methyl bicyclic nucleic acid
  modified_base (6)..(6): 5-methyl modified nucleotide
  modified_base (15)..(15): 5-methyl modified nucleotide
  modified_base (19)..(19): 5-methyl modified nucleotide
  modified_base (20)..(20): 5-methyl modified nucleotide
ccagucgguaaguucugucc

SEQ ID NO: 17605 - RNA, 19 nt, Artificial Sequence
  source: /note="Description of Artificial Sequence: Synthetic oligonucleotide"
  source: /note="RNA"
  modified_base (1)..(1): 5-methyl bicyclic nucleic acid
  modified_base (2)..(2): 5-methyl bicyclic nucleic acid
  modified_base (6)..(6): 5-methyl modified nucleotide
  modified_base (15)..(15): 5-methyl modified nucleotide
  modified_base (19)..(19): 5-methyl modified nucleotide
ccagucgguaaguucuguc

SEQ ID NO: 17606 - RNA, 18 nt, Artificial Sequence
  source: /note="Description of Artificial Sequence: Synthetic oligonucleotide"
  source: /note="RNA"
  modified_base (1)..(1): 5-methyl bicyclic nucleic acid
  modified_base (2)..(2): 5-methyl bicyclic nucleic acid
  modified_base (6)..(6): 5-methyl modified nucleotide
  modified_base (15)..(15): 5-methyl modified nucleotide
ccagucgguaaguucugu

SEQ ID NO: 17607 - RNA, 17 nt, Artificial Sequence
  source: /note="Description of Artificial Sequence: Synthetic oligonucleotide"
  source: /note="RNA"
  modified_base (1)..(1): 5-methyl bicyclic nucleic acid
  modified_base (2)..(2): 5-methyl bicyclic nucleic acid
  modified_base (6)..(6): 5-methyl modified nucleotide
  modified_base (15)..(15): 5-methyl modified nucleotide
ccagucgguaaguucug

SEQ ID NO: 17608 - RNA, 16 nt, Artificial Sequence
  source: /note="Description of Artificial Sequence: Synthetic oligonucleotide"
  source: /note="RNA"
  modified_base (1)..(1): 5-methyl bicyclic nucleic acid
  modified_base (2)..(2): 5-methyl bicyclic nucleic acid
  modified_base (6)..(6): 5-methyl modified nucleotide
  modified_base (15)..(15): 5-methyl modified nucleotide
ccagucgguaaguucu

SEQ ID NO: 17609 - RNA, 15 nt, Artificial Sequence
  source: /note="Description of Artificial Sequence: Synthetic oligonucleotide"
  source: /note="RNA"
  modified_base (1)..(1): 5-methyl bicyclic nucleic acid
  modified_base (2)..(2): 5-methyl bicyclic nucleic acid
  modified_base (6)..(6): 5-methyl modified nucleotide
  modified_base (15)..(15): 5-methyl modified nucleotide
ccagucgguaaguuc

SEQ ID NO: 17610 - RNA, 14 nt, Artificial Sequence
  source: /note="Description of Artificial Sequence: Synthetic oligonucleotide"
  source: /note="RNA"
  modified_base (1)..(1): 5-methyl bicyclic nucleic acid
  modified_base (2)..(2): 5-methyl bicyclic nucleic acid
  modified_base (6)..(6): 5-methyl modified nucleotide
ccagucgguaaguu

SEQ ID NO: 17611 - RNA, 13 nt, Artificial Sequence
  source: /note="Description of Artificial Sequence: Synthetic oligonucleotide"
  source: /note="RNA"
  modified_base (1)..(1): 5-methyl bicyclic nucleic acid
  modified_base (2)..(2): 5-methyl bicyclic nucleic acid
  modified_base (6)..(6): 5-methyl modified nucleotide
ccagucgguaagu

SEQ ID NO: 17612 - RNA, 20 nt, Artificial Sequence
  source: /note="Description of Artificial Sequence: Synthetic oligonucleotide"
  source: /note="RNA"
  modified_base (1)..(1): bicyclic nucleic acid (BNA)
  modified_base (2)..(2): 5-methyl bicyclic nucleic acid
  modified_base (3)..(3): 5-methyl modified nucleotide
  modified_base (7)..(7): 5-methyl modified nucleotide
  modified_base (16)..(16): 5-methyl modified nucleotide
  modified_base (20)..(20): 5-methyl modified nucleotide
gccagucgguaaguucuguc

SEQ ID NO: 17613 - RNA, 19 nt, Artificial Sequence
  source: /note="Description of Artificial Sequence: Synthetic oligonucleotide"
  source: /note="RNA"
  modified_base (1)..(1): bicyclic nucleic acid (BNA)
  modified_base (2)..(2): 5-methyl bicyclic nucleic acid
  modified_base (3)..(3): 5-methyl modified nucleotide
  modified_base (7)..(7): 5-methyl modified nucleotide
  modified_base (16)..(16): 5-methyl modified nucleotide
gccagucgguaaguucugu

SEQ ID NO: 17614 - RNA, 18 nt, Artificial Sequence
  source: /note="Description of Artificial Sequence: Synthetic oligonucleotide"
  source: /note="RNA"
  modified_base (1)..(1): bicyclic nucleic acid (BNA)
  modified_base (2)..(2): 5-methyl bicyclic nucleic acid
  modified_base (3)..(3): 5-methyl modified nucleotide
  modified_base (7)..(7): 5-methyl modified nucleotide
  modified_base (16)..(16): 5-methyl modified nucleotide
gccagucgguaaguucug

SEQ ID NO: 17615 - RNA, 17 nt, Artificial Sequence
  source: /note="Description of Artificial Sequence: Synthetic oligonucleotide"
  source: /note="RNA"
  modified_base (1)..(1): bicyclic nucleic acid (BNA)
  modified_base (2)..(2): 5-methyl bicyclic nucleic acid
  modified_base (3)..(3): 5-methyl modified nucleotide
  modified_base (7)..(7): 5-methyl modified nucleotide
  modified_base (16)..(16): 5-methyl modified nucleotide
gccagucgguaaguucu

SEQ ID NO: 17616 - RNA, 16 nt, Artificial Sequence
  source: /note="Description of Artificial Sequence: Synthetic oligonucleotide"
  source: /note="RNA"
  modified_base (1)..(1): bicyclic nucleic acid (BNA)
  modified_base (2)..(2): 5-methyl bicyclic nucleic acid
  modified_base (3)..(3): 5-methyl modified nucleotide
  modified_base (7)..(7): 5-methyl modified nucleotide
  modified_base (16)..(16): 5-methyl modified nucleotide
gccagucgguaaguuc

SEQ ID NO: 17617 - RNA, 15 nt, Artificial Sequence
  source: /note="Description of Artificial Sequence: Synthetic oligonucleotide"
  source: /note="RNA"
  modified_base (1)..(1): bicyclic nucleic acid (BNA)
  modified_base (2)..(2): 5-methyl bicyclic nucleic acid
  modified_base (3)..(3): 5-methyl modified nucleotide
  modified_base (7)..(7): 5-methyl modified nucleotide
gccagucgguaaguu

SEQ ID NO: 17618 - RNA, 14 nt, Artificial Sequence
  source: /note="Description of Artificial Sequence: Synthetic oligonucleotide"
  source: /note="RNA"
  modified_base (1)..(1): bicyclic nucleic acid (BNA)
  modified_base (2)..(2): 5-methyl bicyclic nucleic acid
  modified_base (3)..(3): 5-methyl modified nucleotide
  modified_base (7)..(7): 5-methyl modified nucleotide
gccagucgguaagu

SEQ ID NO: 17619 - DNA, 20 bp, Artificial Sequence
  source: /note="Description of Artificial Sequence: Synthetic oligonucleotide"
  source: /note="Description of Combined DNA/RNA Molecule: Synthetic oligonucleotide"
  source: /note="DNA/RNA"
  modified_base (1)..(1): bicyclic nucleic acid (BNA)
  modified_base (2)..(2): 5-methyl bicyclic nucleic acid
  modified_base (14)..(14): 5-methyl modified nucleotide
  modified_base (19)..(19): 5-methyl modified nucleotide
tcaaggaagauggcauuucu

SEQ ID NO: 17620 - DNA, 22 bp, Artificial Sequence
  source: /note="Description of Artificial Sequence: Synthetic oligonucleotide"
  source: /note="Description of Combined DNA/RNA Molecule: Synthetic oligonucleotide"
  source: /note="DNA/RNA"
  modified_base (1)..(1): bicyclic nucleic acid (BNA)
  modified_base (2)..(2): 5-methyl bicyclic nucleic acid
  modified_base (14)..(14): 5-methyl modified nucleotide
  modified_base (19)..(19): 5-methyl modified nucleotide
tcaaggaagauggcauuucuag

SEQ ID NO: 17621 - DNA, 16 bp, Artificial Sequence
  source: /note="Description of Artificial Sequence: Synthetic oligonucleotide"
  source: /note="Description of Combined DNA/RNA Molecule: Synthetic oligonucleotide"
  source: /note="DNA/RNA"
  modified_base (1)..(1): bicyclic nucleic acid (BNA)
  modified_base (2)..(2): 5-methyl bicyclic nucleic acid
  modified_base (14)..(14): 5-methyl modified nucleotide
tcaaggaagauggcau

SEQ ID NO: 17622 - RNA, 15 nt, Artificial Sequence
  source: /note="Description of Artificial Sequence: Synthetic oligonucleotide"
  source: /note="RNA"
  modified_base (1)..(1): bicyclic nucleic acid (BNA)
  modified_base (2)..(2): bicyclic nucleic acid (BNA)
  modified_base (9)..(9): 5-methyl modified nucleotide
  modified_base (14)..(14): 5-methyl modified nucleotide
gaagauggcauuucu

SEQ ID NO: 17623 - DNA, 21 bp, Artificial Sequence
  source: /note="Description of Artificial Sequence: Synthetic oligonucleotide"
  source: /note="Description of Combined DNA/RNA Molecule: Synthetic oligonucleotide"
  source: /note="DNA/RNA"
  modified_base (1)..(1): bicyclic nucleic acid (BNA)
  modified_base (2)..(2): 5-methyl bicyclic nucleic acid
  modified_base (14)..(14): 5-methyl modified nucleotide
  modified_base (19)..(19): 5-methyl modified nucleotide
tcaaggaagauggcauuucua

SEQ ID NO: 17624 - DNA, 19 bp, Artificial Sequence
  source: /note="Description of Artificial Sequence: Synthetic oligonucleotide"
  source: /note="Description of Combined DNA/RNA Molecule: Synthetic oligonucleotide"
  source: /note="DNA/RNA"
  modified_base (1)..(1): bicyclic nucleic acid (BNA)
  modified_base (2)..(2): 5-methyl bicyclic nucleic acid
  modified_base (14)..(14): 5-methyl modified nucleotide
  modified_base (19)..(19): 5-methyl modified nucleotide
tcaaggaagauggcauuuc

SEQ ID NO: 17625 - DNA, 18 bp, Artificial Sequence
  source: /note="Description of Artificial Sequence: Synthetic oligonucleotide"
  source: /note="Description of Combined DNA/RNA Molecule: Synthetic oligonucleotide"
  source: /note="DNA/RNA"
  modified_base (1)..(1): bicyclic nucleic acid (BNA)
  modified_base (2)..(2): 5-methyl bicyclic nucleic acid
  modified_base (14)..(14): 5-methyl modified nucleotide
tcaaggaagauggcauuu

SEQ ID NO: 17626 - DNA, 17 bp, Artificial Sequence
  source: /note="Description of Artificial Sequence: Synthetic oligonucleotide"
  source: /note="Description of Combined DNA/RNA Molecule: Synthetic oligonucleotide"
  source: /note="DNA/RNA"
  modified_base (1)..(1): bicyclic nucleic acid (BNA)
  modified_base (2)..(2): 5-methyl bicyclic nucleic acid
  modified_base (14)..(14): 5-methyl modified nucleotide
tcaaggaagauggcauu

SEQ ID NO: 17627 - DNA, 15 bp, Artificial Sequence
  source: /note="Description of Artificial Sequence: Synthetic oligonucleotide"
  source: /note="Description of Combined DNA/RNA Molecule: Synthetic oligonucleotide"
  source: /note="DNA/RNA"
  modified_base (1)..(1): bicyclic nucleic acid (BNA)
  modified_base (2)..(2): 5-methyl bicyclic nucleic acid
  modified_base (14)..(14): 5-methyl modified nucleotide
tcaaggaagauggca

SEQ ID NO: 17628 - DNA, 14 bp, Artificial Sequence
  source: /note="Description of Artificial Sequence: Synthetic oligonucleotide"
  source: /note="Description of Combined DNA/RNA Molecule: Synthetic oligonucleotide"
  source: /note="DNA/RNA"
  modified_base (1)..(1): bicyclic nucleic acid (BNA)
  modified_base (2)..(2): 5-methyl bicyclic nucleic acid
  modified_base (14)..(14): 5-methyl modified nucleotide
tcaaggaagauggc

SEQ ID NO: 17629 - DNA, 13 bp, Artificial Sequence
  source: /note="Description of Artificial Sequence: Synthetic oligonucleotide"
  source: /note="Description of Combined DNA/RNA Molecule: Synthetic oligonucleotide"
  source: /note="DNA/RNA"
  modified_base (1)..(1): bicyclic nucleic acid (BNA)
  modified_base (2)..(2): 5-methyl bicyclic nucleic acid
tcaaggaagaugg

SEQ ID NO: 17630 - DNA, 12 bp, Artificial Sequence
  source: /note="Description of Artificial Sequence: Synthetic oligonucleotide"
  source: /note="Description of Combined DNA/RNA Molecule: Synthetic oligonucleotide"
  source: /note="DNA/RNA"
  modified_base (1)..(1): bicyclic nucleic acid (BNA)
  modified_base (2)..(2): 5-methyl bicyclic nucleic acid
tcaaggaagaug

SEQ ID NO: 17631 - DNA, 11 bp, Artificial Sequence
  source: /note="Description of Artificial Sequence: Synthetic oligonucleotide"
  source: /note="Description of Combined DNA/RNA Molecule: Synthetic oligonucleotide"
  source: /note="DNA/RNA"
  modified_base (1)..(1): bicyclic nucleic acid (BNA)
  modified_base (2)..(2): 5-methyl bicyclic nucleic acid
tcaaggaagau

SEQ ID NO: 17632 - DNA, 10 bp, Artificial Sequence
  source: /note="Description of Artificial Sequence: Synthetic oligonucleotide"
  source: /note="DNA/RNA"
  modified_base (1)..(1): bicyclic nucleic acid (BNA)
  modified_base (2)..(2): 5-methyl bicyclic nucleic acid
tcaaggaaga

SEQ ID NO: 17633 - DNA, 9 bp, Artificial Sequence
  source: /note="Description of Artificial Sequence: Synthetic oligonucleotide"
  source: /note="DNA/RNA"
  modified_base (1)..(1): bicyclic nucleic acid (BNA)
  modified_base (2)..(2): 5-methyl bicyclic nucleic acid
tcaaggaag

SEQ ID NO: 17634 - RNA, 21 nt, Artificial Sequence
  source: /note="Description of Artificial Sequence: Synthetic oligonucleotide"
  source: /note="RNA"
  modified_base (1)..(1): 5-methyl bicyclic nucleic acid
  modified_base (2)..(2): bicyclic nucleic acid (BNA)
  modified_base (13)..(13): 5-methyl modified nucleotide
  modified_base (18)..(18): 5-methyl modified nucleotide
caaggaagauggcauuucuag

SEQ ID NO: 17635 - RNA, 20 nt, Artificial Sequence
  source: /note="Description of Artificial Sequence: Synthetic oligonucleotide"
  source: /note="RNA"
  modified_base (1)..(1): 5-methyl bicyclic nucleic acid
  modified_base (2)..(2): bicyclic nucleic acid (BNA)
  modified_base (13)..(13): 5-methyl modified nucleotide
  modified_base (18)..(18): 5-methyl modified nucleotide
caaggaagauggcauuucua

SEQ ID NO: 17636 - RNA, 19 nt, Artificial Sequence
  source: /note="Description of Artificial Sequence: Synthetic oligonucleotide"
  source: /note="RNA"
  modified_base (1)..(1): 5-methyl bicyclic nucleic acid
  modified_base (2)..(2): bicyclic nucleic acid (BNA)
  modified_base (13)..(13): 5-methyl modified nucleotide
  modified_base (18)..(18): 5-methyl modified nucleotide
caaggaagauggcauuucu

SEQ ID NO: 17637 - RNA, 18 nt, Artificial Sequence
  source: /note="Description of Artificial Sequence: Synthetic oligonucleotide"
  source: /note="RNA"
  modified_base (1)..(1): 5-methyl bicyclic nucleic acid
  modified_base (2)..(2): bicyclic nucleic acid (BNA)
  modified_base (13)..(13): 5-methyl modified nucleotide
  modified_base (18)..(18): 5-methyl modified nucleotide
caaggaagauggcauuuc

SEQ ID NO: 17638 - RNA, 17 nt, Artificial Sequence
  source: /note="Description of Artificial Sequence: Synthetic oligonucleotide"
  source: /note="RNA"
  modified_base (1)..(1): 5-methyl bicyclic nucleic acid
  modified_base (2)..(2): bicyclic nucleic acid (BNA)
  modified_base (13)..(13): 5-methyl modified nucleotide
caaggaagauggcauuu

SEQ ID NO: 17639 - RNA, 16 nt, Artificial Sequence
  source: /note="Description of Artificial Sequence: Synthetic oligonucleotide"
  source: /note="RNA"
  modified_base (1)..(1): 5-methyl bicyclic nucleic acid
  modified_base (2)..(2): bicyclic nucleic acid (BNA)
  modified_base (13)..(13): 5-methyl modified nucleotide
caaggaagauggcauu

SEQ ID NO: 17640 - RNA, 15 nt, Artificial Sequence
  source: /note="Description of Artificial Sequence: Synthetic oligonucleotide"
  source: /note="RNA"
  modified_base (1)..(1): 5-methyl bicyclic nucleic acid
  modified_base (2)..(2): bicyclic nucleic acid (BNA)
  modified_base (13)..(13): 5-methyl modified nucleotide
caaggaagauggcau

SEQ ID NO: 17641 - RNA, 14 nt, Artificial Sequence
  source: /note="Description of Artificial Sequence: Synthetic oligonucleotide"
  source: /note="RNA"
  modified_base (1)..(1): 5-methyl bicyclic nucleic acid
  modified_base (2)..(2): bicyclic nucleic acid (BNA)
  modified_base (13)..(13): 5-methyl modified nucleotide
caaggaagauggca

SEQ ID NO: 17642 - RNA, 13 nt, Artificial Sequence
  source: /note="Description of Artificial Sequence: Synthetic oligonucleotide"
  source: /note="RNA"
  modified_base (1)..(1): 5-methyl bicyclic nucleic acid
  modified_base (2)..(2): bicyclic nucleic acid (BNA)
  modified_base (13)..(13): 5-methyl modified nucleotide
caaggaagauggc

SEQ ID NO: 17643 - RNA, 12 nt, Artificial Sequence
  source: /note="Description of Artificial Sequence: Synthetic oligonucleotide"
  source: /note="RNA"
  modified_base (1)..(1): 5-methyl bicyclic nucleic acid
  modified_base (2)..(2): bicyclic nucleic acid (BNA)
caaggaagaugg

SEQ ID NO: 17644 - RNA, 11 nt, Artificial Sequence
  source: /note="Description of Artificial Sequence: Synthetic oligonucleotide"
  source: /note="RNA"
  modified_base (1)..(1): 5-methyl bicyclic nucleic acid
  modified_base (2)..(2): bicyclic nucleic acid (BNA)
caaggaagaug

SEQ ID NO: 17645 - RNA, 10 nt, Artificial Sequence
  source: /note="Description of Artificial Sequence: Synthetic oligonucleotide"
  source: /note="RNA"
  modified_base (1)..(1): 5-methyl bicyclic nucleic acid
  modified_base (2)..(2): bicyclic nucleic acid (BNA)
caaggaagau

SEQ ID NO: 17646 - RNA, 9 nt, Artificial Sequence
  source: /note="Description of Artificial Sequence: Synthetic oligonucleotide"
  source: /note="RNA/Antisense Oligonucleotide"
  modified_base (1)..(1): 5-methyl bicyclic nucleic acid
  modified_base (2)..(2): bicyclic nucleic acid (BNA)
caaggaaga

SEQ ID NO: 17647 - RNA, 8 nt, Artificial Sequence
  source: /note="Description of Artificial Sequence: Synthetic oligonucleotide"
  source: /note="RNA/Antisense Oligonucleotide"
  modified_base (1)..(1): 5-methyl bicyclic nucleic acid
  modified_base (2)..(2): bicyclic nucleic acid (BNA)
caaggaag

SEQ ID NO: 17648 - RNA, 20 nt, Artificial Sequence
  source: /note="Description of Artificial Sequence: Synthetic oligonucleotide"
  source: /note="RNA"
  modified_base (1)..(1): bicyclic nucleic acid (BNA)
  modified_base (2)..(2): bicyclic nucleic acid (BNA)
  modified_base (12)..(12): 5-methyl modified nucleotide
  modified_base (17)..(17): 5-methyl modified nucleotide
aaggaagauggcauuucuag

SEQ ID NO: 17649 - RNA, 19 nt, Artificial Sequence
  source: /note="Description of Artificial Sequence: Synthetic oligonucleotide"
  source: /note="RNA"
  modified_base (1)..(1): bicyclic nucleic acid (BNA)
  modified_base (2)..(2): bicyclic nucleic acid (BNA)
  modified_base (12)..(12): 5-methyl modified nucleotide
  modified_base (17)..(17): 5-methyl modified nucleotide
aaggaagauggcauuucua

SEQ ID NO: 17650 - RNA, 18 nt, Artificial Sequence
  source: /note="Description of Artificial Sequence: Synthetic oligonucleotide"
  source: /note="RNA"
  modified_base (1)..(1): bicyclic nucleic acid (BNA)
  modified_base (2)..(2): bicyclic nucleic acid (BNA)
  modified_base (12)..(12): 5-methyl modified nucleotide
  modified_base (17)..(17): 5-methyl modified nucleotide
aaggaagauggcauuucu

SEQ ID NO: 17651 - RNA, 17 nt, Artificial Sequence
  source: /note="Description of Artificial Sequence: Synthetic oligonucleotide"
  source: /note="RNA"
  modified_base (1)..(1): bicyclic nucleic acid (BNA)
  modified_base (2)..(2): bicyclic nucleic acid (BNA)
  modified_base (12)..(12): 5-methyl modified nucleotide
  modified_base (17)..(17): 5-methyl modified nucleotide
aaggaagauggcauuuc

SEQ ID NO: 17652 - RNA, 16 nt, Artificial Sequence
  source: /note="Description of Artificial Sequence: Synthetic oligonucleotide"
  source: /note="RNA"
  modified_base (1)..(1): bicyclic nucleic acid (BNA)
  modified_base (2)..(2): bicyclic nucleic acid (BNA)
  modified_base (12)..(12): 5-methyl modified nucleotide
aaggaagauggcauuu

SEQ ID NO: 17653 - RNA, 15 nt, Artificial Sequence
  source: /note="Description of Artificial Sequence: Synthetic oligonucleotide"
  source: /note="RNA"
  modified_base (1)..(1): bicyclic nucleic acid (BNA)
  modified_base (2)..(2): bicyclic nucleic acid (BNA)
  modified_base (12)..(12): 5-methyl modified nucleotide
aaggaagauggcauu

SEQ ID NO: 17654 - RNA, 14 nt, Artificial Sequence
  source: /note="Description of Artificial Sequence: Synthetic oligonucleotide"
  source: /note="RNA"
  modified_base (1)..(1): bicyclic nucleic acid (BNA)
  modified_base (2)..(2): bicyclic nucleic acid (BNA)
  modified_base (12)..(12): 5-methyl modified nucleotide
aaggaagauggcau

SEQ ID NO: 17655 - RNA, 13 nt, Artificial Sequence
  source: /note="Description of Artificial Sequence: Synthetic oligonucleotide"
  source: /note="RNA"
  modified_base (1)..(1): bicyclic nucleic acid (BNA)
  modified_base (2)..(2): bicyclic nucleic acid (BNA)
  modified_base (12)..(12): 5-methyl modified nucleotide
aaggaagauggca

SEQ ID NO: 17656 - RNA, 12 nt, Artificial Sequence
  source: /note="Description of Artificial Sequence: Synthetic oligonucleotide"
  source: /note="RNA"
  modified_base (1)..(1): bicyclic nucleic acid (BNA)
  modified_base (2)..(2): bicyclic nucleic acid (BNA)
  modified_base (12)..(12): 5-methyl modified nucleotide
aaggaagauggc

SEQ ID NO: 17657 - RNA, 11 nt, Artificial Sequence
  source: /note="Description of Artificial Sequence: Synthetic oligonucleotide"
  source: /note="RNA"
  modified_base (1)..(1): bicyclic nucleic acid (BNA)
  modified_base (2)..(2): bicyclic nucleic acid (BNA)
aaggaagaugg

SEQ ID NO: 17658 - RNA, 10 nt, Artificial Sequence
  source: /note="Description of Artificial Sequence: Synthetic oligonucleotide"
  source: /note="RNA"
  modified_base (1)..(1): bicyclic nucleic acid (BNA)
  modified_base (2)..(2): bicyclic nucleic acid (BNA)
aaggaagaug

SEQ ID NO: 17659 - RNA, 9 nt, Artificial Sequence
  source: /note="Description of Artificial Sequence: Synthetic oligonucleotide"
  source: /note="RNA"
  modified_base (1)..(1): bicyclic nucleic acid (BNA)
  modified_base (2)..(2): bicyclic nucleic acid (BNA)
aaggaagau

SEQ ID NO: 17660 - RNA, 8 nt, Artificial Sequence
  source: /note="Description of Artificial Sequence: Synthetic oligonucleotide"
  source: /note="RNA/Antisense Oligonucleotide"
  modified_base (1)..(1): bicyclic nucleic acid (BNA)
  modified_base (2)..(2): bicyclic nucleic acid (BNA)
aaggaaga

SEQ ID NO: 17661 - RNA, 19 nt, Artificial Sequence
  source: /note="Description of Artificial Sequence: Synthetic oligonucleotide"
  source: /note="RNA"
  modified_base (1)..(1): bicyclic nucleic acid (BNA)
  modified_base (2)..(2): bicyclic nucleic acid (BNA)
  modified_base (11)..(11): 5-methyl modified nucleotide
  modified_base (16)..(16): 5-methyl modified nucleotide
aggaagauggcauuucuag

SEQ ID NO: 17662 - RNA, 18 nt, Artificial Sequence
  source: /note="Description of Artificial Sequence: Synthetic oligonucleotide"
  source: /note="RNA"
  modified_base (1)..(1): bicyclic nucleic acid (BNA)
  modified_base (2)..(2): bicyclic nucleic acid (BNA)
  modified_base (11)..(11): 5-methyl modified nucleotide
  modified_base (16)..(16): 5-methyl modified nucleotide
aggaagauggcauuucua

SEQ ID NO: 17663 - RNA, 17 nt, Artificial Sequence
  source: /note="Description of Artificial Sequence: Synthetic oligonucleotide"
  source: /note="RNA"
  modified_base (1)..(1): bicyclic nucleic acid (BNA)
  modified_base (2)..(2): bicyclic nucleic acid (BNA)
  modified_base (11)..(11): 5-methyl modified nucleotide
  modified_base (16)..(16): 5-methyl modified nucleotide
aggaagauggcauuucu

SEQ ID NO: 17664 - RNA, 16 nt, Artificial Sequence
  source: /note="Description of Artificial Sequence: Synthetic oligonucleotide"
  source: /note="RNA"
  modified_base (1)..(1): bicyclic nucleic acid (BNA)
  modified_base (2)..(2): bicyclic nucleic acid (BNA)
  modified_base (11)..(11): 5-methyl modified nucleotide
  modified_base (16)..(16): 5-methyl modified nucleotide
aggaagauggcauuuc

SEQ ID NO: 17665 - RNA, 15 nt, Artificial Sequence
  source: /note="Description of Artificial Sequence: Synthetic oligonucleotide"
  source: /note="RNA"
  modified_base (1)..(1): bicyclic nucleic acid (BNA)
  modified_base (2)..(2): bicyclic nucleic acid (BNA)
  modified_base (11)..(11): 5-methyl modified nucleotide
aggaagauggcauuu

SEQ ID NO: 17666 - RNA, 14 nt, Artificial Sequence
  source: /note="Description of Artificial Sequence: Synthetic oligonucleotide"
  source: /note="RNA"
  modified_base (1)..(1): bicyclic nucleic acid (BNA)
  modified_base (2)..(2): bicyclic nucleic acid (BNA)
  modified_base (11)..(11): 5-methyl modified nucleotide
aggaagauggcauu

SEQ ID NO: 17667 - RNA, 13 nt, Artificial Sequence
  source: /note="Description of Artificial Sequence: Synthetic oligonucleotide"
  source: /note="RNA"
  modified_base (1)..(1): bicyclic nucleic acid (BNA)
  modified_base (2)..(2): bicyclic nucleic acid (BNA)
  modified_base (11)..(11): 5-methyl modified nucleotide
aggaagauggcau

SEQ ID NO: 17668 - RNA, 12 nt, Artificial Sequence
  source: /note="Description of Artificial Sequence: Synthetic oligonucleotide"
  source: /note="RNA"
  modified_base (1)..(1): bicyclic nucleic acid (BNA)
  modified_base (2)..(2): bicyclic nucleic acid (BNA)
  modified_base (11)..(11): 5-methyl modified nucleotide
aggaagauggca

SEQ ID NO: 17669 - RNA, 10 nt, Artificial Sequence
  source: /note="Description of Artificial Sequence: Synthetic oligonucleotide"
  source: /note="RNA"
  modified_base (1)..(1): bicyclic nucleic acid (BNA)
  modified_base (2)..(2): bicyclic nucleic acid (BNA)
aggaagaugg

SEQ ID NO: 17670 - RNA, 9 nt, Artificial Sequence
  source: /note="Description of Artificial Sequence: Synthetic oligonucleotide"
  source: /note="RNA"
  modified_base (1)..(1): bicyclic nucleic acid (BNA)
  modified_base (2)..(2): bicyclic nucleic acid (BNA)
aggaagaug

SEQ ID NO: 17671 - RNA, 8 nt, Artificial Sequence
  source: /note="Description of Artificial Sequence: Synthetic oligonucleotide"
  source: /note="RNA"
  modified_base (1)..(1): bicyclic nucleic acid (BNA)
  modified_base (2)..(2): bicyclic nucleic acid (BNA)
aggaagau

SEQ ID NO: 17672 - RNA, 18 nt, Artificial Sequence
  source: /note="Description of Artificial Sequence: Synthetic oligonucleotide"
  source: /note="RNA"
  modified_base (1)..(1): bicyclic nucleic acid (BNA)
  modified_base (2)..(2): bicyclic nucleic acid (BNA)
  modified_base (10)..(10): 5-methyl modified nucleotide
  modified_base (15)..(15): 5-methyl modified nucleotide
ggaagauggcauuucuag

SEQ ID NO: 17673 - RNA, 17 nt, Artificial Sequence
  source: /note="Description of Artificial Sequence: Synthetic oligonucleotide"
  source: /note="RNA"
  modified_base (1)..(1): bicyclic nucleic acid (BNA)
  modified_base (2)..(2): bicyclic nucleic acid (BNA)
  modified_base (10)..(10): 5-methyl modified nucleotide
  modified_base (15)..(15): 5-methyl modified nucleotide
ggaagauggcauuucua

SEQ ID NO: 17674 - RNA, 16 nt, Artificial Sequence
  source: /note="Description of Artificial Sequence: Synthetic oligonucleotide"
  source: /note="RNA"
  modified_base (1)..(1): bicyclic nucleic acid (BNA)
  modified_base (2)..(2): bicyclic nucleic acid (BNA)
  modified_base (10)..(10): 5-methyl modified nucleotide
  modified_base (15)..(15): 5-methyl modified nucleotide
ggaagauggcauuucu

SEQ ID NO: 17675 - RNA, 15 nt, Artificial Sequence
  source: /note="Description of Artificial Sequence: Synthetic oligonucleotide"
  source: /note="RNA"
  modified_base (1)..(1): bicyclic nucleic acid (BNA)
  modified_base (2)..(2): bicyclic nucleic acid (BNA)
  modified_base (10)..(10): 5-methyl modified nucleotide
  modified_base (15)..(15): 5-methyl modified nucleotide
ggaagauggcauuuc

SEQ ID NO: 17676 - RNA, 14 nt, Artificial Sequence
  source: /note="Description of Artificial Sequence: Synthetic oligonucleotide"
  source: /note="RNA"
  modified_base (1)..(1): bicyclic nucleic acid (BNA)
  modified_base (2)..(2): bicyclic nucleic acid (BNA)
  modified_base (10)..(10): 5-methyl modified nucleotide
ggaagauggcauuu

SEQ ID NO: 17677 - RNA, 13 nt, Artificial Sequence
  source: /note="Description of Artificial Sequence: Synthetic oligonucleotide"
  source: /note="RNA"
  modified_base (1)..(1): bicyclic nucleic acid (BNA)
  modified_base (2)..(2): bicyclic nucleic acid (BNA)
  modified_base (10)..(10): 5-methyl modified nucleotide
ggaagauggcauu

SEQ ID NO: 17678 - RNA, 12 nt, Artificial Sequence
  source: /note="Description of Artificial Sequence: Synthetic oligonucleotide"
  source: /note="RNA"
  modified_base (1)..(1): bicyclic nucleic acid (BNA)
  modified_base (2)..(2): bicyclic nucleic acid (BNA)
  modified_base (10)..(10): 5-methyl modified nucleotide
ggaagauggcau

SEQ ID NO: 17679 - RNA, 11 nt, Artificial Sequence
  source: /note="Description of Artificial Sequence: Synthetic oligonucleotide"
  source: /note="RNA"
  modified_base (1)..(1): bicyclic nucleic acid (BNA)
  modified_base (2)..(2): bicyclic nucleic acid (BNA)
  modified_base (10)..(10): 5-methyl modified nucleotide
ggaagauggca

SEQ ID NO: 17680 - RNA, 10 nt, Artificial Sequence
  source: /note="Description of Artificial Sequence: Synthetic oligonucleotide"
  source: /note="RNA"
  modified_base (1)..(1): bicyclic nucleic acid (BNA)
  modified_base (2)..(2): bicyclic nucleic acid (BNA)
  modified_base (10)..(10): 5-methyl modified nucleotide
ggaagauggc

SEQ ID NO: 17681 - RNA, 8 nt, Artificial Sequence
  source: /note="Description of Artificial Sequence: Synthetic oligonucleotide"
  source: /note="RNA"
  modified_base (1)..(1): bicyclic nucleic acid (BNA)
  modified_base (2)..(2): bicyclic nucleic acid (BNA)
ggaagaug

SEQ ID NO: 17682 - RNA, 17 nt, Artificial Sequence
  source: /note="Description of Artificial Sequence: Synthetic oligonucleotide"
  source: /note="RNA"
  modified_base (1)..(1): bicyclic nucleic acid (BNA)
  modified_base (2)..(2): bicyclic nucleic acid (BNA)
  modified_base (9)..(9): 5-methyl modified nucleotide
  modified_base (14)..(14): 5-methyl modified nucleotide
gaagauggcauuucuag

SEQ ID NO: 17683 - RNA, 16 nt, Artificial Sequence
  source: /note="Description of Artificial Sequence: Synthetic oligonucleotide"
  source: /note="RNA"
  modified_base (1)..(1): bicyclic nucleic acid (BNA)
  modified_base (2)..(2): bicyclic nucleic acid (BNA)
  modified_base (9)..(9): 5-methyl modified nucleotide
  modified_base (14)..(14): 5-methyl modified nucleotide
gaagauggcauuucua

SEQ ID NO: 17684 - RNA, 14 nt, Artificial Sequence
  source: /note="Description of Artificial Sequence: Synthetic oligonucleotide"
  source: /note="RNA"
  modified_base (1)..(1): bicyclic nucleic acid (BNA)
  modified_base (2)..(2): bicyclic nucleic acid (BNA)
  modified_base (9)..(9): 5-methyl modified nucleotide
  modified_base (14)..(14): 5-methyl modified nucleotide
gaagauggcauuuc

SEQ ID NO: 17685 - RNA, 13 nt, Artificial Sequence
  source: /note="Description of Artificial Sequence: Synthetic oligonucleotide"
  source: /note="RNA"
  modified_base (1)..(1): bicyclic nucleic acid (BNA)
  modified_base (2)..(2): bicyclic nucleic acid (BNA)
  modified_base (9)..(9): 5-methyl modified nucleotide
gaagauggcauuu

SEQ ID NO: 17686 - RNA, 12 nt, Artificial Sequence
  source: /note="Description of Artificial Sequence: Synthetic oligonucleotide"
  source: /note="RNA"
  modified_base (1)..(1): bicyclic nucleic acid (BNA)
  modified_base (2)..(2): bicyclic nucleic acid (BNA)
  modified_base (9)..(9): 5-methyl modified nucleotide
gaagauggcauu

SEQ ID NO: 17687 - RNA, 11 nt, Artificial Sequence
  source: /note="Description of Artificial Sequence: Synthetic oligonucleotide"
  source: /note="RNA"
  modified_base (1)..(1): bicyclic nucleic acid (BNA)
  modified_base (2)..(2): bicyclic nucleic acid (BNA)
  modified_base (9)..(9): 5-methyl modified nucleotide
gaagauggcau

SEQ ID NO: 17688 - RNA, 10 nt, Artificial Sequence
  source: /note="Description of Artificial Sequence: Synthetic oligonucleotide"
  source: /note="RNA"
  modified_base (1)..(1): bicyclic nucleic acid (BNA)
  modified_base (2)..(2): bicyclic nucleic acid (BNA)
  modified_base (9)..(9): 5-methyl modified nucleotide
gaagauggca

SEQ ID NO: 17689 - RNA, 9 nt, Artificial Sequence
  source: /note="Description of Artificial Sequence: Synthetic oligonucleotide"
  source: /note="RNA"
  modified_base (1)..(1): bicyclic nucleic acid (BNA)
  modified_base (2)..(2): bicyclic nucleic acid (BNA)
  modified_base (9)..(9): 5-methyl modified nucleotide
gaagauggc

SEQ ID NO: 17690 - RNA, 8 nt, Artificial Sequence
  source: /note="Description of Artificial Sequence: Synthetic oligonucleotide"
  source: /note="RNA"
  modified_base (1)..(1): bicyclic nucleic acid (BNA)
  modified_base (2)..(2): bicyclic nucleic acid (BNA)
gaagaugg

SEQ ID NO: 17691 - RNA, 16 nt, Artificial Sequence
  source: /note="Description of Artificial Sequence: Synthetic oligonucleotide"
  source: /note="RNA"
  modified_base (1)..(1): bicyclic nucleic acid (BNA)
  modified_base (2)..(2): bicyclic nucleic acid (BNA)
  modified_base (8)..(8): 5-methyl modified nucleotide
  modified_base (13)..(13): 5-methyl modified nucleotide
aagauggcauuucuag

SEQ ID NO: 17692 - RNA, 15 nt, Artificial Sequence
  source: /note="Description of Artificial Sequence: Synthetic oligonucleotide"
  source: /note="RNA"
  modified_base (1)..(1): bicyclic nucleic acid (BNA)
  modified_base (2)..(2): bicyclic nucleic acid (BNA)
  modified_base (8)..(8): 5-methyl modified nucleotide
  modified_base (13)..(13): 5-methyl modified nucleotide
aagauggcauuucua

SEQ ID NO: 17693 - RNA, 14 nt, Artificial Sequence
  source: /note="Description of Artificial Sequence: Synthetic oligonucleotide"
  source: /note="RNA"
  modified_base (1)..(1): bicyclic nucleic acid (BNA)
  modified_base (2)..(2): bicyclic nucleic acid (BNA)
  modified_base (8)..(8): 5-methyl modified nucleotide
  modified_base (13)..(13): 5-methyl modified nucleotide
aagauggcauuucu

SEQ ID NO: 17694 - RNA, 13 nt, Artificial Sequence
  source: /note="Description of Artificial Sequence: Synthetic oligonucleotide"
  source: /note="RNA"
  modified_base (1)..(1): bicyclic nucleic acid (BNA)
  modified_base (2)..(2): bicyclic nucleic acid (BNA)
  modified_base (8)..(8): 5-methyl modified nucleotide
  modified_base (13)..(13): 5-methyl modified nucleotide
aagauggcauuuc

SEQ ID NO: 17695 - RNA, 12 nt, Artificial Sequence
  source: /note="Description of Artificial Sequence: Synthetic oligonucleotide"
  source: /note="RNA"
  modified_base (1)..(1): bicyclic nucleic acid (BNA)
  modified_base (2)..(2): bicyclic nucleic acid (BNA)
  modified_base (8)..(8): 5-methyl modified nucleotide
aagauggcauuu

SEQ ID NO: 17696 - RNA, 11 nt, Artificial Sequence
  source: /note="Description of Artificial Sequence: Synthetic oligonucleotide"
  source: /note="RNA"
  modified_base (1)..(1): bicyclic nucleic acid (BNA)
  modified_base (2)..(2): bicyclic nucleic acid (BNA)
  modified_base (8)..(8): 5-methyl modified nucleotide
aagauggcauu

SEQ ID NO: 17697 - RNA, 10 nt, Artificial Sequence
  source: /note="Description of Artificial Sequence: Synthetic oligonucleotide"
  source: /note="RNA"
  modified_base (1)..(1): bicyclic nucleic acid (BNA)
  modified_base (2)..(2): bicyclic nucleic acid (BNA)
  modified_base (8)..(8): 5-methyl modified nucleotide
aagauggcau

SEQ ID NO: 17698 - RNA, 9 nt, Artificial Sequence
  source: /note="Description of Artificial Sequence: Synthetic oligonucleotide"
  source: /note="RNA"
  modified_base (1)..(1): bicyclic nucleic acid (BNA)
  modified_base (2)..(2): bicyclic nucleic acid (BNA)
  modified_base (8)..(8): 5-methyl modified nucleotide
aagauggca

SEQ ID NO: 17699 - RNA, 8 nt, Artificial Sequence
  source: /note="Description of Artificial Sequence: Synthetic oligonucleotide"
  source: /note="RNA"
  modified_base (1)..(1): bicyclic nucleic acid (BNA)
  modified_base (2)..(2): bicyclic nucleic acid (BNA)
  modified_base (8)..(8): 5-methyl modified nucleotide
aagauggc

SEQ ID NO: 17700 - RNA, 15 nt, Artificial Sequence
  source: /note="Description of Artificial Sequence: Synthetic oligonucleotide"
  source: /note="RNA"
  modified_base (1)..(1): bicyclic nucleic acid (BNA)
  modified_base (2)..(2): bicyclic nucleic acid (BNA)
  modified_base (7)..(7): 5-methyl modified nucleotide
  modified_base (12)..(12): 5-methyl modified nucleotide
agauggcauuucuag

SEQ ID NO: 17701 - RNA, 14 nt, Artificial Sequence
  source: /note="Description of Artificial Sequence: Synthetic oligonucleotide"
  source: /note="RNA"
  modified_base (1)..(1): bicyclic nucleic acid (BNA)
  modified_base (2)..(2): bicyclic nucleic acid (BNA)
  modified_base (7)..(7): 5-methyl modified nucleotide
  modified_base (12)..(12): 5-methyl modified nucleotide
agauggcauuucua

SEQ ID NO: 17702 - RNA, 13 nt, Artificial Sequence
  source: /note="Description of Artificial Sequence: Synthetic oligonucleotide"
  source: /note="RNA"
  modified_base (1)..(1): bicyclic nucleic acid (BNA)
  modified_base (2)..(2): bicyclic nucleic acid (BNA)
  modified_base (7)..(7): 5-methyl modified nucleotide
  modified_base (12)..(12): 5-methyl modified nucleotide
agauggcauuucu

SEQ ID NO: 17703 - RNA, 12 nt, Artificial Sequence
  source: /note="Description of Artificial Sequence: Synthetic oligonucleotide"
  source: /note="RNA"
  modified_base (1)..(1): bicyclic nucleic acid (BNA)
  modified_base (2)..(2): bicyclic nucleic acid (BNA)
  modified_base (7)..(7): 5-methyl modified nucleotide
  modified_base (12)..(12): 5-methyl modified nucleotide
agauggcauuuc

SEQ ID NO: 17704 - RNA, 11 nt, Artificial Sequence
  source: /note="Description of Artificial Sequence: Synthetic oligonucleotide"
  source: /note="RNA"
  modified_base (1)..(1): bicyclic nucleic acid (BNA)
  modified_base (2)..(2): bicyclic nucleic acid (BNA)
  modified_base (7)..(7): 5-methyl modified nucleotide
agauggcauuu

SEQ ID NO: 17705 - RNA, 10 nt, Artificial Sequence
  source: /note="Description of Artificial Sequence: Synthetic oligonucleotide"
  source: /note="RNA"
  modified_base (1)..(1): bicyclic nucleic acid (BNA)
  modified_base (2)..(2): bicyclic nucleic acid (BNA)
  modified_base (7)..(7): 5-methyl modified nucleotide
agauggcauu

SEQ ID NO: 17706 - RNA, 9 nt, Artificial Sequence
  source: /note="Description of Artificial Sequence: Synthetic oligonucleotide"
  source: /note="RNA"
  modified_base (1)..(1): bicyclic nucleic acid (BNA)
  modified_base (2)..(2): bicyclic nucleic acid (BNA)
  modified_base (7)..(7): 5-methyl modified nucleotide
agauggcau

SEQ ID NO: 17707 - RNA, 8 nt, Artificial Sequence
  source: /note="Description of Artificial Sequence: Synthetic oligonucleotide"
  source: /note="RNA"
  modified_base (1)..(1): bicyclic nucleic acid (BNA)
  modified_base (2)..(2): bicyclic nucleic acid (BNA)
  modified_base (7)..(7): 5-methyl modified nucleotide
agauggca

SEQ ID NO: 17708 - DNA, 30 bp, Artificial Sequence; identical to SEQ ID NO: 8204
  source: /note="Description of Artificial Sequence: Synthetic oligonucleotide"
  source: /note="Description of Combined DNA/RNA Molecule: Synthetic oligonucleotide"
  source: /note="DNA/RNA"
  modified_base (1)..(1): 5-methyl bicyclic nucleic acid
  modified_base (2)..(2): bicyclic nucleic acid (BNA)
  modified_base (3)..(3): 5-methyl modified nucleotide
  modified_base (4)..(4): 5-methyl modified nucleotide
  modified_base (7)..(7): 5-methyl modified nucleotide
  modified_base (10)..(10): 5-methyl modified nucleotide
  modified_base (22)..(22): 5-methyl modified nucleotide
  modified_base (27)..(27): 5-methyl modified nucleotide

SEQ ID NO: 17709 - DNA, 29 bp, Artificial Sequence
  source: /note="Description of Artificial Sequence: Synthetic oligonucleotide"
  source: /note="Description of Combined DNA/RNA Molecule: Synthetic oligonucleotide"
  source: /note="DNA/RNA"
  modified_base (1)..(1): 5-methyl bicyclic nucleic acid
  modified_base (2)..(2): bicyclic nucleic acid (BNA)
  modified_base (3)..(3): 5-methyl modified nucleotide
  modified_base (4)..(4): 5-methyl modified nucleotide
  modified_base (7)..(7): 5-methyl modified nucleotide
  modified_base (10)..(10): 5-methyl modified nucleotide
  modified_base (22)..(22): 5-methyl modified nucleotide
  modified_base (27)..(27): 5-methyl modified nucleotide
ctccaacaucaaggaagauggcauuucua

SEQ ID NO: 17710 - DNA, 28 bp, Artificial Sequence
  source: /note="Description of Artificial Sequence: Synthetic oligonucleotide"
  source: /note="Description of Combined DNA/RNA Molecule: Synthetic oligonucleotide"
  source: /note="DNA/RNA"
  modified_base (1)..(1): 5-methyl bicyclic nucleic acid
  modified_base (2)..(2): bicyclic nucleic acid (BNA)
  modified_base (3)..(3): 5-methyl modified nucleotide
  modified_base (4)..(4): 5-methyl modified nucleotide
  modified_base (7)..(7): 5-methyl modified nucleotide
  modified_base (10)..(10): 5-methyl modified nucleotide
  modified_base (22)..(22): 5-methyl modified nucleotide
  modified_base (27)..(27): 5-methyl modified nucleotide
ctccaacaucaaggaagauggcauuucu

SEQ ID NO: 17711 - DNA, 27 bp, Artificial Sequence
  source: /note="Description of Artificial Sequence: Synthetic oligonucleotide"
  source: /note="Description of Combined DNA/RNA Molecule: Synthetic oligonucleotide"
  source: /note="DNA/RNA"
  modified_base (1)..(1): 5-methyl bicyclic nucleic acid
  modified_base (2)..(2): bicyclic nucleic acid (BNA)
  modified_base (3)..(3): 5-methyl modified nucleotide
  modified_base (4)..(4): 5-methyl modified nucleotide
  modified_base (7)..(7): 5-methyl modified nucleotide
  modified_base (10)..(10): 5-methyl modified nucleotide
  modified_base (22)..(22): 5-methyl modified nucleotide
  modified_base (27)..(27): 5-methyl modified nucleotide
ctccaacaucaaggaagauggcauuuc

SEQ ID NO: 17712 - DNA, 26 bp, Artificial Sequence
  source: /note="Description of Artificial Sequence: Synthetic oligonucleotide"
  source: /note="Description of Combined DNA/RNA Molecule: Synthetic oligonucleotide"
  source: /note="DNA/RNA"
  modified_base (1)..(1): 5-methyl bicyclic nucleic acid
  modified_base (2)..(2): bicyclic nucleic acid (BNA)
  modified_base (3)..(3): 5-methyl modified nucleotide
  modified_base (4)..(4): 5-methyl modified nucleotide
  modified_base (7)..(7): 5-methyl modified nucleotide
  modified_base (10)..(10): 5-methyl modified nucleotide
  modified_base (22)..(22): 5-methyl modified nucleotide
ctccaacaucaaggaagauggcauuu

SEQ ID NO: 17713 - DNA, 25 bp, Artificial Sequence
  source: /note="Description of Artificial Sequence: Synthetic oligonucleotide"
  source: /note="Description of Combined DNA/RNA Molecule: Synthetic oligonucleotide"
  source: /note="DNA/RNA"
  modified_base (1)..(1): 5-methyl bicyclic nucleic acid
  modified_base (2)..(2): bicyclic nucleic acid (BNA)
  modified_base (3)..(3): 5-methyl modified nucleotide
  modified_base (4)..(4): 5-methyl modified nucleotide
  modified_base (7)..(7): 5-methyl modified nucleotide
  modified_base (10)..(10): 5-methyl modified nucleotide
  modified_base (22)..(22): 5-methyl modified nucleotide
ctccaacaucaaggaagauggcauu

SEQ ID NO: 17714 - DNA, 24 bp, Artificial Sequence
  source: /note="Description of Artificial Sequence: Synthetic oligonucleotide"
  source: /note="Description of Combined DNA/RNA Molecule: Synthetic oligonucleotide"
  source: /note="DNA/RNA"
  modified_base (1)..(1): 5-methyl bicyclic nucleic acid
  modified_base (2)..(2): bicyclic nucleic acid (BNA)
  modified_base (3)..(3): 5-methyl modified nucleotide
  modified_base (4)..(4): 5-methyl modified nucleotide
  modified_base (7)..(7): 5-methyl modified nucleotide
  modified_base (10)..(10): 5-methyl modified nucleotide
  modified_base (22)..(22): 5-methyl modified nucleotide
ctccaacaucaaggaagauggcau

SEQ ID NO: 17715 - DNA, 23 bp, Artificial Sequence
  source: /note="Description of Artificial Sequence: Synthetic oligonucleotide"
  source: /note="Description of Combined DNA/RNA Molecule: Synthetic oligonucleotide"
  source: /note="DNA/RNA"
  modified_base (1)..(1): 5-methyl bicyclic nucleic acid
  modified_base (2)..(2): bicyclic nucleic acid (BNA)
  modified_base (3)..(3): 5-methyl modified nucleotide
  modified_base (4)..(4): 5-methyl modified nucleotide
  modified_base (7)..(7): 5-methyl modified nucleotide
  modified_base (10)..(10): 5-methyl modified nucleotide
  modified_base (22)..(22): 5-methyl modified nucleotide
ctccaacaucaaggaagauggca

SEQ ID NO: 17716 - DNA, 22 bp, Artificial Sequence
  source: /note="Description of Artificial Sequence: Synthetic oligonucleotide"
  source: /note="Description of Combined DNA/RNA Molecule: Synthetic oligonucleotide"
  source: /note="DNA/RNA"
  modified_base (1)..(1): 5-methyl bicyclic nucleic acid
  modified_base (2)..(2): bicyclic nucleic acid (BNA)
  modified_base (3)..(3): 5-methyl modified nucleotide
  modified_base (4)..(4): 5-methyl modified nucleotide
  modified_base (7)..(7): 5-methyl modified nucleotide
  modified_base (10)..(10): 5-methyl modified nucleotide
  modified_base (22)..(22): 5-methyl modified nucleotide
ctccaacaucaaggaagauggc

SEQ ID NO: 17717 - DNA, 21 bp, Artificial Sequence
  source: /note="Description of Artificial Sequence: Synthetic oligonucleotide"
  source: /note="Description of Combined DNA/RNA Molecule: Synthetic oligonucleotide"
  source: /note="DNA/RNA"
  modified_base (1)..(1): 5-methyl bicyclic nucleic acid
  modified_base (2)..(2): bicyclic nucleic acid (BNA)
  modified_base (3)..(3): 5-methyl modified nucleotide
  modified_base (4)..(4): 5-methyl modified nucleotide
  modified_base (7)..(7): 5-methyl modified nucleotide
  modified_base (10)..(10): 5-methyl modified nucleotide
ctccaacaucaaggaagaugg

SEQ ID NO: 17718 - DNA, 20 bp, Artificial Sequence
  source: /note="Description of Artificial Sequence: Synthetic oligonucleotide"
  source: /note="Description of Combined DNA/RNA Molecule: Synthetic oligonucleotide"
  source: /note="DNA/RNA"
  modified_base (1)..(1): 5-methyl bicyclic nucleic acid
  modified_base (2)..(2): bicyclic nucleic acid (BNA)
  modified_base (3)..(3): 5-methyl modified nucleotide
  modified_base (4)..(4): 5-methyl modified nucleotide
  modified_base (7)..(7): 5-methyl modified nucleotide
  modified_base (10)..(10): 5-methyl modified nucleotide
ctccaacaucaaggaagaug

SEQ ID NO: 17719 - DNA, 19 bp, Artificial Sequence
  source: /note="Description of Artificial Sequence: Synthetic oligonucleotide"
  source: /note="Description of Combined DNA/RNA Molecule: Synthetic oligonucleotide"
  source: /note="DNA/RNA"
  modified_base (1)..(1): 5-methyl bicyclic nucleic acid
  modified_base (2)..(2): bicyclic nucleic acid (BNA)
  modified_base (3)..(3): 5-methyl modified nucleotide
  modified_base (4)..(4): 5-methyl modified nucleotide
  modified_base (7)..(7): 5-methyl modified nucleotide
  modified_base (10)..(10): 5-methyl modified nucleotide
ctccaacaucaaggaagau

SEQ ID NO: 17720 - DNA, 18 bp, Artificial Sequence
  source: /note="Description of Artificial Sequence: Synthetic oligonucleotide"
  source: /note="Description of Combined DNA/RNA Molecule: Synthetic oligonucleotide"
  source: /note="DNA/RNA"
  modified_base (1)..(1): 5-methyl bicyclic nucleic acid
  modified_base (2)..(2): bicyclic nucleic acid (BNA)
  modified_base (3)..(3): 5-methyl modified nucleotide
  modified_base (4)..(4): 5-methyl modified nucleotide
  modified_base (7)..(7): 5-methyl modified nucleotide
  modified_base (10)..(10): 5-methyl modified nucleotide
ctccaacaucaaggaaga

SEQ ID NO: 17721 - DNA, 17 bp, Artificial Sequence
  source: /note="Description of Artificial Sequence: Synthetic oligonucleotide"
  source: /note="Description of Combined DNA/RNA Molecule: Synthetic oligonucleotide"
  source: /note="DNA/RNA"
  modified_base (1)..(1): 5-methyl bicyclic nucleic acid
  modified_base (2)..(2): bicyclic nucleic acid (BNA)
  modified_base (3)..(3): 5-methyl modified nucleotide
  modified_base (4)..(4): 5-methyl modified nucleotide
  modified_base (7)..(7): 5-methyl modified nucleotide
  modified_base (10)..(10): 5-methyl modified nucleotide
ctccaacaucaaggaag

SEQ ID NO: 17722 - DNA, 29 bp, Artificial Sequence
  source: /note="Description of Artificial Sequence: Synthetic oligonucleotide"
  source: /note="Description of Combined DNA/RNA Molecule: Synthetic oligonucleotide"
  source: /note="DNA/RNA"
  modified_base (1)..(1): bicyclic nucleic acid (BNA)
  modified_base (2)..(2): 5-methyl bicyclic nucleic acid
  modified_base (3)..(3): 5-methyl modified nucleotide
  modified_base (6)..(6): 5-methyl modified nucleotide
  modified_base (9)..(9): 5-methyl modified nucleotide
  modified_base (21)..(21): 5-methyl modified nucleotide
  modified_base (26)..(26): 5-methyl modified nucleotide
tccaacaucaaggaagauggcauuucuag

SEQ ID NO: 17723 - DNA, 28 bp, Artificial Sequence
  source: /note="Description of Artificial Sequence: Synthetic oligonucleotide"
  source: /note="Description of Combined DNA/RNA Molecule: Synthetic oligonucleotide"
  source: /note="DNA/RNA"
  modified_base (1)..(1): bicyclic nucleic acid (BNA)
  modified_base (2)..(2): 5-methyl bicyclic nucleic acid
  modified_base (3)..(3): 5-methyl modified nucleotide
  modified_base (6)..(6): 5-methyl modified nucleotide
  modified_base (9)..(9): 5-methyl modified nucleotide
  modified_base (21)..(21): 5-methyl modified nucleotide
  modified_base (26)..(26): 5-methyl modified nucleotide
tccaacaucaaggaagauggcauuucua

SEQ ID NO: 17724 - DNA, 27 bp, Artificial Sequence
  source: /note="Description of Artificial Sequence: Synthetic oligonucleotide"
  source: /note="Description of Combined DNA/RNA Molecule: Synthetic oligonucleotide"
  source: /note="DNA/RNA"
  modified_base (1)..(1): bicyclic nucleic acid (BNA)
  modified_base (2)..(2): 5-methyl bicyclic nucleic acid
  modified_base (3)..(3): 5-methyl modified nucleotide
  modified_base (6)..(6): 5-methyl modified nucleotide
  modified_base (9)..(9): 5-methyl modified nucleotide
  modified_base (21)..(21): 5-methyl modified nucleotide
  modified_base (26)..(26): 5-methyl modified nucleotide
tccaacaucaaggaagauggcauuucu

SEQ ID NO: 17725 - DNA, 26 bp, Artificial Sequence
  source: /note="Description of Artificial Sequence: Synthetic oligonucleotide"
  source: /note="Description of Combined DNA/RNA Molecule: Synthetic oligonucleotide"
  source: /note="DNA/RNA"
  modified_base (1)..(1): bicyclic nucleic acid (BNA)
  modified_base (2)..(2): 5-methyl bicyclic nucleic acid
  modified_base (3)..(3): 5-methyl modified nucleotide
  modified_base (6)..(6): 5-methyl modified nucleotide
  modified_base (9)..(9): 5-methyl modified nucleotide
  modified_base (21)..(21): 5-methyl modified nucleotide
  modified_base (26)..(26): 5-methyl modified nucleotide
tccaacaucaaggaagauggcauuuc

SEQ ID NO: 17726 - DNA, 25 bp, Artificial Sequence
  source: /note="Description of Artificial Sequence: Synthetic oligonucleotide"
  source: /note="Description of Combined DNA/RNA Molecule: Synthetic oligonucleotide"
  source: /note="DNA/RNA"
  modified_base (1)..(1): bicyclic nucleic acid (BNA)
  modified_base (2)..(2): 5-methyl bicyclic nucleic acid
  modified_base (3)..(3): 5-methyl modified nucleotide
  modified_base (6)..(6): 5-methyl modified nucleotide
  modified_base (9)..(9): 5-methyl modified nucleotide
  modified_base (21)..(21): 5-methyl modified nucleotide
tccaacaucaaggaagauggcauuu

SEQ ID NO: 17727 - DNA, 24 bp, Artificial Sequence
  source: /note="Description of Artificial Sequence: Synthetic oligonucleotide"
  source: /note="Description of Combined DNA/RNA Molecule: Synthetic oligonucleotide"
  source: /note="DNA/RNA"
  modified_base (1)..(1): bicyclic nucleic acid (BNA)
  modified_base (2)..(2): 5-methyl bicyclic nucleic acid
  modified_base (3)..(3): 5-methyl modified nucleotide
  modified_base (6)..(6): 5-methyl modified nucleotide
  modified_base (9)..(9): 5-methyl modified nucleotide
  modified_base (21)..(21): 5-methyl modified nucleotide
tccaacaucaaggaagauggcauu

SEQ ID NO: 17728 - DNA, 23 bp, Artificial Sequence
  source: /note="Description of Artificial Sequence: Synthetic oligonucleotide"
  source: /note="Description of Combined DNA/RNA Molecule: Synthetic oligonucleotide"
  source: /note="DNA/RNA"
  modified_base (1)..(1): bicyclic nucleic acid (BNA)
  modified_base (2)..(2): 5-methyl bicyclic nucleic acid
  modified_base (3)..(3): 5-methyl modified nucleotide
  modified_base (6)..(6): 5-methyl modified nucleotide
  modified_base (9)..(9): 5-methyl modified nucleotide
  modified_base (21)..(21): 5-methyl modified nucleotide
tccaacaucaaggaagauggcau

SEQ ID NO: 17729 - DNA, 22 bp, Artificial Sequence
  source: /note="Description of Artificial Sequence: Synthetic oligonucleotide"
  source: /note="Description of Combined DNA/RNA Molecule: Synthetic oligonucleotide"
  source: /note="DNA/RNA"
  modified_base (1)..(1): bicyclic nucleic acid (BNA)
  modified_base (2)..(2): 5-methyl bicyclic nucleic acid
  modified_base (3)..(3): 5-methyl modified nucleotide
  modified_base (6)..(6): 5-methyl modified nucleotide
  modified_base (9)..(9): 5-methyl modified nucleotide
  modified_base (21)..(21): 5-methyl modified nucleotide
tccaacaucaaggaagauggca

SEQ ID NO: 17730 - DNA, 21 bp, Artificial Sequence
  source: /note="Description of Artificial Sequence: Synthetic oligonucleotide"
  source: /note="Description of Combined DNA/RNA Molecule: Synthetic oligonucleotide"
  source: /note="DNA/RNA"
  modified_base (1)..(1): bicyclic nucleic acid (BNA)
  modified_base (2)..(2): 5-methyl bicyclic nucleic acid
  modified_base (3)..(3): 5-methyl modified nucleotide
  modified_base (6)..(6): 5-methyl modified nucleotide
  modified_base (9)..(9): 5-methyl modified nucleotide
  modified_base (21)..(21): 5-methyl modified nucleotide
tccaacaucaaggaagauggc

SEQ ID NO: 17731 - DNA, 20 bp, Artificial Sequence
  source: /note="Description of Artificial Sequence: Synthetic oligonucleotide"
  source: /note="Description of Combined DNA/RNA Molecule: Synthetic oligonucleotide"
  source: /note="DNA/RNA"
  modified_base (1)..(1): bicyclic nucleic acid (BNA)
  modified_base (2)..(2): 5-methyl bicyclic nucleic acid
  modified_base (3)..(3): 5-methyl modified nucleotide
  modified_base (6)..(6): 5-methyl modified nucleotide
  modified_base (9)..(9): 5-methyl modified nucleotide
tccaacaucaaggaagaugg

SEQ ID NO: 17732 - DNA, 19 bp, Artificial Sequence
  source: /note="Description of Artificial Sequence: Synthetic oligonucleotide"
  source: /note="Description of Combined DNA/RNA Molecule: Synthetic oligonucleotide"
  source: /note="DNA/RNA"
  modified_base (1)..(1): bicyclic nucleic acid (BNA)
  modified_base (2)..(2): 5-methyl bicyclic nucleic acid
  modified_base (3)..(3): 5-methyl modified nucleotide
  modified_base (6)..(6): 5-methyl modified nucleotide
  modified_base (9)..(9): 5-methyl modified nucleotide
tccaacaucaaggaagaug

SEQ ID NO: 17733 - DNA, 18 bp, Artificial Sequence
  source: /note="Description of Artificial Sequence: Synthetic oligonucleotide"
  source: /note="Description of Combined DNA/RNA Molecule: Synthetic oligonucleotide"
  source: /note="DNA/RNA"
  modified_base (1)..(1): bicyclic nucleic acid (BNA)
  modified_base (2)..(2): 5-methyl bicyclic nucleic acid
  modified_base (3)..(3): 5-methyl modified nucleotide
  modified_base (6)..(6): 5-methyl modified nucleotide
  modified_base (9)..(9): 5-methyl modified nucleotide
tccaacaucaaggaagau

SEQ ID NO: 17734 - DNA, 17 bp, Artificial Sequence
  source: /note="Description of Artificial Sequence: Synthetic oligonucleotide"
  source: /note="Description of Combined DNA/RNA Molecule: Synthetic oligonucleotide"
  source: /note="DNA/RNA"
  modified_base (1)..(1): bicyclic nucleic acid (BNA)
  modified_base (2)..(2): 5-methyl bicyclic nucleic acid
  modified_base (3)..(3): 5-methyl modified nucleotide
  modified_base (6)..(6): 5-methyl modified nucleotide
  modified_base (9)..(9): 5-methyl modified nucleotide
tccaacaucaaggaaga

SEQ ID NO: 17735 - DNA, 16 bp, Artificial Sequence
  source: /note="Description of Artificial Sequence: Synthetic oligonucleotide"
  source: /note="Description of Combined DNA/RNA Molecule: Synthetic oligonucleotide"
  source: /note="DNA/RNA"
  modified_base (1)..(1): bicyclic nucleic acid (BNA)
  modified_base (2)..(2): 5-methyl bicyclic nucleic acid
  modified_base (3)..(3): 5-methyl modified nucleotide
  modified_base (6)..(6): 5-methyl modified nucleotide
  modified_base (9)..(9): 5-methyl modified nucleotide
tccaacaucaaggaag

SEQ ID NO: 17736 - RNA, 28 nt, Artificial Sequence
  source: /note="Description of Artificial Sequence: Synthetic oligonucleotide"
  source: /note="RNA"
  modified_base (1)..(1): 5-methyl bicyclic nucleic acid
  modified_base (2)..(2): 5-methyl bicyclic nucleic acid
  modified_base (5)..(5): 5-methyl modified nucleotide
  modified_base (8)..(8): 5-methyl modified nucleotide
  modified_base (20)..(20): 5-methyl modified nucleotide
  modified_base (25)..(25): 5-methyl modified nucleotide
ccaacaucaaggaagauggcauuucuag

SEQ ID NO: 17737 - RNA, 27 nt, Artificial Sequence
  source: /note="Description of Artificial Sequence: Synthetic oligonucleotide"
  source: /note="RNA"
  modified_base (1)..(1): 5-methyl bicyclic nucleic acid
  modified_base (2)..(2): 5-methyl bicyclic nucleic acid
  modified_base (5)..(5): 5-methyl modified nucleotide
  modified_base (8)..(8): 5-methyl modified nucleotide
  modified_base (20)..(20): 5-methyl modified nucleotide
  modified_base (25)..(25): 5-methyl modified nucleotide
ccaacaucaaggaagauggcauuucua

SEQ ID NO: 17738 - RNA, 26 nt, Artificial Sequence
  source: /note="Description of Artificial Sequence: Synthetic oligonucleotide"
  source: /note="RNA"
  modified_base (1)..(1): 5-methyl bicyclic nucleic acid
  modified_base (2)..(2): 5-methyl bicyclic nucleic acid
  modified_base (5)..(5): 5-methyl modified nucleotide
  modified_base (8)..(8): 5-methyl modified nucleotide
  modified_base (20)..(20): 5-methyl modified nucleotide
  modified_base (25)..(25): 5-methyl modified nucleotide
ccaacaucaaggaagauggcauuucu

SEQ ID NO: 17739 - RNA, 25 nt, Artificial Sequence
  source: /note="Description of Artificial Sequence: Synthetic oligonucleotide"
  source: /note="RNA"
  modified_base (1)..(1): 5-methyl bicyclic nucleic acid
  modified_base (2)..(2): 5-methyl bicyclic nucleic acid
  modified_base (5)..(5): 5-methyl modified nucleotide
  modified_base (8)..(8): 5-methyl modified nucleotide
  modified_base (20)..(20): 5-methyl modified nucleotide
  modified_base (25)..(25): 5-methyl modified nucleotide
ccaacaucaaggaagauggcauuuc

SEQ ID NO: 17740 - RNA, 24 nt, Artificial Sequence
  source: /note="Description of Artificial Sequence: Synthetic oligonucleotide"
  source: /note="RNA"
  modified_base (1)..(1): 5-methyl bicyclic nucleic acid
  modified_base (2)..(2): 5-methyl bicyclic nucleic acid
  modified_base (5)..(5): 5-methyl modified nucleotide
  modified_base (8)..(8): 5-methyl modified nucleotide
  modified_base (20)..(20): 5-methyl modified nucleotide
ccaacaucaaggaagauggcauuu

SEQ ID NO: 17741 - RNA, 23 nt, Artificial Sequence
  source: /note="Description of Artificial Sequence: Synthetic oligonucleotide"
  source: /note="RNA"
  modified_base (1)..(1): 5-methyl bicyclic nucleic acid
  modified_base (2)..(2): 5-methyl bicyclic nucleic acid
  modified_base (5)..(5): 5-methyl modified nucleotide
  modified_base (8)..(8): 5-methyl modified nucleotide
  modified_base (20)..(20): 5-methyl modified nucleotide
ccaacaucaaggaagauggcauu

SEQ ID NO: 17742 - RNA, 22 nt, Artificial Sequence
  source: /note="Description of Artificial Sequence: Synthetic oligonucleotide"
  source: /note="RNA"
  modified_base (1)..(1): 5-methyl bicyclic nucleic acid
  modified_base (2)..(2): 5-methyl bicyclic nucleic acid
  modified_base (5)..(5): 5-methyl modified nucleotide
  modified_base (8)..(8): 5-methyl modified nucleotide
  modified_base (20)..(20): 5-methyl modified nucleotide
ccaacaucaaggaagauggcau

SEQ ID NO: 17743 - RNA, 21 nt, Artificial Sequence
  source: /note="Description of Artificial Sequence: Synthetic oligonucleotide"
  source: /note="RNA"
  modified_base (1)..(1): 5-methyl bicyclic nucleic acid
  modified_base (2)..(2): 5-methyl bicyclic nucleic acid
  modified_base (5)..(5): 5-methyl modified nucleotide
  modified_base (8)..(8): 5-methyl modified nucleotide
  modified_base (20)..(20): 5-methyl modified nucleotide
ccaacaucaaggaagauggca

SEQ ID NO: 17744 - RNA, 20 nt, Artificial Sequence
  source: /note="Description of Artificial Sequence: Synthetic oligonucleotide"
  source: /note="RNA"
  modified_base (1)..(1): 5-methyl bicyclic nucleic acid
  modified_base (2)..(2): 5-methyl bicyclic nucleic acid
  modified_base (5)..(5): 5-methyl modified nucleotide
  modified_base (8)..(8): 5-methyl modified nucleotide
  modified_base (20)..(20): 5-methyl modified nucleotide
ccaacaucaaggaagauggc

SEQ ID NO: 17745 - RNA, 19 nt, Artificial Sequence
  source: /note="Description of Artificial Sequence: Synthetic oligonucleotide"
  source: /note="RNA"
  modified_base (1)..(1): 5-methyl bicyclic nucleic acid
  modified_base (2)..(2): 5-methyl bicyclic nucleic acid
  modified_base (5)..(5): 5-methyl modified nucleotide
  modified_base (8)..(8): 5-methyl modified nucleotide
ccaacaucaaggaagaugg

SEQ ID NO: 17746 - RNA, 18 nt, Artificial Sequence
  source: /note="Description of Artificial Sequence: Synthetic oligonucleotide"
  source: /note="RNA"
  modified_base (1)..(1): 5-methyl bicyclic nucleic acid
  modified_base (2)..(2): 5-methyl bicyclic nucleic acid
  modified_base (5)..(5): 5-methyl modified nucleotide
  modified_base (8)..(8): 5-methyl modified nucleotide
ccaacaucaaggaagaug

SEQ ID NO: 17747 - RNA, 17 nt, Artificial Sequence
  source: /note="Description of Artificial Sequence: Synthetic oligonucleotide"
  source: /note="RNA"
  modified_base (1)..(1): 5-methyl bicyclic nucleic acid
  modified_base (2)..(2): 5-methyl bicyclic nucleic acid
  modified_base (5)..(5): 5-methyl modified nucleotide
  modified_base (8)..(8): 5-methyl modified nucleotide
ccaacaucaaggaagau

SEQ ID NO: 17748 - RNA, 16 nt, Artificial Sequence
  source: /note="Description of Artificial Sequence: Synthetic oligonucleotide"
  source: /note="RNA"
  modified_base (1)..(1): 5-methyl bicyclic nucleic acid
  modified_base (2)..(2): 5-methyl bicyclic nucleic acid
  modified_base (5)..(5): 5-methyl modified nucleotide
  modified_base (8)..(8): 5-methyl modified nucleotide
ccaacaucaaggaaga

SEQ ID NO: 17749 - RNA, 15 nt, Artificial Sequence
  source: /note="Description of Artificial Sequence: Synthetic oligonucleotide"
  source: /note="RNA"
  modified_base (1)..(1): 5-methyl bicyclic nucleic acid
  modified_base (2)..(2): 5-methyl bicyclic nucleic acid
  modified_base (5)..(5): 5-methyl modified nucleotide
  modified_base (8)..(8): 5-methyl modified nucleotide
ccaacaucaaggaag

SEQ ID NO: 17750 - RNA, 27 nt, Artificial Sequence
  source: /note="Description of Artificial Sequence: Synthetic oligonucleotide"
  source: /note="RNA"
  modified_base (1)..(1): 5-methyl bicyclic nucleic acid
  modified_base (2)..(2): bicyclic nucleic acid (BNA)
  modified_base (4)..(4): 5-methyl modified nucleotide
  modified_base (7)..(7): 5-methyl modified nucleotide
  modified_base (19)..(19): 5-methyl modified nucleotide
  modified_base (24)..(24): 5-methyl modified nucleotide
caacaucaaggaagauggcauuucuag

SEQ ID NO: 17751 - RNA, 26 nt, Artificial Sequence
  source: /note="Description of Artificial Sequence: Synthetic oligonucleotide"
  source: /note="RNA"
  modified_base (1)..(1): 5-methyl bicyclic nucleic acid
  modified_base (2)..(2): bicyclic nucleic acid (BNA)
  modified_base (4)..(4): 5-methyl modified nucleotide
  modified_base (7)..(7): 5-methyl modified nucleotide
  modified_base (19)..(19): 5-methyl modified nucleotide
  modified_base (24)..(24): 5-methyl modified nucleotide
caacaucaaggaagauggcauuucua

SEQ ID NO: 17752 - RNA, 25 nt, Artificial Sequence
  source: /note="Description of Artificial Sequence: Synthetic oligonucleotide"
  source: /note="RNA"
  modified_base (1)..(1): 5-methyl bicyclic nucleic acid
  modified_base (2)..(2): bicyclic nucleic acid (BNA)
  modified_base (4)..(4): 5-methyl modified nucleotide
  modified_base (7)..(7): 5-methyl modified nucleotide
  modified_base (19)..(19): 5-methyl modified nucleotide
  modified_base (24)..(24): 5-methyl modified nucleotide
caacaucaaggaagauggcauuucu

SEQ ID NO: 17753 - RNA, 24 nt, Artificial Sequence
  source: /note="Description of Artificial Sequence: Synthetic oligonucleotide"
  source: /note="RNA"
  modified_base (1)..(1): 5-methyl bicyclic nucleic acid
  modified_base (2)..(2): bicyclic nucleic acid (BNA)
  modified_base (4)..(4): 5-methyl modified nucleotide
  modified_base (7)..(7): 5-methyl modified nucleotide
  modified_base (19)..(19): 5-methyl modified nucleotide
  modified_base (24)..(24): 5-methyl modified nucleotide
caacaucaaggaagauggcauuuc

SEQ ID NO: 17754 - RNA, 23 nt, Artificial Sequence
  source: /note="Description of Artificial Sequence: Synthetic oligonucleotide"
  source: /note="RNA"
  modified_base (1)..(1): 5-methyl bicyclic nucleic acid
  modified_base (2)..(2): bicyclic nucleic acid (BNA)
  modified_base (4)..(4): 5-methyl modified nucleotide
  modified_base (7)..(7): 5-methyl modified nucleotide
  modified_base (19)..(19): 5-methyl modified nucleotide
caacaucaaggaagauggcauuu

SEQ ID NO: 17755 - RNA, 22 nt, Artificial Sequence
  source: /note="Description of Artificial Sequence: Synthetic oligonucleotide"
  source: /note="RNA"
  modified_base (1)..(1): 5-methyl bicyclic nucleic acid
  modified_base (2)..(2): bicyclic nucleic acid (BNA)
  modified_base (4)..(4): 5-methyl modified nucleotide
  modified_base (7)..(7): 5-methyl modified nucleotide
  modified_base (19)..(19): 5-methyl modified nucleotide
caacaucaaggaagauggcauu

SEQ ID NO: 17756 - RNA, 21 nt, Artificial Sequence
  source: /note="Description of Artificial Sequence: Synthetic oligonucleotide"
  source: /note="RNA"
  modified_base (1)..(1): 5-methyl bicyclic nucleic acid
  modified_base (2)..(2): bicyclic nucleic acid (BNA)
  modified_base (4)..(4): 5-methyl modified nucleotide
  modified_base (7)..(7): 5-methyl modified nucleotide
  modified_base (19)..(19): 5-methyl modified nucleotide
caacaucaaggaagauggcau

SEQ ID NO: 17757 - RNA, 20 nt, Artificial Sequence
  source: /note="Description of Artificial Sequence: Synthetic oligonucleotide"
  source: /note="RNA"
  modified_base (1)..(1): 5-methyl bicyclic nucleic acid
  modified_base (2)..(2): bicyclic nucleic acid (BNA)
  modified_base (4)..(4): 5-methyl modified nucleotide
  modified_base (7)..(7): 5-methyl modified nucleotide
  modified_base (19)..(19): 5-methyl modified nucleotide
caacaucaaggaagauggca

SEQ ID NO: 17758 - RNA, 19 nt, Artificial Sequence
  source: /note="Description of Artificial Sequence: Synthetic oligonucleotide"
  source: /note="RNA"
  modified_base (1)..(1): 5-methyl bicyclic nucleic acid
  modified_base (2)..(2): bicyclic nucleic acid (BNA)
  modified_base (4)..(4): 5-methyl modified nucleotide
  modified_base (7)..(7): 5-methyl modified nucleotide
  modified_base (19)..(19): 5-methyl modified nucleotide
caacaucaaggaagauggc

SEQ ID NO: 17759 - RNA, 18 nt, Artificial Sequence
  source: /note="Description of Artificial Sequence: Synthetic oligonucleotide"
  source: /note="RNA"
  modified_base (1)..(1): 5-methyl bicyclic nucleic acid
  modified_base (2)..(2): bicyclic nucleic acid (BNA)
  modified_base (4)..(4): 5-methyl modified nucleotide
  modified_base (7)..(7): 5-methyl modified nucleotide
caacaucaaggaagaugg

SEQ ID NO: 17760 - RNA, 17 nt, Artificial Sequence
  source: /note="Description of Artificial Sequence: Synthetic oligonucleotide"
  source: /note="RNA"
  modified_base (1)..(1): 5-methyl bicyclic nucleic acid
  modified_base (2)..(2): bicyclic nucleic acid (BNA)
  modified_base (4)..(4): 5-methyl modified nucleotide
  modified_base (7)..(7): 5-methyl modified nucleotide
caacaucaaggaagaug

SEQ ID NO: 17761 - RNA, 16 nt, Artificial Sequence
  source: /note="Description of Artificial Sequence: Synthetic oligonucleotide"
  source: /note="RNA"
  modified_base (1)..(1): 5-methyl bicyclic nucleic acid
  modified_base (2)..(2): bicyclic nucleic acid (BNA)
  modified_base (4)..(4): 5-methyl modified nucleotide
  modified_base (7)..(7): 5-methyl modified nucleotide
caacaucaaggaagau

SEQ ID NO: 17762 - RNA, 15 nt, Artificial Sequence
  source: /note="Description of Artificial Sequence: Synthetic oligonucleotide"
  source: /note="RNA"
  modified_base (1)..(1): 5-methyl bicyclic nucleic acid
  modified_base (2)..(2): bicyclic nucleic acid (BNA)
  modified_base (4)..(4): 5-methyl modified nucleotide
  modified_base (7)..(7): 5-methyl modified nucleotide
caacaucaaggaaga

SEQ ID NO: 17763 - RNA, 14 nt, Artificial Sequence
  source: /note="Description of Artificial Sequence: Synthetic oligonucleotide"
  source: /note="RNA"
  modified_base (1)..(1): 5-methyl bicyclic nucleic acid
  modified_base (2)..(2): bicyclic nucleic acid (BNA)
  modified_base (4)..(4): 5-methyl modified nucleotide
  modified_base (7)..(7): 5-methyl modified nucleotide
caacaucaaggaag

SEQ ID NO: 17764 - RNA, 26 nt, Artificial Sequence
  source: /note="Description of Artificial Sequence: Synthetic oligonucleotide"
  source: /note="RNA"
  modified_base (1)..(1): bicyclic nucleic acid (BNA)
  modified_base (2)..(2): bicyclic nucleic acid (BNA)
  modified_base (3)..(3): 5-methyl modified nucleotide
  modified_base (6)..(6): 5-methyl modified nucleotide
  modified_base (18)..(18): 5-methyl modified nucleotide
  modified_base (23)..(23): 5-methyl modified nucleotide
aacaucaaggaagauggcauuucuag

SEQ ID NO: 17765 - RNA, 25 nt, Artificial Sequence
  source: /note="Description of Artificial Sequence: Synthetic oligonucleotide"
  source: /note="RNA"
  modified_base (1)..(1): bicyclic nucleic acid (BNA)
  modified_base (2)..(2): bicyclic nucleic acid (BNA)
  modified_base (3)..(3): 5-methyl modified nucleotide
  modified_base (6)..(6): 5-methyl modified nucleotide
  modified_base (18)..(18): 5-methyl modified nucleotide
  modified_base (23)..(23): 5-methyl modified nucleotide
aacaucaaggaagauggcauuucua

SEQ ID NO: 17766 - RNA, 24 nt, Artificial Sequence
  source: /note="Description of Artificial Sequence: Synthetic oligonucleotide"
  source: /note="RNA"
  modified_base (1)..(1): bicyclic nucleic acid (BNA)
  modified_base (2)..(2): bicyclic nucleic acid (BNA)
  modified_base (3)..(3): 5-methyl modified nucleotide
  modified_base (6)..(6): 5-methyl modified nucleotide
  modified_base (18)..(18): 5-methyl modified nucleotide
  modified_base (23)..(23): 5-methyl modified nucleotide
aacaucaaggaagauggcauuucu

SEQ ID NO: 17767 - RNA, 23 nt, Artificial Sequence
  source: /note="Description of Artificial Sequence: Synthetic oligonucleotide"
  source: /note="RNA"
  modified_base (1)..(1): bicyclic nucleic acid (BNA)
  modified_base (2)..(2): bicyclic nucleic acid (BNA)
  modified_base (3)..(3): 5-methyl modified nucleotide
  modified_base (6)..(6): 5-methyl modified nucleotide
  modified_base (18)..(18): 5-methyl modified nucleotide
  modified_base (23)..(23): 5-methyl modified nucleotide
aacaucaaggaagauggcauuuc

SEQ ID NO: 17768 - RNA, 22 nt, Artificial Sequence
  source: /note="Description of Artificial Sequence: Synthetic oligonucleotide"
  source: /note="RNA"
  modified_base (1)..(1): bicyclic nucleic acid (BNA)
  modified_base (2)..(2): bicyclic nucleic acid (BNA)
  modified_base (3)..(3): 5-methyl modified nucleotide
  modified_base (6)..(6): 5-methyl modified nucleotide
  modified_base (18)..(18): 5-methyl modified nucleotide
aacaucaaggaagauggcauuu

SEQ ID NO: 17769 - RNA, 21 nt, Artificial Sequence
  source: /note="Description of Artificial Sequence: Synthetic oligonucleotide"
  source: /note="RNA"
  modified_base (1)..(1): bicyclic nucleic acid (BNA)
  modified_base (2)..(2): bicyclic nucleic acid (BNA)
  modified_base (3)..(3): 5-methyl modified nucleotide
  modified_base (6)..(6): 5-methyl modified nucleotide
  modified_base (18)..(18): 5-methyl modified nucleotide
aacaucaaggaagauggcauu

SEQ ID NO: 17770 - RNA, 20 nt, Artificial Sequence
  source: /note="Description of Artificial Sequence: Synthetic oligonucleotide"
  source: /note="RNA"
  modified_base (1)..(1): bicyclic nucleic acid (BNA)
  modified_base (2)..(2): bicyclic nucleic acid (BNA)
  modified_base (3)..(3): 5-methyl modified nucleotide
  modified_base (6)..(6): 5-methyl modified nucleotide
  modified_base (18)..(18): 5-methyl modified nucleotide
aacaucaaggaagauggcau

SEQ ID NO: 17771 - RNA, 19 nt, Artificial Sequence
  source: /note="Description of Artificial Sequence: Synthetic oligonucleotide"
  source: /note="RNA"
  modified_base (1)..(1): bicyclic nucleic acid (BNA)
  modified_base (2)..(2): bicyclic nucleic acid (BNA)
  modified_base (3)..(3): 5-methyl modified nucleotide
  modified_base (6)..(6): 5-methyl modified nucleotide
  modified_base (18)..(18): 5-methyl modified nucleotide
aacaucaaggaagauggca

SEQ ID NO: 17772 - RNA, 18 nt, Artificial Sequence
  source: /note="Description of Artificial Sequence: Synthetic oligonucleotide"
  source: /note="RNA"
  modified_base (1)..(1): bicyclic nucleic acid (BNA)
  modified_base (2)..(2): bicyclic nucleic acid (BNA)
  modified_base (3)..(3): 5-methyl modified nucleotide
  modified_base (6)..(6): 5-methyl modified nucleotide
  modified_base (18)..(18): 5-methyl modified nucleotide
aacaucaaggaagauggc

SEQ ID NO: 17773 - RNA, 17 nt, Artificial Sequence
  source: /note="Description of Artificial Sequence: Synthetic oligonucleotide"
  source: /note="RNA"
  modified_base (1)..(1): bicyclic nucleic acid (BNA)
  modified_base (2)..(2): bicyclic nucleic acid (BNA)
  modified_base (3)..(3): 5-methyl modified nucleotide
  modified_base (6)..(6): 5-methyl modified nucleotide
aacaucaaggaagaugg

SEQ ID NO: 17774 - RNA, 16 nt, Artificial Sequence
  source: /note="Description of Artificial Sequence: Synthetic oligonucleotide"
  source: /note="RNA"
  modified_base (1)..(1): bicyclic nucleic acid (BNA)
  modified_base (2)..(2): bicyclic nucleic acid (BNA)
  modified_base (3)..(3): 5-methyl modified nucleotide
  modified_base (6)..(6): 5-methyl modified nucleotide
aacaucaaggaagaug

SEQ ID NO: 17775 - RNA, 15 nt, Artificial Sequence
  source: /note="Description of Artificial Sequence: Synthetic oligonucleotide"
  source: /note="RNA"
  modified_base (1)..(1): bicyclic nucleic acid (BNA)
  modified_base (2)..(2): bicyclic nucleic acid (BNA)
  modified_base (3)..(3): 5-methyl modified nucleotide
  modified_base (6)..(6): 5-methyl modified nucleotide
aacaucaaggaagau

SEQ ID NO: 17776 - RNA, 14 nt, Artificial Sequence
  source: /note="Description of Artificial Sequence: Synthetic oligonucleotide"
  source: /note="RNA"
  modified_base (1)..(1): bicyclic nucleic acid (BNA)
  modified_base (2)..(2): bicyclic nucleic acid (BNA)
  modified_base (3)..(3): 5-methyl modified nucleotide
  modified_base (6)..(6): 5-methyl modified nucleotide
aacaucaaggaaga

SEQ ID NO: 17777 - RNA, 13 nt, Artificial Sequence
  source: /note="Description of Artificial Sequence: Synthetic oligonucleotide"
  source: /note="RNA"
  modified_base (1)..(1): bicyclic nucleic acid (BNA)
  modified_base (2)..(2): bicyclic nucleic acid (BNA)
  modified_base (3)..(3): 5-methyl modified nucleotide
  modified_base (6)..(6): 5-methyl modified nucleotide
aacaucaaggaag

SEQ ID NO: 17778 - RNA, 25 nt, Artificial Sequence
  source: /note="Description of Artificial Sequence: Synthetic oligonucleotide"
  source: /note="RNA"
  modified_base (1)..(1): bicyclic nucleic acid (BNA)
  modified_base (2)..(2): 5-methyl bicyclic nucleic acid
  modified_base (5)..(5): 5-methyl modified nucleotide
  modified_base (17)..(17): 5-methyl modified nucleotide
  modified_base (22)..(22): 5-methyl modified nucleotide
acaucaaggaagauggcauuucuag

SEQ ID NO: 17779 - RNA, 24 nt, Artificial Sequence
  source: /note="Description of Artificial Sequence: Synthetic oligonucleotide"
  source: /note="RNA"
  modified_base (1)..(1): bicyclic nucleic acid (BNA)
  modified_base (2)..(2): 5-methyl bicyclic nucleic acid
  modified_base (5)..(5): 5-methyl modified nucleotide
  modified_base (17)..(17): 5-methyl modified nucleotide
  modified_base (22)..(22): 5-methyl modified nucleotide
acaucaaggaagauggcauuucua

SEQ ID NO: 17780 - RNA, 23 nt, Artificial Sequence
  source: /note="Description of Artificial Sequence: Synthetic oligonucleotide"
  source: /note="RNA"
  modified_base (1)..(1): bicyclic nucleic acid (BNA)
  modified_base (2)..(2): 5-methyl bicyclic nucleic acid
  modified_base (5)..(5): 5-methyl modified nucleotide
  modified_base (17)..(17): 5-methyl modified nucleotide
  modified_base (22)..(22): 5-methyl modified nucleotide
acaucaaggaagauggcauuucu

SEQ ID NO: 17781 - RNA, 22 nt, Artificial Sequence
  source: /note="Description of Artificial Sequence: Synthetic oligonucleotide"
  source: /note="RNA"
  modified_base (1)..(1): bicyclic nucleic acid (BNA)
  modified_base (2)..(2): 5-methyl bicyclic nucleic acid
  modified_base (5)..(5): 5-methyl modified nucleotide
  modified_base (17)..(17): 5-methyl modified nucleotide
  modified_base (22)..(22): 5-methyl modified nucleotide
acaucaaggaagauggcauuuc

SEQ ID NO: 17782 - RNA, 21 nt, Artificial Sequence
  source: /note="Description of Artificial Sequence: Synthetic oligonucleotide"
  source: /note="RNA"
  modified_base (1)..(1): bicyclic nucleic acid (BNA)
  modified_base (2)..(2): 5-methyl bicyclic nucleic acid
  modified_base (5)..(5): 5-methyl modified nucleotide
  modified_base (17)..(17): 5-methyl modified nucleotide
acaucaaggaagauggcauuu

SEQ ID NO: 17783 - RNA, 20 nt, Artificial Sequence
  source: /note="Description of Artificial Sequence: Synthetic oligonucleotide"
  source: /note="RNA"
  modified_base (1)..(1): bicyclic nucleic acid (BNA)
  modified_base (2)..(2): 5-methyl bicyclic nucleic acid
  modified_base (5)..(5): 5-methyl modified nucleotide
  modified_base (17)..(17): 5-methyl modified nucleotide
acaucaaggaagauggcauu

SEQ ID NO: 17784 - RNA, 19 nt, Artificial Sequence
  source: /note="Description of Artificial Sequence: Synthetic oligonucleotide"
  source: /note="RNA"
  modified_base (1)..(1): bicyclic nucleic acid (BNA)
  modified_base (2)..(2): 5-methyl bicyclic nucleic acid
  modified_base (5)..(5): 5-methyl modified nucleotide
  modified_base (17)..(17): 5-methyl modified nucleotide
acaucaaggaagauggcau

SEQ ID NO: 17785 - RNA, 18 nt, Artificial Sequence
  source: /note="Description of Artificial Sequence: Synthetic oligonucleotide"
  source: /note="RNA"
  modified_base (1)..(1): bicyclic nucleic acid (BNA)
  modified_base (2)..(2): 5-methyl bicyclic nucleic acid
  modified_base (5)..(5): 5-methyl modified nucleotide
  modified_base (17)..(17): 5-methyl modified nucleotide
acaucaaggaagauggca

SEQ ID NO: 17786 - RNA, 17 nt, Artificial Sequence
  source: /note="Description of Artificial Sequence: Synthetic oligonucleotide"
  source: /note="RNA"
  modified_base (1)..(1): bicyclic nucleic acid (BNA)
  modified_base (2)..(2): 5-methyl bicyclic nucleic acid
  modified_base (5)..(5): 5-methyl modified nucleotide
  modified_base (17)..(17): 5-methyl modified nucleotide
acaucaaggaagauggc

SEQ ID NO: 17787 - RNA, 16 nt, Artificial Sequence
  source: /note="Description of Artificial Sequence: Synthetic oligonucleotide"
  source: /note="RNA"
  modified_base (1)..(1): bicyclic nucleic acid (BNA)
  modified_base (2)..(2): 5-methyl bicyclic nucleic acid
  modified_base (5)..(5): 5-methyl modified nucleotide
acaucaaggaagaugg

SEQ ID NO: 17788 - RNA, 15 nt, Artificial Sequence
  source: /note="Description of Artificial Sequence: Synthetic oligonucleotide"
  source: /note="RNA"
  modified_base (1)..(1): bicyclic nucleic acid (BNA)
  modified_base (2)..(2): 5-methyl bicyclic nucleic acid
  modified_base (5)..(5): 5-methyl modified nucleotide
acaucaaggaagaug

SEQ ID NO: 17789 - RNA, 14 nt, Artificial Sequence
  source: /note="Description of Artificial Sequence: Synthetic oligonucleotide"
  source: /note="RNA"
  modified_base (1)..(1): bicyclic nucleic acid (BNA)
  modified_base (2)..(2): 5-methyl bicyclic nucleic acid
  modified_base (5)..(5): 5-methyl modified nucleotide
acaucaaggaagau

SEQ ID NO: 17790 - RNA, 13 nt, Artificial Sequence
  source: /note="Description of Artificial Sequence: Synthetic oligonucleotide"
  source: /note="RNA"
  modified_base (1)..(1): bicyclic nucleic acid (BNA)
  modified_base (2)..(2): 5-methyl bicyclic nucleic acid
  modified_base (5)..(5): 5-methyl modified nucleotide
acaucaaggaaga

SEQ ID NO: 17791 - RNA, 12 nt, Artificial Sequence
  source: /note="Description of Artificial Sequence: Synthetic oligonucleotide"
  source: /note="RNA"
  modified_base (1)..(1): bicyclic nucleic acid (BNA)
  modified_base (2)..(2): 5-methyl bicyclic nucleic acid
  modified_base (5)..(5): 5-methyl modified nucleotide
acaucaaggaag

SEQ ID NO: 17792 - RNA, 24 nt, Artificial Sequence
  source: /note="Description of Artificial Sequence: Synthetic oligonucleotide"
  source: /note="RNA"
  modified_base (1)..(1): 5-methyl bicyclic nucleic acid
  modified_base (2)..(2): bicyclic nucleic acid (BNA)
  modified_base (4)..(4): 5-methyl modified nucleotide
  modified_base (16)..(16): 5-methyl modified nucleotide
  modified_base (21)..(21): 5-methyl modified nucleotide
caucaaggaagauggcauuucuag

SEQ ID NO: 17793 - RNA, 23 nt, Artificial Sequence
  source: /note="Description of Artificial Sequence: Synthetic oligonucleotide"
  source: /note="RNA"
  modified_base (1)..(1): 5-methyl bicyclic nucleic acid
  modified_base (2)..(2): bicyclic nucleic acid (BNA)
  modified_base (4)..(4): 5-methyl modified nucleotide
  modified_base (16)..(16): 5-methyl modified nucleotide
  modified_base (21)..(21): 5-methyl modified nucleotide
caucaaggaagauggcauuucua

SEQ ID NO: 17794 - RNA, 22 nt, Artificial Sequence
  source: /note="Description of Artificial Sequence: Synthetic oligonucleotide"
  source: /note="RNA"
  modified_base (1)..(1): 5-methyl bicyclic nucleic acid
  modified_base (2)..(2): bicyclic nucleic acid (BNA)
  modified_base (4)..(4): 5-methyl modified nucleotide
  modified_base (16)..(16): 5-methyl modified nucleotide
  modified_base (21)..(21): 5-methyl modified nucleotide
caucaaggaagauggcauuucu

SEQ ID NO: 17795 - RNA, 21 nt, Artificial Sequence
  source: /note="Description of Artificial Sequence: Synthetic oligonucleotide"
  source: /note="RNA"
  modified_base (1)..(1): 5-methyl bicyclic nucleic acid
  modified_base (2)..(2): bicyclic nucleic acid (BNA)
  modified_base (4)..(4): 5-methyl modified nucleotide
  modified_base (16)..(16): 5-methyl modified nucleotide
  modified_base (21)..(21): 5-methyl modified nucleotide
caucaaggaagauggcauuuc

SEQ ID NO: 17796 - RNA, 20 nt, Artificial Sequence
  source: /note="Description of Artificial Sequence: Synthetic oligonucleotide"
  source: /note="RNA"
  modified_base (1)..(1): 5-methyl bicyclic nucleic acid
  modified_base (2)..(2): bicyclic nucleic acid (BNA)
  modified_base (4)..(4): 5-methyl modified nucleotide
  modified_base (16)..(16): 5-methyl modified nucleotide
caucaaggaagauggcauuu

SEQ ID NO: 17797 - RNA, 19 nt, Artificial Sequence
  source: /note="Description of Artificial Sequence: Synthetic oligonucleotide"
  source: /note="RNA"
  modified_base (1)..(1): 5-methyl bicyclic nucleic acid
  modified_base (2)..(2): bicyclic nucleic acid (BNA)
  modified_base (4)..(4): 5-methyl modified nucleotide
  modified_base (16)..(16): 5-methyl modified nucleotide
caucaaggaagauggcauu

SEQ ID NO: 17798 - RNA, 18 nt, Artificial Sequence
  source: /note="Description of Artificial Sequence: Synthetic oligonucleotide"
  source: /note="RNA"
  modified_base (1)..(1): 5-methyl bicyclic nucleic acid
  modified_base (2)..(2): bicyclic nucleic acid (BNA)
  modified_base (4)..(4): 5-methyl modified nucleotide
  modified_base (16)..(16): 5-methyl modified nucleotide
caucaaggaagauggcau

SEQ ID NO: 17799 - RNA, 17 nt, Artificial Sequence
  source: /note="Description of Artificial Sequence: Synthetic oligonucleotide"
  source: /note="RNA"
  modified_base (1)..(1): 5-methyl bicyclic nucleic acid
  modified_base (2)..(2): bicyclic nucleic acid (BNA)
  modified_base (4)..(4): 5-methyl modified nucleotide
  modified_base (16)..(16): 5-methyl modified nucleotide
caucaaggaagauggca

SEQ ID NO: 17800 - RNA, 16 nt, Artificial Sequence
  source: /note="Description of Artificial Sequence: Synthetic oligonucleotide"
  source: /note="RNA"
  modified_base (1)..(1): 5-methyl bicyclic nucleic acid
  modified_base (2)..(2): bicyclic nucleic acid (BNA)
  modified_base (4)..(4): 5-methyl modified nucleotide
  modified_base (16)..(16): 5-methyl modified nucleotide
caucaaggaagauggc

SEQ ID NO: 17801 - RNA, 15 nt, Artificial Sequence
  source: /note="Description of Artificial Sequence: Synthetic oligonucleotide"
  source: /note="RNA"
  modified_base (1)..(1): 5-methyl bicyclic nucleic acid
  modified_base (2)..(2): bicyclic nucleic acid (BNA)
  modified_base (4)..(4): 5-methyl modified nucleotide
caucaaggaagaugg

SEQ ID NO: 17802 - RNA, 14 nt, Artificial Sequence
  source: /note="Description of Artificial Sequence: Synthetic oligonucleotide"
  source: /note="RNA"
  modified_base (1)..(1): 5-methyl bicyclic nucleic acid
  modified_base (2)..(2): bicyclic nucleic acid (BNA)
  modified_base (4)..(4): 5-methyl modified nucleotide
caucaaggaagaug

SEQ ID NO: 17803 - RNA, 13 nt, Artificial Sequence
  source: /note="Description of Artificial Sequence: Synthetic oligonucleotide"
  source: /note="RNA"
  modified_base (1)..(1): 5-methyl bicyclic nucleic acid
  modified_base (2)..(2): bicyclic nucleic acid (BNA)
  modified_base (4)..(4): 5-methyl modified nucleotide
caucaaggaagau

SEQ ID NO: 17804 - RNA, 12 nt, Artificial Sequence
  source: /note="Description of Artificial Sequence: Synthetic oligonucleotide"
  source: /note="RNA"
  modified_base (1)..(1): 5-methyl bicyclic nucleic acid
  modified_base (2)..(2): bicyclic nucleic acid (BNA)
  modified_base (4)..(4): 5-methyl modified nucleotide
caucaaggaaga

SEQ ID NO: 17805 - RNA, 11 nt, Artificial Sequence
  source: /note="Description of Artificial Sequence: Synthetic oligonucleotide"
  source: /note="RNA"
  modified_base (1)..(1): 5-methyl bicyclic nucleic acid
  modified_base (2)..(2): bicyclic nucleic acid (BNA)
  modified_base (4)..(4): 5-methyl modified nucleotide
caucaaggaag

SEQ ID NO: 17806 - DNA, 23 bp, Artificial Sequence
  source: /note="Description of Artificial Sequence: Synthetic oligonucleotide"
  source: /note="Description of Combined DNA/RNA Molecule: Synthetic oligonucleotide"
  source: /note="DNA/RNA"
  modified_base (1)..(1): bicyclic nucleic acid (BNA)
  modified_base (2)..(2): bicyclic nucleic acid (BNA)
  modified_base (3)..(3): 5-methyl modified nucleotide
  modified_base (15)..(15): 5-methyl modified nucleotide
  modified_base (20)..(20): 5-methyl modified nucleotide
atcaaggaagauggcauuucuag

SEQ ID NO: 17807 - DNA, 22 bp, Artificial Sequence
  source: /note="Description of Artificial Sequence: Synthetic oligonucleotide"
  source: /note="Description of Combined DNA/RNA Molecule: Synthetic oligonucleotide"
  source: /note="DNA/RNA"
  modified_base (1)..(1): bicyclic nucleic acid (BNA)
  modified_base (2)..(2): bicyclic nucleic acid (BNA)
  modified_base (3)..(3): 5-methyl modified nucleotide
  modified_base (15)..(15): 5-methyl modified nucleotide
  modified_base (20)..(20): 5-methyl modified nucleotide
atcaaggaagauggcauuucua

SEQ ID NO: 17808 - DNA, 21 bp, Artificial Sequence
  source: /note="Description of Artificial Sequence: Synthetic oligonucleotide"
  source: /note="Description of Combined DNA/RNA Molecule: Synthetic oligonucleotide"
  source: /note="DNA/RNA"
  modified_base (1)..(1): bicyclic nucleic acid (BNA)
  modified_base (2)..(2): bicyclic nucleic acid (BNA)
  modified_base (3)..(3): 5-methyl modified nucleotide
  modified_base (15)..(15): 5-methyl modified nucleotide
  modified_base (20)..(20): 5-methyl modified nucleotide
atcaaggaagauggcauuucu

SEQ ID NO: 17809 - DNA, 20 bp, Artificial Sequence
  source: /note="Description of Artificial Sequence: Synthetic oligonucleotide"
  source: /note="Description of Combined DNA/RNA Molecule: Synthetic oligonucleotide"
  source: /note="DNA/RNA"
  modified_base (1)..(1): bicyclic nucleic acid (BNA)
  modified_base (2)..(2): bicyclic nucleic acid (BNA)
  modified_base (3)..(3): 5-methyl modified nucleotide
  modified_base (15)..(15): 5-methyl modified nucleotide
  modified_base (20)..(20): 5-methyl modified nucleotide
atcaaggaagauggcauuuc

SEQ ID NO: 17810 - DNA, 19 bp, Artificial Sequence
  source: /note="Description of Artificial Sequence: Synthetic oligonucleotide"
  source: /note="Description of Combined DNA/RNA Molecule: Synthetic oligonucleotide"
  source: /note="DNA/RNA"
  modified_base (1)..(1): bicyclic nucleic acid (BNA)
  modified_base (2)..(2): bicyclic nucleic acid (BNA)
  modified_base (3)..(3): 5-methyl modified nucleotide
  modified_base (15)..(15): 5-methyl modified nucleotide
atcaaggaagauggcauuu

SEQ ID NO: 17811 - DNA, 18 bp, Artificial Sequence
  source: /note="Description of Artificial Sequence: Synthetic oligonucleotide"
  source: /note="Description of Combined DNA/RNA Molecule: Synthetic oligonucleotide"
  source: /note="DNA/RNA"
  modified_base (1)..(1): bicyclic nucleic acid (BNA)
  modified_base (2)..(2): bicyclic nucleic acid (BNA)
  modified_base (3)..(3): 5-methyl modified nucleotide
  modified_base (15)..(15): 5-methyl modified nucleotide
atcaaggaagauggcauu

SEQ ID NO: 17812 - DNA, 17 bp, Artificial Sequence
  source: /note="Description of Artificial Sequence: Synthetic oligonucleotide"
  source: /note="Description of Combined DNA/RNA Molecule: Synthetic oligonucleotide"
  source: /note="DNA/RNA"
  modified_base (1)..(1): bicyclic nucleic acid (BNA)
  modified_base (2)..(2): bicyclic nucleic acid (BNA)
  modified_base (3)..(3): 5-methyl modified nucleotide
  modified_base (15)..(15): 5-methyl modified nucleotide
atcaaggaagauggcau

SEQ ID NO: 17813 - DNA, 16 bp, Artificial Sequence
  source: /note="Description of Artificial Sequence: Synthetic oligonucleotide"
  source: /note="Description of Combined DNA/RNA Molecule: Synthetic oligonucleotide"
  source: /note="DNA/RNA"
  modified_base (1)..(1): bicyclic nucleic acid (BNA)
  modified_base (2)..(2): bicyclic nucleic acid (BNA)
  modified_base (3)..(3): 5-methyl modified nucleotide
  modified_base (15)..(15): 5-methyl modified nucleotide
atcaaggaagauggca

SEQ ID NO: 17814 - DNA, 15 bp, Artificial Sequence
  source: /note="Description of Artificial Sequence: Synthetic oligonucleotide"
  source: /note="Description of Combined DNA/RNA Molecule: Synthetic oligonucleotide"
  source: /note="DNA/RNA"
  modified_base (1)..(1): bicyclic nucleic acid (BNA)
  modified_base (2)..(2): bicyclic nucleic acid (BNA)
  modified_base (3)..(3): 5-methyl modified nucleotide
  modified_base (15)..(15): 5-methyl modified nucleotide
atcaaggaagauggc

SEQ ID NO: 17815 - DNA, 14 bp, Artificial Sequence
  source: /note="Description of Artificial Sequence: Synthetic oligonucleotide"
  source: /note="Description of Combined DNA/RNA Molecule: Synthetic oligonucleotide"
  source: /note="DNA/RNA"
  modified_base (1)..(1): bicyclic nucleic acid (BNA)
  modified_base (2)..(2): bicyclic nucleic acid (BNA)
  modified_base (3)..(3): 5-methyl modified nucleotide
atcaaggaagaugg

SEQ ID NO: 17816 - DNA, 13 bp, Artificial Sequence
  source: /note="Description of Artificial Sequence: Synthetic oligonucleotide"
  source: /note="Description of Combined DNA/RNA Molecule: Synthetic oligonucleotide"
  source: /note="DNA/RNA"
  modified_base (1)..(1): bicyclic nucleic acid (BNA)
  modified_base (2)..(2): bicyclic nucleic acid (BNA)
  modified_base (3)..(3): 5-methyl modified nucleotide
atcaaggaagaug

SEQ ID NO: 17817 - DNA, 12 bp, Artificial Sequence
  source: /note="Description of Artificial Sequence: Synthetic oligonucleotide"
  source: /note="Description of Combined DNA/RNA Molecule: Synthetic oligonucleotide"
  source: /note="DNA/RNA"
  modified_base (1)..(1): bicyclic nucleic acid (BNA)
  modified_base (2)..(2): bicyclic nucleic acid (BNA)
  modified_base (3)..(3): 5-methyl modified nucleotide
atcaaggaagau

SEQ ID NO: 17818 - DNA, 11 bp, Artificial Sequence
  source: /note="Description of Artificial Sequence: Synthetic oligonucleotide"
  source: /note="DNA/RNA"
  modified_base (1)..(1): bicyclic nucleic acid (BNA)
  modified_base (2)..(2): bicyclic nucleic acid (BNA)
  modified_base (3)..(3): 5-methyl modified nucleotide
atcaaggaaga

SEQ ID NO: 17819 - DNA, 10 bp, Artificial Sequence
  source: /note="Description of Artificial Sequence: Synthetic oligonucleotide"
  source: /note="DNA/RNA"
  modified_base (1)..(1): bicyclic nucleic acid (BNA)
  modified_base (2)..(2): bicyclic nucleic acid (BNA)
  modified_base (3)..(3): 5-methyl modified nucleotide
atcaaggaag

SEQ ID NO: 17820 - RNA, 23 nt, Artificial Sequence
  source: /note="Description of Artificial Sequence: Synthetic oligonucleotide"
  source: /note="RNA"
  modified_base (1)..(1): 5-methyl bicyclic nucleic acid
  modified_base (2)..(2): 5-methyl bicyclic nucleic acid
  modified_base (7)..(7): 5-methyl modified nucleotide
  modified_base (13)..(13): 5-methyl modified nucleotide
  modified_base (14)..(14): 5-methyl modified nucleotide
  modified_base (16)..(16): 5-methyl modified nucleotide
  modified_base (17)..(17): 5-methyl modified nucleotide
  modified_base (20)..(20): 5-methyl modified nucleotide
  modified_base (23)..(23): 5-methyl modified nucleotide
ccagagcagguaccuccaacauc

SEQ ID NO: 17821 - RNA, 18 nt, Artificial Sequence
  source: /note="Description of Artificial Sequence: Synthetic oligonucleotide"
  source: /note="RNA"
  modified_base (1)..(1): 5-methyl bicyclic nucleic acid
  modified_base (2)..(2): 5-methyl bicyclic nucleic acid
  modified_base (7)..(7): 5-methyl modified nucleotide
  modified_base (13)..(13): 5-methyl modified nucleotide
  modified_base (14)..(14): 5-methyl modified nucleotide
  modified_base (16)..(16): 5-methyl modified nucleotide
  modified_base (17)..(17): 5-methyl modified nucleotide
ccagagcagguaccucca

SEQ ID NO: 17822 - RNA, 23 nt, Artificial Sequence
  source: /note="Description of Artificial Sequence: Synthetic oligonucleotide"
  source: /note="RNA"
  modified_base (1)..(1): 5-methyl bicyclic nucleic acid
  modified_base (2)..(2): 5-methyl bicyclic nucleic acid
  modified_base (4)..(4): 5-methyl modified nucleotide
  modified_base (18)..(18): 5-methyl modified nucleotide
ccucugugauuuuauaacuugau

SEQ ID NO: 17823 - DNA, 17 bp, Artificial Sequence
  source: /note="Description of Artificial Sequence: Synthetic oligonucleotide"
  source: /note="Description of Combined DNA/RNA Molecule: Synthetic oligonucleotide"
  source: /note="DNA/RNA"
  modified_base (1)..(1): bicyclic nucleic acid (BNA)
  modified_base (2)..(2): 5-methyl bicyclic nucleic acid
  modified_base (4)..(4): 5-methyl modified nucleotide
  modified_base (5)..(5): 5-methyl modified nucleotide
  modified_base (6)..(6): 5-methyl modified nucleotide
  modified_base (8)..(8): 5-methyl modified nucleotide
  modified_base (9)..(9): 5-methyl modified nucleotide
  modified_base (12)..(12): 5-methyl modified nucleotide
  modified_base (14)..(14): 5-methyl modified nucleotide
  modified_base (15)..(15): 5-methyl modified nucleotide
  modified_base (16)..(16): 5-methyl modified nucleotide
tcacccaccaucacccu

SEQ ID NO: 17824 - DNA, 20 bp, Artificial Sequence
  source: /note="Description of Artificial Sequence: Synthetic oligonucleotide"
  source: /note="Description of Combined DNA/RNA Molecule: Synthetic oligonucleotide"
  source: /note="DNA/RNA"
  modified_base (1)..(1): bicyclic nucleic acid (BNA)
  modified_base (2)..(2): bicyclic nucleic acid (BNA)
  modified_base (7)..(7): 5-methyl modified nucleotide
  modified_base (8)..(8): 5-methyl modified nucleotide
  modified_base (10)..(10): 5-methyl modified nucleotide
  modified_base (16)..(16): 5-methyl modified nucleotide
  modified_base (18)..(18): 5-methyl modified nucleotide
  modified_base (19)..(19): 5-methyl modified nucleotide
  modified_base (20)..(20): 5-methyl modified nucleotide
tgauauccucaaggucaccc

SEQ ID NO: 17825 - DNA, 22 bp, Artificial Sequence
  source: /note="Description of Artificial Sequence: Synthetic oligonucleotide"
  source: /note="Description of Combined DNA/RNA Molecule: Synthetic oligonucleotide"
  source: /note="DNA/RNA"
  modified_base (1)..(1): 5-methyl bicyclic nucleic acid
  modified_base (2)..(2): bicyclic nucleic acid (BNA)
  modified_base (4)..(4): 5-methyl modified nucleotide
  modified_base (13)..(13): 5-methyl modified nucleotide
  modified_base (16)..(16): 5-methyl modified nucleotide
  modified_base (18)..(18): 5-methyl modified nucleotide
ctgcuugaugaucaucucguug

SEQ ID NO: 17826 - DNA, 18 bp, Artificial Sequence
  source: /note="Description of Artificial Sequence: Synthetic oligonucleotide"
  source: /note="Description of Combined DNA/RNA Molecule: Synthetic oligonucleotide"
  source: /note="DNA/RNA"
  modified_base (1)..(1): 5-methyl bicyclic nucleic acid
  modified_base (2)..(2): bicyclic nucleic acid (BNA)
  modified_base (4)..(4): 5-methyl modified nucleotide
  modified_base (13)..(13): 5-methyl modified nucleotide
  modified_base (16)..(16): 5-methyl modified nucleotide
  modified_base (18)..(18): 5-methyl modified nucleotide
ctgcuugaugaucaucuc

SEQ ID NO: 17827 - DNA, 19 bp, Artificial Sequence
  source: /note="Description of Artificial Sequence: Synthetic oligonucleotide"
  source: /note="Description of Combined DNA/RNA Molecule: Synthetic oligonucleotide"
  source: /note="DNA/RNA"
  modified_base (1)..(1): bicyclic nucleic acid (BNA)
  modified_base (2)..(2): bicyclic nucleic acid (BNA)
  modified_base (5)..(5): 5-methyl modified nucleotide
  modified_base (6)..(6): 5-methyl modified nucleotide
  modified_base (14)..(14): 5-methyl modified nucleotide
  modified_base (15)..(15): 5-methyl modified nucleotide
  modified_base (17)..(17): 5-methyl modified nucleotide
gtuuccuuaguaaccacag

SEQ ID NO: 17828 - DNA, 17 bp, Artificial Sequence
  source: /note="Description of Artificial Sequence: Synthetic oligonucleotide"
  source: /note="Description of Combined DNA/RNA Molecule: Synthetic oligonucleotide"
  source: /note="DNA/RNA"
  modified_base (1)..(1): bicyclic nucleic acid (BNA)
  modified_base (2)..(2): bicyclic nucleic acid (BNA)
  modified_base (5)..(5): 5-methyl modified nucleotide
  modified_base (6)..(6): 5-methyl modified nucleotide
  modified_base (14)..(14): 5-methyl modified nucleotide
  modified_base (15)..(15): 5-methyl modified nucleotide
  modified_base (17)..(17): 5-methyl modified nucleotide
gtuuccuuaguaaccac

SEQ ID NO: 17829 - DNA, 20 bp, Artificial Sequence
  source: /note="Description of Artificial Sequence: Synthetic oligonucleotide"
  source: /note="Description of Combined DNA/RNA Molecule: Synthetic oligonucleotide"
  source: /note="DNA/RNA"
  source: /note="5' tri-ethylene glycol (TEG)"
  modified_base (1)..(1): bicyclic nucleic acid (BNA)
  modified_base (2)..(2): 5-methyl bicyclic nucleic acid
  modified_base (14)..(14): 5-methyl modified nucleotide
  modified_base (19)..(19): 5-methyl modified nucleotide
tcaaggaagauggcauuucu

SEQ ID NO: 17830 - DNA, 22 bp, Artificial Sequence
  source: /note="Description of Artificial Sequence: Synthetic oligonucleotide"
  source: /note="Description of Combined DNA/RNA Molecule: Synthetic oligonucleotide"
  source: /note="DNA/RNA"
  source: /note="5' tri-ethylene glycol (TEG)"
  modified_base (1)..(1): bicyclic nucleic acid (BNA)
  modified_base (2)..(2): 5-methyl bicyclic nucleic acid
  modified_base (14)..(14): 5-methyl modified nucleotide
  modified_base (19)..(19): 5-methyl modified nucleotide
tcaaggaagauggcauuucuag

SEQ ID NO: 17831 - RNA, 18 nt, Artificial Sequence
  source: /note="Description of Artificial Sequence: Synthetic oligonucleotide"
  source: /note="RNA"
  source: /note="5' tri-ethylene glycol (TEG)"
  modified_base (1)..(1): bicyclic nucleic acid (BNA)
  modified_base (2)..(2): bicyclic nucleic acid (BNA)
  modified_base (9)..(9): 5-methyl modified nucleotide
  modified_base (13)..(13): 5-methyl modified nucleotide
  modified_base (14)..(14): 5-methyl modified nucleotide
  modified_base (18)..(18): 5-methyl modified nucleotide
gguaaguucuguccaagc

SEQ ID NO: 17832 - DNA, 18 bp, Artificial Sequence
  source: /note="Description of Artificial Sequence: Synthetic oligonucleotide"
  source: /note="Description of Combined DNA/RNA Molecule: Synthetic oligonucleotide"
  source: /note="DNA/RNA"
  source: /note="5' tri-ethylene glycol (TEG)"
  modified_base (1)..(1): bicyclic nucleic acid (BNA)
  modified_base (2)..(2): bicyclic nucleic acid (BNA)
  modified_base (8)..(8): 5-methyl modified nucleotide
  modified_base (12)..(12): 5-methyl modified nucleotide
  modified_base (13)..(13): 5-methyl modified nucleotide
  modified_base (17)..(17): 5-methyl modified nucleotide
  modified_base (18)..(18): 5-methyl modified nucleotide
gtaaguucuguccaagcc

SEQ ID NO: 17833 - RNA, 18 nt, Artificial Sequence
  source: /note="Description of Artificial Sequence: Synthetic oligonucleotide"
  source: /note="RNA"
  source: /note="5' tri-ethylene glycol (TEG)"
  modified_base (1)..(1): bicyclic nucleic acid (BNA)
  modified_base (2)..(2): bicyclic nucleic acid (BNA)
  modified_base (4)..(4): 5-methyl modified nucleotide
  modified_base (13)..(13): 5-methyl modified nucleotide
  modified_base (17)..(17): 5-methyl modified nucleotide
  modified_base (18)..(18): 5-methyl modified nucleotide
agucgguaaguucugucc

SEQ ID NO: 17834 - DNA, 18 bp, Artificial Sequence
  source: /note="Description of Artificial Sequence: Synthetic oligonucleotide"
  source: /note="Description of Combined DNA/RNA Molecule: Synthetic oligonucleotide"
  source: /note="DNA/RNA"
  source: /note="5' tri-ethylene glycol (TEG)"
  modified_base (1)..(1): 5-methyl bicyclic nucleic acid
  modified_base (2)..(2): bicyclic nucleic acid (BNA)
  modified_base (5)..(5): 5-methyl modified nucleotide
  modified_base (6)..(6): 5-methyl modified nucleotide
  modified_base (10)..(10): 5-methyl modified nucleotide
  modified_base (11)..(11): 5-methyl modified nucleotide
  modified_base (12)..(12): 5-methyl modified nucleotide
ctguccaagcccgguuga

SEQ ID NO: 17835 - DNA, 15 bp, Artificial Sequence
  source: /note="Description of Artificial Sequence: Synthetic oligonucleotide"
  source: /note="Description of Combined DNA/RNA Molecule: Synthetic oligonucleotide"
  source: /note="DNA/RNA"
  source: /note="5' tri-ethylene glycol (TEG)"
  modified_base (1)..(1): bicyclic nucleic acid (BNA)
  modified_base (2)..(2): bicyclic nucleic acid (BNA)
  modified_base (7)..(7): 5-methyl modified nucleotide
  modified_base (11)..(11): 5-methyl modified nucleotide
  modified_base (12)..(12): 5-methyl modified nucleotide
taaguucuguccaag

SEQ ID NO: 17836 - DNA, 20 bp, Artificial Sequence
  source: /note="Description of Artificial Sequence: Synthetic oligonucleotide"
  source: /note="Description of Combined DNA/RNA Molecule: Synthetic oligonucleotide"
  source: /note="DNA/RNA"
  source: /note="5' tri-ethylene glycol (TEG)"
  modified_base (1)..(1): bicyclic nucleic acid (BNA)
  modified_base (2)..(2): bicyclic nucleic acid (BNA)
  modified_base (3)..(3): 5-methyl modified nucleotide
  modified_base (7)..(7): 5-methyl modified nucleotide
  modified_base (8)..(8): 5-methyl modified nucleotide
  modified_base (12)..(12): 5-methyl modified nucleotide
  modified_base (13)..(13): 5-methyl modified nucleotide
  modified_base (14)..(14): 5-methyl modified nucleotide
ttcuguccaagcccgguuga

SEQ ID NO: 17837 - DNA, 19 bp, Artificial Sequence
  source: /note="Description of Artificial Sequence: Synthetic oligonucleotide"
  source: /note="Description of Combined DNA/RNA Molecule: Synthetic oligonucleotide"
  source: /note="DNA/RNA"
  source: /note="5' tri-ethylene glycol (TEG)"
  modified_base (1)..(1): bicyclic nucleic acid (BNA)
  modified_base (2)..(2): bicyclic nucleic acid (BNA)
  modified_base (3)..(3): 5-methyl modified nucleotide
  modified_base (7)..(7): 5-methyl modified nucleotide
  modified_base (8)..(8): 5-methyl modified nucleotide
  modified_base (12)..(12): 5-methyl modified nucleotide
  modified_base (13)..(13): 5-methyl modified nucleotide
  modified_base (14)..(14): 5-methyl modified nucleotide
ttcuguccaagcccgguug

SEQ ID NO: 17838 - DNA, 18 bp, Artificial Sequence
  source: /note="Description of Artificial Sequence: Synthetic oligonucleotide"
  source: /note="Description of Combined DNA/RNA Molecule: Synthetic oligonucleotide"
  source: /note="DNA/RNA"
  source: /note="5' tri-ethylene glycol (TEG)"
  modified_base (1)..(1): bicyclic nucleic acid (BNA)
  modified_base (2)..(2): bicyclic nucleic acid (BNA)
  modified_base (3)..(3): 5-methyl modified nucleotide
  modified_base (7)..(7): 5-methyl modified nucleotide
  modified_base (8)..(8): 5-methyl modified nucleotide
  modified_base (12)..(12): 5-methyl modified nucleotide
  modified_base (13)..(13): 5-methyl modified nucleotide
  modified_base (14)..(14): 5-methyl modified nucleotide
ttcuguccaagcccgguu

SEQ ID NO: 17839 - DNA, 17 bp, Artificial Sequence
  source: /note="Description of Artificial Sequence: Synthetic oligonucleotide"
  source: /note="Description of Combined DNA/RNA Molecule: Synthetic oligonucleotide"
  source: /note="DNA/RNA"
  source: /note="5' tri-ethylene glycol (TEG)"
  modified_base (1)..(1): bicyclic nucleic acid (BNA)
  modified_base (2)..(2): bicyclic nucleic acid (BNA)
  modified_base (3)..(3): 5-methyl modified nucleotide
  modified_base (7)..(7): 5-methyl modified nucleotide
  modified_base (8)..(8): 5-methyl modified nucleotide
  modified_base (12)..(12): 5-methyl modified nucleotide
  modified_base (13)..(13): 5-methyl modified nucleotide
  modified_base (14)..(14): 5-methyl modified nucleotide
ttcuguccaagcccggu

SEQ ID NO: 17840 - DNA, 16 bp, Artificial Sequence
  source: /note="Description of Artificial Sequence: Synthetic oligonucleotide"
  source: /note="Description of Combined DNA/RNA Molecule: Synthetic oligonucleotide"
  source: /note="DNA/RNA"
  source: /note="5' tri-ethylene glycol (TEG)"
  modified_base (1)..(1): bicyclic nucleic acid (BNA)
  modified_base (2)..(2): bicyclic nucleic acid (BNA)
  modified_base (3)..(3): 5-methyl modified nucleotide
  modified_base (7)..(7): 5-methyl modified nucleotide
  modified_base (8)..(8): 5-methyl modified nucleotide
  modified_base (12)..(12): 5-methyl modified nucleotide
  modified_base (13)..(13): 5-methyl modified nucleotide
  modified_base (14)..(14): 5-methyl modified nucleotide
ttcuguccaagcccgg

SEQ ID NO: 17841 - DNA, 15 bp, Artificial Sequence
  source: /note="Description of Artificial Sequence: Synthetic oligonucleotide"
  source: /note="Description of Combined DNA/RNA Molecule: Synthetic oligonucleotide"
  source: /note="DNA/RNA"
  source: /note="5' tri-ethylene glycol (TEG)"
  modified_base (1)..(1): bicyclic nucleic acid (BNA)
  modified_base (2)..(2): bicyclic nucleic acid (BNA)
  modified_base (3)..(3): 5-methyl modified nucleotide
  modified_base (7)..(7): 5-methyl modified nucleotide
  modified_base (8)..(8): 5-methyl modified nucleotide
  modified_base (12)..(12): 5-methyl modified nucleotide
  modified_base (13)..(13): 5-methyl modified nucleotide
  modified_base (14)..(14): 5-methyl modified nucleotide
ttcuguccaagcccg

SEQ ID NO: 17842 - DNA, 14 bp, Artificial Sequence
  source: /note="Description of Artificial Sequence: Synthetic oligonucleotide"
  source: /note="Description of Combined DNA/RNA Molecule: Synthetic oligonucleotide"
  source: /note="DNA/RNA"
  source: /note="5' tri-ethylene glycol (TEG)"
  modified_base (1)..(1): bicyclic nucleic acid (BNA)
  modified_base (2)..(2): bicyclic nucleic acid (BNA)
  modified_base (3)..(3): 5-methyl modified nucleotide
  modified_base (7)..(7): 5-methyl modified nucleotide
  modified_base (8)..(8): 5-methyl modified nucleotide
  modified_base (12)..(12): 5-methyl modified nucleotide
  modified_base (13)..(13): 5-methyl modified nucleotide
  modified_base (14)..(14): 5-methyl modified nucleotide
ttcuguccaagccc

SEQ ID NO: 17843 - DNA, 13 bp, Artificial Sequence
  source: /note="Description of Artificial Sequence: Synthetic oligonucleotide"
  source: /note="Description of Combined DNA/RNA Molecule: Synthetic oligonucleotide"
  source: /note="DNA/RNA"
  source: /note="5' tri-ethylene glycol (TEG)"
  modified_base (1)..(1): bicyclic nucleic acid (BNA)
  modified_base (2)..(2): bicyclic nucleic acid (BNA)
  modified_base (3)..(3): 5-methyl modified nucleotide
  modified_base (7)..(7): 5-methyl modified nucleotide
  modified_base (8)..(8): 5-methyl modified nucleotide
  modified_base (12)..(12): 5-methyl modified nucleotide
  modified_base (13)..(13): 5-methyl modified nucleotide
ttcuguccaagcc

SEQ ID NO: 17844 - DNA, 12 bp, Artificial Sequence
  source: /note="Description of Artificial Sequence: Synthetic oligonucleotide"
  source: /note="Description of Combined DNA/RNA Molecule: Synthetic oligonucleotide"
  source: /note="DNA/RNA"
  source: /note="5' tri-ethylene glycol (TEG)"
  modified_base (1)..(1): bicyclic nucleic acid (BNA)
  modified_base (2)..(2): bicyclic nucleic acid (BNA)
  modified_base (3)..(3): 5-methyl modified nucleotide
  modified_base (7)..(7): 5-methyl modified nucleotide
  modified_base (8)..(8): 5-methyl modified nucleotide
  modified_base (12)..(12): 5-methyl modified nucleotide
ttcuguccaagc

SEQ ID NO: 17845 - DNA, 11 bp, Artificial Sequence
  source: /note="Description of Artificial Sequence: Synthetic oligonucleotide"
  source: /note="Description of Combined DNA/RNA Molecule: Synthetic oligonucleotide"
  source: /note="DNA/RNA"
  source: /note="5' tri-ethylene glycol (TEG)"
  modified_base (1)..(1): bicyclic nucleic acid (BNA)
  modified_base (2)..(2): bicyclic nucleic acid (BNA)
  modified_base (3)..(3): 5-methyl modified nucleotide
  modified_base (7)..(7): 5-methyl modified nucleotide
  modified_base (8)..(8): 5-methyl modified nucleotide
ttcuguccaag

SEQ ID NO: 17846 - DNA, 10 bp, Artificial Sequence
  source: /note="Description of Artificial Sequence: Synthetic oligonucleotide"
  source: /note="Description of Combined DNA/RNA Molecule: Synthetic oligonucleotide"
  source: /note="DNA/RNA"
  source: /note="5' tri-ethylene glycol (TEG)"
  modified_base (1)..(1): bicyclic nucleic acid (BNA)
  modified_base (2)..(2): bicyclic nucleic acid (BNA)
  modified_base (3)..(3): 5-methyl modified nucleotide
  modified_base (7)..(7): 5-methyl modified nucleotide
  modified_base (8)..(8): 5-methyl modified nucleotide
ttcuguccaa

SEQ ID NO: 17847 - DNA, 9 bp, Artificial Sequence
  source: /note="Description of Artificial Sequence: Synthetic oligonucleotide"
  source: /note="Description of Combined DNA/RNA Molecule: Synthetic oligonucleotide"
  source: /note="DNA/RNA"
  source: /note="5' tri-ethylene glycol (TEG)"
  modified_base (1)..(1): bicyclic nucleic acid (BNA)
  modified_base (2)..(2): bicyclic nucleic acid (BNA)
  modified_base (3)..(3): 5-methyl modified nucleotide
  modified_base (7)..(7): 5-methyl modified nucleotide
  modified_base (8)..(8): 5-methyl modified nucleotide
ttcugucca

SEQ ID NO: 17848 - DNA, 8 bp, Artificial Sequence
  source: /note="Description of Artificial Sequence: Synthetic oligonucleotide"
  source: /note="Description of Combined DNA/RNA Molecule: Synthetic oligonucleotide"
  source: /note="DNA/RNA"
  source: /note="5' tri-ethylene glycol (TEG)"
  modified_base (1)..(1): bicyclic nucleic acid (BNA)
  modified_base (2)..(2): bicyclic nucleic acid (BNA)
  modified_base (3)..(3): 5-methyl modified nucleotide
  modified_base (7)..(7): 5-methyl modified nucleotide
  modified_base (8)..(8): 5-methyl modified nucleotide
ttcugucc

SEQ ID NO: 17849 - DNA, 19 bp, Artificial Sequence
  source: /note="Description of Artificial Sequence: Synthetic oligonucleotide"
  source: /note="Description of Combined DNA/RNA Molecule: Synthetic oligonucleotide"
  source: /note="DNA/RNA"
  source: /note="5' tri-ethylene glycol (TEG)"
  modified_base (1)..(1): bicyclic nucleic acid (BNA)
  modified_base (2)..(2): 5-methyl bicyclic nucleic acid
  modified_base (6)..(6): 5-methyl modified nucleotide
  modified_base (7)..(7): 5-methyl modified nucleotide
  modified_base (11)..(11): 5-methyl modified nucleotide
  modified_base (12)..(12): 5-methyl modified nucleotide
  modified_base (13)..(13): 5-methyl modified nucleotide
tcuguccaagcccgguuga

SEQ ID NO: 17850 - DNA, 18 bp, Artificial Sequence
  source: /note="Description of Artificial Sequence: Synthetic oligonucleotide"
  source: /note="Description of Combined DNA/RNA Molecule: Synthetic oligonucleotide"
  source: /note="DNA/RNA"
  source: /note="5' tri-ethylene glycol (TEG)"
  modified_base (1)..(1): bicyclic nucleic acid (BNA)
  modified_base (2)..(2): 5-methyl bicyclic nucleic acid
  modified_base (6)..(6): 5-methyl modified nucleotide
  modified_base (7)..(7): 5-methyl modified nucleotide
  modified_base (11)..(11): 5-methyl modified nucleotide
  modified_base (12)..(12): 5-methyl modified nucleotide
  modified_base (13)..(13): 5-methyl modified nucleotide
tcuguccaagcccgguug

SEQ ID NO: 17851 - DNA, 17 bp, Artificial Sequence
  source: /note="Description of Artificial Sequence: Synthetic oligonucleotide"
  source: /note="Description of Combined DNA/RNA Molecule: Synthetic oligonucleotide"
  source: /note="DNA/RNA"
  source: /note="5' tri-ethylene glycol (TEG)"
  modified_base (1)..(1): bicyclic nucleic acid (BNA)
  modified_base (2)..(2): 5-methyl bicyclic nucleic acid
  modified_base (6)..(6): 5-methyl modified nucleotide
  modified_base (7)..(7): 5-methyl modified nucleotide
  modified_base (11)..(11): 5-methyl modified nucleotide
  modified_base (12)..(12): 5-methyl modified nucleotide
  modified_base (13)..(13): 5-methyl modified nucleotide
tcuguccaagcccgguu

SEQ ID NO: 17852 - DNA, 16 bp, Artificial Sequence
  source: /note="Description of Artificial Sequence: Synthetic oligonucleotide"
  source: /note="Description of Combined DNA/RNA Molecule: Synthetic oligonucleotide"
  source: /note="DNA/RNA"
  source: /note="5' tri-ethylene glycol (TEG)"
  modified_base (1)..(1): bicyclic nucleic acid (BNA)
  modified_base (2)..(2): 5-methyl bicyclic nucleic acid
  modified_base (6)..(6): 5-methyl modified nucleotide
  modified_base (7)..(7): 5-methyl modified nucleotide
  modified_base (11)..(11): 5-methyl modified nucleotide
  modified_base (12)..(12): 5-methyl modified nucleotide
  modified_base (13)..(13): 5-methyl modified nucleotide
tcuguccaagcccggu

SEQ ID NO: 17853 - DNA, 15 bp, Artificial Sequence
  source: /note="Description of Artificial Sequence: Synthetic oligonucleotide"
  source: /note="Description of Combined DNA/RNA Molecule: Synthetic oligonucleotide"
  source: /note="DNA/RNA"
  source: /note="5' tri-ethylene glycol (TEG)"
  modified_base (1)..(1): bicyclic nucleic acid (BNA)
  modified_base (2)..(2): 5-methyl bicyclic nucleic acid
  modified_base (6)..(6): 5-methyl modified nucleotide
  modified_base (7)..(7): 5-methyl modified nucleotide
  modified_base (11)..(11): 5-methyl modified nucleotide
  modified_base (12)..(12): 5-methyl modified nucleotide
  modified_base (13)..(13): 5-methyl modified nucleotide
tcuguccaagcccgg

SEQ ID NO: 17854 - DNA, 14 bp, Artificial Sequence
  source: /note="Description of Artificial Sequence: Synthetic oligonucleotide"
  source: /note="Description of Combined DNA/RNA Molecule: Synthetic oligonucleotide"
  source: /note="DNA/RNA"
  source: /note="5' tri-ethylene glycol (TEG)"
  modified_base (1)..(1): bicyclic nucleic acid (BNA)
  modified_base (2)..(2): 5-methyl bicyclic nucleic acid
  modified_base (6)..(6): 5-methyl modified nucleotide
  modified_base (7)..(7): 5-methyl modified nucleotide
  modified_base (11)..(11): 5-methyl modified nucleotide
  modified_base (12)..(12): 5-methyl modified nucleotide
  modified_base (13)..(13): 5-methyl modified nucleotide
tcuguccaagcccg

SEQ ID NO: 17855 - DNA, 13 bp, Artificial Sequence
  source: /note="Description of Artificial Sequence: Synthetic oligonucleotide"
  source: /note="Description of Combined DNA/RNA Molecule: Synthetic oligonucleotide"
  source: /note="DNA/RNA"
  source: /note="5' tri-ethylene glycol (TEG)"
  modified_base (1)..(1): bicyclic nucleic acid (BNA)
  modified_base (2)..(2): 5-methyl bicyclic nucleic acid
  modified_base (6)..(6): 5-methyl modified nucleotide
  modified_base (7)..(7): 5-methyl modified nucleotide
  modified_base (11)..(11): 5-methyl modified nucleotide
  modified_base (12)..(12): 5-methyl modified nucleotide
  modified_base (13)..(13): 5-methyl modified nucleotide
tcuguccaagccc

SEQ ID NO: 17856 - DNA, 12 bp, Artificial Sequence
  source: /note="Description of Artificial Sequence: Synthetic oligonucleotide"
  source: /note="Description of Combined DNA/RNA Molecule: Synthetic oligonucleotide"
  source: /note="DNA/RNA"
  source: /note="5' tri-ethylene glycol (TEG)"
  modified_base (1)..(1): bicyclic nucleic acid (BNA)
  modified_base (2)..(2): 5-methyl bicyclic nucleic acid
  modified_base (6)..(6): 5-methyl modified nucleotide
  modified_base (7)..(7): 5-methyl modified nucleotide
  modified_base (11)..(11): 5-methyl modified nucleotide
  modified_base (12)..(12): 5-methyl modified nucleotide
tcuguccaagcc

SEQ ID NO: 17857 - DNA, 11 bp, Artificial Sequence
  source: /note="Description of Artificial Sequence: Synthetic oligonucleotide"
  source: /note="Description of Combined DNA/RNA Molecule: Synthetic oligonucleotide"
  source: /note="DNA/RNA"
  source: /note="5' tri-ethylene glycol (TEG)"
  modified_base (1)..(1): bicyclic nucleic acid (BNA)
  modified_base (2)..(2): 5-methyl bicyclic nucleic acid
  modified_base (6)..(6): 5-methyl modified nucleotide
  modified_base (7)..(7): 5-methyl modified nucleotide
  modified_base (11)..(11): 5-methyl modified nucleotide
tcuguccaagc

SEQ ID NO: 17858 - DNA, 10 bp, Artificial Sequence
  source: /note="Description of Artificial Sequence: Synthetic oligonucleotide"
  source: /note="Description of Combined DNA/RNA Molecule: Synthetic oligonucleotide"
  source: /note="DNA/RNA"
  source: /note="5' tri-ethylene glycol (TEG)"
  modified_base (1)..(1): bicyclic nucleic acid (BNA)
  modified_base (2)..(2): 5-methyl bicyclic nucleic acid
  modified_base (6)..(6): 5-methyl modified nucleotide
  modified_base (7)..(7): 5-methyl modified nucleotide
tcuguccaag

SEQ ID NO: 17859 - DNA, 9 bp, Artificial Sequence
  source: /note="Description of Artificial Sequence: Synthetic oligonucleotide"
  source: /note="Description of Combined DNA/RNA Molecule: Synthetic oligonucleotide"
  source: /note="DNA/RNA"
  source: /note="5' tri-ethylene glycol (TEG)"
  modified_base (1)..(1): bicyclic nucleic acid (BNA)
  modified_base (2)..(2): 5-methyl bicyclic nucleic acid
  modified_base (6)..(6): 5-methyl modified nucleotide
  modified_base (7)..(7): 5-methyl modified nucleotide
tcuguccaa

SEQ ID NO: 17860 - DNA, 8 bp, Artificial Sequence
  source: /note="Description of Artificial Sequence: Synthetic oligonucleotide"
  source: /note="Description of Combined DNA/RNA Molecule: Synthetic oligonucleotide"
  source: /note="DNA/RNA"
  source: /note="5' tri-ethylene glycol (TEG)"
  modified_base (1)..(1): bicyclic nucleic acid (BNA)
  modified_base (2)..(2): 5-methyl bicyclic nucleic acid
  modified_base (6)..(6): 5-methyl modified nucleotide
  modified_base (7)..(7): 5-methyl modified nucleotide
tcugucca

SEQ ID NO: 17861 - DNA, 17 bp, Artificial Sequence
  source: /note="Description of Artificial Sequence: Synthetic oligonucleotide"
  source: /note="Description of Combined DNA/RNA Molecule: Synthetic oligonucleotide"
  source: /note="DNA/RNA"
  source: /note="5' tri-ethylene glycol (TEG)"
  modified_base (1)..(1): 5-methyl bicyclic nucleic acid
  modified_base (2)..(2): bicyclic nucleic acid (BNA)
  modified_base (5)..(5): 5-methyl modified nucleotide
  modified_base (6)..(6): 5-methyl modified nucleotide
  modified_base (10)..(10): 5-methyl modified nucleotide
  modified_base (11)..(11): 5-methyl modified nucleotide
  modified_base (12)..(12): 5-methyl modified nucleotide
ctguccaagcccgguug

SEQ ID NO: 17862 - DNA, 16 bp, Artificial Sequence
  source: /note="Description of Artificial Sequence: Synthetic oligonucleotide"
  source: /note="Description of Combined DNA/RNA Molecule: Synthetic oligonucleotide"
  source: /note="DNA/RNA"
  source: /note="5' tri-ethylene glycol (TEG)"
  modified_base (1)..(1): 5-methyl bicyclic nucleic acid
  modified_base (2)..(2): bicyclic nucleic acid (BNA)
  modified_base (5)..(5): 5-methyl modified nucleotide
  modified_base (6)..(6): 5-methyl modified nucleotide
  modified_base (10)..(10): 5-methyl modified nucleotide
  modified_base (11)..(11): 5-methyl modified nucleotide
  modified_base (12)..(12): 5-methyl modified nucleotide
ctguccaagcccgguu

SEQ ID NO: 17863 - DNA, 15 bp, Artificial Sequence
  source: /note="Description of Artificial Sequence: Synthetic oligonucleotide"
  source: /note="Description of Combined DNA/RNA Molecule: Synthetic oligonucleotide"
  source: /note="DNA/RNA"
  source: /note="5' tri-ethylene glycol (TEG)"
  modified_base (1)..(1): 5-methyl bicyclic nucleic acid
  modified_base (2)..(2): bicyclic nucleic acid (BNA)
  modified_base (5)..(5): 5-methyl modified nucleotide
  modified_base (6)..(6): 5-methyl modified nucleotide
  modified_base (10)..(10): 5-methyl modified nucleotide
  modified_base (11)..(11): 5-methyl modified nucleotide
  modified_base (12)..(12): 5-methyl modified nucleotide
ctguccaagcccggu

SEQ ID NO: 17864 - DNA, 14 bp, Artificial Sequence
  source: /note="Description of Artificial Sequence: Synthetic oligonucleotide"
  source: /note="Description of Combined DNA/RNA Molecule: Synthetic oligonucleotide"
  source: /note="DNA/RNA"
  source: /note="5' tri-ethylene glycol (TEG)"
  modified_base (1)..(1): 5-methyl bicyclic nucleic acid
  modified_base (2)..(2): bicyclic nucleic acid (BNA)
  modified_base (5)..(5): 5-methyl modified nucleotide
  modified_base (6)..(6): 5-methyl modified nucleotide
  modified_base (10)..(10): 5-methyl modified nucleotide
  modified_base (11)..(11): 5-methyl modified nucleotide
  modified_base (12)..(12): 5-methyl modified nucleotide
ctguccaagcccgg

SEQ ID NO: 17865 - DNA, 13 bp, Artificial Sequence
  source: /note="Description of Artificial Sequence: Synthetic oligonucleotide"
  source: /note="Description of Combined DNA/RNA Molecule: Synthetic oligonucleotide"
  source: /note="DNA/RNA"
  source: /note="5' tri-ethylene glycol (TEG)"
  modified_base (1)..(1): 5-methyl bicyclic nucleic acid
  modified_base (2)..(2): bicyclic nucleic acid (BNA)
  modified_base (5)..(5): 5-methyl modified nucleotide
  modified_base (6)..(6): 5-methyl modified nucleotide
  modified_base (10)..(10): 5-methyl modified nucleotide
  modified_base (11)..(11): 5-methyl modified nucleotide
  modified_base (12)..(12): 5-methyl modified nucleotide
ctguccaagcccg

SEQ ID NO: 17866 - DNA, 12 bp, Artificial Sequence
  source: /note="Description of Artificial Sequence: Synthetic oligonucleotide"
  source: /note="Description of Combined DNA/RNA Molecule: Synthetic oligonucleotide"
  source: /note="DNA/RNA"
  source: /note="5' tri-ethylene glycol (TEG)"
  modified_base (1)..(1): 5-methyl bicyclic nucleic acid
  modified_base (2)..(2): bicyclic nucleic acid (BNA)
  modified_base (5)..(5): 5-methyl modified nucleotide
  modified_base (6)..(6): 5-methyl modified nucleotide
  modified_base (10)..(10): 5-methyl modified nucleotide
  modified_base (11)..(11): 5-methyl modified nucleotide
  modified_base (12)..(12): 5-methyl modified nucleotide
ctguccaagccc

SEQ ID NO: 17867 - DNA, 11 bp, Artificial Sequence
  source: /note="Description of Artificial Sequence: Synthetic oligonucleotide"
  source: /note="Description of Combined DNA/RNA Molecule: Synthetic oligonucleotide"
  source: /note="DNA/RNA"
  source: /note="5' tri-ethylene glycol (TEG)"
  modified_base (1)..(1): 5-methyl bicyclic nucleic acid
  modified_base (2)..(2): bicyclic nucleic acid (BNA)
  modified_base (5)..(5): 5-methyl modified nucleotide
  modified_base (6)..(6): 5-methyl modified nucleotide
  modified_base (10)..(10): 5-methyl modified nucleotide
  modified_base (11)..(11): 5-methyl modified nucleotide
ctguccaagcc

SEQ ID NO: 17868 - DNA, 10 bp, Artificial Sequence
  source: /note="Description of Artificial Sequence: Synthetic oligonucleotide"
  source: /note="Description of Combined DNA/RNA Molecule: Synthetic oligonucleotide"
  source: /note="DNA/RNA"
  source: /note="5' tri-ethylene glycol (TEG)"
  modified_base (1)..(1): 5-methyl bicyclic nucleic acid
  modified_base (2)..(2): bicyclic nucleic acid (BNA)
  modified_base (5)..(5): 5-methyl modified nucleotide
  modified_base (6)..(6): 5-methyl modified nucleotide
  modified_base (10)..(10): 5-methyl modified nucleotide
ctguccaagc

SEQ ID NO: 17869 - DNA, 9 bp, Artificial Sequence
  source: /note="Description of Artificial Sequence: Synthetic oligonucleotide"
  source: /note="Description of Combined DNA/RNA Molecule: Synthetic oligonucleotide"
  source: /note="DNA/RNA"
  source: /note="5' tri-ethylene glycol (TEG)"
  modified_base (1)..(1): 5-methyl bicyclic nucleic acid
  modified_base (2)..(2): bicyclic nucleic acid (BNA)
  modified_base (5)..(5): 5-methyl modified nucleotide
  modified_base (6)..(6): 5-methyl modified nucleotide
ctguccaag

SEQ ID NO: 17870 - DNA, 8 bp, Artificial Sequence
  source: /note="Description of Artificial Sequence: Synthetic oligonucleotide"
  source: /note="Description of Combined DNA/RNA Molecule: Synthetic oligonucleotide"
  source: /note="DNA/RNA"
  source: /note="5' tri-ethylene glycol (TEG)"
  modified_base (1)..(1): 5-methyl bicyclic nucleic acid
  modified_base (2)..(2): bicyclic nucleic acid (BNA)
  modified_base (5)..(5): 5-methyl modified nucleotide
  modified_base (6)..(6): 5-methyl modified nucleotide
ctguccaa

SEQ ID NO: 17871 - DNA, 20 bp, Artificial Sequence
  source: /note="Description of Artificial Sequence: Synthetic oligonucleotide"
  source: /note="Description of Combined DNA/RNA Molecule: Synthetic oligonucleotide"
  source: /note="DNA/RNA"
  source: /note="5' tri-ethylene glycol (TEG)"
  modified_base (1)..(1): bicyclic nucleic acid (BNA)
  modified_base (2)..(2): bicyclic nucleic acid (BNA)
  modified_base (4)..(4): 5-methyl modified nucleotide
  modified_base (8)..(8): 5-methyl modified nucleotide
  modified_base (9)..(9): 5-methyl modified nucleotide
  modified_base (13)..(13): 5-methyl modified nucleotide
  modified_base (14)..(14): 5-methyl modified nucleotide
  modified_base (15)..(15): 5-methyl modified nucleotide
gtucuguccaagcccgguug

SEQ ID NO: 17872 - DNA, 19 bp, Artificial Sequence
  source: /note="Description of Artificial Sequence: Synthetic oligonucleotide"
  source: /note="Description of Combined DNA/RNA Molecule: Synthetic oligonucleotide"
  source: /note="DNA/RNA"
  source: /note="5' tri-ethylene glycol (TEG)"
  modified_base (1)..(1): bicyclic nucleic acid (BNA)
  modified_base (2)..(2): bicyclic nucleic acid (BNA)
  modified_base (4)..(4): 5-methyl modified nucleotide
  modified_base (8)..(8): 5-methyl modified nucleotide
  modified_base (9)..(9): 5-methyl modified nucleotide
  modified_base (13)..(13): 5-methyl modified nucleotide
  modified_base (14)..(14): 5-methyl modified nucleotide
  modified_base (15)..(15): 5-methyl modified nucleotide
gtucuguccaagcccgguu

SEQ ID NO: 17873 - DNA, 18 bp, Artificial Sequence
  source: /note="Description of Artificial Sequence: Synthetic oligonucleotide"
  source: /note="Description of Combined DNA/RNA Molecule: Synthetic oligonucleotide"
  source: /note="DNA/RNA"
  source: /note="5' tri-ethylene glycol (TEG)"
  modified_base (1)..(1): bicyclic nucleic acid (BNA)
  modified_base (2)..(2): bicyclic nucleic acid (BNA)
  modified_base (4)..(4): 5-methyl modified nucleotide
  modified_base (8)..(8): 5-methyl modified nucleotide
  modified_base (9)..(9): 5-methyl modified nucleotide
  modified_base (13)..(13): 5-methyl modified nucleotide
  modified_base (14)..(14): 5-methyl modified nucleotide
  modified_base (15)..(15): 5-methyl modified nucleotide
gtucuguccaagcccggu

SEQ ID NO: 17874 - DNA, 17 bp, Artificial Sequence
  source: /note="Description of Artificial Sequence: Synthetic oligonucleotide"
  source: /note="Description of Combined DNA/RNA Molecule: Synthetic oligonucleotide"
  source: /note="DNA/RNA"
  source: /note="5' tri-ethylene glycol (TEG)"
  modified_base (1)..(1): bicyclic nucleic acid (BNA)
  modified_base (2)..(2): bicyclic nucleic acid (BNA)
  modified_base (4)..(4): 5-methyl modified nucleotide
  modified_base (8)..(8): 5-methyl modified nucleotide
  modified_base (9)..(9): 5-methyl modified nucleotide
  modified_base (13)..(13): 5-methyl modified nucleotide
  modified_base (14)..(14): 5-methyl modified nucleotide
  modified_base (15)..(15): 5-methyl modified nucleotide
gtucuguccaagcccgg

SEQ ID NO: 17875 - DNA, 16 bp, Artificial Sequence
  source: /note="Description of Artificial Sequence: Synthetic oligonucleotide"
  source: /note="Description of Combined DNA/RNA Molecule: Synthetic oligonucleotide"
  source: /note="DNA/RNA"
  source: /note="5' tri-ethylene glycol (TEG)"
  modified_base (1)..(1): bicyclic nucleic acid (BNA)
  modified_base (2)..(2): bicyclic nucleic acid (BNA)
  modified_base (4)..(4): 5-methyl modified nucleotide
  modified_base (8)..(8): 5-methyl modified nucleotide
  modified_base (9)..(9): 5-methyl modified nucleotide
  modified_base (13)..(13): 5-methyl modified nucleotide
  modified_base (14)..(14): 5-methyl modified nucleotide
  modified_base (15)..(15): 5-methyl modified nucleotide
gtucuguccaagcccg

SEQ ID NO: 17876 - DNA, 15 bp, Artificial Sequence
  source: /note="Description of Artificial Sequence: Synthetic oligonucleotide"
  source: /note="Description of Combined DNA/RNA Molecule: Synthetic oligonucleotide"
  source: /note="DNA/RNA"
  source: /note="5' tri-ethylene glycol (TEG)"
  modified_base (1)..(1): bicyclic nucleic acid (BNA)
  modified_base (2)..(2): bicyclic nucleic acid (BNA)
  modified_base (4)..(4): 5-methyl modified nucleotide
  modified_base (8)..(8): 5-methyl modified nucleotide
  modified_base (9)..(9): 5-methyl modified nucleotide
  modified_base (13)..(13): 5-methyl modified nucleotide
  modified_base (14)..(14): 5-methyl modified nucleotide
  modified_base (15)..(15): 5-methyl modified nucleotide
gtucuguccaagccc

SEQ ID NO: 17877 - DNA, 14 bp, Artificial Sequence
  source: /note="Description of Artificial Sequence: Synthetic oligonucleotide"
  source: /note="Description of Combined DNA/RNA Molecule: Synthetic oligonucleotide"
  source: /note="DNA/RNA"
  source: /note="5' tri-ethylene glycol (TEG)"
  modified_base (1)..(1): bicyclic nucleic acid (BNA)
  modified_base (2)..(2): bicyclic nucleic acid (BNA)
  modified_base (4)..(4): 5-methyl modified nucleotide
  modified_base (8)..(8): 5-methyl modified nucleotide
  modified_base (9)..(9): 5-methyl modified nucleotide
  modified_base (13)..(13): 5-methyl modified nucleotide
  modified_base (14)..(14): 5-methyl modified nucleotide
gtucuguccaagcc

SEQ ID NO: 17878 - DNA, 13 bp, Artificial Sequence
  source: /note="Description of Artificial Sequence: Synthetic oligonucleotide"
  source: /note="Description of Combined DNA/RNA Molecule: Synthetic oligonucleotide"
  source: /note="DNA/RNA"
  source: /note="5' tri-ethylene glycol (TEG)"
  modified_base (1)..(1): bicyclic nucleic acid (BNA)
  modified_base (2)..(2): bicyclic nucleic acid (BNA)
  modified_base (4)..(4): 5-methyl modified nucleotide
  modified_base (8)..(8): 5-methyl modified nucleotide
  modified_base (9)..(9): 5-methyl modified nucleotide
  modified_base (13)..(13): 5-methyl modified nucleotide
gtucuguccaagc

SEQ ID NO: 17879 - DNA, 12 bp, Artificial Sequence
  source: /note="Description of Artificial Sequence: Synthetic oligonucleotide"
  source: /note="Description of Combined DNA/RNA Molecule: Synthetic oligonucleotide"
  source: /note="DNA/RNA"
  source: /note="5' tri-ethylene glycol (TEG)"
  modified_base (1)..(1): bicyclic nucleic acid (BNA)
  modified_base (2)..(2): bicyclic nucleic acid (BNA)
  modified_base (4)..(4): 5-methyl modified nucleotide
  modified_base (8)..(8): 5-methyl modified nucleotide
  modified_base (9)..(9): 5-methyl modified nucleotide
gtucuguccaag

SEQ ID NO: 17880 - DNA, 11 bp, Artificial Sequence
  source: /note="Description of Artificial Sequence: Synthetic oligonucleotide"
  source: /note="Description of Combined DNA/RNA Molecule: Synthetic oligonucleotide"
  source: /note="DNA/RNA"
  source: /note="5' tri-ethylene glycol (TEG)"
  modified_base (1)..(1): bicyclic nucleic acid (BNA)
  modified_base (2)..(2): bicyclic nucleic acid (BNA)
  modified_base (4)..(4): 5-methyl modified nucleotide
  modified_base (8)..(8): 5-methyl modified nucleotide
  modified_base (9)..(9): 5-methyl modified nucleotide
gtucuguccaa

SEQ ID NO: 17881 - DNA, 10 bp, Artificial Sequence
  source: /note="Description of Artificial Sequence: Synthetic oligonucleotide"
  source: /note="Description of Combined DNA/RNA Molecule: Synthetic oligonucleotide"
  source: /note="DNA/RNA"
  source: /note="5' tri-ethylene glycol (TEG)"
  modified_base (1)..(1): bicyclic nucleic acid (BNA)
  modified_base (2)..(2): bicyclic nucleic acid (BNA)
  modified_base (4)..(4): 5-methyl modified nucleotide
  modified_base (8)..(8): 5-methyl modified nucleotide
  modified_base (9)..(9): 5-methyl modified nucleotide
gtucugucca

SEQ ID NO: 17882 - DNA, 9 bp, Artificial Sequence
  source: /note="Description of Artificial Sequence: Synthetic oligonucleotide"
  source: /note="Description of Combined DNA/RNA Molecule: Synthetic oligonucleotide"
  source: /note="DNA/RNA"
  source: /note="5' tri-ethylene glycol (TEG)"
  modified_base (1)..(1): bicyclic nucleic acid (BNA)
  modified_base (2)..(2): bicyclic nucleic acid (BNA)
  modified_base (4)..(4): 5-methyl modified nucleotide
  modified_base (8)..(8): 5-methyl modified nucleotide
  modified_base (9)..(9): 5-methyl modified nucleotide
gtucugucc

SEQ ID NO: 17883 - DNA, 8 bp, Artificial Sequence
  source: /note="Description of Artificial Sequence: Synthetic oligonucleotide"
  source: /note="Description of Combined DNA/RNA Molecule: Synthetic oligonucleotide"
  source: /note="DNA/RNA"
  source: /note="5' tri-ethylene glycol (TEG)"
  modified_base (1)..(1): bicyclic nucleic acid (BNA)
  modified_base (2)..(2): bicyclic nucleic acid (BNA)
  modified_base (4)..(4): 5-methyl modified nucleotide
  modified_base (8)..(8): 5-methyl modified nucleotide
gtucuguc

SEQ ID NO: 17884 - RNA, 20 nt, Artificial Sequence
  source: /note="Description of Artificial Sequence: Synthetic oligonucleotide"
  source: /note="RNA"
  source: /note="5' tri-ethylene glycol (TEG)"
  modified_base (1)..(1): bicyclic nucleic acid (BNA)
  modified_base (2)..(2): bicyclic nucleic acid (BNA)
  modified_base (5)..(5): 5-methyl modified nucleotide
  modified_base (9)..(9): 5-methyl modified nucleotide
  modified_base (10)..(10): 5-methyl modified nucleotide
  modified_base (14)..(14): 5-methyl modified nucleotide
  modified_base (15)..(15): 5-methyl modified nucleotide
  modified_base (16)..(16): 5-methyl modified nucleotide
aguucuguccaagcccgguu

SEQ ID NO: 17885 - RNA, 19 nt, Artificial Sequence
  source: /note="Description of Artificial Sequence: Synthetic oligonucleotide"
  source: /note="RNA"
  source: /note="5' tri-ethylene glycol (TEG)"
  modified_base (1)..(1): bicyclic nucleic acid (BNA)
  modified_base (2)..(2): bicyclic nucleic acid (BNA)
  modified_base (5)..(5): 5-methyl modified nucleotide
  modified_base (9)..(9): 5-methyl modified nucleotide
  modified_base (10)..(10): 5-methyl modified nucleotide
  modified_base (14)..(14): 5-methyl modified nucleotide
  modified_base (15)..(15): 5-methyl modified nucleotide
  modified_base (16)..(16): 5-methyl modified nucleotide
aguucuguccaagcccggu

SEQ ID NO: 17886 - RNA, 18 nt, Artificial Sequence
  source: /note="Description of Artificial Sequence: Synthetic oligonucleotide"
  source: /note="RNA"
  source: /note="5' tri-ethylene glycol (TEG)"
  modified_base (1)..(1): bicyclic nucleic acid (BNA)
  modified_base (2)..(2): bicyclic nucleic acid (BNA)
  modified_base (5)..(5): 5-methyl modified nucleotide
  modified_base (9)..(9): 5-methyl modified nucleotide
  modified_base (10)..(10): 5-methyl modified nucleotide
  modified_base (14)..(14): 5-methyl modified nucleotide
  modified_base (15)..(15): 5-methyl modified nucleotide
  modified_base (16)..(16): 5-methyl modified nucleotide
aguucuguccaagcccgg

SEQ ID NO: 17887 - RNA, 17 nt, Artificial Sequence
  source: /note="Description of Artificial Sequence: Synthetic oligonucleotide"
  source: /note="RNA"
  source: /note="5' tri-ethylene glycol (TEG)"
  modified_base (1)..(1): bicyclic nucleic acid (BNA)
  modified_base (2)..(2): bicyclic nucleic acid (BNA)
  modified_base (5)..(5): 5-methyl modified nucleotide
  modified_base (9)..(9): 5-methyl modified nucleotide
  modified_base (10)..(10): 5-methyl modified nucleotide
  modified_base (14)..(14): 5-methyl modified nucleotide
  modified_base (15)..(15): 5-methyl modified nucleotide
  modified_base (16)..(16): 5-methyl modified nucleotide
aguucuguccaagcccg

SEQ ID NO: 17888 - RNA, 16 nt, Artificial Sequence
  source: /note="Description of Artificial Sequence: Synthetic oligonucleotide"
  source: /note="RNA"
  source: /note="5' tri-ethylene glycol (TEG)"
  modified_base (1)..(1): bicyclic nucleic acid (BNA)
  modified_base (2)..(2): bicyclic nucleic acid (BNA)
  modified_base (5)..(5): 5-methyl modified nucleotide
  modified_base (9)..(9): 5-methyl modified nucleotide
  modified_base (10)..(10): 5-methyl modified nucleotide
  modified_base (14)..(14): 5-methyl modified nucleotide
  modified_base (15)..(15): 5-methyl modified nucleotide
  modified_base (16)..(16): 5-methyl modified nucleotide
aguucuguccaagccc

SEQ ID NO: 17889 - RNA, 15 nt, Artificial Sequence
  source: /note="Description of Artificial Sequence: Synthetic oligonucleotide"
  source: /note="RNA"
  source: /note="5' tri-ethylene glycol (TEG)"
  modified_base (1)..(1): bicyclic nucleic acid (BNA)
  modified_base (2)..(2): bicyclic nucleic acid (BNA)
  modified_base (5)..(5): 5-methyl modified nucleotide
  modified_base (9)..(9): 5-methyl modified nucleotide
  modified_base (10)..(10): 5-methyl modified nucleotide
  modified_base (14)..(14): 5-methyl modified nucleotide
  modified_base (15)..(15): 5-methyl modified nucleotide
aguucuguccaagcc

SEQ ID NO: 17890 - RNA, 14 nt, Artificial Sequence
  source: /note="Description of Artificial Sequence: Synthetic oligonucleotide"
  source: /note="RNA"
  source: /note="5' tri-ethylene glycol (TEG)"
  modified_base (1)..(1): bicyclic nucleic acid (BNA)
  modified_base (2)..(2): bicyclic nucleic acid (BNA)
  modified_base (5)..(5): 5-methyl modified nucleotide
  modified_base (9)..(9): 5-methyl modified nucleotide
  modified_base (10)..(10): 5-methyl modified nucleotide
  modified_base (14)..(14): 5-methyl modified nucleotide
aguucuguccaagc

SEQ ID NO: 17891 - RNA, 13 nt, Artificial Sequence
  source: /note="Description of Artificial Sequence: Synthetic oligonucleotide"
  source: /note="RNA"
  source: /note="5' tri-ethylene glycol (TEG)"
  modified_base (1)..(1): bicyclic nucleic acid (BNA)
  modified_base (2)..(2): bicyclic nucleic acid (BNA)
  modified_base (5)..(5): 5-methyl modified nucleotide
  modified_base (9)..(9): 5-methyl modified nucleotide
  modified_base (10)..(10): 5-methyl modified nucleotide
aguucuguccaag

SEQ ID NO: 17892 - RNA, 12 nt, Artificial Sequence
  source: /note="Description of Artificial Sequence: Synthetic oligonucleotide"
  source: /note="RNA"
  source: /note="5' tri-ethylene glycol (TEG)"
  modified_base (1)..(1): bicyclic nucleic acid (BNA)
  modified_base (2)..(2): bicyclic nucleic acid (BNA)
  modified_base (5)..(5): 5-methyl modified nucleotide
  modified_base (9)..(9): 5-methyl modified nucleotide
  modified_base (10)..(10): 5-methyl modified nucleotide
aguucuguccaa

SEQ ID NO: 17893 - RNA, 11 nt, Artificial Sequence
  source: /note="Description of Artificial Sequence: Synthetic oligonucleotide"
  source: /note="RNA"
  source: /note="5' tri-ethylene glycol (TEG)"
  modified_base (1)..(1): bicyclic nucleic acid (BNA)
  modified_base (2)..(2): bicyclic nucleic acid (BNA)
  modified_base (5)..(5): 5-methyl modified nucleotide
  modified_base (9)..(9): 5-methyl modified nucleotide
  modified_base (10)..(10): 5-methyl modified nucleotide
aguucugucca

SEQ ID NO: 17894 - RNA, 10 nt, Artificial Sequence
  source: /note="Description of Artificial Sequence: Synthetic oligonucleotide"
  source: /note="RNA"
  source: /note="5' tri-ethylene glycol (TEG)"
  modified_base (1)..(1): bicyclic nucleic acid (BNA)
  modified_base (2)..(2): bicyclic nucleic acid (BNA)
  modified_base (5)..(5): 5-methyl modified nucleotide
  modified_base (9)..(9): 5-methyl modified nucleotide
  modified_base (10)..(10): 5-methyl modified nucleotide
aguucugucc

SEQ ID NO: 17895 - RNA, 9 nt, Artificial Sequence
  source: /note="Description of Artificial Sequence: Synthetic oligonucleotide"
  source: /note="RNA"
  source: /note="5' tri-ethylene glycol (TEG)"
  modified_base (1)..(1): bicyclic nucleic acid (BNA)
  modified_base (2)..(2): bicyclic nucleic acid (BNA)
  modified_base (5)..(5): 5-methyl modified nucleotide
  modified_base (9)..(9): 5-methyl modified nucleotide
aguucuguc

SEQ ID NO: 17896 - RNA, 8 nt, Artificial Sequence
  source: /note="Description of Artificial Sequence: Synthetic oligonucleotide"
  source: /note="RNA"
  source: /note="5' tri-ethylene glycol (TEG)"
  modified_base (1)..(1): bicyclic nucleic acid (BNA)
  modified_base (2)..(2): bicyclic nucleic acid (BNA)
  modified_base (5)..(5): 5-methyl modified nucleotide
aguucugu

SEQ ID NO: 17897 - RNA, 20 nt, Artificial Sequence
  source: /note="Description of Artificial Sequence: Synthetic oligonucleotide"
  source: /note="RNA"
  source: /note="5' tri-ethylene glycol (TEG)"
  modified_base (1)..(1): bicyclic nucleic acid (BNA)
  modified_base (2)..(2): bicyclic nucleic acid (BNA)
  modified_base (6)..(6): 5-methyl modified nucleotide
  modified_base (10)..(10): 5-methyl modified nucleotide
  modified_base (11)..(11): 5-methyl modified nucleotide
  modified_base (15)..(15): 5-methyl modified nucleotide
  modified_base (16)..(16): 5-methyl modified nucleotide
  modified_base (17)..(17): 5-methyl modified nucleotide
aaguucuguccaagcccggu

SEQ ID NO: 17898 - RNA, 19 nt, Artificial Sequence
  source: /note="Description of Artificial Sequence: Synthetic oligonucleotide"
  source: /note="RNA"
  source: /note="5' tri-ethylene glycol (TEG)"
  modified_base (1)..(1): bicyclic nucleic acid (BNA)
  modified_base (2)..(2): bicyclic nucleic acid (BNA)
  modified_base (6)..(6): 5-methyl modified nucleotide
  modified_base (10)..(10): 5-methyl modified nucleotide
  modified_base (11)..(11): 5-methyl modified nucleotide
  modified_base (15)..(15): 5-methyl modified nucleotide
  modified_base (16)..(16): 5-methyl modified nucleotide
  modified_base (17)..(17): 5-methyl modified nucleotide
aaguucuguccaagcccgg

SEQ ID NO: 17899 - RNA, 18 nt, Artificial Sequence
  source: /note="Description of Artificial Sequence: Synthetic oligonucleotide"
  source: /note="RNA"
  source: /note="5' tri-ethylene glycol (TEG)"
  modified_base (1)..(1): bicyclic nucleic acid (BNA)
  modified_base (2)..(2): bicyclic nucleic acid (BNA)
  modified_base (6)..(6): 5-methyl modified nucleotide
  modified_base (10)..(10): 5-methyl modified nucleotide
  modified_base (11)..(11): 5-methyl modified nucleotide
  modified_base (15)..(15): 5-methyl modified nucleotide
  modified_base (16)..(16): 5-methyl modified nucleotide
  modified_base (17)..(17): 5-methyl modified nucleotide
aaguucuguccaagcccg

SEQ ID NO: 17900 - RNA, 17 nt, Artificial Sequence
  source: /note="Description of Artificial Sequence: Synthetic oligonucleotide"
  source: /note="RNA"
  source: /note="5' tri-ethylene glycol (TEG)"
  modified_base (1)..(1): bicyclic nucleic acid (BNA)
  modified_base (2)..(2): bicyclic nucleic acid (BNA)
  modified_base (6)..(6): 5-methyl modified nucleotide
  modified_base (10)..(10): 5-methyl modified nucleotide
  modified_base (11)..(11): 5-methyl modified nucleotide
  modified_base (15)..(15): 5-methyl modified nucleotide
  modified_base (16)..(16): 5-methyl modified nucleotide
  modified_base (17)..(17): 5-methyl modified nucleotide
aaguucuguccaagccc

SEQ ID NO: 17901 - RNA, 16 nt, Artificial Sequence
  source: /note="Description of Artificial Sequence: Synthetic oligonucleotide"
  source: /note="RNA"
  source: /note="5' tri-ethylene glycol (TEG)"
  modified_base (1)..(1): bicyclic nucleic acid (BNA)
  modified_base (2)..(2): bicyclic nucleic acid (BNA)
  modified_base (6)..(6): 5-methyl modified nucleotide
  modified_base (10)..(10): 5-methyl modified nucleotide
  modified_base (11)..(11): 5-methyl modified nucleotide
  modified_base (15)..(15): 5-methyl modified nucleotide
  modified_base (16)..(16): 5-methyl modified nucleotide
aaguucuguccaagcc

SEQ ID NO: 17902 - RNA, 15 nt, Artificial Sequence
  source: /note="Description of Artificial Sequence: Synthetic oligonucleotide"
  source: /note="RNA"
  source: /note="5' tri-ethylene glycol (TEG)"
  modified_base (1)..(1): bicyclic nucleic acid (BNA)
  modified_base (2)..(2): bicyclic nucleic acid (BNA)
  modified_base (6)..(6): 5-methyl modified nucleotide
  modified_base (10)..(10): 5-methyl modified nucleotide
  modified_base (11)..(11): 5-methyl modified nucleotide
  modified_base (15)..(15): 5-methyl modified nucleotide
aaguucuguccaagc

SEQ ID NO: 17903 - RNA, 14 nt, Artificial Sequence
  source: /note="Description of Artificial Sequence: Synthetic oligonucleotide"
  source: /note="RNA"
  source: /note="5' tri-ethylene glycol (TEG)"
  modified_base (1)..(1): bicyclic nucleic acid (BNA)
  modified_base (2)..(2): bicyclic nucleic acid (BNA)
  modified_base (6)..(6): 5-methyl modified nucleotide
  modified_base (10)..(10): 5-methyl modified nucleotide
  modified_base (11)..(11): 5-methyl modified nucleotide
aaguucuguccaag

SEQ ID NO: 17904 - RNA, 13 nt, Artificial Sequence
  source: /note="Description of Artificial Sequence: Synthetic oligonucleotide"
  source: /note="RNA"
  source: /note="5' tri-ethylene glycol (TEG)"
  modified_base (1)..(1): bicyclic nucleic acid (BNA)
  modified_base (2)..(2): bicyclic nucleic acid (BNA)
  modified_base (6)..(6): 5-methyl modified nucleotide
  modified_base (10)..(10): 5-methyl modified nucleotide
  modified_base (11)..(11): 5-methyl modified nucleotide
aaguucuguccaa

SEQ ID NO: 17905 - RNA, 12 nt, Artificial Sequence
  source: /note="Description of Artificial Sequence: Synthetic oligonucleotide"
  source: /note="RNA"
  source: /note="5' tri-ethylene glycol (TEG)"
  modified_base (1)..(1): bicyclic nucleic acid (BNA)
  modified_base (2)..(2): bicyclic nucleic acid (BNA)
  modified_base (6)..(6): 5-methyl modified nucleotide
  modified_base (10)..(10): 5-methyl modified nucleotide
  modified_base (11)..(11): 5-methyl modified nucleotide
aaguucugucca

SEQ ID NO: 17906 - RNA, 11 nt, Artificial Sequence
  source: /note="Description of Artificial Sequence: Synthetic oligonucleotide"
  source: /note="RNA"
  source: /note="5' tri-ethylene glycol (TEG)"
  modified_base (1)..(1): bicyclic nucleic acid (BNA)
  modified_base (2)..(2): bicyclic nucleic acid (BNA)
  modified_base (6)..(6): 5-methyl modified nucleotide
  modified_base (10)..(10): 5-methyl modified nucleotide
  modified_base (11)..(11): 5-methyl modified nucleotide
aaguucugucc

SEQ ID NO: 17907 - RNA, 10 nt, Artificial Sequence
  source: /note="Description of Artificial Sequence: Synthetic oligonucleotide"
  source: /note="RNA"
  source: /note="5' tri-ethylene glycol (TEG)"
  modified_base (1)..(1): bicyclic nucleic acid (BNA)
  modified_base (2)..(2): bicyclic nucleic acid (BNA)
  modified_base (6)..(6): 5-methyl modified nucleotide
  modified_base (10)..(10): 5-methyl modified nucleotide
aaguucuguc

SEQ ID NO: 17908 - RNA, 9 nt, Artificial Sequence
  source: /note="Description of Artificial Sequence: Synthetic oligonucleotide"
  source: /note="RNA"
  source: /note="5' tri-ethylene glycol (TEG)"
  modified_base (1)..(1): bicyclic nucleic acid (BNA)
  modified_base (2)..(2): bicyclic nucleic acid (BNA)
  modified_base (6)..(6): 5-methyl modified nucleotide
aaguucugu

SEQ ID NO: 17909 - RNA, 8 nt, Artificial Sequence
  source: /note="Description of Artificial Sequence: Synthetic oligonucleotide"
  source: /note="RNA"
  source: /note="5' tri-ethylene glycol (TEG)"
  modified_base (1)..(1): bicyclic nucleic acid (BNA)
  modified_base (2)..(2): bicyclic nucleic acid (BNA)
  modified_base (6)..(6): 5-methyl modified nucleotide
aaguucug

SEQ ID NO: 17910 - DNA, 20 bp, Artificial Sequence
  source: /note="Description of Artificial Sequence: Synthetic oligonucleotide"
  source: /note="Description of Combined DNA/RNA Molecule: Synthetic oligonucleotide"
  source: /note="DNA/RNA"
  source: /note="5' tri-ethylene glycol (TEG)"
  modified_base (1)..(1): bicyclic nucleic acid (BNA)
  modified_base (2)..(2): bicyclic nucleic acid (BNA)
  modified_base (7)..(7): 5-methyl modified nucleotide
  modified_base (11)..(11): 5-methyl modified nucleotide
  modified_base (12)..(12): 5-methyl modified nucleotide
  modified_base (16)..(16): 5-methyl modified nucleotide
  modified_base (17)..(17): 5-methyl modified nucleotide
  modified_base (18)..(18): 5-methyl modified nucleotide
taaguucuguccaagcccgg

SEQ ID NO: 17911 - DNA, 19 bp, Artificial Sequence
  source: /note="Description of Artificial Sequence: Synthetic oligonucleotide"
  source: /note="Description of Combined DNA/RNA Molecule: Synthetic oligonucleotide"
  source: /note="DNA/RNA"
  source: /note="5' tri-ethylene glycol (TEG)"
  modified_base (1)..(1): bicyclic nucleic acid (BNA)
  modified_base (2)..(2): bicyclic nucleic acid (BNA)
  modified_base (7)..(7): 5-methyl modified nucleotide
  modified_base (11)..(11): 5-methyl modified nucleotide
  modified_base (12)..(12): 5-methyl modified nucleotide
  modified_base (16)..(16): 5-methyl modified nucleotide
  modified_base (17)..(17): 5-methyl modified nucleotide
  modified_base (18)..(18): 5-methyl modified nucleotide
taaguucuguccaagcccg

SEQ ID NO: 17912 - DNA, 18 bp, Artificial Sequence
  source: /note="Description of Artificial Sequence: Synthetic oligonucleotide"
  source: /note="Description of Combined DNA/RNA Molecule: Synthetic oligonucleotide"
  source: /note="DNA/RNA"
  source: /note="5' tri-ethylene glycol (TEG)"
  modified_base (1)..(1): bicyclic nucleic acid (BNA)
  modified_base (2)..(2): bicyclic nucleic acid (BNA)
  modified_base (7)..(7): 5-methyl modified nucleotide
  modified_base (11)..(11): 5-methyl modified nucleotide
  modified_base (12)..(12): 5-methyl modified nucleotide
  modified_base (16)..(16): 5-methyl modified nucleotide
  modified_base (17)..(17): 5-methyl modified nucleotide
  modified_base (18)..(18): 5-methyl modified nucleotide
taaguucuguccaagccc

SEQ ID NO: 17913 - DNA, 17 bp, Artificial Sequence
  source: /note="Description of Artificial Sequence: Synthetic oligonucleotide"
  source: /note="Description of Combined DNA/RNA Molecule: Synthetic oligonucleotide"
  source: /note="DNA/RNA"
  source: /note="5' tri-ethylene glycol (TEG)"
  modified_base (1)..(1): bicyclic nucleic acid (BNA)
  modified_base (2)..(2): bicyclic nucleic acid (BNA)
  modified_base (7)..(7): 5-methyl modified nucleotide
  modified_base (11)..(11): 5-methyl modified nucleotide
  modified_base (12)..(12): 5-methyl modified nucleotide
  modified_base (16)..(16): 5-methyl modified nucleotide
  modified_base (17)..(17): 5-methyl modified nucleotide
taaguucuguccaagcc

SEQ ID NO: 17914 - DNA, 16 bp, Artificial Sequence
  source: /note="Description of Artificial Sequence: Synthetic oligonucleotide"
  source: /note="Description of Combined DNA/RNA Molecule: Synthetic oligonucleotide"
  source: /note="DNA/RNA"
  source: /note="5' tri-ethylene glycol (TEG)"
  modified_base (1)..(1): bicyclic nucleic acid (BNA)
  modified_base (2)..(2): bicyclic nucleic acid (BNA)
  modified_base (7)..(7): 5-methyl modified nucleotide
  modified_base (11)..(11): 5-methyl modified nucleotide
  modified_base (12)..(12): 5-methyl modified nucleotide
  modified_base (16)..(16): 5-methyl modified nucleotide
taaguucuguccaagc

SEQ ID NO: 17915 - DNA, 14 bp, Artificial Sequence
  source: /note="Description of Artificial Sequence: Synthetic oligonucleotide"
  source: /note="Description of Combined DNA/RNA Molecule: Synthetic oligonucleotide"
  source: /note="DNA/RNA"
  source: /note="5' tri-ethylene glycol (TEG)"
  modified_base (1)..(1): bicyclic nucleic acid (BNA)
  modified_base (2)..(2): bicyclic nucleic acid (BNA)
  modified_base (7)..(7): 5-methyl modified nucleotide
  modified_base (11)..(11): 5-methyl modified nucleotide
  modified_base (12)..(12): 5-methyl modified nucleotide
taaguucuguccaa

SEQ ID NO: 17916 - DNA, 13 bp, Artificial Sequence
  source: /note="Description of Artificial Sequence: Synthetic oligonucleotide"
  source: /note="Description of Combined DNA/RNA Molecule: Synthetic oligonucleotide"
  source: /note="DNA/RNA"
  source: /note="5' tri-ethylene glycol (TEG)"
  modified_base (1)..(1): bicyclic nucleic acid (BNA)
  modified_base (2)..(2): bicyclic nucleic acid (BNA)
  modified_base (7)..(7): 5-methyl modified nucleotide
  modified_base (11)..(11): 5-methyl modified nucleotide
  modified_base (12)..(12): 5-methyl modified nucleotide
taaguucugucca

SEQ ID NO: 17917 - DNA, 12 bp, Artificial Sequence
  source: /note="Description of Artificial Sequence: Synthetic oligonucleotide"
  source: /note="Description of Combined DNA/RNA Molecule: Synthetic oligonucleotide"
  source: /note="DNA/RNA"
  source: /note="5' tri-ethylene glycol (TEG)"
  modified_base (1)..(1): bicyclic nucleic acid (BNA)
  modified_base (2)..(2): bicyclic nucleic acid (BNA)
  modified_base (7)..(7): 5-methyl modified nucleotide
  modified_base (11)..(11): 5-methyl modified nucleotide
  modified_base (12)..(12): 5-methyl modified nucleotide
taaguucugucc

SEQ ID NO: 17918 - DNA, 11 bp, Artificial Sequence
  source: /note="Description of Artificial Sequence: Synthetic oligonucleotide"
  source: /note="Description of Combined DNA/RNA Molecule: Synthetic oligonucleotide"
  source: /note="DNA/RNA"
  source: /note="5' tri-ethylene glycol (TEG)"
  modified_base (1)..(1): bicyclic nucleic acid (BNA)
  modified_base (2)..(2): bicyclic nucleic acid (BNA)
  modified_base (7)..(7): 5-methyl modified nucleotide
  modified_base (11)..(11): 5-methyl modified nucleotide
taaguucuguc

SEQ ID NO: 17919 - DNA, 10 bp, Artificial Sequence
  source: /note="Description of Artificial Sequence: Synthetic oligonucleotide"
  source: /note="Description of Combined DNA/RNA Molecule: Synthetic oligonucleotide"
  source: /note="DNA/RNA"
  source: /note="5' tri-ethylene glycol (TEG)"
  modified_base (1)..(1): bicyclic nucleic acid (BNA)
  modified_base (2)..(2): bicyclic nucleic acid (BNA)
  modified_base (7)..(7): 5-methyl modified nucleotide
taaguucugu

SEQ ID NO: 17920 - DNA, 9 bp, Artificial Sequence
  source: /note="Description of Artificial Sequence: Synthetic oligonucleotide"
  source: /note="Description of Combined DNA/RNA Molecule: Synthetic oligonucleotide"
  source: /note="DNA/RNA"
  source: /note="5' tri-ethylene glycol (TEG)"
  modified_base (1)..(1): bicyclic nucleic acid (BNA)
  modified_base (2)..(2): bicyclic nucleic acid (BNA)
  modified_base (7)..(7): 5-methyl modified nucleotide
taaguucug

SEQ ID NO: 17921 - DNA, 8 bp, Artificial Sequence
  source: /note="Description of Artificial Sequence: Synthetic oligonucleotide"
  source: /note="Description of Combined DNA/RNA Molecule: Synthetic oligonucleotide"
  source: /note="DNA/RNA"
  source: /note="5' tri-ethylene glycol (TEG)"
  modified_base (1)..(1): bicyclic nucleic acid (BNA)
  modified_base (2)..(2): bicyclic nucleic acid (BNA)
  modified_base (7)..(7): 5-methyl modified nucleotide
taaguucu

SEQ ID NO: 17922 - DNA, 20 bp, Artificial Sequence
  source: /note="Description of Artificial Sequence: Synthetic oligonucleotide"
  source: /note="Description of Combined DNA/RNA Molecule: Synthetic oligonucleotide"
  source: /note="DNA/RNA"
  source: /note="5' tri-ethylene glycol (TEG)"
  modified_base (1)..(1): bicyclic nucleic acid (BNA)
  modified_base (2)..(2): bicyclic nucleic acid (BNA)
  modified_base (8)..(8): 5-methyl modified nucleotide
  modified_base (12)..(12): 5-methyl modified nucleotide
  modified_base (13)..(13): 5-methyl modified nucleotide
  modified_base (17)..(17): 5-methyl modified nucleotide
  modified_base (18)..(18): 5-methyl modified nucleotide
  modified_base (19)..(19): 5-methyl modified nucleotide
gtaaguucuguccaagcccg

SEQ ID NO: 17923 - DNA, 19 bp, Artificial Sequence
  source: /note="Description of Artificial Sequence: Synthetic oligonucleotide"
  source: /note="Description of Combined DNA/RNA Molecule: Synthetic oligonucleotide"
  source: /note="DNA/RNA"
  source: /note="5' tri-ethylene glycol (TEG)"
  modified_base (1)..(1): bicyclic nucleic acid (BNA)
  modified_base (2)..(2): bicyclic nucleic acid (BNA)
  modified_base (8)..(8): 5-methyl modified nucleotide
  modified_base (12)..(12): 5-methyl modified nucleotide
  modified_base (13)..(13): 5-methyl modified nucleotide
  modified_base (17)..(17): 5-methyl modified nucleotide
  modified_base (18)..(18): 5-methyl modified nucleotide
  modified_base (19)..(19): 5-methyl modified nucleotide
gtaaguucuguccaagccc

SEQ ID NO: 17924 - DNA, 17 bp, Artificial Sequence
  source: /note="Description of Artificial Sequence: Synthetic oligonucleotide"
  source: /note="Description of Combined DNA/RNA Molecule: Synthetic oligonucleotide"
  source: /note="DNA/RNA"
  source: /note="5' tri-ethylene glycol (TEG)"
  modified_base (1)..(1): bicyclic nucleic acid (BNA)
  modified_base (2)..(2): bicyclic nucleic acid (BNA)
  modified_base (8)..(8): 5-methyl modified nucleotide
  modified_base (12)..(12): 5-methyl modified nucleotide
  modified_base (13)..(13): 5-methyl modified nucleotide
  modified_base (17)..(17): 5-methyl modified nucleotide
gtaaguucuguccaagc

SEQ ID NO: 17925 - DNA, 16 bp, Artificial Sequence
  source: /note="Description of Artificial Sequence: Synthetic oligonucleotide"
  source: /note="Description of Combined DNA/RNA Molecule: Synthetic oligonucleotide"
  source: /note="DNA/RNA"
  source: /note="5' tri-ethylene glycol (TEG)"
  modified_base (1)..(1): bicyclic nucleic acid (BNA)
  modified_base (2)..(2): bicyclic nucleic acid (BNA)
  modified_base (8)..(8): 5-methyl modified nucleotide
  modified_base (12)..(12): 5-methyl modified nucleotide
  modified_base (13)..(13): 5-methyl modified nucleotide
gtaaguucuguccaag

SEQ ID NO: 17926 - DNA, 15 bp, Artificial Sequence
  source: /note="Description of Artificial Sequence: Synthetic oligonucleotide"
  source: /note="Description of Combined DNA/RNA Molecule: Synthetic oligonucleotide"
  source: /note="DNA/RNA"
  source: /note="5' tri-ethylene glycol (TEG)"
  modified_base (1)..(1): bicyclic nucleic acid (BNA)
  modified_base (2)..(2): bicyclic nucleic acid (BNA)
  modified_base (8)..(8): 5-methyl modified nucleotide
  modified_base (12)..(12): 5-methyl modified nucleotide
  modified_base (13)..(13): 5-methyl modified nucleotide
gtaaguucuguccaa

SEQ ID NO: 17927 - DNA, 14 bp, Artificial Sequence
  source: /note="Description of Artificial Sequence: Synthetic oligonucleotide"
  source: /note="Description of Combined DNA/RNA Molecule: Synthetic oligonucleotide"
  source: /note="DNA/RNA"
  source: /note="5' tri-ethylene glycol (TEG)"
  modified_base (1)..(1): bicyclic nucleic acid (BNA)
  modified_base (2)..(2): bicyclic nucleic acid (BNA)
  modified_base (8)..(8): 5-methyl modified nucleotide
  modified_base (12)..(12): 5-methyl modified nucleotide
  modified_base (13)..(13): 5-methyl modified nucleotide
gtaaguucugucca

SEQ ID NO: 17928 - DNA, 13 bp, Artificial Sequence
  source: /note="Description of Artificial Sequence: Synthetic oligonucleotide"
  source: /note="Description of Combined DNA/RNA Molecule: Synthetic oligonucleotide"
  source: /note="DNA/RNA"
  source: /note="5' tri-ethylene glycol (TEG)"
  modified_base (1)..(1): bicyclic nucleic acid (BNA)
  modified_base (2)..(2): bicyclic nucleic acid (BNA)
  modified_base (8)..(8): 5-methyl modified nucleotide
  modified_base (12)..(12): 5-methyl modified nucleotide
  modified_base (13)..(13): 5-methyl modified nucleotide
gtaaguucugucc

SEQ ID NO: 17929 - DNA, 12 bp, Artificial Sequence
  source: /note="Description of Artificial Sequence: Synthetic oligonucleotide"
  source: /note="Description of Combined DNA/RNA Molecule: Synthetic oligonucleotide"
  source: /note="DNA/RNA"
  source: /note="5' tri-ethylene glycol (TEG)"
  modified_base (1)..(1): bicyclic nucleic acid (BNA)
  modified_base (2)..(2): bicyclic nucleic acid (BNA)
  modified_base (8)..(8): 5-methyl modified nucleotide
  modified_base (12)..(12): 5-methyl modified nucleotide
gtaaguucuguc

SEQ ID NO: 17930 - DNA, 11 bp, Artificial Sequence
  source: /note="Description of Artificial Sequence: Synthetic oligonucleotide"
  source: /note="Description of Combined DNA/RNA Molecule: Synthetic oligonucleotide"
  source: /note="DNA/RNA"
  source: /note="5' tri-ethylene glycol (TEG)"
  modified_base (1)..(1): bicyclic nucleic acid (BNA)
  modified_base (2)..(2): bicyclic nucleic acid (BNA)
  modified_base (8)..(8): 5-methyl modified nucleotide
gtaaguucugu

SEQ ID NO: 17931 - DNA, 10 bp, Artificial Sequence
  source: /note="Description of Artificial Sequence: Synthetic oligonucleotide"
  source: /note="Description of Combined DNA/RNA Molecule: Synthetic oligonucleotide"
  source: /note="DNA/RNA"
  source: /note="5' tri-ethylene glycol (TEG)"
  modified_base (1)..(1): bicyclic nucleic acid (BNA)
  modified_base (2)..(2): bicyclic nucleic acid (BNA)
  modified_base (8)..(8): 5-methyl modified nucleotide
gtaaguucug

SEQ ID NO: 17932 - DNA, 9 bp, Artificial Sequence
  source: /note="Description of Artificial Sequence: Synthetic oligonucleotide"
  source: /note="Description of Combined DNA/RNA Molecule: Synthetic oligonucleotide"
  source: /note="DNA/RNA"
  source: /note="5' tri-ethylene glycol (TEG)"
  modified_base (1)..(1): bicyclic nucleic acid (BNA)
  modified_base (2)..(2): bicyclic nucleic acid (BNA)
  modified_base (8)..(8): 5-methyl modified nucleotide
gtaaguucu

SEQ ID NO: 17933 - DNA, 8 bp, Artificial Sequence
  source: /note="Description of Artificial Sequence: Synthetic oligonucleotide"
  source: /note="Description of Combined DNA/RNA Molecule: Synthetic oligonucleotide"
  source: /note="DNA/RNA"
  source: /note="5' tri-ethylene glycol (TEG)"
  modified_base (1)..(1): bicyclic nucleic acid (BNA)
  modified_base (2)..(2): bicyclic nucleic acid (BNA)
  modified_base (8)..(8): 5-methyl modified nucleotide
gtaaguuc

SEQ ID NO: 17934 - RNA, 20 nt, Artificial Sequence
  source: /note="Description of Artificial Sequence: Synthetic oligonucleotide"
  source: /note="RNA"
  source: /note="5' tri-ethylene glycol (TEG)"
  modified_base (1)..(1): bicyclic nucleic acid (BNA)
  modified_base (2)..(2): bicyclic nucleic acid (BNA)
  modified_base (9)..(9): 5-methyl modified nucleotide
  modified_base (13)..(13): 5-methyl modified nucleotide
  modified_base (14)..(14): 5-methyl modified nucleotide
  modified_base (18)..(18): 5-methyl modified nucleotide
  modified_base (19)..(19): 5-methyl modified nucleotide
  modified_base (20)..(20): 5-methyl modified nucleotide
gguaaguucuguccaagccc

SEQ ID NO: 17935 - RNA, 19 nt, Artificial Sequence
  source: /note="Description of Artificial Sequence: Synthetic oligonucleotide"
  source: /note="RNA"
  source: /note="5' tri-ethylene glycol (TEG)"
  modified_base (1)..(1): bicyclic nucleic acid (BNA)
  modified_base (2)..(2): bicyclic nucleic acid (BNA)
  modified_base (9)..(9): 5-methyl modified nucleotide
  modified_base (13)..(13): 5-methyl modified nucleotide
  modified_base (14)..(14): 5-methyl modified nucleotide
  modified_base (18)..(18): 5-methyl modified nucleotide
  modified_base (19)..(19): 5-methyl modified nucleotide
gguaaguucuguccaagcc

SEQ ID NO: 17936 - RNA, 17 nt, Artificial Sequence
  source: /note="Description of Artificial Sequence: Synthetic oligonucleotide"
  source: /note="RNA"
  source: /note="5' tri-ethylene glycol (TEG)"
  modified_base (1)..(1): bicyclic nucleic acid (BNA)
  modified_base (2)..(2): bicyclic nucleic acid (BNA)
  modified_base (9)..(9): 5-methyl modified nucleotide
  modified_base (13)..(13): 5-methyl modified nucleotide
  modified_base (14)..(14): 5-methyl modified nucleotide
gguaaguucuguccaag

SEQ ID NO: 17937 - RNA, 16 nt, Artificial Sequence
  source: /note="Description of Artificial Sequence: Synthetic oligonucleotide"
  source: /note="RNA"
  source: /note="5' tri-ethylene glycol (TEG)"
  modified_base (1)..(1): bicyclic nucleic acid (BNA)
  modified_base (2)..(2): bicyclic nucleic acid (BNA)
  modified_base (9)..(9): 5-methyl modified nucleotide
  modified_base (13)..(13): 5-methyl modified nucleotide
  modified_base (14)..(14): 5-methyl modified nucleotide
gguaaguucuguccaa

SEQ ID NO: 17938 - RNA, 15 nt, Artificial Sequence
  source: /note="Description of Artificial Sequence: Synthetic oligonucleotide"
  source: /note="RNA"
  source: /note="5' tri-ethylene glycol (TEG)"
  modified_base (1)..(1): bicyclic nucleic acid (BNA)
  modified_base (2)..(2): bicyclic nucleic acid (BNA)
  modified_base (9)..(9): 5-methyl modified nucleotide
  modified_base (13)..(13): 5-methyl modified nucleotide
  modified_base (14)..(14): 5-methyl modified nucleotide
gguaaguucugucca

SEQ ID NO: 17939 - RNA, 14 nt, Artificial Sequence
  source: /note="Description of Artificial Sequence: Synthetic oligonucleotide"
  source: /note="RNA"
  source: /note="5' tri-ethylene glycol (TEG)"
  modified_base (1)..(1): bicyclic nucleic acid (BNA)
  modified_base (2)..(2): bicyclic nucleic acid (BNA)
  modified_base (9)..(9): 5-methyl modified nucleotide
  modified_base (13)..(13): 5-methyl modified nucleotide
  modified_base (14)..(14): 5-methyl modified nucleotide
gguaaguucugucc

SEQ ID NO: 17940 - RNA, 13 nt, Artificial Sequence
  source: /note="Description of Artificial Sequence: Synthetic oligonucleotide"
  source: /note="RNA"
  source: /note="5' tri-ethylene glycol (TEG)"
  modified_base (1)..(1): bicyclic nucleic acid (BNA)
  modified_base (2)..(2): bicyclic nucleic acid (BNA)
  modified_base (9)..(9): 5-methyl modified nucleotide
  modified_base (13)..(13): 5-methyl modified nucleotide
gguaaguucuguc

SEQ ID NO: 17941 - RNA, 12 nt, Artificial Sequence
  source: /note="Description of Artificial Sequence: Synthetic oligonucleotide"
  source: /note="RNA"
  source: /note="5' tri-ethylene glycol (TEG)"
  modified_base (1)..(1): bicyclic nucleic acid (BNA)
  modified_base (2)..(2): bicyclic nucleic acid (BNA)
  modified_base (9)..(9): 5-methyl modified nucleotide
gguaaguucugu

SEQ ID NO: 17942 - RNA, 11 nt, Artificial Sequence
  source: /note="Description of Artificial Sequence: Synthetic oligonucleotide"
  source: /note="RNA"
  source: /note="5' tri-ethylene glycol (TEG)"
  modified_base (1)..(1): bicyclic nucleic acid (BNA)
  modified_base (2)..(2): bicyclic nucleic acid (BNA)
  modified_base (9)..(9): 5-methyl modified nucleotide
gguaaguucug

SEQ ID NO: 17943 - RNA, 10 nt, Artificial Sequence
  source: /note="Description of Artificial Sequence: Synthetic oligonucleotide"
  source: /note="RNA"
  source: /note="5' tri-ethylene glycol (TEG)"
  modified_base (1)..(1): bicyclic nucleic acid (BNA)
  modified_base (2)..(2): bicyclic nucleic acid (BNA)
  modified_base (9)..(9): 5-methyl modified nucleotide
gguaaguucu

SEQ ID NO: 17944 - RNA, 9 nt, Artificial Sequence
  source: /note="Description of Artificial Sequence: Synthetic oligonucleotide"
  source: /note="RNA"
  source: /note="5' tri-ethylene glycol (TEG)"
  modified_base (1)..(1): bicyclic nucleic acid (BNA)
  modified_base (2)..(2): bicyclic nucleic acid (BNA)
  modified_base (9)..(9): 5-methyl modified nucleotide
gguaaguuc

SEQ ID NO: 17945 - RNA, 8 nt, Artificial Sequence
  source: /note="Description of Artificial Sequence: Synthetic oligonucleotide"
  source: /note="RNA"
  source: /note="5' tri-ethylene glycol (TEG)"
  modified_base (1)..(1): bicyclic nucleic acid (BNA)
  modified_base (2)..(2): bicyclic nucleic acid (BNA)
gguaaguu

SEQ ID NO: 17946 - RNA, 20 nt, Artificial Sequence
  source: /note="Description of Artificial Sequence: Synthetic oligonucleotide"
  source: /note="RNA"
  source: /note="5' tri-ethylene glycol (TEG)"
  modified_base (1)..(1): 5-methyl bicyclic nucleic acid
  modified_base (2)..(2): bicyclic nucleic acid (BNA)
  modified_base (10)..(10): 5-methyl modified nucleotide
  modified_base (14)..(14): 5-methyl modified nucleotide
  modified_base (15)..(15): 5-methyl modified nucleotide
  modified_base (19)..(19): 5-methyl modified nucleotide
  modified_base (20)..(20): 5-methyl modified nucleotide
cgguaaguucuguccaagcc

SEQ ID NO: 17947 - RNA, 19 nt, Artificial Sequence
  source: /note="Description of Artificial Sequence: Synthetic oligonucleotide"
  source: /note="RNA"
  source: /note="5' tri-ethylene glycol (TEG)"
  modified_base (1)..(1): 5-methyl bicyclic nucleic acid
  modified_base (2)..(2): bicyclic nucleic acid (BNA)
  modified_base (10)..(10): 5-methyl modified nucleotide
  modified_base (14)..(14): 5-methyl modified nucleotide
  modified_base (15)..(15): 5-methyl modified nucleotide
  modified_base (19)..(19): 5-methyl modified nucleotide
cgguaaguucuguccaagc

SEQ ID NO: 17948 - RNA, 18 nt, Artificial Sequence
  source: /note="Description of Artificial Sequence: Synthetic oligonucleotide"
  source: /note="RNA"
  source: /note="5' tri-ethylene glycol (TEG)"
  modified_base (1)..(1): 5-methyl bicyclic nucleic acid
  modified_base (2)..(2): bicyclic nucleic acid (BNA)
  modified_base (10)..(10): 5-methyl modified nucleotide
  modified_base (14)..(14): 5-methyl modified nucleotide
  modified_base (15)..(15): 5-methyl modified nucleotide
cgguaaguucuguccaag

SEQ ID NO: 17949 - RNA, 17 nt, Artificial Sequence
  source: /note="Description of Artificial Sequence: Synthetic oligonucleotide"
  source: /note="RNA"
  source: /note="5' tri-ethylene glycol (TEG)"
  modified_base (1)..(1): 5-methyl bicyclic nucleic acid
  modified_base (2)..(2): bicyclic nucleic acid (BNA)
  modified_base (10)..(10): 5-methyl modified nucleotide
  modified_base (14)..(14): 5-methyl modified nucleotide
  modified_base (15)..(15): 5-methyl modified nucleotide
cgguaaguucuguccaa

SEQ ID NO: 17950 - RNA, 16 nt, Artificial Sequence
  source: /note="Description of Artificial Sequence: Synthetic oligonucleotide"
  source: /note="RNA"
  source: /note="5' tri-ethylene glycol (TEG)"
  modified_base (1)..(1): 5-methyl bicyclic nucleic acid
  modified_base (2)..(2): bicyclic nucleic acid (BNA)
  modified_base (10)..(10): 5-methyl modified nucleotide
  modified_base (14)..(14): 5-methyl modified nucleotide
  modified_base (15)..(15): 5-methyl modified nucleotide
cgguaaguucugucca

SEQ ID NO: 17951 - RNA, 15 nt, Artificial Sequence
  source: /note="Description of Artificial Sequence: Synthetic oligonucleotide"
  source: /note="RNA"
  source: /note="5' tri-ethylene glycol (TEG)"
  modified_base (1)..(1): 5-methyl bicyclic nucleic acid
  modified_base (2)..(2): bicyclic nucleic acid (BNA)
  modified_base (10)..(10): 5-methyl modified nucleotide
  modified_base (14)..(14): 5-methyl modified nucleotide
  modified_base (15)..(15): 5-methyl modified nucleotide
cgguaaguucugucc

SEQ ID NO: 17952 - RNA, 14 nt, Artificial Sequence
  source: /note="Description of Artificial Sequence: Synthetic oligonucleotide"
  source: /note="RNA"
  source: /note="5' tri-ethylene glycol (TEG)"
  modified_base (1)..(1): 5-methyl bicyclic nucleic acid
  modified_base (2)..(2): bicyclic nucleic acid (BNA)
  modified_base (10)..(10): 5-methyl modified nucleotide
  modified_base (14)..(14): 5-methyl modified nucleotide
cgguaaguucuguc

SEQ ID NO: 17953 - RNA, 13 nt, Artificial Sequence
  source: /note="Description of Artificial Sequence: Synthetic oligonucleotide"
  source: /note="RNA"
  source: /note="5' tri-ethylene glycol (TEG)"
  modified_base (1)..(1): 5-methyl bicyclic nucleic acid
  modified_base (2)..(2): bicyclic nucleic acid (BNA)
  modified_base (10)..(10): 5-methyl modified nucleotide
cgguaaguucugu

SEQ ID NO: 17954 - RNA, 12 nt, Artificial Sequence
  source: /note="Description of Artificial Sequence: Synthetic oligonucleotide"
  source: /note="RNA"
  source: /note="5' tri-ethylene glycol (TEG)"
  modified_base (1)..(1): 5-methyl bicyclic nucleic acid
  modified_base (2)..(2): bicyclic nucleic acid (BNA)
  modified_base (10)..(10): 5-methyl modified nucleotide
cgguaaguucug

SEQ ID NO: 17955 - RNA, 11 nt, Artificial Sequence
  source: /note="Description of Artificial Sequence: Synthetic oligonucleotide"
  source: /note="RNA"
  source: /note="5' tri-ethylene glycol (TEG)"
  modified_base (1)..(1): 5-methyl bicyclic nucleic acid
  modified_base (2)..(2): bicyclic nucleic acid (BNA)
  modified_base (10)..(10): 5-methyl modified nucleotide
cgguaaguucu

SEQ ID NO: 17956 - RNA, 10 nt, Artificial Sequence
  source: /note="Description of Artificial Sequence: Synthetic oligonucleotide"
  source: /note="RNA"
  source: /note="5' tri-ethylene glycol (TEG)"
  modified_base (1)..(1): 5-methyl bicyclic nucleic acid
  modified_base (2)..(2): bicyclic nucleic acid (BNA)
  modified_base (10)..(10): 5-methyl modified nucleotide
cgguaaguuc

SEQ ID NO: 17957 - RNA, 9 nt, Artificial Sequence
  source: /note="Description of Artificial Sequence: Synthetic oligonucleotide"
  source: /note="RNA"
  source: /note="5' tri-ethylene glycol (TEG)"
  modified_base (1)..(1): 5-methyl bicyclic nucleic acid
  modified_base (2)..(2): bicyclic nucleic acid (BNA)
cgguaaguu

SEQ ID NO: 17958 - RNA, 8 nt, Artificial Sequence
  source: /note="Description of Artificial Sequence: Synthetic oligonucleotide"
  source: /note="RNA"
  source: /note="5' tri-ethylene glycol (TEG)"
  modified_base (1)..(1): 5-methyl bicyclic nucleic acid
  modified_base (2)..(2): bicyclic nucleic acid (BNA)
cgguaagu

SEQ ID NO: 17959 - DNA, 20 bp, Artificial Sequence
  source: /note="Description of Artificial Sequence: Synthetic oligonucleotide"
  source: /note="Description of Combined DNA/RNA Molecule: Synthetic oligonucleotide"
  source: /note="DNA/RNA"
  source: /note="5' tri-ethylene glycol (TEG)"
  modified_base (1)..(1): bicyclic nucleic acid (BNA)
  modified_base (2)..(2): 5-methyl bicyclic nucleic acid
  modified_base (11)..(11): 5-methyl modified nucleotide
  modified_base (15)..(15): 5-methyl modified nucleotide
  modified_base (16)..(16): 5-methyl modified nucleotide
  modified_base (20)..(20): 5-methyl modified nucleotide
tcgguaaguucuguccaagc

SEQ ID NO: 17960 - DNA, 19 bp, Artificial Sequence
  source: /note="Description of Artificial Sequence: Synthetic oligonucleotide"
  source: /note="Description of Combined DNA/RNA Molecule: Synthetic oligonucleotide"
  source: /note="DNA/RNA"
  source: /note="5' tri-ethylene glycol (TEG)"
  modified_base (1)..(1): bicyclic nucleic acid (BNA)
  modified_base (2)..(2): 5-methyl bicyclic nucleic acid
  modified_base (11)..(11): 5-methyl modified nucleotide
  modified_base (15)..(15): 5-methyl modified nucleotide
  modified_base (16)..(16): 5-methyl modified nucleotide
tcgguaaguucuguccaag

SEQ ID NO: 17961 - DNA, 18 bp, Artificial Sequence
  source: /note="Description of Artificial Sequence: Synthetic oligonucleotide"
  source: /note="Description of Combined DNA/RNA Molecule: Synthetic oligonucleotide"
  source: /note="DNA/RNA"
  source: /note="5' tri-ethylene glycol (TEG)"
  modified_base (1)..(1): bicyclic nucleic acid (BNA)
  modified_base (2)..(2): 5-methyl bicyclic nucleic acid
  modified_base (11)..(11): 5-methyl modified nucleotide
  modified_base (15)..(15): 5-methyl modified nucleotide
  modified_base (16)..(16): 5-methyl modified nucleotide
tcgguaaguucuguccaa

SEQ ID NO: 17962 - DNA, 17 bp, Artificial Sequence
  source: /note="Description of Artificial Sequence: Synthetic oligonucleotide"
  source: /note="Description of Combined DNA/RNA Molecule: Synthetic oligonucleotide"
  source: /note="DNA/RNA"
  source: /note="5' tri-ethylene glycol (TEG)"
  modified_base (1)..(1): bicyclic nucleic acid (BNA)
  modified_base (2)..(2): 5-methyl bicyclic nucleic acid
  modified_base (11)..(11): 5-methyl modified nucleotide
  modified_base (15)..(15): 5-methyl modified nucleotide
  modified_base (16)..(16): 5-methyl modified nucleotide
tcgguaaguucugucca

SEQ ID NO: 17963 - DNA, 16 bp, Artificial Sequence
  source: /note="Description of Artificial Sequence: Synthetic oligonucleotide"
  source: /note="Description of Combined DNA/RNA Molecule: Synthetic oligonucleotide"
  source: /note="DNA/RNA"
  source: /note="5' tri-ethylene glycol (TEG)"
  modified_base (1)..(1): bicyclic nucleic acid (BNA)
  modified_base (2)..(2): 5-methyl bicyclic nucleic acid
  modified_base (11)..(11): 5-methyl modified nucleotide
  modified_base (15)..(15): 5-methyl modified nucleotide
  modified_base (16)..(16): 5-methyl modified nucleotide
tcgguaaguucugucc

SEQ ID NO: 17964 - DNA, 15 bp, Artificial Sequence
  source: /note="Description of Artificial Sequence: Synthetic oligonucleotide"
  source: /note="Description of Combined DNA/RNA Molecule: Synthetic oligonucleotide"
  source: /note="DNA/RNA"
  source: /note="5' tri-ethylene glycol (TEG)"
  modified_base (1)..(1): bicyclic nucleic acid (BNA)
  modified_base (2)..(2): 5-methyl bicyclic nucleic acid
  modified_base (11)..(11): 5-methyl modified nucleotide
  modified_base (15)..(15): 5-methyl modified nucleotide
tcgguaaguucuguc

SEQ ID NO: 17965 - DNA, 14 bp, Artificial Sequence
  source: /note="Description of Artificial Sequence: Synthetic oligonucleotide"
  source: /note="Description of Combined DNA/RNA Molecule: Synthetic oligonucleotide"
  source: /note="DNA/RNA"
  source: /note="5' tri-ethylene glycol (TEG)"
  modified_base (1)..(1): bicyclic nucleic acid (BNA)
  modified_base (2)..(2): 5-methyl bicyclic nucleic acid
  modified_base (11)..(11): 5-methyl modified nucleotide
tcgguaaguucugu

SEQ ID NO: 17966 - DNA, 13 bp, Artificial Sequence
  source: /note="Description of Artificial Sequence: Synthetic oligonucleotide"
  source: /note="Description of Combined DNA/RNA Molecule: Synthetic oligonucleotide"
  source: /note="DNA/RNA"
  source: /note="5' tri-ethylene glycol (TEG)"
  modified_base (1)..(1): bicyclic nucleic acid (BNA)
  modified_base (2)..(2): 5-methyl bicyclic nucleic acid
  modified_base (11)..(11): 5-methyl modified nucleotide
tcgguaaguucug

SEQ ID NO: 17967 - DNA, 12 bp, Artificial Sequence
  source: /note="Description of Artificial Sequence: Synthetic oligonucleotide"
  source: /note="Description of Combined DNA/RNA Molecule: Synthetic oligonucleotide"
  source: /note="DNA/RNA"
  source: /note="5' tri-ethylene glycol (TEG)"
  modified_base (1)..(1): bicyclic nucleic acid (BNA)
  modified_base (2)..(2): 5-methyl bicyclic nucleic acid
  modified_base (11)..(11): 5-methyl modified nucleotide
tcgguaaguucu

SEQ ID NO: 17968 - DNA, 11 bp, Artificial Sequence
  source: /note="Description of Artificial Sequence: Synthetic oligonucleotide"
  source: /note="Description of Combined DNA/RNA Molecule: Synthetic oligonucleotide"
  source: /note="DNA/RNA"
  source: /note="5' tri-ethylene glycol (TEG)"
  modified_base (1)..(1): bicyclic nucleic acid (BNA)
  modified_base (2)..(2): 5-methyl bicyclic nucleic acid
  modified_base (11)..(11): 5-methyl modified nucleotide
tcgguaaguuc

SEQ ID NO: 17969 - DNA, 10 bp, Artificial Sequence
  source: /note="Description of Artificial Sequence: Synthetic oligonucleotide"
  source: /note="Description of Combined DNA/RNA Molecule: Synthetic oligonucleotide"
  source: /note="DNA/RNA"
  source: /note="5' tri-ethylene glycol (TEG)"
  modified_base (1)..(1): bicyclic nucleic acid (BNA)
  modified_base (2)..(2): 5-methyl bicyclic nucleic acid
tcgguaaguu

SEQ ID NO: 17970 - DNA, 9 bp, Artificial Sequence
  source: /note="Description of Artificial Sequence: Synthetic oligonucleotide"
  source: /note="Description of Combined DNA/RNA Molecule: Synthetic oligonucleotide"
  source: /note="DNA/RNA"
  source: /note="5' tri-ethylene glycol (TEG)"
  modified_base (1)..(1): bicyclic nucleic acid (BNA)
  modified_base (2)..(2): 5-methyl bicyclic nucleic acid
tcgguaagu

SEQ ID NO: 17971 - DNA, 20 bp, Artificial Sequence
  source: /note="Description of Artificial Sequence: Synthetic oligonucleotide"
  source: /note="Description of Combined DNA/RNA Molecule: Synthetic oligonucleotide"
  source: /note="DNA/RNA"
  source: /note="5' tri-ethylene glycol (TEG)"
  modified_base (1)..(1): bicyclic nucleic acid (BNA)
  modified_base (2)..(2): bicyclic nucleic acid (BNA)
  modified_base (3)..(3): 5-methyl modified nucleotide
  modified_base (12)..(12): 5-methyl modified nucleotide
  modified_base (16)..(16): 5-methyl modified nucleotide
  modified_base (17)..(17): 5-methyl modified nucleotide
gtcgguaaguucuguccaag

SEQ ID NO: 17972 - DNA, 19 bp, Artificial Sequence
  source: /note="Description of Artificial Sequence: Synthetic oligonucleotide"
  source: /note="Description of Combined DNA/RNA Molecule: Synthetic oligonucleotide"
  source: /note="DNA/RNA"
  source: /note="5' tri-ethylene glycol (TEG)"
  modified_base (1)..(1): bicyclic nucleic acid (BNA)
  modified_base (2)..(2): bicyclic nucleic acid (BNA)
  modified_base (3)..(3): 5-methyl modified nucleotide
  modified_base (12)..(12): 5-methyl modified nucleotide
  modified_base (16)..(16): 5-methyl modified nucleotide
  modified_base (17)..(17): 5-methyl modified nucleotide
gtcgguaaguucuguccaa

SEQ ID NO: 17973 - DNA, 18 bp, Artificial Sequence
  source: /note="Description of Artificial Sequence: Synthetic oligonucleotide"
  source: /note="Description of Combined DNA/RNA Molecule: Synthetic oligonucleotide"
  source: /note="DNA/RNA"
  source: /note="5' tri-ethylene glycol (TEG)"
  modified_base (1)..(1): bicyclic nucleic acid (BNA)
  modified_base (2)..(2): bicyclic nucleic acid (BNA)
  modified_base (3)..(3): 5-methyl modified nucleotide
  modified_base (12)..(12): 5-methyl modified nucleotide
  modified_base (16)..(16): 5-methyl modified nucleotide
  modified_base (17)..(17): 5-methyl modified nucleotide
gtcgguaaguucugucca

SEQ ID NO: 17974 - DNA, 17 bp, Artificial Sequence
  source: /note="Description of Artificial Sequence: Synthetic oligonucleotide"
  source: /note="Description of Combined DNA/RNA Molecule: Synthetic oligonucleotide"
  source: /note="DNA/RNA"
  source: /note="5' tri-ethylene glycol (TEG)"
  modified_base (1)..(1): bicyclic nucleic acid (BNA)
  modified_base (2)..(2): bicyclic nucleic acid (BNA)
  modified_base (3)..(3): 5-methyl modified nucleotide
  modified_base (12)..(12): 5-methyl modified nucleotide
  modified_base (16)..(16): 5-methyl modified nucleotide
  modified_base (17)..(17): 5-methyl modified nucleotide
gtcgguaaguucugucc

SEQ ID NO: 17975 - DNA, 16 bp, Artificial Sequence
  source: /note="Description of Artificial Sequence: Synthetic oligonucleotide"
  source: /note="Description of Combined DNA/RNA Molecule: Synthetic oligonucleotide"
  source: /note="DNA/RNA"
  source: /note="5' tri-ethylene glycol (TEG)"
  modified_base (1)..(1): bicyclic nucleic acid (BNA)
  modified_base (2)..(2): bicyclic nucleic acid (BNA)
  modified_base (3)..(3): 5-methyl modified nucleotide
  modified_base (12)..(12): 5-methyl modified nucleotide
  modified_base (16)..(16): 5-methyl modified nucleotide
gtcgguaaguucuguc

SEQ ID NO: 17976 - DNA, 15 bp, Artificial Sequence
  source: /note="Description of Artificial Sequence: Synthetic oligonucleotide"
  source: /note="Description of Combined DNA/RNA Molecule: Synthetic oligonucleotide"
  source: /note="DNA/RNA"
  source: /note="5' tri-ethylene glycol (TEG)"
  modified_base (1)..(1): bicyclic nucleic acid (BNA)
  modified_base (2)..(2): bicyclic nucleic acid (BNA)
  modified_base (3)..(3): 5-methyl modified nucleotide
  modified_base (12)..(12): 5-methyl modified nucleotide
gtcgguaaguucugu

SEQ ID NO: 17977 - DNA, 14 bp, Artificial Sequence
  source: /note="Description of Artificial Sequence: Synthetic oligonucleotide"
  source: /note="Description of Combined DNA/RNA Molecule: Synthetic oligonucleotide"
  source: /note="DNA/RNA"
  source: /note="5' tri-ethylene glycol (TEG)"
  modified_base (1)..(1): bicyclic nucleic acid (BNA)
  modified_base (2)..(2): bicyclic nucleic acid (BNA)
  modified_base (3)..(3): 5-methyl modified nucleotide
  modified_base (12)..(12): 5-methyl modified nucleotide
gtcgguaaguucug

SEQ ID NO: 17978 - DNA, 13 bp, Artificial Sequence
  source: /note="Description of Artificial Sequence: Synthetic oligonucleotide"
  source: /note="Description of Combined DNA/RNA Molecule: Synthetic oligonucleotide"
  source: /note="DNA/RNA"
  source: /note="5' tri-ethylene glycol (TEG)"
  modified_base (1)..(1): bicyclic nucleic acid (BNA)
  modified_base (2)..(2): bicyclic nucleic acid (BNA)
  modified_base (3)..(3): 5-methyl modified nucleotide
  modified_base (12)..(12): 5-methyl modified nucleotide
gtcgguaaguucu

SEQ ID NO: 17979 - DNA, 12 bp, Artificial Sequence
  source: /note="Description of Artificial Sequence: Synthetic oligonucleotide"
  source: /note="Description of Combined DNA/RNA Molecule: Synthetic oligonucleotide"
  source: /note="DNA/RNA"
  source: /note="5' tri-ethylene glycol (TEG)"
  modified_base (1)..(1): bicyclic nucleic acid (BNA)
  modified_base (2)..(2): bicyclic nucleic acid (BNA)
  modified_base (3)..(3): 5-methyl modified nucleotide
  modified_base (12)..(12): 5-methyl modified nucleotide
gtcgguaaguuc

SEQ ID NO: 17980 - DNA, 11 bp, Artificial Sequence
  source: /note="Description of Artificial Sequence: Synthetic oligonucleotide"
  source: /note="Description of Combined DNA/RNA Molecule: Synthetic oligonucleotide"
  source: /note="DNA/RNA"
  source: /note="5' tri-ethylene glycol (TEG)"
  modified_base (1)..(1): bicyclic nucleic acid (BNA)
  modified_base (2)..(2): bicyclic nucleic acid (BNA)
  modified_base (3)..(3): 5-methyl modified nucleotide
gtcgguaaguu

SEQ ID NO: 17981 - DNA, 10 bp, Artificial Sequence
  source: /note="Description of Artificial Sequence: Synthetic oligonucleotide"
  source: /note="Description of Combined DNA/RNA Molecule: Synthetic oligonucleotide"
  source: /note="DNA/RNA"
  source: /note="5' tri-ethylene glycol (TEG)"
  modified_base (1)..(1): bicyclic nucleic acid (BNA)
  modified_base (2)..(2): bicyclic nucleic acid (BNA)
  modified_base (3)..(3): 5-methyl modified nucleotide
gtcgguaagu

SEQ ID NO: 17982 - RNA, 20 nt, Artificial Sequence
  source: /note="Description of Artificial Sequence: Synthetic oligonucleotide"
  source: /note="RNA"
  source: /note="5' tri-ethylene glycol (TEG)"
  modified_base (1)..(1): bicyclic nucleic acid (BNA)
  modified_base (2)..(2): bicyclic nucleic acid (BNA)
  modified_base (4)..(4): 5-methyl modified nucleotide
  modified_base (13)..(13): 5-methyl modified nucleotide
  modified_base (17)..(17): 5-methyl modified nucleotide
  modified_base (18)..(18): 5-methyl modified nucleotide
agucgguaaguucuguccaa

SEQ ID NO: 17983 - RNA, 19 nt, Artificial Sequence
  source: /note="Description of Artificial Sequence: Synthetic oligonucleotide"
  source: /note="RNA"
  source: /note="5' tri-ethylene glycol (TEG)"
  modified_base (1)..(1): bicyclic nucleic acid (BNA)
  modified_base (2)..(2): bicyclic nucleic acid (BNA)
  modified_base (4)..(4): 5-methyl modified nucleotide
  modified_base (13)..(13): 5-methyl modified nucleotide
  modified_base (17)..(17): 5-methyl modified nucleotide
  modified_base (18)..(18): 5-methyl modified nucleotide
agucgguaaguucugucca

SEQ ID NO: 17984 - RNA, 17 nt, Artificial Sequence
  source: /note="Description of Artificial Sequence: Synthetic oligonucleotide"
  source: /note="RNA"
  source: /note="5' tri-ethylene glycol (TEG)"
  modified_base (1)..(1): bicyclic nucleic acid (BNA)
  modified_base (2)..(2): bicyclic nucleic acid (BNA)
  modified_base (4)..(4): 5-methyl modified nucleotide
  modified_base (13)..(13): 5-methyl modified nucleotide
  modified_base (17)..(17): 5-methyl modified nucleotide
agucgguaaguucuguc

SEQ ID NO: 17985 - RNA, 16 nt, Artificial Sequence
  source: /note="Description of Artificial Sequence: Synthetic oligonucleotide"
  source: /note="RNA"
  source: /note="5' tri-ethylene glycol (TEG)"
  modified_base (1)..(1): bicyclic nucleic acid (BNA)
  modified_base (2)..(2): bicyclic nucleic acid (BNA)
  modified_base (4)..(4): 5-methyl modified nucleotide
  modified_base (13)..(13): 5-methyl modified nucleotide
agucgguaaguucugu

SEQ ID NO: 17986 - RNA, 15 nt, Artificial Sequence
  source: /note="Description of Artificial Sequence: Synthetic oligonucleotide"
  source: /note="RNA"
  source: /note="5' tri-ethylene glycol (TEG)"
  modified_base (1)..(1): bicyclic nucleic acid (BNA)
  modified_base (2)..(2): bicyclic nucleic acid (BNA)
  modified_base (4)..(4): 5-methyl modified nucleotide
  modified_base (13)..(13): 5-methyl modified nucleotide
agucgguaaguucug

SEQ ID NO: 17987 - RNA, 14 nt, Artificial Sequence
  source: /note="Description of Artificial Sequence: Synthetic oligonucleotide"
  source: /note="RNA"
  source: /note="5' tri-ethylene glycol (TEG)"
  modified_base (1)..(1): bicyclic nucleic acid (BNA)
  modified_base (2)..(2): bicyclic nucleic acid (BNA)
  modified_base (4)..(4): 5-methyl modified nucleotide
  modified_base (13)..(13): 5-methyl modified nucleotide
agucgguaaguucu

SEQ ID NO: 17988 - RNA, 13 nt, Artificial Sequence
  source: /note="Description of Artificial Sequence: Synthetic oligonucleotide"
  source: /note="RNA"
  source: /note="5' tri-ethylene glycol (TEG)"
  modified_base (1)..(1): bicyclic nucleic acid (BNA)
  modified_base (2)..(2): bicyclic nucleic acid (BNA)
  modified_base (4)..(4): 5-methyl modified nucleotide
  modified_base (13)..(13): 5-methyl modified nucleotide
agucgguaaguuc

SEQ ID NO: 17989 - RNA, 12 nt, Artificial Sequence
  source: /note="Description of Artificial Sequence: Synthetic oligonucleotide"
  source: /note="RNA"
  source: /note="5' tri-ethylene glycol (TEG)"
  modified_base (1)..(1): bicyclic nucleic acid (BNA)
  modified_base (2)..(2): bicyclic nucleic acid (BNA)
  modified_base (4)..(4): 5-methyl modified nucleotide
agucgguaaguu

SEQ ID NO: 17990 - RNA, 11 nt, Artificial Sequence
  source: /note="Description of Artificial Sequence: Synthetic oligonucleotide"
  source: /note="RNA"
  source: /note="5' tri-ethylene glycol (TEG)"
  modified_base (1)..(1): bicyclic nucleic acid (BNA)
  modified_base (2)..(2): bicyclic nucleic acid (BNA)
  modified_base (4)..(4): 5-methyl modified nucleotide
agucgguaagu

SEQ ID NO: 17991 - RNA, 20 nt, Artificial Sequence
  source: /note="Description of Artificial Sequence: Synthetic oligonucleotide"
  source: /note="RNA"
  source: /note="5' tri-ethylene glycol (TEG)"
  modified_base (1)..(1): 5-methyl bicyclic nucleic acid
  modified_base (2)..(2): bicyclic nucleic acid (BNA)
  modified_base (5)..(5): 5-methyl modified nucleotide
  modified_base (14)..(14): 5-methyl modified nucleotide
  modified_base (18)..(18): 5-methyl modified nucleotide
  modified_base (19)..(19): 5-methyl modified nucleotide
cagucgguaaguucugucca

SEQ ID NO: 17992 - RNA, 19 nt, Artificial Sequence
  source: /note="Description of Artificial Sequence: Synthetic oligonucleotide"
  source: /note="RNA"
  source: /note="5' tri-ethylene glycol (TEG)"
  modified_base (1)..(1): 5-methyl bicyclic nucleic acid
  modified_base (2)..(2): bicyclic nucleic acid (BNA)
  modified_base (5)..(5): 5-methyl modified nucleotide
  modified_base (14)..(14): 5-methyl modified nucleotide
  modified_base (18)..(18): 5-methyl modified nucleotide
  modified_base (19)..(19): 5-methyl modified nucleotide
cagucgguaaguucugucc

SEQ ID NO: 17993 - RNA, 18 nt, Artificial Sequence
  source: /note="Description of Artificial Sequence: Synthetic oligonucleotide"
  source: /note="RNA"
  source: /note="5' tri-ethylene glycol (TEG)"
  modified_base (1)..(1): 5-methyl bicyclic nucleic acid
  modified_base (2)..(2): bicyclic nucleic acid (BNA)
  modified_base (5)..(5): 5-methyl modified nucleotide
  modified_base (14)..(14): 5-methyl modified nucleotide
  modified_base (18)..(18): 5-methyl modified nucleotide
cagucgguaaguucuguc

SEQ ID NO: 17994 - RNA, 17 nt, Artificial Sequence
  source: /note="Description of Artificial Sequence: Synthetic oligonucleotide"
  source: /note="RNA"
  source: /note="5' tri-ethylene glycol (TEG)"
  modified_base (1)..(1): 5-methyl bicyclic nucleic acid
  modified_base (2)..(2): bicyclic nucleic acid (BNA)
  modified_base (5)..(5): 5-methyl modified nucleotide
  modified_base (14)..(14): 5-methyl modified nucleotide
cagucgguaaguucugu

SEQ ID NO: 17995 - RNA, 16 nt, Artificial Sequence
  source: /note="Description of Artificial Sequence: Synthetic oligonucleotide"
  source: /note="RNA"
  source: /note="5' tri-ethylene glycol (TEG)"
  modified_base (1)..(1): 5-methyl bicyclic nucleic acid
  modified_base (2)..(2): bicyclic nucleic acid (BNA)
  modified_base (5)..(5): 5-methyl modified nucleotide
  modified_base (14)..(14): 5-methyl modified nucleotide
cagucgguaaguucug

SEQ ID NO: 17996 - RNA, 15 nt, Artificial Sequence
  source: /note="Description of Artificial Sequence: Synthetic oligonucleotide"
  source: /note="RNA"
  source: /note="5' tri-ethylene glycol (TEG)"
  modified_base (1)..(1): 5-methyl bicyclic nucleic acid
  modified_base (2)..(2): bicyclic nucleic acid (BNA)
  modified_base (5)..(5): 5-methyl modified nucleotide
  modified_base (14)..(14): 5-methyl modified nucleotide
cagucgguaaguucu

SEQ ID NO: 17997 - RNA, 14 nt, Artificial Sequence
  source: /note="Description of Artificial Sequence: Synthetic oligonucleotide"
  source: /note="RNA"
  source: /note="5' tri-ethylene glycol (TEG)"
  modified_base (1)..(1): 5-methyl bicyclic nucleic acid
  modified_base (2)..(2): bicyclic nucleic acid (BNA)
  modified_base (5)..(5): 5-methyl modified nucleotide
  modified_base (14)..(14): 5-methyl modified nucleotide
cagucgguaaguuc

SEQ ID NO: 17998 - RNA, 13 nt, Artificial Sequence
  source: /note="Description of Artificial Sequence: Synthetic oligonucleotide"
  source: /note="RNA"
  source: /note="5' tri-ethylene glycol (TEG)"
  modified_base (1)..(1): 5-methyl bicyclic nucleic acid
  modified_base (2)..(2): bicyclic nucleic acid (BNA)
  modified_base (5)..(5): 5-methyl modified nucleotide
cagucgguaaguu

SEQ ID NO: 17999 - RNA, 12 nt, Artificial Sequence
  source: /note="Description of Artificial Sequence: Synthetic oligonucleotide"
  source: /note="RNA"
  source: /note="5' tri-ethylene glycol (TEG)"
  modified_base (1)..(1): 5-methyl bicyclic nucleic acid
  modified_base (2)..(2): bicyclic nucleic acid (BNA)
  modified_base (5)..(5): 5-methyl modified nucleotide
cagucgguaagu

SEQ ID NO: 18000 - RNA, 20 nt, Artificial Sequence
  source: /note="Description of Artificial Sequence: Synthetic oligonucleotide"
  source: /note="RNA"
  source: /note="5' tri-ethylene glycol (TEG)"
  modified_base (1)..(1): 5-methyl bicyclic nucleic acid
  modified_base (2)..(2): 5-methyl bicyclic nucleic acid
  modified_base (6)..(6): 5-methyl modified nucleotide
  modified_base (15)..(15): 5-methyl modified nucleotide
  modified_base (19)..(19): 5-methyl modified nucleotide
  modified_base (20)..(20): 5-methyl modified nucleotide
ccagucgguaaguucugucc

SEQ ID NO: 18001 - RNA, 19 nt, Artificial Sequence
  source: /note="Description of Artificial Sequence: Synthetic oligonucleotide"
  source: /note="RNA"
  source: /note="5' tri-ethylene glycol (TEG)"
  modified_base (1)..(1): 5-methyl bicyclic nucleic acid
  modified_base (2)..(2): 5-methyl bicyclic nucleic acid
  modified_base (6)..(6): 5-methyl modified nucleotide
  modified_base (15)..(15): 5-methyl modified nucleotide
  modified_base (19)..(19): 5-methyl modified nucleotide
ccagucgguaaguucuguc

SEQ ID NO: 18002 - RNA, 18 nt, Artificial Sequence
  source: /note="Description of Artificial Sequence: Synthetic oligonucleotide"
  source: /note="RNA"
  source: /note="5' tri-ethylene glycol (TEG)"
  modified_base (1)..(1): 5-methyl bicyclic nucleic acid
  modified_base (2)..(2): 5-methyl bicyclic nucleic acid
  modified_base (6)..(6): 5-methyl modified nucleotide
  modified_base (15)..(15): 5-methyl modified nucleotide
ccagucgguaaguucugu

SEQ ID NO: 18003 - RNA, 17 nt, Artificial Sequence
  source: /note="Description of Artificial Sequence: Synthetic oligonucleotide"
  source: /note="RNA"
  source: /note="5' tri-ethylene glycol (TEG)"
  modified_base (1)..(1): 5-methyl bicyclic nucleic acid
  modified_base (2)..(2): 5-methyl bicyclic nucleic acid
  modified_base (6)..(6): 5-methyl modified nucleotide
  modified_base (15)..(15): 5-methyl modified nucleotide
ccagucgguaaguucug

SEQ ID NO: 18004 - RNA, 16 nt, Artificial Sequence
  source: /note="Description of Artificial Sequence: Synthetic oligonucleotide"
  source: /note="RNA"
  source: /note="5' tri-ethylene glycol (TEG)"
  modified_base (1)..(1): 5-methyl bicyclic nucleic acid
  modified_base (2)..(2): 5-methyl bicyclic nucleic acid
  modified_base (6)..(6): 5-methyl modified nucleotide
  modified_base (15)..(15): 5-methyl modified nucleotide
ccagucgguaaguucu

SEQ ID NO: 18005 - RNA, 15 nt, Artificial Sequence
  source: /note="Description of Artificial Sequence: Synthetic oligonucleotide"
  source: /note="RNA"
  source: /note="5' tri-ethylene glycol (TEG)"
  modified_base (1)..(1): 5-methyl bicyclic nucleic acid
  modified_base (2)..(2): 5-methyl bicyclic nucleic acid
  modified_base (6)..(6): 5-methyl modified nucleotide
  modified_base (15)..(15): 5-methyl modified nucleotide
ccagucgguaaguuc

SEQ ID NO: 18006 - RNA, 14 nt, Artificial Sequence
  source: /note="Description of Artificial Sequence: Synthetic oligonucleotide"
  source: /note="RNA"
  source: /note="5' tri-ethylene glycol (TEG)"
  modified_base (1)..(1): 5-methyl bicyclic nucleic acid
  modified_base (2)..(2): 5-methyl bicyclic nucleic acid
  modified_base (6)..(6): 5-methyl modified nucleotide
ccagucgguaaguu

SEQ ID NO: 18007 - RNA, 13 nt, Artificial Sequence
  source: /note="Description of Artificial Sequence: Synthetic oligonucleotide"
  source: /note="RNA"
  source: /note="5' tri-ethylene glycol (TEG)"
  modified_base (1)..(1): 5-methyl bicyclic nucleic acid
  modified_base (2)..(2): 5-methyl bicyclic nucleic acid
  modified_base (6)..(6): 5-methyl modified nucleotide
ccagucgguaagu

SEQ ID NO: 18008 - RNA, 20 nt, Artificial Sequence
  source: /note="Description of Artificial Sequence: Synthetic oligonucleotide"
  source: /note="RNA"
  source: /note="5' tri-ethylene glycol (TEG)"
  modified_base (1)..(1): bicyclic nucleic acid (BNA)
  modified_base (2)..(2): 5-methyl bicyclic nucleic acid
  modified_base (3)..(3): 5-methyl modified nucleotide
  modified_base (7)..(7): 5-methyl modified nucleotide
  modified_base (16)..(16): 5-methyl modified nucleotide
  modified_base (20)..(20): 5-methyl modified nucleotide
gccagucgguaaguucuguc

SEQ ID NO: 18009 - RNA, 19 nt, Artificial Sequence
  source: /note="Description of Artificial Sequence: Synthetic oligonucleotide"
  source: /note="RNA"
  source: /note="5' tri-ethylene glycol (TEG)"
  modified_base (1)..(1): bicyclic nucleic acid (BNA)
  modified_base (2)..(2): 5-methyl bicyclic nucleic acid
  modified_base (3)..(3): 5-methyl modified nucleotide
  modified_base (7)..(7): 5-methyl modified nucleotide
  modified_base (16)..(16): 5-methyl modified nucleotide
gccagucgguaaguucugu

SEQ ID NO: 18010 - RNA, 18 nt, Artificial Sequence
  source: /note="Description of Artificial Sequence: Synthetic oligonucleotide"
  source: /note="RNA"
  source: /note="5' tri-ethylene glycol (TEG)"
  modified_base (1)..(1): bicyclic nucleic acid (BNA)
  modified_base (2)..(2): 5-methyl bicyclic nucleic acid
  modified_base (3)..(3): 5-methyl modified nucleotide
  modified_base (7)..(7): 5-methyl modified nucleotide
  modified_base (16)..(16): 5-methyl modified nucleotide
gccagucgguaaguucug

SEQ ID NO: 18011 - RNA, 17 nt, Artificial Sequence
  source: /note="Description of Artificial Sequence: Synthetic oligonucleotide"
  source: /note="RNA"
  source: /note="5' tri-ethylene glycol (TEG)"
  modified_base (1)..(1): bicyclic nucleic acid (BNA)
  modified_base (2)..(2): 5-methyl bicyclic nucleic acid
  modified_base (3)..(3): 5-methyl modified nucleotide
  modified_base (7)..(7): 5-methyl modified nucleotide
  modified_base (16)..(16): 5-methyl modified nucleotide
gccagucgguaaguucu

SEQ ID NO: 18012 - RNA, 16 nt, Artificial Sequence
  source: /note="Description of Artificial Sequence: Synthetic oligonucleotide"
  source: /note="RNA"
  source: /note="5' tri-ethylene glycol (TEG)"
  modified_base (1)..(1): bicyclic nucleic acid (BNA)
  modified_base (2)..(2): 5-methyl bicyclic nucleic acid
  modified_base (3)..(3): 5-methyl modified nucleotide
  modified_base (7)..(7): 5-methyl modified nucleotide
  modified_base (16)..(16): 5-methyl modified nucleotide
gccagucgguaaguuc

SEQ ID NO: 18013 - RNA, 15 nt, Artificial Sequence
  source: /note="Description of Artificial Sequence: Synthetic oligonucleotide"
  source: /note="RNA"
  source: /note="5' tri-ethylene glycol (TEG)"
  modified_base (1)..(1): bicyclic nucleic acid (BNA)
  modified_base (2)..(2): 5-methyl bicyclic nucleic acid
  modified_base (3)..(3): 5-methyl modified nucleotide
  modified_base (7)..(7): 5-methyl modified nucleotide
gccagucgguaaguu

SEQ ID NO: 18014 - RNA, 14 nt, Artificial Sequence
  source: /note="Description of Artificial Sequence: Synthetic oligonucleotide"
  source: /note="RNA"
  source: /note="5' tri-ethylene glycol (TEG)"
  modified_base (1)..(1): bicyclic nucleic acid (BNA)
  modified_base (2)..(2): 5-methyl bicyclic nucleic acid
  modified_base (3)..(3): 5-methyl modified nucleotide
  modified_base (7)..(7): 5-methyl modified nucleotide
gccagucgguaagu

SEQ ID NO: 18015 - DNA, 20 bp, Artificial Sequence
  source: /note="Description of Artificial Sequence: Synthetic oligonucleotide"
  source: /note="Description of Combined DNA/RNA Molecule: Synthetic oligonucleotide"
  source: /note="DNA/RNA"
  source: /note="5' tri-ethylene glycol (TEG)"
  modified_base (1)..(1): bicyclic nucleic acid (BNA)
  modified_base (2)..(2): 5-methyl bicyclic nucleic acid
  modified_base (14)..(14): 5-methyl modified nucleotide
  modified_base (19)..(19): 5-methyl modified nucleotide
tcaaggaagauggcauuucu

SEQ ID NO: 18016 - DNA, 22 bp, Artificial Sequence
  source: /note="Description of Artificial Sequence: Synthetic oligonucleotide"
  source: /note="Description of Combined DNA/RNA Molecule: Synthetic oligonucleotide"
  source: /note="DNA/RNA"
  source: /note="5' tri-ethylene glycol (TEG)"
  modified_base (1)..(1): bicyclic nucleic acid (BNA)
  modified_base (2)..(2): 5-methyl bicyclic nucleic acid
  modified_base (14)..(14): 5-methyl modified nucleotide
  modified_base (19)..(19): 5-methyl modified nucleotide
tcaaggaagauggcauuucuag

SEQ ID NO: 18017 - DNA, 16 bp, Artificial Sequence
  source: /note="Description of Artificial Sequence: Synthetic oligonucleotide"
  source: /note="Description of Combined DNA/RNA Molecule: Synthetic oligonucleotide"
  source: /note="DNA/RNA"
  source: /note="5' tri-ethylene glycol (TEG)"
  modified_base (1)..(1): bicyclic nucleic acid (BNA)
  modified_base (2)..(2): 5-methyl bicyclic nucleic acid
  modified_base (14)..(14): 5-methyl modified nucleotide
tcaaggaagauggcau

SEQ ID NO: 18018 - RNA, 15 nt, Artificial Sequence
  source: /note="Description of Artificial Sequence: Synthetic oligonucleotide"
  source: /note="RNA"
  source: /note="5' tri-ethylene glycol (TEG)"
  modified_base (1)..(1): bicyclic nucleic acid (BNA)
  modified_base (2)..(2): bicyclic nucleic acid (BNA)
  modified_base (9)..(9): 5-methyl modified nucleotide
  modified_base (14)..(14): 5-methyl modified nucleotide
gaagauggcauuucu

SEQ ID NO: 18019 - DNA, 21 bp, Artificial Sequence
  source: /note="Description of Artificial Sequence: Synthetic oligonucleotide"
  source: /note="Description of Combined DNA/RNA Molecule: Synthetic oligonucleotide"
  source: /note="DNA/RNA"
  source: /note="5' tri-ethylene glycol (TEG)"
  modified_base (1)..(1): bicyclic nucleic acid (BNA)
  modified_base (2)..(2): 5-methyl bicyclic nucleic acid
  modified_base (14)..(14): 5-methyl modified nucleotide
  modified_base (19)..(19): 5-methyl modified nucleotide
tcaaggaagauggcauuucua

SEQ ID NO: 18020 - DNA, 19 bp, Artificial Sequence
  source: /note="Description of Artificial Sequence: Synthetic oligonucleotide"
  source: /note="Description of Combined DNA/RNA Molecule: Synthetic oligonucleotide"
  source: /note="DNA/RNA"
  source: /note="5' tri-ethylene glycol (TEG)"
  modified_base (1)..(1): bicyclic nucleic acid (BNA)
  modified_base (2)..(2): 5-methyl bicyclic nucleic acid
  modified_base (14)..(14): 5-methyl modified nucleotide
  modified_base (19)..(19): 5-methyl modified nucleotide
tcaaggaagauggcauuuc

SEQ ID NO: 18021 - DNA, 18 bp, Artificial Sequence
  source: /note="Description of Artificial Sequence: Synthetic oligonucleotide"
  source: /note="Description of Combined DNA/RNA Molecule: Synthetic oligonucleotide"
  source: /note="DNA/RNA"
  source: /note="5' tri-ethylene glycol (TEG)"
  modified_base (1)..(1): bicyclic nucleic acid (BNA)
  modified_base (2)..(2): 5-methyl bicyclic nucleic acid
  modified_base (14)..(14): 5-methyl modified nucleotide
tcaaggaagauggcauuu

SEQ ID NO: 18022 - DNA, 17 bp, Artificial Sequence
  source: /note="Description of Artificial Sequence: Synthetic oligonucleotide"
  source: /note="Description of Combined DNA/RNA Molecule: Synthetic oligonucleotide"
  source: /note="DNA/RNA"
  source: /note="5' tri-ethylene glycol (TEG)"
  modified_base (1)..(1): bicyclic nucleic acid (BNA)
  modified_base (2)..(2): 5-methyl bicyclic nucleic acid
  modified_base (14)..(14): 5-methyl modified nucleotide
tcaaggaagauggcauu

SEQ ID NO: 18023 - DNA, 15 bp, Artificial Sequence
  source: /note="Description of Artificial Sequence: Synthetic oligonucleotide"
  source: /note="Description of Combined DNA/RNA Molecule: Synthetic oligonucleotide"
  source: /note="DNA/RNA"
  source: /note="5' tri-ethylene glycol (TEG)"
  modified_base (1)..(1): bicyclic nucleic acid (BNA)
  modified_base (2)..(2): 5-methyl bicyclic nucleic acid
  modified_base (14)..(14): 5-methyl modified nucleotide
tcaaggaagauggca

SEQ ID NO: 18024 - DNA, 14 bp, Artificial Sequence
  source: /note="Description of Artificial Sequence: Synthetic oligonucleotide"
  source: /note="Description of Combined DNA/RNA Molecule: Synthetic oligonucleotide"
  source: /note="DNA/RNA"
  source: /note="5' tri-ethylene glycol (TEG)"
  modified_base (1)..(1): bicyclic nucleic acid (BNA)
  modified_base (2)..(2): 5-methyl bicyclic nucleic acid
  modified_base (14)..(14): 5-methyl modified nucleotide
tcaaggaagauggc

SEQ ID NO: 18025 - DNA, 13 bp, Artificial Sequence
  source: /note="Description of Artificial Sequence: Synthetic oligonucleotide"
  source: /note="Description of Combined DNA/RNA Molecule: Synthetic oligonucleotide"
  source: /note="DNA/RNA"
  source: /note="5' tri-ethylene glycol (TEG)"
  modified_base (1)..(1): bicyclic nucleic acid (BNA)
  modified_base (2)..(2): 5-methyl bicyclic nucleic acid
tcaaggaagaugg

SEQ ID NO: 18026 - DNA, 12 bp, Artificial Sequence
  source: /note="Description of Artificial Sequence: Synthetic oligonucleotide"
  source: /note="Description of Combined DNA/RNA Molecule: Synthetic oligonucleotide"
  source: /note="DNA/RNA"
  source: /note="5' tri-ethylene glycol (TEG)"
  modified_base (1)..(1): bicyclic nucleic acid (BNA)
  modified_base (2)..(2): 5-methyl bicyclic nucleic acid
tcaaggaagaug

SEQ ID NO: 18027 - DNA, 11 bp, Artificial Sequence
  source: /note="Description of Artificial Sequence: Synthetic oligonucleotide"
  source: /note="Description of Combined DNA/RNA Molecule: Synthetic oligonucleotide"
  source: /note="DNA/RNA"
  source: /note="5' tri-ethylene glycol (TEG)"
  modified_base (1)..(1): bicyclic nucleic acid (BNA)
  modified_base (2)..(2): 5-methyl bicyclic nucleic acid
tcaaggaagau

SEQ ID NO: 18028 - DNA, 10 bp, Artificial Sequence
  source: /note="Description of Artificial Sequence: Synthetic oligonucleotide"
  source: /note="DNA/RNA"
  source: /note="5' tri-ethylene glycol (TEG)"
  modified_base (1)..(1): bicyclic nucleic acid (BNA)
  modified_base (2)..(2): 5-methyl bicyclic nucleic acid
tcaaggaaga

SEQ ID NO: 18029 - DNA, 9 bp, Artificial Sequence
  source: /note="Description of Artificial Sequence: Synthetic oligonucleotide"
  source: /note="DNA/RNA"
  source: /note="5' tri-ethylene glycol (TEG)"
  modified_base (1)..(1): bicyclic nucleic acid (BNA)
  modified_base (2)..(2): 5-methyl bicyclic nucleic acid
tcaaggaag

SEQ ID NO: 18030 - RNA, 21 nt, Artificial Sequence
  source: /note="Description of Artificial Sequence: Synthetic oligonucleotide"
  source: /note="RNA"
  source: /note="5' tri-ethylene glycol (TEG)"
  modified_base (1)..(1): 5-methyl bicyclic nucleic acid
  modified_base (2)..(2): bicyclic nucleic acid (BNA)
  modified_base (13)..(13): 5-methyl modified nucleotide
  modified_base (18)..(18): 5-methyl modified nucleotide
caaggaagauggcauuucuag

SEQ ID NO: 18031 - RNA, 20 nt, Artificial Sequence
  source: /note="Description of Artificial Sequence: Synthetic oligonucleotide"
  source: /note="RNA"
  source: /note="5' tri-ethylene glycol (TEG)"
  modified_base (1)..(1): 5-methyl bicyclic nucleic acid
  modified_base (2)..(2): bicyclic nucleic acid (BNA)
  modified_base (13)..(13): 5-methyl modified nucleotide
  modified_base (18)..(18): 5-methyl modified nucleotide
caaggaagauggcauuucua

SEQ ID NO: 18032 - RNA, 19 nt, Artificial Sequence
  source: /note="Description of Artificial Sequence: Synthetic oligonucleotide"
  source: /note="RNA"
  source: /note="5' tri-ethylene glycol (TEG)"
  modified_base (1)..(1): 5-methyl bicyclic nucleic acid
  modified_base (2)..(2): bicyclic nucleic acid (BNA)
  modified_base (13)..(13): 5-methyl modified nucleotide
  modified_base (18)..(18): 5-methyl modified nucleotide
caaggaagauggcauuucu

SEQ ID NO: 18033 - RNA, 18 nt, Artificial Sequence
  source: /note="Description of Artificial Sequence: Synthetic oligonucleotide"
  source: /note="RNA"
  source: /note="5' tri-ethylene glycol (TEG)"
  modified_base (1)..(1): 5-methyl bicyclic nucleic acid
  modified_base (2)..(2): bicyclic nucleic acid (BNA)
  modified_base (13)..(13): 5-methyl modified nucleotide
  modified_base (18)..(18): 5-methyl modified nucleotide
caaggaagauggcauuuc

SEQ ID NO: 18034 - RNA, 17 nt, Artificial Sequence
  source: /note="Description of Artificial Sequence: Synthetic oligonucleotide"
  source: /note="RNA"
  source: /note="5' tri-ethylene glycol (TEG)"
  modified_base (1)..(1): 5-methyl bicyclic nucleic acid
  modified_base (2)..(2): bicyclic nucleic acid (BNA)
  modified_base (13)..(13): 5-methyl modified nucleotide
caaggaagauggcauuu

SEQ ID NO: 18035 - RNA, 16 nt, Artificial Sequence
  source: /note="Description of Artificial Sequence: Synthetic oligonucleotide"
  source: /note="RNA"
  source: /note="5' tri-ethylene glycol (TEG)"
  modified_base (1)..(1): 5-methyl bicyclic nucleic acid
  modified_base (2)..(2): bicyclic nucleic acid (BNA)
  modified_base (13)..(13): 5-methyl modified nucleotide
caaggaagauggcauu

SEQ ID NO: 18036 - RNA, 15 nt, Artificial Sequence
  source: /note="Description of Artificial Sequence: Synthetic oligonucleotide"
  source: /note="RNA"
  source: /note="5' tri-ethylene glycol (TEG)"
  modified_base (1)..(1): 5-methyl bicyclic nucleic acid
  modified_base (2)..(2): bicyclic nucleic acid (BNA)
  modified_base (13)..(13): 5-methyl modified nucleotide
caaggaagauggcau

SEQ ID NO: 18037 - RNA, 14 nt, Artificial Sequence
  source: /note="Description of Artificial Sequence: Synthetic oligonucleotide"
  source: /note="RNA"
  source: /note="5' tri-ethylene glycol (TEG)"
  modified_base (1)..(1): 5-methyl bicyclic nucleic acid
  modified_base (2)..(2): bicyclic nucleic acid (BNA)
  modified_base (13)..(13): 5-methyl modified nucleotide
caaggaagauggca

SEQ ID NO: 18038 - RNA, 13 nt, Artificial Sequence
  source: /note="Description of Artificial Sequence: Synthetic oligonucleotide"
  source: /note="RNA"
  source: /note="5' tri-ethylene glycol (TEG)"
  modified_base (1)..(1): 5-methyl bicyclic nucleic acid
  modified_base (2)..(2): bicyclic nucleic acid (BNA)
  modified_base (13)..(13): 5-methyl modified nucleotide
caaggaagauggc

SEQ ID NO: 18039 - RNA, 12 nt, Artificial Sequence
  source: /note="Description of Artificial Sequence: Synthetic oligonucleotide"
  source: /note="RNA"
  source: /note="5' tri-ethylene glycol (TEG)"
  modified_base (1)..(1): 5-methyl bicyclic nucleic acid
  modified_base (2)..(2): bicyclic nucleic acid (BNA)
caaggaagaugg

SEQ ID NO: 18040 - RNA, 11 nt, Artificial Sequence
  source: /note="Description of Artificial Sequence: Synthetic oligonucleotide"
  source: /note="RNA"
  source: /note="5' tri-ethylene glycol (TEG)"
  modified_base (1)..(1): 5-methyl bicyclic nucleic acid
  modified_base (2)..(2): bicyclic nucleic acid (BNA)
caaggaagaug

SEQ ID NO: 18041 - RNA, 10 nt, Artificial Sequence
  source: /note="Description of Artificial Sequence: Synthetic oligonucleotide"
  source: /note="RNA"
  source: /note="5' tri-ethylene glycol (TEG)"
  modified_base (1)..(1): 5-methyl bicyclic nucleic acid
  modified_base (2)..(2): bicyclic nucleic acid (BNA)
caaggaagau

SEQ ID NO: 18042 - RNA, 9 nt, Artificial Sequence
  source: /note="Description of Artificial Sequence: Synthetic oligonucleotide"
  source: /note="RNA/Antisense Oligonucleotide"
  source: /note="5' tri-ethylene glycol (TEG)"
  modified_base (1)..(1): 5-methyl bicyclic nucleic acid
  modified_base (2)..(2): bicyclic nucleic acid (BNA)
caaggaaga

SEQ ID NO: 18043 - RNA, 8 nt, Artificial Sequence
  source: /note="Description of Artificial Sequence: Synthetic oligonucleotide"
  source: /note="RNA/Antisense Oligonucleotide"
  source: /note="5' tri-ethylene glycol (TEG)"
  modified_base (1)..(1): 5-methyl bicyclic nucleic acid
  modified_base (2)..(2): bicyclic nucleic acid (BNA)
caaggaag

SEQ ID NO: 18044 - RNA, 20 nt, Artificial Sequence
  source: /note="Description of Artificial Sequence: Synthetic oligonucleotide"
  source: /note="RNA"
  source: /note="5' tri-ethylene glycol (TEG)"
  modified_base (1)..(1): bicyclic nucleic acid (BNA)
  modified_base (2)..(2): bicyclic nucleic acid (BNA)
  modified_base (12)..(12): 5-methyl modified nucleotide
  modified_base (17)..(17): 5-methyl modified nucleotide
aaggaagauggcauuucuag

SEQ ID NO: 18045 - RNA, 19 nt, Artificial Sequence
  source: /note="Description of Artificial Sequence: Synthetic oligonucleotide"
  source: /note="RNA"
  source: /note="5' tri-ethylene glycol (TEG)"
  modified_base (1)..(1): bicyclic nucleic acid (BNA)
  modified_base (2)..(2): bicyclic nucleic acid (BNA)
  modified_base (12)..(12): 5-methyl modified nucleotide
  modified_base (17)..(17): 5-methyl modified nucleotide
aaggaagauggcauuucua

SEQ ID NO: 18046 - RNA, 18 nt, Artificial Sequence
  source: /note="Description of Artificial Sequence: Synthetic oligonucleotide"
  source: /note="RNA"
  source: /note="5' tri-ethylene glycol (TEG)"
  modified_base (1)..(1): bicyclic nucleic acid (BNA)
  modified_base (2)..(2): bicyclic nucleic acid (BNA)
  modified_base (12)..(12): 5-methyl modified nucleotide
  modified_base (17)..(17): 5-methyl modified nucleotide
aaggaagauggcauuucu

SEQ ID NO: 18047 - RNA, 17 nt, Artificial Sequence
  source: /note="Description of Artificial Sequence: Synthetic oligonucleotide"
  source: /note="RNA"
  source: /note="5' tri-ethylene glycol (TEG)"
  modified_base (1)..(1): bicyclic nucleic acid (BNA)
  modified_base (2)..(2): bicyclic nucleic acid (BNA)
  modified_base (12)..(12): 5-methyl modified nucleotide
  modified_base (17)..(17): 5-methyl modified nucleotide
aaggaagauggcauuuc

SEQ ID NO: 18048 - RNA, 16 nt, Artificial Sequence
  source: /note="Description of Artificial Sequence: Synthetic oligonucleotide"
  source: /note="RNA"
  source: /note="5' tri-ethylene glycol (TEG)"
  modified_base (1)..(1): bicyclic nucleic acid (BNA)
  modified_base (2)..(2): bicyclic nucleic acid (BNA)
  modified_base (12)..(12): 5-methyl modified nucleotide
aaggaagauggcauuu

SEQ ID NO: 18049 - RNA, 15 nt, Artificial Sequence
  source: /note="Description of Artificial Sequence: Synthetic oligonucleotide"
  source: /note="RNA"
  source: /note="5' tri-ethylene glycol (TEG)"
  modified_base (1)..(1): bicyclic nucleic acid (BNA)
  modified_base (2)..(2): bicyclic nucleic acid (BNA)
  modified_base (12)..(12): 5-methyl modified nucleotide
aaggaagauggcauu

SEQ ID NO: 18050 - RNA, 14 nt, Artificial Sequence
  source: /note="Description of Artificial Sequence: Synthetic oligonucleotide"
  source: /note="RNA"
  source: /note="5' tri-ethylene glycol (TEG)"
  modified_base (1)..(1): bicyclic nucleic acid (BNA)
  modified_base (2)..(2): bicyclic nucleic acid (BNA)
  modified_base (12)..(12): 5-methyl modified nucleotide
aaggaagauggcau

SEQ ID NO: 18051 - RNA, 13 nt, Artificial Sequence
  source: /note="Description of Artificial Sequence: Synthetic oligonucleotide"
  source: /note="RNA"
  source: /note="5' tri-ethylene glycol (TEG)"
  modified_base (1)..(1): bicyclic nucleic acid (BNA)
  modified_base (2)..(2): bicyclic nucleic acid (BNA)
  modified_base (12)..(12): 5-methyl modified nucleotide
aaggaagauggca

SEQ ID NO: 18052 - RNA, 12 nt, Artificial Sequence
  source: /note="Description of Artificial Sequence: Synthetic oligonucleotide"
  source: /note="RNA"
  source: /note="5' tri-ethylene glycol (TEG)"
  modified_base (1)..(1): bicyclic nucleic acid (BNA)
  modified_base (2)..(2): bicyclic nucleic acid (BNA)
  modified_base (12)..(12): 5-methyl modified nucleotide
aaggaagauggc

SEQ ID NO: 18053 - RNA, 11 nt, Artificial Sequence
  source: /note="Description of Artificial Sequence: Synthetic oligonucleotide"
  source: /note="RNA"
  source: /note="5' tri-ethylene glycol (TEG)"
  modified_base (1)..(1): bicyclic nucleic acid (BNA)
  modified_base (2)..(2): bicyclic nucleic acid (BNA)
aaggaagaugg

SEQ ID NO: 18054 - RNA, 10 nt, Artificial Sequence
  source: /note="Description of Artificial Sequence: Synthetic oligonucleotide"
  source: /note="RNA"
  source: /note="5' tri-ethylene glycol (TEG)"
  modified_base (1)..(1): bicyclic nucleic acid (BNA)
  modified_base (2)..(2): bicyclic nucleic acid (BNA)
aaggaagaug

SEQ ID NO: 18055 - RNA, 9 nt, Artificial Sequence
  source: /note="Description of Artificial Sequence: Synthetic oligonucleotide"
  source: /note="RNA"
  source: /note="5' tri-ethylene glycol (TEG)"
  modified_base (1)..(1): bicyclic nucleic acid (BNA)
  modified_base (2)..(2): bicyclic nucleic acid (BNA)
aaggaagau

SEQ ID NO: 18056 - RNA, 8 nt, Artificial Sequence
  source: /note="Description of Artificial Sequence: Synthetic oligonucleotide"
  source: /note="RNA/Antisense Oligonucleotide"
  source: /note="5' tri-ethylene glycol (TEG)"
  modified_base (1)..(1): bicyclic nucleic acid (BNA)
  modified_base (2)..(2): bicyclic nucleic acid (BNA)
aaggaaga

SEQ ID NO: 18057 - RNA, 19 nt, Artificial Sequence
  source: /note="Description of Artificial Sequence: Synthetic oligonucleotide"
  source: /note="RNA"
  source: /note="5' tri-ethylene glycol (TEG)"
  modified_base (1)..(1): bicyclic nucleic acid (BNA)
  modified_base (2)..(2): bicyclic nucleic acid (BNA)
  modified_base (11)..(11): 5-methyl modified nucleotide
  modified_base (16)..(16): 5-methyl modified nucleotide
aggaagauggcauuucuag

SEQ ID NO: 18058 - RNA, 18 nt, Artificial Sequence
  source: /note="Description of Artificial Sequence: Synthetic oligonucleotide"
  source: /note="RNA"
  source: /note="5' tri-ethylene glycol (TEG)"
  modified_base (1)..(1): bicyclic nucleic acid (BNA)
  modified_base (2)..(2): bicyclic nucleic acid (BNA)
  modified_base (11)..(11): 5-methyl modified nucleotide
  modified_base (16)..(16): 5-methyl modified nucleotide
aggaagauggcauuucua

SEQ ID NO: 18059 - RNA, 17 nt, Artificial Sequence
  source: /note="Description of Artificial Sequence: Synthetic oligonucleotide"
  source: /note="RNA"
  source: /note="5' tri-ethylene glycol (TEG)"
  modified_base (1)..(1): bicyclic nucleic acid (BNA)
  modified_base (2)..(2): bicyclic nucleic acid (BNA)
  modified_base (11)..(11): 5-methyl modified nucleotide
  modified_base (16)..(16): 5-methyl modified nucleotide
aggaagauggcauuucu

SEQ ID NO: 18060 - RNA, 16 nt, Artificial Sequence
  source: /note="Description of Artificial Sequence: Synthetic oligonucleotide"
  source: /note="RNA"
  source: /note="5' tri-ethylene glycol (TEG)"
  modified_base (1)..(1): bicyclic nucleic acid (BNA)
  modified_base (2)..(2): bicyclic nucleic acid (BNA)
  modified_base (11)..(11): 5-methyl modified nucleotide
  modified_base (16)..(16): 5-methyl modified nucleotide
aggaagauggcauuuc

SEQ ID NO: 18061 - RNA, 15 nt, Artificial Sequence
  source: /note="Description of Artificial Sequence: Synthetic oligonucleotide"
  source: /note="RNA"
  source: /note="5' tri-ethylene glycol (TEG)"
  modified_base (1)..(1): bicyclic nucleic acid (BNA)
  modified_base (2)..(2): bicyclic nucleic acid (BNA)
  modified_base (11)..(11): 5-methyl modified nucleotide
aggaagauggcauuu

SEQ ID NO: 18062 - RNA, 14 nt, Artificial Sequence
  source: /note="Description of Artificial Sequence: Synthetic oligonucleotide"
  source: /note="RNA"
  source: /note="5' tri-ethylene glycol (TEG)"
  modified_base (1)..(1): bicyclic nucleic acid (BNA)
  modified_base (2)..(2): bicyclic nucleic acid (BNA)
  modified_base (11)..(11): 5-methyl modified nucleotide
aggaagauggcauu

SEQ ID NO: 18063 - RNA, 13 nt, Artificial Sequence
  source: /note="Description of Artificial Sequence: Synthetic oligonucleotide"
  source: /note="RNA"
  source: /note="5' tri-ethylene glycol (TEG)"
  modified_base (1)..(1): bicyclic nucleic acid (BNA)
  modified_base (2)..(2): bicyclic nucleic acid (BNA)
  modified_base (11)..(11): 5-methyl modified nucleotide
aggaagauggcau

SEQ ID NO: 18064 - RNA, 12 nt, Artificial Sequence
  source: /note="Description of Artificial Sequence: Synthetic oligonucleotide"
  source: /note="RNA"
  source: /note="5' tri-ethylene glycol (TEG)"
  modified_base (1)..(1): bicyclic nucleic acid (BNA)
  modified_base (2)..(2): bicyclic nucleic acid (BNA)
  modified_base (11)..(11): 5-methyl modified nucleotide
aggaagauggca

SEQ ID NO: 18065 - RNA, 10 nt, Artificial Sequence
  source: /note="Description of Artificial Sequence: Synthetic oligonucleotide"
  source: /note="RNA"
  source: /note="5' tri-ethylene glycol (TEG)"
  modified_base (1)..(1): bicyclic nucleic acid (BNA)
  modified_base (2)..(2): bicyclic nucleic acid (BNA)
aggaagaugg

SEQ ID NO: 18066 - RNA, 9 nt, Artificial Sequence
  source: /note="Description of Artificial Sequence: Synthetic oligonucleotide"
  source: /note="RNA"
  source: /note="5' tri-ethylene glycol (TEG)"
  modified_base (1)..(1): bicyclic nucleic acid (BNA)
  modified_base (2)..(2): bicyclic nucleic acid (BNA)
aggaagaug

SEQ ID NO: 18067 - RNA, 8 nt, Artificial Sequence
  source: /note="Description of Artificial Sequence: Synthetic oligonucleotide"
  source: /note="RNA"
  source: /note="5' tri-ethylene glycol (TEG)"
  modified_base (1)..(1): bicyclic nucleic acid (BNA)
  modified_base (2)..(2): bicyclic nucleic acid (BNA)
aggaagau

SEQ ID NO: 18068 - RNA, 18 nt, Artificial Sequence
  source: /note="Description of Artificial Sequence: Synthetic oligonucleotide"
  source: /note="RNA"
  source: /note="5' tri-ethylene glycol (TEG)"
  modified_base (1)..(1): bicyclic nucleic acid (BNA)
  modified_base (2)..(2): bicyclic nucleic acid (BNA)
  modified_base (10)..(10): 5-methyl modified nucleotide
  modified_base (15)..(15): 5-methyl modified nucleotide
ggaagauggcauuucuag

SEQ ID NO: 18069 - RNA, 17 nt, Artificial Sequence
  source: /note="Description of Artificial Sequence: Synthetic oligonucleotide"
  source: /note="RNA"
  source: /note="5' tri-ethylene glycol (TEG)"
  modified_base (1)..(1): bicyclic nucleic acid (BNA)
  modified_base (2)..(2): bicyclic nucleic acid (BNA)
  modified_base (10)..(10): 5-methyl modified nucleotide
  modified_base (15)..(15): 5-methyl modified nucleotide
ggaagauggcauuucua

SEQ ID NO: 18070 - RNA, 16 nt, Artificial Sequence
  source: /note="Description of Artificial Sequence: Synthetic oligonucleotide"
  source: /note="RNA"
  source: /note="5' tri-ethylene glycol (TEG)"
  modified_base (1)..(1): bicyclic nucleic acid (BNA)
  modified_base (2)..(2): bicyclic nucleic acid (BNA)
  modified_base (10)..(10): 5-methyl modified nucleotide
  modified_base (15)..(15): 5-methyl modified nucleotide
ggaagauggcauuucu

SEQ ID NO: 18071 - RNA, 15 nt, Artificial Sequence
  source: /note="Description of Artificial Sequence: Synthetic oligonucleotide"
  source: /note="RNA"
  source: /note="5' tri-ethylene glycol (TEG)"
  modified_base (1)..(1): bicyclic nucleic acid (BNA)
  modified_base (2)..(2): bicyclic nucleic acid (BNA)
  modified_base (10)..(10): 5-methyl modified nucleotide
  modified_base (15)..(15): 5-methyl modified nucleotide
ggaagauggcauuuc

SEQ ID NO: 18072 - RNA, 14 nt, Artificial Sequence
  source: /note="Description of Artificial Sequence: Synthetic oligonucleotide"
  source: /note="RNA"
  source: /note="5' tri-ethylene glycol (TEG)"
  modified_base (1)..(1): bicyclic nucleic acid (BNA)
  modified_base (2)..(2): bicyclic nucleic acid (BNA)
  modified_base (10)..(10): 5-methyl modified nucleotide
ggaagauggcauuu

SEQ ID NO: 18073 - RNA, 13 nt, Artificial Sequence
  source: /note="Description of Artificial Sequence: Synthetic oligonucleotide"
  source: /note="RNA"
  source: /note="5' tri-ethylene glycol (TEG)"
  modified_base (1)..(1): bicyclic nucleic acid (BNA)
  modified_base (2)..(2): bicyclic nucleic acid (BNA)
  modified_base (10)..(10): 5-methyl modified nucleotide
ggaagauggcauu

SEQ ID NO: 18074 - RNA, 12 nt, Artificial Sequence
  source: /note="Description of Artificial Sequence: Synthetic oligonucleotide"
  source: /note="RNA"
  source: /note="5' tri-ethylene glycol (TEG)"
  modified_base (1)..(1): bicyclic nucleic acid (BNA)
  modified_base (2)..(2): bicyclic nucleic acid (BNA)
  modified_base (10)..(10): 5-methyl modified nucleotide
ggaagauggcau

SEQ ID NO: 18075 - RNA, 11 nt, Artificial Sequence
  source: /note="Description of Artificial Sequence: Synthetic oligonucleotide"
  source: /note="RNA"
  source: /note="5' tri-ethylene glycol (TEG)"
  modified_base (1)..(1): bicyclic nucleic acid (BNA)
  modified_base (2)..(2): bicyclic nucleic acid (BNA)
  modified_base (10)..(10): 5-methyl modified nucleotide
ggaagauggca

SEQ ID NO: 18076 - RNA, 10 nt, Artificial Sequence
  source: /note="Description of Artificial Sequence: Synthetic oligonucleotide"
  source: /note="RNA"
  source: /note="5' tri-ethylene glycol (TEG)"
  modified_base (1)..(1): bicyclic nucleic acid (BNA)
  modified_base (2)..(2): bicyclic nucleic acid (BNA)
  modified_base (10)..(10): 5-methyl modified nucleotide
ggaagauggc

SEQ ID NO: 18077 - RNA, 8 nt, Artificial Sequence
  source: /note="Description of Artificial Sequence: Synthetic oligonucleotide"
  source: /note="RNA"
  source: /note="5' tri-ethylene glycol (TEG)"
  modified_base (1)..(1): bicyclic nucleic acid (BNA)
  modified_base (2)..(2): bicyclic nucleic acid (BNA)
ggaagaug

SEQ ID NO: 18078 - RNA, 17 nt, Artificial Sequence
  source: /note="Description of Artificial Sequence: Synthetic oligonucleotide"
  source: /note="RNA"
  source: /note="5' tri-ethylene glycol (TEG)"
  modified_base (1)..(1): bicyclic nucleic acid (BNA)
  modified_base (2)..(2): bicyclic nucleic acid (BNA)
  modified_base (9)..(9): 5-methyl modified nucleotide
  modified_base (14)..(14): 5-methyl modified nucleotide
gaagauggcauuucuag

SEQ ID NO: 18079 - RNA, 16 nt, Artificial Sequence
  source: /note="Description of Artificial Sequence: Synthetic oligonucleotide"
  source: /note="RNA"
  source: /note="5' tri-ethylene glycol (TEG)"
  modified_base (1)..(1): bicyclic nucleic acid (BNA)
  modified_base (2)..(2): bicyclic nucleic acid (BNA)
  modified_base (9)..(9): 5-methyl modified nucleotide
  modified_base (14)..(14): 5-methyl modified nucleotide
gaagauggcauuucua

SEQ ID NO: 18080 - RNA, 14 nt, Artificial Sequence
  source: /note="Description of Artificial Sequence: Synthetic oligonucleotide"
  source: /note="RNA"
  source: /note="5' tri-ethylene glycol (TEG)"
  modified_base (1)..(1): bicyclic nucleic acid (BNA)
  modified_base (2)..(2): bicyclic nucleic acid (BNA)
  modified_base (9)..(9): 5-methyl modified nucleotide
  modified_base (14)..(14): 5-methyl modified nucleotide
gaagauggcauuuc

SEQ ID NO: 18081 - RNA, 13 nt, Artificial Sequence
  source: /note="Description of Artificial Sequence: Synthetic oligonucleotide"
  source: /note="RNA"
  source: /note="5' tri-ethylene glycol (TEG)"
  modified_base (1)..(1): bicyclic nucleic acid (BNA)
  modified_base (2)..(2): bicyclic nucleic acid (BNA)
  modified_base (9)..(9): 5-methyl modified nucleotide
gaagauggcauuu

SEQ ID NO: 18082 - RNA, 12 nt, Artificial Sequence
  source: /note="Description of Artificial Sequence: Synthetic oligonucleotide"
  source: /note="RNA"
  source: /note="5' tri-ethylene glycol (TEG)"
  modified_base (1)..(1): bicyclic nucleic acid (BNA)
  modified_base (2)..(2): bicyclic nucleic acid (BNA)
  modified_base (9)..(9): 5-methyl modified nucleotide
gaagauggcauu

SEQ ID NO: 18083 - RNA, 11 nt, Artificial Sequence
  source: /note="Description of Artificial Sequence: Synthetic oligonucleotide"
  source: /note="RNA"
  source: /note="5' tri-ethylene glycol (TEG)"
  modified_base (1)..(1): bicyclic nucleic acid (BNA)
  modified_base (2)..(2): bicyclic nucleic acid (BNA)
  modified_base (9)..(9): 5-methyl modified nucleotide
gaagauggcau

SEQ ID NO: 18084 - RNA, 10 nt, Artificial Sequence
  source: /note="Description of Artificial Sequence: Synthetic oligonucleotide"
  source: /note="RNA"
  source: /note="5' tri-ethylene glycol (TEG)"
  modified_base (1)..(1): bicyclic nucleic acid (BNA)
  modified_base (2)..(2): bicyclic nucleic acid (BNA)
  modified_base (9)..(9): 5-methyl modified nucleotide
gaagauggca

SEQ ID NO: 18085 - RNA, 9 nt, Artificial Sequence
  source: /note="Description of Artificial Sequence: Synthetic oligonucleotide"
  source: /note="RNA"
  source: /note="5' tri-ethylene glycol (TEG)"
  modified_base (1)..(1): bicyclic nucleic acid (BNA)
  modified_base (2)..(2): bicyclic nucleic acid (BNA)
  modified_base (9)..(9): 5-methyl modified nucleotide
gaagauggc

SEQ ID NO: 18086 - RNA, 8 nt, Artificial Sequence
  source: /note="Description of Artificial Sequence: Synthetic oligonucleotide"
  source: /note="RNA"
  source: /note="5' tri-ethylene glycol (TEG)"
  modified_base (1)..(1): bicyclic nucleic acid (BNA)
  modified_base (2)..(2): bicyclic nucleic acid (BNA)
gaagaugg

SEQ ID NO: 18087 - RNA, 16 nt, Artificial Sequence
  source: /note="Description of Artificial Sequence: Synthetic oligonucleotide"
  source: /note="RNA"
  source: /note="5' tri-ethylene glycol (TEG)"
  modified_base (1)..(1): bicyclic nucleic acid (BNA)
  modified_base (2)..(2): bicyclic nucleic acid (BNA)
  modified_base (8)..(8): 5-methyl modified nucleotide
  modified_base (13)..(13): 5-methyl modified nucleotide
aagauggcauuucuag

SEQ ID NO: 18088 - RNA, 15 nt, Artificial Sequence
  source: /note="Description of Artificial Sequence: Synthetic oligonucleotide"
  source: /note="RNA"
  source: /note="5' tri-ethylene glycol (TEG)"
  modified_base (1)..(1): bicyclic nucleic acid (BNA)
  modified_base (2)..(2): bicyclic nucleic acid (BNA)
  modified_base (8)..(8): 5-methyl modified nucleotide
  modified_base (13)..(13): 5-methyl modified nucleotide
aagauggcauuucua

SEQ ID NO: 18089 - RNA, 14 nt, Artificial Sequence
  source: /note="Description of Artificial Sequence: Synthetic oligonucleotide"
  source: /note="RNA"
  source: /note="5' tri-ethylene glycol (TEG)"
  modified_base (1)..(1): bicyclic nucleic acid (BNA)
  modified_base (2)..(2): bicyclic nucleic acid (BNA)
  modified_base (8)..(8): 5-methyl modified nucleotide
  modified_base (13)..(13): 5-methyl modified nucleotide
aagauggcauuucu

SEQ ID NO: 18090 - RNA, 13 nt, Artificial Sequence
  source: /note="Description of Artificial Sequence: Synthetic oligonucleotide"
  source: /note="RNA"
  source: /note="5' tri-ethylene glycol (TEG)"
  modified_base (1)..(1): bicyclic nucleic acid (BNA)
  modified_base (2)..(2): bicyclic nucleic acid (BNA)
  modified_base (8)..(8): 5-methyl modified nucleotide
  modified_base (13)..(13): 5-methyl modified nucleotide
aagauggcauuuc

SEQ ID NO: 18091 - RNA, 12 nt, Artificial Sequence
  source: /note="Description of Artificial Sequence: Synthetic oligonucleotide"
  source: /note="RNA"
  source: /note="5' tri-ethylene glycol (TEG)"
  modified_base (1)..(1): bicyclic nucleic acid (BNA)
  modified_base (2)..(2): bicyclic nucleic acid (BNA)
  modified_base (8)..(8): 5-methyl modified nucleotide
aagauggcauuu

SEQ ID NO: 18092 - RNA, 11 nt, Artificial Sequence
  source: /note="Description of Artificial Sequence: Synthetic oligonucleotide"
  source: /note="RNA"
  source: /note="5' tri-ethylene glycol (TEG)"
  modified_base (1)..(1): bicyclic nucleic acid (BNA)
  modified_base (2)..(2): bicyclic nucleic acid (BNA)
  modified_base (8)..(8): 5-methyl modified nucleotide
aagauggcauu

SEQ ID NO: 18093 - RNA, 10 nt, Artificial Sequence
  source: /note="Description of Artificial Sequence: Synthetic oligonucleotide"
  source: /note="RNA"
  source: /note="5' tri-ethylene glycol (TEG)"
  modified_base (1)..(1): bicyclic nucleic acid (BNA)
  modified_base (2)..(2): bicyclic nucleic acid (BNA)
  modified_base (8)..(8): 5-methyl modified nucleotide
aagauggcau

SEQ ID NO: 18094 - RNA, 9 nt, Artificial Sequence
  source: /note="Description of Artificial Sequence: Synthetic oligonucleotide"
  source: /note="RNA"
  source: /note="5' tri-ethylene glycol (TEG)"
  modified_base (1)..(1): bicyclic nucleic acid (BNA)
  modified_base (2)..(2): bicyclic nucleic acid (BNA)
  modified_base (8)..(8): 5-methyl modified nucleotide
aagauggca

SEQ ID NO: 18095 - RNA, 8 nt, Artificial Sequence
  source: /note="Description of Artificial Sequence: Synthetic oligonucleotide"
  source: /note="RNA"
  source: /note="5' tri-ethylene glycol (TEG)"
  modified_base (1)..(1): bicyclic nucleic acid (BNA)
  modified_base (2)..(2): bicyclic nucleic acid (BNA)
  modified_base (8)..(8): 5-methyl modified nucleotide
aagauggc

SEQ ID NO: 18096 - RNA, 15 nt, Artificial Sequence
  source: /note="Description of Artificial Sequence: Synthetic oligonucleotide"
  source: /note="RNA"
  source: /note="5' tri-ethylene glycol (TEG)"
  modified_base (1)..(1): bicyclic nucleic acid (BNA)
  modified_base (2)..(2): bicyclic nucleic acid (BNA)
  modified_base (7)..(7): 5-methyl modified nucleotide
  modified_base (12)..(12): 5-methyl modified nucleotide
agauggcauuucuag

SEQ ID NO: 18097 - RNA, 14 nt, Artificial Sequence
  source: /note="Description of Artificial Sequence: Synthetic oligonucleotide"
  source: /note="RNA"
  source: /note="5' tri-ethylene glycol (TEG)"
  modified_base (1)..(1): bicyclic nucleic acid (BNA)
  modified_base (2)..(2): bicyclic nucleic acid (BNA)
  modified_base (7)..(7): 5-methyl modified nucleotide
  modified_base (12)..(12): 5-methyl modified nucleotide
agauggcauuucua

SEQ ID NO: 18098 - RNA, 13 nt, Artificial Sequence
  source: /note="Description of Artificial Sequence: Synthetic oligonucleotide"
  source: /note="RNA"
  source: /note="5' tri-ethylene glycol (TEG)"
  modified_base (1)..(1): bicyclic nucleic acid (BNA)
  modified_base (2)..(2): bicyclic nucleic acid (BNA)
  modified_base (7)..(7): 5-methyl modified nucleotide
  modified_base (12)..(12): 5-methyl modified nucleotide
agauggcauuucu

SEQ ID NO: 18099 - RNA, 12 nt, Artificial Sequence
  source: /note="Description of Artificial Sequence: Synthetic oligonucleotide"
  source: /note="RNA"
  source: /note="5' tri-ethylene glycol (TEG)"
  modified_base (1)..(1): bicyclic nucleic acid (BNA)
  modified_base (2)..(2): bicyclic nucleic acid (BNA)
  modified_base (7)..(7): 5-methyl modified nucleotide
  modified_base (12)..(12): 5-methyl modified nucleotide
agauggcauuuc

SEQ ID NO: 18100 - RNA, 11 nt, Artificial Sequence
  source: /note="Description of Artificial Sequence: Synthetic oligonucleotide"
  source: /note="RNA"
  source: /note="5' tri-ethylene glycol (TEG)"
  modified_base (1)..(1): bicyclic nucleic acid (BNA)
  modified_base (2)..(2): bicyclic nucleic acid (BNA)
  modified_base (7)..(7): 5-methyl modified nucleotide
agauggcauuu

SEQ ID NO: 18101 - RNA, 10 nt, Artificial Sequence
  source: /note="Description of Artificial Sequence: Synthetic oligonucleotide"
  source: /note="RNA"
  source: /note="5' tri-ethylene glycol (TEG)"
  modified_base (1)..(1): bicyclic nucleic acid (BNA)
  modified_base (2)..(2): bicyclic nucleic acid (BNA)
  modified_base (7)..(7): 5-methyl modified nucleotide
agauggcauu

SEQ ID NO: 18102 - RNA, 9 nt, Artificial Sequence
  source: /note="Description of Artificial Sequence: Synthetic oligonucleotide"
  source: /note="RNA"
  source: /note="5' tri-ethylene glycol (TEG)"
  modified_base (1)..(1): bicyclic nucleic acid (BNA)
  modified_base (2)..(2): bicyclic nucleic acid (BNA)
  modified_base (7)..(7): 5-methyl modified nucleotide
agauggcau

SEQ ID NO: 18103 - RNA, 8 nt, Artificial Sequence
  source: /note="Description of Artificial Sequence: Synthetic oligonucleotide"
  source: /note="RNA"
  source: /note="5' tri-ethylene glycol (TEG)"
  modified_base (1)..(1): bicyclic nucleic acid (BNA)
  modified_base (2)..(2): bicyclic nucleic acid (BNA)
  modified_base (7)..(7): 5-methyl modified nucleotide
agauggca

SEQ ID NO: 18104 - DNA, 30 bp, Artificial Sequence; identical to SEQ ID NO: 8204
  source: /note="Description of Artificial Sequence: Synthetic oligonucleotide"
  source: /note="Description of Combined DNA/RNA Molecule: Synthetic oligonucleotide"
  source: /note="DNA/RNA"
  source: /note="5' tri-ethylene glycol (TEG)"
  modified_base (1)..(1): 5-methyl bicyclic nucleic acid
  modified_base (2)..(2): bicyclic nucleic acid (BNA)
  modified_base (3)..(3): 5-methyl modified nucleotide
  modified_base (4)..(4): 5-methyl modified nucleotide
  modified_base (7)..(7): 5-methyl modified nucleotide
  modified_base (10)..(10): 5-methyl modified nucleotide
  modified_base (22)..(22): 5-methyl modified nucleotide
  modified_base (27)..(27): 5-methyl modified nucleotide

SEQ ID NO: 18105 - DNA, 29 bp, Artificial Sequence
  source: /note="Description of Artificial Sequence: Synthetic oligonucleotide"
  source: /note="Description of Combined DNA/RNA Molecule: Synthetic oligonucleotide"
  source: /note="DNA/RNA"
  source: /note="5' tri-ethylene glycol (TEG)"
  modified_base (1)..(1): 5-methyl bicyclic nucleic acid
  modified_base (2)..(2): bicyclic nucleic acid (BNA)
  modified_base (3)..(3): 5-methyl modified nucleotide
  modified_base (4)..(4): 5-methyl modified nucleotide
  modified_base (7)..(7): 5-methyl modified nucleotide
  modified_base (10)..(10): 5-methyl modified nucleotide
  modified_base (22)..(22): 5-methyl modified nucleotide
  modified_base (27)..(27): 5-methyl modified nucleotide
ctccaacaucaaggaagauggcauuucua

SEQ ID NO: 18106 - DNA, 28 bp, Artificial Sequence
  source: /note="Description of Artificial Sequence: Synthetic oligonucleotide"
  source: /note="Description of Combined DNA/RNA Molecule: Synthetic oligonucleotide"
  source: /note="DNA/RNA"
  source: /note="5' tri-ethylene glycol (TEG)"
  modified_base (1)..(1): 5-methyl bicyclic nucleic acid
  modified_base (2)..(2): bicyclic nucleic acid (BNA)
  modified_base (3)..(3): 5-methyl modified nucleotide
  modified_base (4)..(4): 5-methyl modified nucleotide
  modified_base (7)..(7): 5-methyl modified nucleotide
  modified_base (10)..(10): 5-methyl modified nucleotide
  modified_base (22)..(22): 5-methyl modified nucleotide
  modified_base (27)..(27): 5-methyl modified nucleotide
ctccaacaucaaggaagauggcauuucu

SEQ ID NO: 18107 - DNA, 27 bp, Artificial Sequence
  source: /note="Description of Artificial Sequence: Synthetic oligonucleotide"
  source: /note="Description of Combined DNA/RNA Molecule: Synthetic oligonucleotide"
  source: /note="DNA/RNA"
  source: /note="5' tri-ethylene glycol (TEG)"
  modified_base (1)..(1): 5-methyl bicyclic nucleic acid
  modified_base (2)..(2): bicyclic nucleic acid (BNA)
  modified_base (3)..(3): 5-methyl modified nucleotide
  modified_base (4)..(4): 5-methyl modified nucleotide
  modified_base (7)..(7): 5-methyl modified nucleotide
  modified_base (10)..(10): 5-methyl modified nucleotide
  modified_base (22)..(22): 5-methyl modified nucleotide
  modified_base (27)..(27): 5-methyl modified nucleotide
ctccaacaucaaggaagauggcauuuc

SEQ ID NO: 18108 - DNA, 26 bp, Artificial Sequence
  source: /note="Description of Artificial Sequence: Synthetic oligonucleotide"
  source: /note="Description of Combined DNA/RNA Molecule: Synthetic oligonucleotide"
  source: /note="DNA/RNA"
  source: /note="5' tri-ethylene glycol (TEG)"
  modified_base (1)..(1): 5-methyl bicyclic nucleic acid
  modified_base (2)..(2): bicyclic nucleic acid (BNA)
  modified_base (3)..(3): 5-methyl modified nucleotide
  modified_base (4)..(4): 5-methyl modified nucleotide
  modified_base (7)..(7): 5-methyl modified nucleotide
  modified_base (10)..(10): 5-methyl modified nucleotide
  modified_base (22)..(22): 5-methyl modified nucleotide
ctccaacaucaaggaagauggcauuu

SEQ ID NO: 18109 - DNA, 25 bp, Artificial Sequence
  source: /note="Description of Artificial Sequence: Synthetic oligonucleotide"
  source: /note="Description of Combined DNA/RNA Molecule: Synthetic oligonucleotide"
  source: /note="DNA/RNA"
  source: /note="5' tri-ethylene glycol (TEG)"
  modified_base (1)..(1): 5-methyl bicyclic nucleic acid
  modified_base (2)..(2): bicyclic nucleic acid (BNA)
  modified_base (3)..(3): 5-methyl modified nucleotide
  modified_base (4)..(4): 5-methyl modified nucleotide
  modified_base (7)..(7): 5-methyl modified nucleotide
  modified_base (10)..(10): 5-methyl modified nucleotide
  modified_base (22)..(22): 5-methyl modified nucleotide
ctccaacaucaaggaagauggcauu

SEQ ID NO: 18110 - DNA, 24 bp, Artificial Sequence
  source: /note="Description of Artificial Sequence: Synthetic oligonucleotide"
  source: /note="Description of Combined DNA/RNA Molecule: Synthetic oligonucleotide"
  source: /note="DNA/RNA"
  source: /note="5' tri-ethylene glycol (TEG)"
  modified_base (1)..(1): 5-methyl bicyclic nucleic acid
  modified_base (2)..(2): bicyclic nucleic acid (BNA)
  modified_base (3)..(3): 5-methyl modified nucleotide
  modified_base (4)..(4): 5-methyl modified nucleotide
  modified_base (7)..(7): 5-methyl modified nucleotide
  modified_base (10)..(10): 5-methyl modified nucleotide
  modified_base (22)..(22): 5-methyl modified nucleotide
ctccaacaucaaggaagauggcau

SEQ ID NO: 18111 - DNA, 23 bp, Artificial Sequence
  source: /note="Description of Artificial Sequence: Synthetic oligonucleotide"
  source: /note="Description of Combined DNA/RNA Molecule: Synthetic oligonucleotide"
  source: /note="DNA/RNA"
  source: /note="5' tri-ethylene glycol (TEG)"
  modified_base (1)..(1): 5-methyl bicyclic nucleic acid
  modified_base (2)..(2): bicyclic nucleic acid (BNA)
  modified_base (3)..(3): 5-methyl modified nucleotide
  modified_base (4)..(4): 5-methyl modified nucleotide
  modified_base (7)..(7): 5-methyl modified nucleotide
  modified_base (10)..(10): 5-methyl modified nucleotide
  modified_base (22)..(22): 5-methyl modified nucleotide
ctccaacaucaaggaagauggca

SEQ ID NO: 18112 - DNA, 22 bp, Artificial Sequence
  source: /note="Description of Artificial Sequence: Synthetic oligonucleotide"
  source: /note="Description of Combined DNA/RNA Molecule: Synthetic oligonucleotide"
  source: /note="DNA/RNA"
  source: /note="5' tri-ethylene glycol (TEG)"
  modified_base (1)..(1): 5-methyl bicyclic nucleic acid
  modified_base (2)..(2): bicyclic nucleic acid (BNA)
  modified_base (3)..(3): 5-methyl modified nucleotide
  modified_base (4)..(4): 5-methyl modified nucleotide
  modified_base (7)..(7): 5-methyl modified nucleotide
  modified_base (10)..(10): 5-methyl modified nucleotide
  modified_base (22)..(22): 5-methyl modified nucleotide
ctccaacaucaaggaagauggc

SEQ ID NO: 18113 - DNA, 21 bp, Artificial Sequence
  source: /note="Description of Artificial Sequence: Synthetic oligonucleotide"
  source: /note="Description of Combined DNA/RNA Molecule: Synthetic oligonucleotide"
  source: /note="DNA/RNA"
  source: /note="5' tri-ethylene glycol (TEG)"
  modified_base (1)..(1): 5-methyl bicyclic nucleic acid
  modified_base (2)..(2): bicyclic nucleic acid (BNA)
  modified_base (3)..(3): 5-methyl modified nucleotide
  modified_base (4)..(4): 5-methyl modified nucleotide
  modified_base (7)..(7): 5-methyl modified nucleotide
  modified_base (10)..(10): 5-methyl modified nucleotide
ctccaacaucaaggaagaugg

SEQ ID NO: 18114 - DNA, 20 bp, Artificial Sequence
  source: /note="Description of Artificial Sequence: Synthetic oligonucleotide"
  source: /note="Description of Combined DNA/RNA Molecule: Synthetic oligonucleotide"
  source: /note="DNA/RNA"
  source: /note="5' tri-ethylene glycol (TEG)"
  modified_base (1)..(1): 5-methyl bicyclic nucleic acid
  modified_base (2)..(2): bicyclic nucleic acid (BNA)
  modified_base (3)..(3): 5-methyl modified nucleotide
  modified_base (4)..(4): 5-methyl modified nucleotide
  modified_base (7)..(7): 5-methyl modified nucleotide
  modified_base (10)..(10): 5-methyl modified nucleotide
ctccaacaucaaggaagaug

SEQ ID NO: 18115 - DNA, 19 bp, Artificial Sequence
  source: /note="Description of Artificial Sequence: Synthetic oligonucleotide"
  source: /note="Description of Combined DNA/RNA Molecule: Synthetic oligonucleotide"
  source: /note="DNA/RNA"
  source: /note="5' tri-ethylene glycol (TEG)"
  modified_base (1)..(1): 5-methyl bicyclic nucleic acid
  modified_base (2)..(2): bicyclic nucleic acid (BNA)
  modified_base (3)..(3): 5-methyl modified nucleotide
  modified_base (4)..(4): 5-methyl modified nucleotide
  modified_base (7)..(7): 5-methyl modified nucleotide
  modified_base (10)..(10): 5-methyl modified nucleotide
ctccaacaucaaggaagau

SEQ ID NO: 18116 - DNA, 18 bp, Artificial Sequence
  source: /note="Description of Artificial Sequence: Synthetic oligonucleotide"
  source: /note="Description of Combined DNA/RNA Molecule: Synthetic oligonucleotide"
  source: /note="DNA/RNA"
  source: /note="5' tri-ethylene glycol (TEG)"
  modified_base (1)..(1): 5-methyl bicyclic nucleic acid
  modified_base (2)..(2): bicyclic nucleic acid (BNA)
  modified_base (3)..(3): 5-methyl modified nucleotide
  modified_base (4)..(4): 5-methyl modified nucleotide
  modified_base (7)..(7): 5-methyl modified nucleotide
  modified_base (10)..(10): 5-methyl modified nucleotide
ctccaacaucaaggaaga

SEQ ID NO: 18117 - DNA, 17 bp, Artificial Sequence
  source: /note="Description of Artificial Sequence: Synthetic oligonucleotide"
  source: /note="Description of Combined DNA/RNA Molecule: Synthetic oligonucleotide"
  source: /note="DNA/RNA"
  source: /note="5' tri-ethylene glycol (TEG)"
  modified_base (1)..(1): 5-methyl bicyclic nucleic acid
  modified_base (2)..(2): bicyclic nucleic acid (BNA)
  modified_base (3)..(3): 5-methyl modified nucleotide
  modified_base (4)..(4): 5-methyl modified nucleotide
  modified_base (7)..(7): 5-methyl modified nucleotide
  modified_base (10)..(10): 5-methyl modified nucleotide
ctccaacaucaaggaag

SEQ ID NO: 18118 - DNA, 29 bp, Artificial Sequence
  source: /note="Description of Artificial Sequence: Synthetic oligonucleotide"
  source: /note="Description of Combined DNA/RNA Molecule: Synthetic oligonucleotide"
  source: /note="DNA/RNA"
  source: /note="5' tri-ethylene glycol (TEG)"
  modified_base (1)..(1): bicyclic nucleic acid (BNA)
  modified_base (2)..(2): 5-methyl bicyclic nucleic acid
  modified_base (3)..(3): 5-methyl modified nucleotide
  modified_base (6)..(6): 5-methyl modified nucleotide
  modified_base (9)..(9): 5-methyl modified nucleotide
  modified_base (21)..(21): 5-methyl modified nucleotide
  modified_base (26)..(26): 5-methyl modified nucleotide
tccaacaucaaggaagauggcauuucuag

SEQ ID NO: 18119 - DNA, 28 bp, Artificial Sequence
  source: /note="Description of Artificial Sequence: Synthetic oligonucleotide"
  source: /note="Description of Combined DNA/RNA Molecule: Synthetic oligonucleotide"
  source: /note="DNA/RNA"
  source: /note="5' tri-ethylene glycol (TEG)"
  modified_base (1)..(1): bicyclic nucleic acid (BNA)
  modified_base (2)..(2): 5-methyl bicyclic nucleic acid
  modified_base (3)..(3): 5-methyl modified nucleotide
  modified_base (6)..(6): 5-methyl modified nucleotide
  modified_base (9)..(9): 5-methyl modified nucleotide
  modified_base (21)..(21): 5-methyl modified nucleotide
  modified_base (26)..(26): 5-methyl modified nucleotide
tccaacaucaaggaagauggcauuucua

SEQ ID NO: 18120 - DNA, 27 bp, Artificial Sequence
  source: /note="Description of Artificial Sequence: Synthetic oligonucleotide"
  source: /note="Description of Combined DNA/RNA Molecule: Synthetic oligonucleotide"
  source: /note="DNA/RNA"
  source: /note="5' tri-ethylene glycol (TEG)"
  modified_base (1)..(1): bicyclic nucleic acid (BNA)
  modified_base (2)..(2): 5-methyl bicyclic nucleic acid
  modified_base (3)..(3): 5-methyl modified nucleotide
  modified_base (6)..(6): 5-methyl modified nucleotide
  modified_base (9)..(9): 5-methyl modified nucleotide
  modified_base (21)..(21): 5-methyl modified nucleotide
  modified_base (26)..(26): 5-methyl modified nucleotide
tccaacaucaaggaagauggcauuucu

SEQ ID NO: 18121 - DNA, 26 bp, Artificial Sequence
  source: /note="Description of Artificial Sequence: Synthetic oligonucleotide"
  source: /note="Description of Combined DNA/RNA Molecule: Synthetic oligonucleotide"
  source: /note="DNA/RNA"
  source: /note="5' tri-ethylene glycol (TEG)"
  modified_base (1)..(1): bicyclic nucleic acid (BNA)
  modified_base (2)..(2): 5-methyl bicyclic nucleic acid
  modified_base (3)..(3): 5-methyl modified nucleotide
  modified_base (6)..(6): 5-methyl modified nucleotide
  modified_base (9)..(9): 5-methyl modified nucleotide
  modified_base (21)..(21): 5-methyl modified nucleotide
  modified_base (26)..(26): 5-methyl modified nucleotide
tccaacaucaaggaagauggcauuuc

SEQ ID NO: 18122 - DNA, 25 bp, Artificial Sequence
  source: /note="Description of Artificial Sequence: Synthetic oligonucleotide"
  source: /note="Description of Combined DNA/RNA Molecule: Synthetic oligonucleotide"
  source: /note="DNA/RNA"
  source: /note="5' tri-ethylene glycol (TEG)"
  modified_base (1)..(1): bicyclic nucleic acid (BNA)
  modified_base (2)..(2): 5-methyl bicyclic nucleic acid
  modified_base (3)..(3): 5-methyl modified nucleotide
  modified_base (6)..(6): 5-methyl modified nucleotide
  modified_base (9)..(9): 5-methyl modified nucleotide
  modified_base (21)..(21): 5-methyl modified nucleotide
tccaacaucaaggaagauggcauuu

SEQ ID NO: 18123 - DNA, 24 bp, Artificial Sequence
  source: /note="Description of Artificial Sequence: Synthetic oligonucleotide"
  source: /note="Description of Combined DNA/RNA Molecule: Synthetic oligonucleotide"
  source: /note="DNA/RNA"
  source: /note="5' tri-ethylene glycol (TEG)"
  modified_base (1)..(1): bicyclic nucleic acid (BNA)
  modified_base (2)..(2): 5-methyl bicyclic nucleic acid
  modified_base (3)..(3): 5-methyl modified nucleotide
  modified_base (6)..(6): 5-methyl modified nucleotide
  modified_base (9)..(9): 5-methyl modified nucleotide
  modified_base (21)..(21): 5-methyl modified nucleotide
tccaacaucaaggaagauggcauu

SEQ ID NO: 18124 - DNA, 23 bp, Artificial Sequence
  source: /note="Description of Artificial Sequence: Synthetic oligonucleotide"
  source: /note="Description of Combined DNA/RNA Molecule: Synthetic oligonucleotide"
  source: /note="DNA/RNA"
  source: /note="5' tri-ethylene glycol (TEG)"
  modified_base (1)..(1): bicyclic nucleic acid (BNA)
  modified_base (2)..(2): 5-methyl bicyclic nucleic acid
  modified_base (3)..(3): 5-methyl modified nucleotide
  modified_base (6)..(6): 5-methyl modified nucleotide
  modified_base (9)..(9): 5-methyl modified nucleotide
  modified_base (21)..(21): 5-methyl modified nucleotide
tccaacaucaaggaagauggcau

SEQ ID NO: 18125 - DNA, 22 bp, Artificial Sequence
  source: /note="Description of Artificial Sequence: Synthetic oligonucleotide"
  source: /note="Description of Combined DNA/RNA Molecule: Synthetic oligonucleotide"
  source: /note="DNA/RNA"
  source: /note="5' tri-ethylene glycol (TEG)"
  modified_base (1)..(1): bicyclic nucleic acid (BNA)
  modified_base (2)..(2): 5-methyl bicyclic nucleic acid
  modified_base (3)..(3): 5-methyl modified nucleotide
  modified_base (6)..(6): 5-methyl modified nucleotide
  modified_base (9)..(9): 5-methyl modified nucleotide
  modified_base (21)..(21): 5-methyl modified nucleotide
tccaacaucaaggaagauggca

SEQ ID NO: 18126 - DNA, 21 bp, Artificial Sequence
  source: /note="Description of Artificial Sequence: Synthetic oligonucleotide"
  source: /note="Description of Combined DNA/RNA Molecule: Synthetic oligonucleotide"
  source: /note="DNA/RNA"
  source: /note="5' tri-ethylene glycol (TEG)"
  modified_base (1)..(1): bicyclic nucleic acid (BNA)
  modified_base (2)..(2): 5-methyl bicyclic nucleic acid
  modified_base (3)..(3): 5-methyl modified nucleotide
  modified_base (6)..(6): 5-methyl modified nucleotide
  modified_base (9)..(9): 5-methyl modified nucleotide
  modified_base (21)..(21): 5-methyl modified nucleotide
tccaacaucaaggaagauggc

SEQ ID NO: 18127 - DNA, 20 bp, Artificial Sequence
  source: /note="Description of Artificial Sequence: Synthetic oligonucleotide"
  source: /note="Description of Combined DNA/RNA Molecule: Synthetic oligonucleotide"
  source: /note="DNA/RNA"
  source: /note="5' tri-ethylene glycol (TEG)"
  modified_base (1)..(1): bicyclic nucleic acid (BNA)
  modified_base (2)..(2): 5-methyl bicyclic nucleic acid
  modified_base (3)..(3): 5-methyl modified nucleotide
  modified_base (6)..(6): 5-methyl modified nucleotide
  modified_base (9)..(9): 5-methyl modified nucleotide
tccaacaucaaggaagaugg

SEQ ID NO: 18128 - DNA, 19 bp, Artificial Sequence
  source: /note="Description of Artificial Sequence: Synthetic oligonucleotide"
  source: /note="Description of Combined DNA/RNA Molecule: Synthetic oligonucleotide"
  source: /note="DNA/RNA"
  source: /note="5' tri-ethylene glycol (TEG)"
  modified_base (1)..(1): bicyclic nucleic acid (BNA)
  modified_base (2)..(2): 5-methyl bicyclic nucleic acid
  modified_base (3)..(3): 5-methyl modified nucleotide
  modified_base (6)..(6): 5-methyl modified nucleotide
  modified_base (9)..(9): 5-methyl modified nucleotide
tccaacaucaaggaagaug

SEQ ID NO: 18129 - DNA, 18 bp, Artificial Sequence
  source: /note="Description of Artificial Sequence: Synthetic oligonucleotide"
  source: /note="Description of Combined DNA/RNA Molecule: Synthetic oligonucleotide"
  source: /note="DNA/RNA"
  source: /note="5' tri-ethylene glycol (TEG)"
  modified_base (1)..(1): bicyclic nucleic acid (BNA)
  modified_base (2)..(2): 5-methyl bicyclic nucleic acid
  modified_base (3)..(3): 5-methyl modified nucleotide
  modified_base (6)..(6): 5-methyl modified nucleotide
  modified_base (9)..(9): 5-methyl modified nucleotide
tccaacaucaaggaagau

SEQ ID NO: 18130 - DNA, 17 bp, Artificial Sequence
  source: /note="Description of Artificial Sequence: Synthetic oligonucleotide"
  source: /note="Description of Combined DNA/RNA Molecule: Synthetic oligonucleotide"
  source: /note="DNA/RNA"
  source: /note="5' tri-ethylene glycol (TEG)"
  modified_base (1)..(1): bicyclic nucleic acid (BNA)
  modified_base (2)..(2): 5-methyl bicyclic nucleic acid
  modified_base (3)..(3): 5-methyl modified nucleotide
  modified_base (6)..(6): 5-methyl modified nucleotide
  modified_base (9)..(9): 5-methyl modified nucleotide
tccaacaucaaggaaga

SEQ ID NO: 18131 - DNA, 16 bp, Artificial Sequence
  source: /note="Description of Artificial Sequence: Synthetic oligonucleotide"
  source: /note="Description of Combined DNA/RNA Molecule: Synthetic oligonucleotide"
  source: /note="DNA/RNA"
  source: /note="5' tri-ethylene glycol (TEG)"
  modified_base (1)..(1): bicyclic nucleic acid (BNA)
  modified_base (2)..(2): 5-methyl bicyclic nucleic acid
  modified_base (3)..(3): 5-methyl modified nucleotide
  modified_base (6)..(6): 5-methyl modified nucleotide
  modified_base (9)..(9): 5-methyl modified nucleotide
tccaacaucaaggaag

SEQ ID NO: 18132 - RNA, 28 nt, Artificial Sequence
  source: /note="Description of Artificial Sequence: Synthetic oligonucleotide"
  source: /note="RNA"
  source: /note="5' tri-ethylene glycol (TEG)"
  modified_base (1)..(1): 5-methyl bicyclic nucleic acid
  modified_base (2)..(2): 5-methyl bicyclic nucleic acid
  modified_base (5)..(5): 5-methyl modified nucleotide
  modified_base (8)..(8): 5-methyl modified nucleotide
  modified_base (20)..(20): 5-methyl modified nucleotide
  modified_base (25)..(25): 5-methyl modified nucleotide
ccaacaucaaggaagauggcauuucuag

SEQ ID NO: 18133 - RNA, 27 nt, Artificial Sequence
  source: /note="Description of Artificial Sequence: Synthetic oligonucleotide"
  source: /note="RNA"
  source: /note="5' tri-ethylene glycol (TEG)"
  modified_base (1)..(1): 5-methyl bicyclic nucleic acid
  modified_base (2)..(2): 5-methyl bicyclic nucleic acid
  modified_base (5)..(5): 5-methyl modified nucleotide
  modified_base (8)..(8): 5-methyl modified nucleotide
  modified_base (20)..(20): 5-methyl modified nucleotide
  modified_base (25)..(25): 5-methyl modified nucleotide
ccaacaucaaggaagauggcauuucua

SEQ ID NO: 18134 - RNA, 26 nt, Artificial Sequence
  source: /note="Description of Artificial Sequence: Synthetic oligonucleotide"
  source: /note="RNA"
  source: /note="5' tri-ethylene glycol (TEG)"
  modified_base (1)..(1): 5-methyl bicyclic nucleic acid
  modified_base (2)..(2): 5-methyl bicyclic nucleic acid
  modified_base (5)..(5): 5-methyl modified nucleotide
  modified_base (8)..(8): 5-methyl modified nucleotide
  modified_base (20)..(20): 5-methyl modified nucleotide
  modified_base (25)..(25): 5-methyl modified nucleotide
ccaacaucaaggaagauggcauuucu

SEQ ID NO: 18135 - RNA, 25 nt, Artificial Sequence
  source: /note="Description of Artificial Sequence: Synthetic oligonucleotide"
  source: /note="RNA"
  source: /note="5' tri-ethylene glycol (TEG)"
  modified_base (1)..(1): 5-methyl bicyclic nucleic acid
  modified_base (2)..(2): 5-methyl bicyclic nucleic acid
  modified_base (5)..(5): 5-methyl modified nucleotide
  modified_base (8)..(8): 5-methyl modified nucleotide
  modified_base (20)..(20): 5-methyl modified nucleotide
  modified_base (25)..(25): 5-methyl modified nucleotide
ccaacaucaaggaagauggcauuuc

SEQ ID NO: 18136 - RNA, 24 nt, Artificial Sequence
  source: /note="Description of Artificial Sequence: Synthetic oligonucleotide"
  source: /note="RNA"
  source: /note="5' tri-ethylene glycol (TEG)"
  modified_base (1)..(1): 5-methyl bicyclic nucleic acid
  modified_base (2)..(2): 5-methyl bicyclic nucleic acid
  modified_base (5)..(5): 5-methyl modified nucleotide
  modified_base (8)..(8): 5-methyl modified nucleotide
  modified_base (20)..(20): 5-methyl modified nucleotide
ccaacaucaaggaagauggcauuu

SEQ ID NO: 18137 - RNA, 23 nt, Artificial Sequence
  source: /note="Description of Artificial Sequence: Synthetic oligonucleotide"
  source: /note="RNA"
  source: /note="5' tri-ethylene glycol (TEG)"
  modified_base (1)..(1): 5-methyl bicyclic nucleic acid
  modified_base (2)..(2): 5-methyl bicyclic nucleic acid
  modified_base (5)..(5): 5-methyl modified nucleotide
  modified_base (8)..(8): 5-methyl modified nucleotide
  modified_base (20)..(20): 5-methyl modified nucleotide
ccaacaucaaggaagauggcauu

SEQ ID NO: 18138 - RNA, 22 nt, Artificial Sequence
  source: /note="Description of Artificial Sequence: Synthetic oligonucleotide"
  source: /note="RNA"
  source: /note="5' tri-ethylene glycol (TEG)"
  modified_base (1)..(1): 5-methyl bicyclic nucleic acid
  modified_base (2)..(2): 5-methyl bicyclic nucleic acid
  modified_base (5)..(5): 5-methyl modified nucleotide
  modified_base (8)..(8): 5-methyl modified nucleotide
  modified_base (20)..(20): 5-methyl modified nucleotide
ccaacaucaaggaagauggcau

SEQ ID NO: 18139 - RNA, 21 nt, Artificial Sequence
  source: /note="Description of Artificial Sequence: Synthetic oligonucleotide"
  source: /note="RNA"
  source: /note="5' tri-ethylene glycol (TEG)"
  modified_base (1)..(1): 5-methyl bicyclic nucleic acid
  modified_base (2)..(2): 5-methyl bicyclic nucleic acid
  modified_base (5)..(5): 5-methyl modified nucleotide
  modified_base (8)..(8): 5-methyl modified nucleotide
  modified_base (20)..(20): 5-methyl modified nucleotide
ccaacaucaaggaagauggca

SEQ ID NO: 18140 - RNA, 20 nt, Artificial Sequence
  source: /note="Description of Artificial Sequence: Synthetic oligonucleotide"
  source: /note="RNA"
  source: /note="5' tri-ethylene glycol (TEG)"
  modified_base (1)..(1): 5-methyl bicyclic nucleic acid
  modified_base (2)..(2): 5-methyl bicyclic nucleic acid
  modified_base (5)..(5): 5-methyl modified nucleotide
  modified_base (8)..(8): 5-methyl modified nucleotide
  modified_base (20)..(20): 5-methyl modified nucleotide
ccaacaucaaggaagauggc

SEQ ID NO: 18141 - RNA, 19 nt, Artificial Sequence
  source: /note="Description of Artificial Sequence: Synthetic oligonucleotide"
  source: /note="RNA"
  source: /note="5' tri-ethylene glycol (TEG)"
  modified_base (1)..(1): 5-methyl bicyclic nucleic acid
  modified_base (2)..(2): 5-methyl bicyclic nucleic acid
  modified_base (5)..(5): 5-methyl modified nucleotide
  modified_base (8)..(8): 5-methyl modified nucleotide
ccaacaucaaggaagaugg

SEQ ID NO: 18142 - RNA, 18 nt, Artificial Sequence
  source: /note="Description of Artificial Sequence: Synthetic oligonucleotide"
  source: /note="RNA"
  source: /note="5' tri-ethylene glycol (TEG)"
  modified_base (1)..(1): 5-methyl bicyclic nucleic acid
  modified_base (2)..(2): 5-methyl bicyclic nucleic acid
  modified_base (5)..(5): 5-methyl modified nucleotide
  modified_base (8)..(8): 5-methyl modified nucleotide
ccaacaucaaggaagaug

SEQ ID NO: 18143 - RNA, 17 nt, Artificial Sequence
  source: /note="Description of Artificial Sequence: Synthetic oligonucleotide"
  source: /note="RNA"
  source: /note="5' tri-ethylene glycol (TEG)"
  modified_base (1)..(1): 5-methyl bicyclic nucleic acid
  modified_base (2)..(2): 5-methyl bicyclic nucleic acid
  modified_base (5)..(5): 5-methyl modified nucleotide
  modified_base (8)..(8): 5-methyl modified nucleotide
ccaacaucaaggaagau

SEQ ID NO: 18144 - RNA, 16 nt, Artificial Sequence
  source: /note="Description of Artificial Sequence: Synthetic oligonucleotide"
  source: /note="RNA"
  source: /note="5' tri-ethylene glycol (TEG)"
  modified_base (1)..(1): 5-methyl bicyclic nucleic acid
  modified_base (2)..(2): 5-methyl bicyclic nucleic acid
  modified_base (5)..(5): 5-methyl modified nucleotide
  modified_base (8)..(8): 5-methyl modified nucleotide
ccaacaucaaggaaga

SEQ ID NO: 18145 - RNA, 15 nt, Artificial Sequence
  source: /note="Description of Artificial Sequence: Synthetic oligonucleotide"
  source: /note="RNA"
  source: /note="5' tri-ethylene glycol (TEG)"
  modified_base (1)..(1): 5-methyl bicyclic nucleic acid
  modified_base (2)..(2): 5-methyl bicyclic nucleic acid
  modified_base (5)..(5): 5-methyl modified nucleotide
  modified_base (8)..(8): 5-methyl modified nucleotide
ccaacaucaaggaag

SEQ ID NO: 18146 - RNA, 27 nt, Artificial Sequence
  source: /note="Description of Artificial Sequence: Synthetic oligonucleotide"
  source: /note="RNA"
  source: /note="5' tri-ethylene glycol (TEG)"
  modified_base (1)..(1): 5-methyl bicyclic nucleic acid
  modified_base (2)..(2): bicyclic nucleic acid (BNA)
  modified_base (4)..(4): 5-methyl modified nucleotide
  modified_base (7)..(7): 5-methyl modified nucleotide
  modified_base (19)..(19): 5-methyl modified nucleotide
  modified_base (24)..(24): 5-methyl modified nucleotide
caacaucaaggaagauggcauuucuag

SEQ ID NO: 18147 - RNA, 26 nt, Artificial Sequence
  source: /note="Description of Artificial Sequence: Synthetic oligonucleotide"
  source: /note="RNA"
  source: /note="5' tri-ethylene glycol (TEG)"
  modified_base (1)..(1): 5-methyl bicyclic nucleic acid
  modified_base (2)..(2): bicyclic nucleic acid (BNA)
  modified_base (4)..(4): 5-methyl modified nucleotide
  modified_base (7)..(7): 5-methyl modified nucleotide
  modified_base (19)..(19): 5-methyl modified nucleotide
  modified_base (24)..(24): 5-methyl modified nucleotide
caacaucaaggaagauggcauuucua

SEQ ID NO: 18148 - RNA, 25 nt, Artificial Sequence
  source: /note="Description of Artificial Sequence: Synthetic oligonucleotide"
  source: /note="RNA"
  source: /note="5' tri-ethylene glycol (TEG)"
  modified_base (1)..(1): 5-methyl bicyclic nucleic acid
  modified_base (2)..(2): bicyclic nucleic acid (BNA)
  modified_base (4)..(4): 5-methyl modified nucleotide
  modified_base (7)..(7): 5-methyl modified nucleotide
  modified_base (19)..(19): 5-methyl modified nucleotide
  modified_base (24)..(24): 5-methyl modified nucleotide
caacaucaaggaagauggcauuucu

SEQ ID NO: 18149 - RNA, 24 nt, Artificial Sequence
  source: /note="Description of Artificial Sequence: Synthetic oligonucleotide"
  source: /note="RNA"
  source: /note="5' tri-ethylene glycol (TEG)"
  modified_base (1)..(1): 5-methyl bicyclic nucleic acid
  modified_base (2)..(2): bicyclic nucleic acid (BNA)
  modified_base (4)..(4): 5-methyl modified nucleotide
  modified_base (7)..(7): 5-methyl modified nucleotide
  modified_base (19)..(19): 5-methyl modified nucleotide
  modified_base (24)..(24): 5-methyl modified nucleotide
caacaucaaggaagauggcauuuc

SEQ ID NO: 18150 - RNA, 23 nt, Artificial Sequence
  source: /note="Description of Artificial Sequence: Synthetic oligonucleotide"
  source: /note="RNA"
  source: /note="5' tri-ethylene glycol (TEG)"
  modified_base (1)..(1): 5-methyl bicyclic nucleic acid
  modified_base (2)..(2): bicyclic nucleic acid (BNA)
  modified_base (4)..(4): 5-methyl modified nucleotide
  modified_base (7)..(7): 5-methyl modified nucleotide
  modified_base (19)..(19): 5-methyl modified nucleotide
caacaucaaggaagauggcauuu

SEQ ID NO: 18151 - RNA, 22 nt, Artificial Sequence
  source: /note="Description of Artificial Sequence: Synthetic oligonucleotide"
  source: /note="RNA"
  source: /note="5' tri-ethylene glycol (TEG)"
  modified_base (1)..(1): 5-methyl bicyclic nucleic acid
  modified_base (2)..(2): bicyclic nucleic acid (BNA)
  modified_base (4)..(4): 5-methyl modified nucleotide
  modified_base (7)..(7): 5-methyl modified nucleotide
  modified_base (19)..(19): 5-methyl modified nucleotide
caacaucaaggaagauggcauu

SEQ ID NO: 18152 - RNA, 21 nt, Artificial Sequence
  source: /note="Description of Artificial Sequence: Synthetic oligonucleotide"
  source: /note="RNA"
  source: /note="5' tri-ethylene glycol (TEG)"
  modified_base (1)..(1): 5-methyl bicyclic nucleic acid
  modified_base (2)..(2): bicyclic nucleic acid (BNA)
  modified_base (4)..(4): 5-methyl modified nucleotide
  modified_base (7)..(7): 5-methyl modified nucleotide
  modified_base (19)..(19): 5-methyl modified nucleotide
caacaucaaggaagauggcau

SEQ ID NO: 18153 - RNA, 20 nt, Artificial Sequence
  source: /note="Description of Artificial Sequence: Synthetic oligonucleotide"
  source: /note="RNA"
  source: /note="5' tri-ethylene glycol (TEG)"
  modified_base (1)..(1): 5-methyl bicyclic nucleic acid
  modified_base (2)..(2): bicyclic nucleic acid (BNA)
  modified_base (4)..(4): 5-methyl modified nucleotide
  modified_base (7)..(7): 5-methyl modified nucleotide
  modified_base (19)..(19): 5-methyl modified nucleotide
caacaucaaggaagauggca

SEQ ID NO: 18154 - RNA, 19 nt, Artificial Sequence
  source: /note="Description of Artificial Sequence: Synthetic oligonucleotide"
  source: /note="RNA"
  source: /note="5' tri-ethylene glycol (TEG)"
  modified_base (1)..(1): 5-methyl bicyclic nucleic acid
  modified_base (2)..(2): bicyclic nucleic acid (BNA)
  modified_base (4)..(4): 5-methyl modified nucleotide
  modified_base (7)..(7): 5-methyl modified nucleotide
  modified_base (19)..(19): 5-methyl modified nucleotide
caacaucaaggaagauggc

SEQ ID NO: 18155 - RNA, 18 nt, Artificial Sequence
  source: /note="Description of Artificial Sequence: Synthetic oligonucleotide"
  source: /note="RNA"
  source: /note="5' tri-ethylene glycol (TEG)"
  modified_base (1)..(1): 5-methyl bicyclic nucleic acid
  modified_base (2)..(2): bicyclic nucleic acid (BNA)
  modified_base (4)..(4): 5-methyl modified nucleotide
  modified_base (7)..(7): 5-methyl modified nucleotide
caacaucaaggaagaugg

SEQ ID NO: 18156 - RNA, 17 nt, Artificial Sequence
  source: /note="Description of Artificial Sequence: Synthetic oligonucleotide"
  source: /note="RNA"
  source: /note="5' tri-ethylene glycol (TEG)"
  modified_base (1)..(1): 5-methyl bicyclic nucleic acid
  modified_base (2)..(2): bicyclic nucleic acid (BNA)
  modified_base (4)..(4): 5-methyl modified nucleotide
  modified_base (7)..(7): 5-methyl modified nucleotide
caacaucaaggaagaug

SEQ ID NO: 18157 - RNA, 16 nt, Artificial Sequence
  source: /note="Description of Artificial Sequence: Synthetic oligonucleotide"
  source: /note="RNA"
  source: /note="5' tri-ethylene glycol (TEG)"
  modified_base (1)..(1): 5-methyl bicyclic nucleic acid
  modified_base (2)..(2): bicyclic nucleic acid (BNA)
  modified_base (4)..(4): 5-methyl modified nucleotide
  modified_base (7)..(7): 5-methyl modified nucleotide
caacaucaaggaagau

SEQ ID NO: 18158 - RNA, 15 nt, Artificial Sequence
  source: /note="Description of Artificial Sequence: Synthetic oligonucleotide"
  source: /note="RNA"
  source: /note="5' tri-ethylene glycol (TEG)"
  modified_base (1)..(1): 5-methyl bicyclic nucleic acid
  modified_base (2)..(2): bicyclic nucleic acid (BNA)
  modified_base (4)..(4): 5-methyl modified nucleotide
  modified_base (7)..(7): 5-methyl modified nucleotide
caacaucaaggaaga

SEQ ID NO: 18159 - RNA, 14 nt, Artificial Sequence
  source: /note="Description of Artificial Sequence: Synthetic oligonucleotide"
  source: /note="RNA"
  source: /note="5' tri-ethylene glycol (TEG)"
  modified_base (1)..(1): 5-methyl bicyclic nucleic acid
  modified_base (2)..(2): bicyclic nucleic acid (BNA)
  modified_base (4)..(4): 5-methyl modified nucleotide
  modified_base (7)..(7): 5-methyl modified nucleotide
caacaucaaggaag

SEQ ID NO: 18160 - RNA, 26 nt, Artificial Sequence
  source: /note="Description of Artificial Sequence: Synthetic oligonucleotide"
  source: /note="RNA"
  source: /note="5' tri-ethylene glycol (TEG)"
  modified_base (1)..(1): bicyclic nucleic acid (BNA)
  modified_base (2)..(2): bicyclic nucleic acid (BNA)
  modified_base (3)..(3): 5-methyl modified nucleotide
  modified_base (6)..(6): 5-methyl modified nucleotide
  modified_base (18)..(18): 5-methyl modified nucleotide
  modified_base (23)..(23): 5-methyl modified nucleotide
aacaucaaggaagauggcauuucuag

SEQ ID NO: 18161 - RNA, 25 nt, Artificial Sequence
  source: /note="Description of Artificial Sequence: Synthetic oligonucleotide"
  source: /note="RNA"
  source: /note="5' tri-ethylene glycol (TEG)"
  modified_base (1)..(1): bicyclic nucleic acid (BNA)
  modified_base (2)..(2): bicyclic nucleic acid (BNA)
  modified_base (3)..(3): 5-methyl modified nucleotide
  modified_base (6)..(6): 5-methyl modified nucleotide
  modified_base (18)..(18): 5-methyl modified nucleotide
  modified_base (23)..(23): 5-methyl modified nucleotide
aacaucaaggaagauggcauuucua

SEQ ID NO: 18162 - RNA, 24 nt, Artificial Sequence
  source: /note="Description of Artificial Sequence: Synthetic oligonucleotide"
  source: /note="RNA"
  source: /note="5' tri-ethylene glycol (TEG)"
  modified_base (1)..(1): bicyclic nucleic acid (BNA)
  modified_base (2)..(2): bicyclic nucleic acid (BNA)
  modified_base (3)..(3): 5-methyl modified nucleotide
  modified_base (6)..(6): 5-methyl modified nucleotide
  modified_base (18)..(18): 5-methyl modified nucleotide
  modified_base (23)..(23): 5-methyl modified nucleotide
aacaucaaggaagauggcauuucu

SEQ ID NO: 18163 - RNA, 23 nt, Artificial Sequence
  source: /note="Description of Artificial Sequence: Synthetic oligonucleotide"
  source: /note="RNA"
  source: /note="5' tri-ethylene glycol (TEG)"
  modified_base (1)..(1): bicyclic nucleic acid (BNA)
  modified_base (2)..(2): bicyclic nucleic acid (BNA)
  modified_base (3)..(3): 5-methyl modified nucleotide
  modified_base (6)..(6): 5-methyl modified nucleotide
  modified_base (18)..(18): 5-methyl modified nucleotide
  modified_base (23)..(23): 5-methyl modified nucleotide
aacaucaaggaagauggcauuuc

SEQ ID NO: 18164 - RNA, 22 nt, Artificial Sequence
  source: /note="Description of Artificial Sequence: Synthetic oligonucleotide"
  source: /note="RNA"
  source: /note="5' tri-ethylene glycol (TEG)"
  modified_base (1)..(1): bicyclic nucleic acid (BNA)
  modified_base (2)..(2): bicyclic nucleic acid (BNA)
  modified_base (3)..(3): 5-methyl modified nucleotide
  modified_base (6)..(6): 5-methyl modified nucleotide
  modified_base (18)..(18): 5-methyl modified nucleotide
aacaucaaggaagauggcauuu

SEQ ID NO: 18165 - RNA, 21 nt, Artificial Sequence
  source: /note="Description of Artificial Sequence: Synthetic oligonucleotide"
  source: /note="RNA"
  source: /note="5' tri-ethylene glycol (TEG)"
  modified_base (1)..(1): bicyclic nucleic acid (BNA)
  modified_base (2)..(2): bicyclic nucleic acid (BNA)
  modified_base (3)..(3): 5-methyl modified nucleotide
  modified_base (6)..(6): 5-methyl modified nucleotide
  modified_base (18)..(18): 5-methyl modified nucleotide
aacaucaaggaagauggcauu

SEQ ID NO: 18166 - RNA, 20 nt, Artificial Sequence
  source: /note="Description of Artificial Sequence: Synthetic oligonucleotide"
  source: /note="RNA"
  source: /note="5' tri-ethylene glycol (TEG)"
  modified_base (1)..(1): bicyclic nucleic acid (BNA)
  modified_base (2)..(2): bicyclic nucleic acid (BNA)
  modified_base (3)..(3): 5-methyl modified nucleotide
  modified_base (6)..(6): 5-methyl modified nucleotide
  modified_base (18)..(18): 5-methyl modified nucleotide
aacaucaaggaagauggcau

SEQ ID NO: 18167 - RNA, 19 nt, Artificial Sequence
  source: /note="Description of Artificial Sequence: Synthetic oligonucleotide"
  source: /note="RNA"
  source: /note="5' tri-ethylene glycol (TEG)"
  modified_base (1)..(1): bicyclic nucleic acid (BNA)
  modified_base (2)..(2): bicyclic nucleic acid (BNA)
  modified_base (3)..(3): 5-methyl modified nucleotide
  modified_base (6)..(6): 5-methyl modified nucleotide
  modified_base (18)..(18): 5-methyl modified nucleotide
aacaucaaggaagauggca

SEQ ID NO: 18168 - RNA, 18 nt, Artificial Sequence
  source: /note="Description of Artificial Sequence: Synthetic oligonucleotide"
  source: /note="RNA"
  source: /note="5' tri-ethylene glycol (TEG)"
  modified_base (1)..(1): bicyclic nucleic acid (BNA)
  modified_base (2)..(2): bicyclic nucleic acid (BNA)
  modified_base (3)..(3): 5-methyl modified nucleotide
  modified_base (6)..(6): 5-methyl modified nucleotide
  modified_base (18)..(18): 5-methyl modified nucleotide
aacaucaaggaagauggc

SEQ ID NO: 18169 - RNA, 17 nt, Artificial Sequence
  source: /note="Description of Artificial Sequence: Synthetic oligonucleotide"
  source: /note="RNA"
  source: /note="5' tri-ethylene glycol (TEG)"
  modified_base (1)..(1): bicyclic nucleic acid (BNA)
  modified_base (2)..(2): bicyclic nucleic acid (BNA)
  modified_base (3)..(3): 5-methyl modified nucleotide
  modified_base (6)..(6): 5-methyl modified nucleotide
aacaucaaggaagaugg

SEQ ID NO: 18170 - RNA, 16 nt, Artificial Sequence
  source: /note="Description of Artificial Sequence: Synthetic oligonucleotide"
  source: /note="RNA"
  source: /note="5' tri-ethylene glycol (TEG)"
  modified_base (1)..(1): bicyclic nucleic acid (BNA)
  modified_base (2)..(2): bicyclic nucleic acid (BNA)
  modified_base (3)..(3): 5-methyl modified nucleotide
  modified_base (6)..(6): 5-methyl modified nucleotide
aacaucaaggaagaug

SEQ ID NO: 18171 - RNA, 15 nt, Artificial Sequence
  source: /note="Description of Artificial Sequence: Synthetic oligonucleotide"
  source: /note="RNA"
  source: /note="5' tri-ethylene glycol (TEG)"
  modified_base (1)..(1): bicyclic nucleic acid (BNA)
  modified_base (2)..(2): bicyclic nucleic acid (BNA)
  modified_base (3)..(3): 5-methyl modified nucleotide
  modified_base (6)..(6): 5-methyl modified nucleotide
aacaucaaggaagau

SEQ ID NO: 18172 - RNA, 14 nt, Artificial Sequence
  source: /note="Description of Artificial Sequence: Synthetic oligonucleotide"
  source: /note="RNA"
  source: /note="5' tri-ethylene glycol (TEG)"
  modified_base (1)..(1): bicyclic nucleic acid (BNA)
  modified_base (2)..(2): bicyclic nucleic acid (BNA)
  modified_base (3)..(3): 5-methyl modified nucleotide
  modified_base (6)..(6): 5-methyl modified nucleotide
aacaucaaggaaga

SEQ ID NO: 18173 - RNA, 13 nt, Artificial Sequence
  source: /note="Description of Artificial Sequence: Synthetic oligonucleotide"
  source: /note="RNA"
  source: /note="5' tri-ethylene glycol (TEG)"
  modified_base (1)..(1): bicyclic nucleic acid (BNA)
  modified_base (2)..(2): bicyclic nucleic acid (BNA)
  modified_base (3)..(3): 5-methyl modified nucleotide
  modified_base (6)..(6): 5-methyl modified nucleotide
aacaucaaggaag

SEQ ID NO: 18174 - RNA, 25 nt, Artificial Sequence
  source: /note="Description of Artificial Sequence: Synthetic oligonucleotide"
  source: /note="RNA"
  source: /note="5' tri-ethylene glycol (TEG)"
  modified_base (1)..(1): bicyclic nucleic acid (BNA)
  modified_base (2)..(2): 5-methyl bicyclic nucleic acid
  modified_base (5)..(5): 5-methyl modified nucleotide
  modified_base (17)..(17): 5-methyl modified nucleotide
  modified_base (22)..(22): 5-methyl modified nucleotide
acaucaaggaagauggcauuucuag

SEQ ID NO: 18175 - RNA, 24 nt, Artificial Sequence
  source: /note="Description of Artificial Sequence: Synthetic oligonucleotide"
  source: /note="RNA"
  source: /note="5' tri-ethylene glycol (TEG)"
  modified_base (1)..(1): bicyclic nucleic acid (BNA)
  modified_base (2)..(2): 5-methyl bicyclic nucleic acid
  modified_base (5)..(5): 5-methyl modified nucleotide
  modified_base (17)..(17): 5-methyl modified nucleotide
  modified_base (22)..(22): 5-methyl modified nucleotide
acaucaaggaagauggcauuucua

SEQ ID NO: 18176 - RNA, 23 nt, Artificial Sequence
  source: /note="Description of Artificial Sequence: Synthetic oligonucleotide"
  source: /note="RNA"
  source: /note="5' tri-ethylene glycol (TEG)"
  modified_base (1)..(1): bicyclic nucleic acid (BNA)
  modified_base (2)..(2): 5-methyl bicyclic nucleic acid
  modified_base (5)..(5): 5-methyl modified nucleotide
  modified_base (17)..(17): 5-methyl modified nucleotide
  modified_base (22)..(22): 5-methyl modified nucleotide
acaucaaggaagauggcauuucu

SEQ ID NO: 18177 - RNA, 22 nt, Artificial Sequence
  source: /note="Description of Artificial Sequence: Synthetic oligonucleotide"
  source: /note="RNA"
  source: /note="5' tri-ethylene glycol (TEG)"
  modified_base (1)..(1): bicyclic nucleic acid (BNA)
  modified_base (2)..(2): 5-methyl bicyclic nucleic acid
  modified_base (5)..(5): 5-methyl modified nucleotide
  modified_base (17)..(17): 5-methyl modified nucleotide
  modified_base (22)..(22): 5-methyl modified nucleotide
acaucaaggaagauggcauuuc

SEQ ID NO: 18178 - RNA, 21 nt, Artificial Sequence
  source: /note="Description of Artificial Sequence: Synthetic oligonucleotide"
  source: /note="RNA"
  source: /note="5' tri-ethylene glycol (TEG)"
  modified_base (1)..(1): bicyclic nucleic acid (BNA)
  modified_base (2)..(2): 5-methyl bicyclic nucleic acid
  modified_base (5)..(5): 5-methyl modified nucleotide
  modified_base (17)..(17): 5-methyl modified nucleotide
acaucaaggaagauggcauuu

SEQ ID NO: 18179 - RNA, 20 nt, Artificial Sequence
  source: /note="Description of Artificial Sequence: Synthetic oligonucleotide"
  source: /note="RNA"
  source: /note="5' tri-ethylene glycol (TEG)"
  modified_base (1)..(1): bicyclic nucleic acid (BNA)
  modified_base (2)..(2): 5-methyl bicyclic nucleic acid
  modified_base (5)..(5): 5-methyl modified nucleotide
  modified_base (17)..(17): 5-methyl modified nucleotide
acaucaaggaagauggcauu

SEQ ID NO: 18180 - RNA, 19 nt, Artificial Sequence
  source: /note="Description of Artificial Sequence: Synthetic oligonucleotide"
  source: /note="RNA"
  source: /note="5' tri-ethylene glycol (TEG)"
  modified_base (1)..(1): bicyclic nucleic acid (BNA)
  modified_base (2)..(2): 5-methyl bicyclic nucleic acid
  modified_base (5)..(5): 5-methyl modified nucleotide
  modified_base (17)..(17): 5-methyl modified nucleotide
acaucaaggaagauggcau

SEQ ID NO: 18181 - RNA, 18 nt, Artificial Sequence
  source: /note="Description of Artificial Sequence: Synthetic oligonucleotide"
  source: /note="RNA"
  source: /note="5' tri-ethylene glycol (TEG)"
  modified_base (1)..(1): bicyclic nucleic acid (BNA)
  modified_base (2)..(2): 5-methyl bicyclic nucleic acid
  modified_base (5)..(5): 5-methyl modified nucleotide
  modified_base (17)..(17): 5-methyl modified nucleotide
acaucaaggaagauggca

SEQ ID NO: 18182 - RNA, 17 nt, Artificial Sequence
  source: /note="Description of Artificial Sequence: Synthetic oligonucleotide"
  source: /note="RNA"
  source: /note="5' tri-ethylene glycol (TEG)"
  modified_base (1)..(1): bicyclic nucleic acid (BNA)
  modified_base (2)..(2): 5-methyl bicyclic nucleic acid
  modified_base (5)..(5): 5-methyl modified nucleotide
  modified_base (17)..(17): 5-methyl modified nucleotide
acaucaaggaagauggc

SEQ ID NO: 18183 - RNA, 16 nt, Artificial Sequence
  source: /note="Description of Artificial Sequence: Synthetic oligonucleotide"
  source: /note="RNA"
  source: /note="5' tri-ethylene glycol (TEG)"
  modified_base (1)..(1): bicyclic nucleic acid (BNA)
  modified_base (2)..(2): 5-methyl bicyclic nucleic acid
  modified_base (5)..(5): 5-methyl modified nucleotide
acaucaaggaagaugg

SEQ ID NO: 18184 - RNA, 15 nt, Artificial Sequence
  source: /note="Description of Artificial Sequence: Synthetic oligonucleotide"
  source: /note="RNA"
  source: /note="5' tri-ethylene glycol (TEG)"
  modified_base (1)..(1): bicyclic nucleic acid (BNA)
  modified_base (2)..(2): 5-methyl bicyclic nucleic acid
  modified_base (5)..(5): 5-methyl modified nucleotide
acaucaaggaagaug

SEQ ID NO: 18185 - RNA, 14 nt, Artificial Sequence
  source: /note="Description of Artificial Sequence: Synthetic oligonucleotide"
  source: /note="RNA"
  source: /note="5' tri-ethylene glycol (TEG)"
  modified_base (1)..(1): bicyclic nucleic acid (BNA)
  modified_base (2)..(2): 5-methyl bicyclic nucleic acid
  modified_base (5)..(5): 5-methyl modified nucleotide
acaucaaggaagau

SEQ ID NO: 18186 - RNA, 13 nt, Artificial Sequence
  source: /note="Description of Artificial Sequence: Synthetic oligonucleotide"
  source: /note="RNA"
  source: /note="5' tri-ethylene glycol (TEG)"
  modified_base (1)..(1): bicyclic nucleic acid (BNA)
  modified_base (2)..(2): 5-methyl bicyclic nucleic acid
  modified_base (5)..(5): 5-methyl modified nucleotide
acaucaaggaaga

SEQ ID NO: 18187 - RNA, 12 nt, Artificial Sequence
  source: /note="Description of Artificial Sequence: Synthetic oligonucleotide"
  source: /note="RNA"
  source: /note="5' tri-ethylene glycol (TEG)"
  modified_base (1)..(1): bicyclic nucleic acid (BNA)
  modified_base (2)..(2): 5-methyl bicyclic nucleic acid
  modified_base (5)..(5): 5-methyl modified nucleotide
acaucaaggaag

SEQ ID NO: 18188 - RNA, 24 nt, Artificial Sequence
  source: /note="Description of Artificial Sequence: Synthetic oligonucleotide"
  source: /note="RNA"
  source: /note="5' tri-ethylene glycol (TEG)"
  modified_base (1)..(1): 5-methyl bicyclic nucleic acid
  modified_base (2)..(2): bicyclic nucleic acid (BNA)
  modified_base (4)..(4): 5-methyl modified nucleotide
  modified_base (16)..(16): 5-methyl modified nucleotide
  modified_base (21)..(21): 5-methyl modified nucleotide
caucaaggaagauggcauuucuag

SEQ ID NO: 18189 - RNA, 23 nt, Artificial Sequence
  source: /note="Description of Artificial Sequence: Synthetic oligonucleotide"
  source: /note="RNA"
  source: /note="5' tri-ethylene glycol (TEG)"
  modified_base (1)..(1): 5-methyl bicyclic nucleic acid
  modified_base (2)..(2): bicyclic nucleic acid (BNA)
  modified_base (4)..(4): 5-methyl modified nucleotide
  modified_base (16)..(16): 5-methyl modified nucleotide
  modified_base (21)..(21): 5-methyl modified nucleotide
caucaaggaagauggcauuucua

SEQ ID NO: 18190 - RNA, 22 nt, Artificial Sequence
  source: /note="Description of Artificial Sequence: Synthetic oligonucleotide"
  source: /note="RNA"
  source: /note="5' tri-ethylene glycol (TEG)"
  modified_base (1)..(1): 5-methyl bicyclic nucleic acid
  modified_base (2)..(2): bicyclic nucleic acid (BNA)
  modified_base (4)..(4): 5-methyl modified nucleotide
  modified_base (16)..(16): 5-methyl modified nucleotide
  modified_base (21)..(21): 5-methyl modified nucleotide
caucaaggaagauggcauuucu

SEQ ID NO: 18191 - RNA, 21 nt, Artificial Sequence
  source: /note="Description of Artificial Sequence: Synthetic oligonucleotide"
  source: /note="RNA"
  source: /note="5' tri-ethylene glycol (TEG)"
  modified_base (1)..(1): 5-methyl bicyclic nucleic acid
  modified_base (2)..(2): bicyclic nucleic acid (BNA)
  modified_base (4)..(4): 5-methyl modified nucleotide
  modified_base (16)..(16): 5-methyl modified nucleotide
  modified_base (21)..(21): 5-methyl modified nucleotide
caucaaggaagauggcauuuc

SEQ ID NO: 18192 - RNA, 20 nt, Artificial Sequence
  source: /note="Description of Artificial Sequence: Synthetic oligonucleotide"
  source: /note="RNA"
  source: /note="5' tri-ethylene glycol (TEG)"
  modified_base (1)..(1): 5-methyl bicyclic nucleic acid
  modified_base (2)..(2): bicyclic nucleic acid (BNA)
  modified_base (4)..(4): 5-methyl modified nucleotide
  modified_base (16)..(16): 5-methyl modified nucleotide
caucaaggaagauggcauuu

SEQ ID NO: 18193 - RNA, 19 nt, Artificial Sequence
  source: /note="Description of Artificial Sequence: Synthetic oligonucleotide"
  source: /note="RNA"
  source: /note="5' tri-ethylene glycol (TEG)"
  modified_base (1)..(1): 5-methyl bicyclic nucleic acid
  modified_base (2)..(2): bicyclic nucleic acid (BNA)
  modified_base (4)..(4): 5-methyl modified nucleotide
  modified_base (16)..(16): 5-methyl modified nucleotide
caucaaggaagauggcauu

SEQ ID NO: 18194 - RNA, 18 nt, Artificial Sequence
  source: /note="Description of Artificial Sequence: Synthetic oligonucleotide"
  source: /note="RNA"
  source: /note="5' tri-ethylene glycol (TEG)"
  modified_base (1)..(1): 5-methyl bicyclic nucleic acid
  modified_base (2)..(2): bicyclic nucleic acid (BNA)
  modified_base (4)..(4): 5-methyl modified nucleotide
  modified_base (16)..(16): 5-methyl modified nucleotide
caucaaggaagauggcau

SEQ ID NO: 18195 - RNA, 17 nt, Artificial Sequence
  source: /note="Description of Artificial Sequence: Synthetic oligonucleotide"
  source: /note="RNA"
  source: /note="5' tri-ethylene glycol (TEG)"
  modified_base (1)..(1): 5-methyl bicyclic nucleic acid
  modified_base (2)..(2): bicyclic nucleic acid (BNA)
  modified_base (4)..(4): 5-methyl modified nucleotide
  modified_base (16)..(16): 5-methyl modified nucleotide
caucaaggaagauggca

SEQ ID NO: 18196 - RNA, 16 nt, Artificial Sequence
  source: /note="Description of Artificial Sequence: Synthetic oligonucleotide"
  source: /note="RNA"
  source: /note="5' tri-ethylene glycol (TEG)"
  modified_base (1)..(1): 5-methyl bicyclic nucleic acid
  modified_base (2)..(2): bicyclic nucleic acid (BNA)
  modified_base (4)..(4): 5-methyl modified nucleotide
  modified_base (16)..(16): 5-methyl modified nucleotide
caucaaggaagauggc

SEQ ID NO: 18197 - RNA, 15 nt, Artificial Sequence
  source: /note="Description of Artificial Sequence: Synthetic oligonucleotide"
  source: /note="RNA"
  source: /note="5' tri-ethylene glycol (TEG)"
  modified_base (1)..(1): 5-methyl bicyclic nucleic acid
  modified_base (2)..(2): bicyclic nucleic acid (BNA)
  modified_base (4)..(4): 5-methyl modified nucleotide
caucaaggaagaugg

SEQ ID NO: 18198 - RNA, 14 nt, Artificial Sequence
  source: /note="Description of Artificial Sequence: Synthetic oligonucleotide"
  source: /note="RNA"
  source: /note="5' tri-ethylene glycol (TEG)"
  modified_base (1)..(1): 5-methyl bicyclic nucleic acid
  modified_base (2)..(2): bicyclic nucleic acid (BNA)
  modified_base (4)..(4): 5-methyl modified nucleotide
caucaaggaagaug

SEQ ID NO: 18199 - RNA, 13 nt, Artificial Sequence
  source: /note="Description of Artificial Sequence: Synthetic oligonucleotide"
  source: /note="RNA"
  source: /note="5' tri-ethylene glycol (TEG)"
  modified_base (1)..(1): 5-methyl bicyclic nucleic acid
  modified_base (2)..(2): bicyclic nucleic acid (BNA)
  modified_base (4)..(4): 5-methyl modified nucleotide
caucaaggaagau

SEQ ID NO: 18200 - RNA, 12 nt, Artificial Sequence
  source: /note="Description of Artificial Sequence: Synthetic oligonucleotide"
  source: /note="RNA"
  source: /note="5' tri-ethylene glycol (TEG)"
  modified_base (1)..(1): 5-methyl bicyclic nucleic acid
  modified_base (2)..(2): bicyclic nucleic acid (BNA)
  modified_base (4)..(4): 5-methyl modified nucleotide
caucaaggaaga

SEQ ID NO: 18201 - RNA, 11 nt, Artificial Sequence
  source: /note="Description of Artificial Sequence: Synthetic oligonucleotide"
  source: /note="RNA"
  source: /note="5' tri-ethylene glycol (TEG)"
  modified_base (1)..(1): 5-methyl bicyclic nucleic acid
  modified_base (2)..(2): bicyclic nucleic acid (BNA)
  modified_base (4)..(4): 5-methyl modified nucleotide
caucaaggaag

SEQ ID NO: 18202 - DNA, 23 bp, Artificial Sequence
  source: /note="Description of Artificial Sequence: Synthetic oligonucleotide"
  source: /note="Description of Combined DNA/RNA Molecule: Synthetic oligonucleotide"
  source: /note="DNA/RNA"
  source: /note="5' tri-ethylene glycol (TEG)"
  modified_base (1)..(1): bicyclic nucleic acid (BNA)
  modified_base (2)..(2): bicyclic nucleic acid (BNA)
  modified_base (3)..(3): 5-methyl modified nucleotide
  modified_base (15)..(15): 5-methyl modified nucleotide
  modified_base (20)..(20): 5-methyl modified nucleotide
atcaaggaagauggcauuucuag

SEQ ID NO: 18203 - DNA, 22 bp, Artificial Sequence
  source: /note="Description of Artificial Sequence: Synthetic oligonucleotide"
  source: /note="Description of Combined DNA/RNA Molecule: Synthetic oligonucleotide"
  source: /note="DNA/RNA"
  source: /note="5' tri-ethylene glycol (TEG)"
  modified_base (1)..(1): bicyclic nucleic acid (BNA)
  modified_base (2)..(2): bicyclic nucleic acid (BNA)
  modified_base (3)..(3): 5-methyl modified nucleotide
  modified_base (15)..(15): 5-methyl modified nucleotide
  modified_base (20)..(20): 5-methyl modified nucleotide
atcaaggaagauggcauuucua

SEQ ID NO: 18204 - DNA, 21 bp, Artificial Sequence
  source: /note="Description of Artificial Sequence: Synthetic oligonucleotide"
  source: /note="Description of Combined DNA/RNA Molecule: Synthetic oligonucleotide"
  source: /note="DNA/RNA"
  source: /note="5' tri-ethylene glycol (TEG)"
  modified_base (1)..(1): bicyclic nucleic acid (BNA)
  modified_base (2)..(2): bicyclic nucleic acid (BNA)
  modified_base (3)..(3): 5-methyl modified nucleotide
  modified_base (15)..(15): 5-methyl modified nucleotide
  modified_base (20)..(20): 5-methyl modified nucleotide
atcaaggaagauggcauuucu

SEQ ID NO: 18205 - DNA, 20 bp, Artificial Sequence
  source: /note="Description of Artificial Sequence: Synthetic oligonucleotide"
  source: /note="Description of Combined DNA/RNA Molecule: Synthetic oligonucleotide"
  source: /note="DNA/RNA"
  source: /note="5' tri-ethylene glycol (TEG)"
  modified_base (1)..(1): bicyclic nucleic acid (BNA)
  modified_base (2)..(2): bicyclic nucleic acid (BNA)
  modified_base (3)..(3): 5-methyl modified nucleotide
  modified_base (15)..(15): 5-methyl modified nucleotide
  modified_base (20)..(20): 5-methyl modified nucleotide
atcaaggaagauggcauuuc

SEQ ID NO: 18206 - DNA, 19 bp, Artificial Sequence
  source: /note="Description of Artificial Sequence: Synthetic oligonucleotide"
  source: /note="Description of Combined DNA/RNA Molecule: Synthetic oligonucleotide"
  source: /note="DNA/RNA"
  source: /note="5' tri-ethylene glycol (TEG)"
  modified_base (1)..(1): bicyclic nucleic acid (BNA)
  modified_base (2)..(2): bicyclic nucleic acid (BNA)
  modified_base (3)..(3): 5-methyl modified nucleotide
  modified_base (15)..(15): 5-methyl modified nucleotide
atcaaggaagauggcauuu

SEQ ID NO: 18207 - DNA, 18 bp, Artificial Sequence
  source: /note="Description of Artificial Sequence: Synthetic oligonucleotide"
  source: /note="Description of Combined DNA/RNA Molecule: Synthetic oligonucleotide"
  source: /note="DNA/RNA"
  source: /note="5' tri-ethylene glycol (TEG)"
  modified_base (1)..(1): bicyclic nucleic acid (BNA)
  modified_base (2)..(2): bicyclic nucleic acid (BNA)
  modified_base (3)..(3): 5-methyl modified nucleotide
  modified_base (15)..(15): 5-methyl modified nucleotide
atcaaggaagauggcauu

SEQ ID NO: 18208 - DNA, 17 bp, Artificial Sequence
  source: /note="Description of Artificial Sequence: Synthetic oligonucleotide"
  source: /note="Description of Combined DNA/RNA Molecule: Synthetic oligonucleotide"
  source: /note="DNA/RNA"
  source: /note="5' tri-ethylene glycol (TEG)"
  modified_base (1)..(1): bicyclic nucleic acid (BNA)
  modified_base (2)..(2): bicyclic nucleic acid (BNA)
  modified_base (3)..(3): 5-methyl modified nucleotide
  modified_base (15)..(15): 5-methyl modified nucleotide
atcaaggaagauggcau

SEQ ID NO: 18209 - DNA, 16 bp, Artificial Sequence
  source: /note="Description of Artificial Sequence: Synthetic oligonucleotide"
  source: /note="Description of Combined DNA/RNA Molecule: Synthetic oligonucleotide"
  source: /note="DNA/RNA"
  source: /note="5' tri-ethylene glycol (TEG)"
  modified_base (1)..(1): bicyclic nucleic acid (BNA)
  modified_base (2)..(2): bicyclic nucleic acid (BNA)
  modified_base (3)..(3): 5-methyl modified nucleotide
  modified_base (15)..(15): 5-methyl modified nucleotide
atcaaggaagauggca

SEQ ID NO: 18210 - DNA, 15 bp, Artificial Sequence
  source: /note="Description of Artificial Sequence: Synthetic oligonucleotide"
  source: /note="Description of Combined DNA/RNA Molecule: Synthetic oligonucleotide"
  source: /note="DNA/RNA"
  source: /note="5' tri-ethylene glycol (TEG)"
  modified_base (1)..(1): bicyclic nucleic acid (BNA)
  modified_base (2)..(2): bicyclic nucleic acid (BNA)
  modified_base (3)..(3): 5-methyl modified nucleotide
  modified_base (15)..(15): 5-methyl modified nucleotide
atcaaggaagauggc

SEQ ID NO: 18211 - DNA, 14 bp, Artificial Sequence
  source: /note="Description of Artificial Sequence: Synthetic oligonucleotide"
  source: /note="Description of Combined DNA/RNA Molecule: Synthetic oligonucleotide"
  source: /note="DNA/RNA"
  source: /note="5' tri-ethylene glycol (TEG)"
  modified_base (1)..(1): bicyclic nucleic acid (BNA)
  modified_base (2)..(2): bicyclic nucleic acid (BNA)
  modified_base (3)..(3): 5-methyl modified nucleotide
atcaaggaagaugg

SEQ ID NO: 18212 - DNA, 13 bp, Artificial Sequence
  source: /note="Description of Artificial Sequence: Synthetic oligonucleotide"
  source: /note="Description of Combined DNA/RNA Molecule: Synthetic oligonucleotide"
  source: /note="DNA/RNA"
  source: /note="5' tri-ethylene glycol (TEG)"
  modified_base (1)..(1): bicyclic nucleic acid (BNA)
  modified_base (2)..(2): bicyclic nucleic acid (BNA)
  modified_base (3)..(3): 5-methyl modified nucleotide
atcaaggaagaug

SEQ ID NO: 18213 - DNA, 12 bp, Artificial Sequence
  source: /note="Description of Artificial Sequence: Synthetic oligonucleotide"
  source: /note="Description of Combined DNA/RNA Molecule: Synthetic oligonucleotide"
  source: /note="DNA/RNA"
  source: /note="5' tri-ethylene glycol (TEG)"
  modified_base (1)..(1): bicyclic nucleic acid (BNA)
  modified_base (2)..(2): bicyclic nucleic acid (BNA)
  modified_base (3)..(3): 5-methyl modified nucleotide
atcaaggaagau

SEQ ID NO: 18214 - DNA, 11 bp, Artificial Sequence
  source: /note="Description of Artificial Sequence: Synthetic oligonucleotide"
  source: /note="DNA/RNA"
  source: /note="5' tri-ethylene glycol (TEG)"
  modified_base (1)..(1): bicyclic nucleic acid (BNA)
  modified_base (2)..(2): bicyclic nucleic acid (BNA)
  modified_base (3)..(3): 5-methyl modified nucleotide
atcaaggaaga

SEQ ID NO: 18215 - DNA, 10 bp, Artificial Sequence
  source: /note="Description of Artificial Sequence: Synthetic oligonucleotide"
  source: /note="DNA/RNA"
  source: /note="5' tri-ethylene glycol (TEG)"
  modified_base (1)..(1): bicyclic nucleic acid (BNA)
  modified_base (2)..(2): bicyclic nucleic acid (BNA)
  modified_base (3)..(3): 5-methyl modified nucleotide
atcaaggaag

SEQ ID NO: 18216 - RNA, 23 nt, Artificial Sequence
  source: /note="Description of Artificial Sequence: Synthetic oligonucleotide"
  source: /note="RNA"
  source: /note="5' tri-ethylene glycol (TEG)"
  modified_base (1)..(1): 5-methyl bicyclic nucleic acid
  modified_base (2)..(2): 5-methyl bicyclic nucleic acid
  modified_base (7)..(7): 5-methyl modified nucleotide
  modified_base (13)..(13): 5-methyl modified nucleotide
  modified_base (14)..(14): 5-methyl modified nucleotide
  modified_base (16)..(16): 5-methyl modified nucleotide
  modified_base (17)..(17): 5-methyl modified nucleotide
  modified_base (20)..(20): 5-methyl modified nucleotide
  modified_base (23)..(23): 5-methyl modified nucleotide
ccagagcagguaccuccaacauc

SEQ ID NO: 18217 - RNA, 18 nt, Artificial Sequence
  source: /note="Description of Artificial Sequence: Synthetic oligonucleotide"
  source: /note="RNA"
  source: /note="5' tri-ethylene glycol (TEG)"
  modified_base (1)..(1): 5-methyl bicyclic nucleic acid
  modified_base (2)..(2): 5-methyl bicyclic nucleic acid
  modified_base (7)..(7): 5-methyl modified nucleotide
  modified_base (13)..(13): 5-methyl modified nucleotide
  modified_base (14)..(14): 5-methyl modified nucleotide
  modified_base (16)..(16): 5-methyl modified nucleotide
  modified_base (17)..(17): 5-methyl modified nucleotide
ccagagcagguaccucca

SEQ ID NO: 18218 - RNA, 23 nt, Artificial Sequence
  source: /note="Description of Artificial Sequence: Synthetic oligonucleotide"
  source: /note="RNA"
  source: /note="5' tri-ethylene glycol (TEG)"
  modified_base (1)..(1): 5-methyl bicyclic nucleic acid
  modified_base (2)..(2): 5-methyl bicyclic nucleic acid
  modified_base (4)..(4): 5-methyl modified nucleotide
  modified_base (18)..(18): 5-methyl modified nucleotide
ccucugugauuuuauaacuugau

SEQ ID NO: 18219 - DNA, 17 bp, Artificial Sequence
  source: /note="Description of Artificial Sequence: Synthetic oligonucleotide"
  source: /note="Description of Combined DNA/RNA Molecule: Synthetic oligonucleotide"
  source: /note="DNA/RNA"
  source: /note="5' tri-ethylene glycol (TEG)"
  modified_base (1)..(1): bicyclic nucleic acid (BNA)
  modified_base (2)..(2): 5-methyl bicyclic nucleic acid
  modified_base (4)..(4): 5-methyl modified nucleotide
  modified_base (5)..(5): 5-methyl modified nucleotide
  modified_base (6)..(6): 5-methyl modified nucleotide
  modified_base (8)..(8): 5-methyl modified nucleotide
  modified_base (9)..(9): 5-methyl modified nucleotide
  modified_base (12)..(12): 5-methyl modified nucleotide
  modified_base (14)..(14): 5-methyl modified nucleotide
  modified_base (15)..(15): 5-methyl modified nucleotide
  modified_base (16)..(16): 5-methyl modified nucleotide
tcacccaccaucacccu

SEQ ID NO: 18220 - DNA, 20 bp, Artificial Sequence
  source: /note="Description of Artificial Sequence: Synthetic oligonucleotide"
  source: /note="Description of Combined DNA/RNA Molecule: Synthetic oligonucleotide"
  source: /note="DNA/RNA"
  source: /note="5' tri-ethylene glycol (TEG)"
  modified_base (1)..(1): bicyclic nucleic acid (BNA)
  modified_base (2)..(2): bicyclic nucleic acid (BNA)
  modified_base (7)..(7): 5-methyl modified nucleotide
  modified_base (8)..(8): 5-methyl modified nucleotide
  modified_base (10)..(10): 5-methyl modified nucleotide
  modified_base (16)..(16): 5-methyl modified nucleotide
  modified_base (18)..(18): 5-methyl modified nucleotide
  modified_base (19)..(19): 5-methyl modified nucleotide
  modified_base (20)..(20): 5-methyl modified nucleotide
tgauauccucaaggucaccc

SEQ ID NO: 18221 - DNA, 22 bp, Artificial Sequence
  source: /note="Description of Artificial Sequence: Synthetic oligonucleotide"
  source: /note="Description of Combined DNA/RNA Molecule: Synthetic oligonucleotide"
  source: /note="DNA/RNA"
  source: /note="5' tri-ethylene glycol (TEG)"
  modified_base (1)..(1): 5-methyl bicyclic nucleic acid
  modified_base (2)..(2): bicyclic nucleic acid (BNA)
  modified_base (4)..(4): 5-methyl modified nucleotide
  modified_base (13)..(13): 5-methyl modified nucleotide
  modified_base (16)..(16): 5-methyl modified nucleotide
  modified_base (18)..(18): 5-methyl modified nucleotide
ctgcuugaugaucaucucguug

SEQ ID NO: 18222 - DNA, 18 bp, Artificial Sequence
  source: /note="Description of Artificial Sequence: Synthetic oligonucleotide"
  source: /note="Description of Combined DNA/RNA Molecule: Synthetic oligonucleotide"
  source: /note="DNA/RNA"
  source: /note="5' tri-ethylene glycol (TEG)"
  modified_base (1)..(1): 5-methyl bicyclic nucleic acid
  modified_base (2)..(2): bicyclic nucleic acid (BNA)
  modified_base (4)..(4): 5-methyl modified nucleotide
  modified_base (13)..(13): 5-methyl modified nucleotide
  modified_base (16)..(16): 5-methyl modified nucleotide
  modified_base (18)..(18): 5-methyl modified nucleotide
ctgcuugaugaucaucuc

SEQ ID NO: 18223 - DNA, 19 bp, Artificial Sequence
  source: /note="Description of Artificial Sequence: Synthetic oligonucleotide"
  source: /note="Description of Combined DNA/RNA Molecule: Synthetic oligonucleotide"
  source: /note="DNA/RNA"
  source: /note="5' tri-ethylene glycol (TEG)"
  modified_base (1)..(1): bicyclic nucleic acid (BNA)
  modified_base (2)..(2): bicyclic nucleic acid (BNA)
  modified_base (5)..(5): 5-methyl modified nucleotide
  modified_base (6)..(6): 5-methyl modified nucleotide
  modified_base (14)..(14): 5-methyl modified nucleotide
  modified_base (15)..(15): 5-methyl modified nucleotide
  modified_base (17)..(17): 5-methyl modified nucleotide
gtuuccuuaguaaccacag

SEQ ID NO: 18224 - DNA, 17 bp, Artificial Sequence
  source: /note="Description of Artificial Sequence: Synthetic oligonucleotide"
  source: /note="Description of Combined DNA/RNA Molecule: Synthetic oligonucleotide"
  source: /note="DNA/RNA"
  source: /note="5' tri-ethylene glycol (TEG)"
  modified_base (1)..(1): bicyclic nucleic acid (BNA)
  modified_base (2)..(2): bicyclic nucleic acid (BNA)
  modified_base (5)..(5): 5-methyl modified nucleotide
  modified_base (6)..(6): 5-methyl modified nucleotide
  modified_base (14)..(14): 5-methyl modified nucleotide
  modified_base (15)..(15): 5-methyl modified nucleotide
  modified_base (17)..(17): 5-methyl modified nucleotide
gtuuccuuaguaaccac

SEQ ID NO: 18225 - DNA, 20 bp, Artificial Sequence
  source: /note="Description of Artificial Sequence: Synthetic oligonucleotide"
  source: /note="Description of Combined DNA/RNA Molecule: Synthetic oligonucleotide"
  source: /note="DNA/RNA"
  modified_base (1)..(1): bicyclic nucleic acid (BNA)
  modified_base (2)..(2): 5-methyl bicyclic nucleic acid
  modified_base (14)..(14): 5-methyl modified nucleotide
  modified_base (19)..(19): 5-methyl modified nucleotide
  source: /note="3' tri-ethylene glycol (TEG)"
tcaaggaagauggcauuucu

SEQ ID NO: 18226 - DNA, 22 bp, Artificial Sequence
  source: /note="Description of Artificial Sequence: Synthetic oligonucleotide"
  source: /note="Description of Combined DNA/RNA Molecule: Synthetic oligonucleotide"
  source: /note="DNA/RNA"
  modified_base (1)..(1): bicyclic nucleic acid (BNA)
  modified_base (2)..(2): 5-methyl bicyclic nucleic acid
  modified_base (14)..(14): 5-methyl modified nucleotide
  modified_base (19)..(19): 5-methyl modified nucleotide
  source: /note="3' tri-ethylene glycol (TEG)"
tcaaggaagauggcauuucuag

SEQ ID NO: 18227 - RNA, 18 nt, Artificial Sequence
  source: /note="Description of Artificial Sequence: Synthetic oligonucleotide"
  source: /note="RNA"
  modified_base (1)..(1): bicyclic nucleic acid (BNA)
  modified_base (2)..(2): bicyclic nucleic acid (BNA)
  modified_base (9)..(9): 5-methyl modified nucleotide
  modified_base (13)..(13): 5-methyl modified nucleotide
  modified_base (14)..(14): 5-methyl modified nucleotide
  modified_base (18)..(18): 5-methyl modified nucleotide
  source: /note="3' tri-ethylene glycol (TEG)"
gguaaguucuguccaagc

SEQ ID NO: 18228 - DNA, 18 bp, Artificial Sequence
  source: /note="Description of Artificial Sequence: Synthetic oligonucleotide"
  source: /note="Description of Combined DNA/RNA Molecule: Synthetic oligonucleotide"
  source: /note="DNA/RNA"
  modified_base (1)..(1): bicyclic nucleic acid (BNA)
  modified_base (2)..(2): bicyclic nucleic acid (BNA)
  modified_base (8)..(8): 5-methyl modified nucleotide
  modified_base (12)..(12): 5-methyl modified nucleotide
  modified_base (13)..(13): 5-methyl modified nucleotide
  modified_base (17)..(17): 5-methyl modified nucleotide
  modified_base (18)..(18): 5-methyl modified nucleotide
  source: /note="3' tri-ethylene glycol (TEG)"
gtaaguucuguccaagcc

SEQ ID NO: 18229 - RNA, 18 nt, Artificial Sequence
  source: /note="Description of Artificial Sequence: Synthetic oligonucleotide"
  source: /note="RNA"
  modified_base (1)..(1): bicyclic nucleic acid (BNA)
  modified_base (2)..(2): bicyclic nucleic acid (BNA)
  modified_base (4)..(4): 5-methyl modified nucleotide
  modified_base (13)..(13): 5-methyl modified nucleotide
  modified_base (17)..(17): 5-methyl modified nucleotide
  modified_base (18)..(18): 5-methyl modified nucleotide
  source: /note="3' tri-ethylene glycol (TEG)"
agucgguaaguucugucc

SEQ ID NO: 18230 - DNA, 18 bp, Artificial Sequence
  source: /note="Description of Artificial Sequence: Synthetic oligonucleotide"
  source: /note="Description of Combined DNA/RNA Molecule: Synthetic oligonucleotide"
  source: /note="DNA/RNA"
  modified_base (1)..(1): 5-methyl bicyclic nucleic acid
  modified_base (2)..(2): bicyclic nucleic acid (BNA)
  modified_base (5)..(5): 5-methyl modified nucleotide
  modified_base (6)..(6): 5-methyl modified nucleotide
  modified_base (10)..(10): 5-methyl modified nucleotide
  modified_base (11)..(11): 5-methyl modified nucleotide
  modified_base (12)..(12): 5-methyl modified nucleotide
  source: /note="3' tri-ethylene glycol (TEG)"
ctguccaagcccgguuga

SEQ ID NO: 18231 - DNA, 15 bp, Artificial Sequence
  source: /note="Description of Artificial Sequence: Synthetic oligonucleotide"
  source: /note="Description of Combined DNA/RNA Molecule: Synthetic oligonucleotide"
  source: /note="DNA/RNA"
  modified_base (1)..(1): bicyclic nucleic acid (BNA)
  modified_base (2)..(2): bicyclic nucleic acid (BNA)
  modified_base (7)..(7): 5-methyl modified nucleotide
  modified_base (11)..(11): 5-methyl modified nucleotide
  modified_base (12)..(12): 5-methyl modified nucleotide
  source: /note="3' tri-ethylene glycol (TEG)"
taaguucuguccaag

SEQ ID NO: 18232 - DNA, 20 bp, Artificial Sequence
  source: /note="Description of Artificial Sequence: Synthetic oligonucleotide"
  source: /note="Description of Combined DNA/RNA Molecule: Synthetic oligonucleotide"
  source: /note="DNA/RNA"
  modified_base (1)..(1): bicyclic nucleic acid (BNA)
  modified_base (2)..(2): bicyclic nucleic acid (BNA)
  modified_base (3)..(3): 5-methyl modified nucleotide
  modified_base (7)..(7): 5-methyl modified nucleotide
  modified_base (8)..(8): 5-methyl modified nucleotide
  modified_base (12)..(12): 5-methyl modified nucleotide
  modified_base (13)..(13): 5-methyl modified nucleotide
  modified_base (14)..(14): 5-methyl modified nucleotide
  source: /note="3' tri-ethylene glycol (TEG)"
ttcuguccaagcccgguuga

SEQ ID NO: 18233 - DNA, 19 bp, Artificial Sequence
  source: /note="Description of Artificial Sequence: Synthetic oligonucleotide"
  source: /note="Description of Combined DNA/RNA Molecule: Synthetic oligonucleotide"
  source: /note="DNA/RNA"
  modified_base (1)..(1): bicyclic nucleic acid (BNA)
  modified_base (2)..(2): bicyclic nucleic acid (BNA)
  modified_base (3)..(3): 5-methyl modified nucleotide
  modified_base (7)..(7): 5-methyl modified nucleotide
  modified_base (8)..(8): 5-methyl modified nucleotide
  modified_base (12)..(12): 5-methyl modified nucleotide
  modified_base (13)..(13): 5-methyl modified nucleotide
  modified_base (14)..(14): 5-methyl modified nucleotide
  source: /note="3' tri-ethylene glycol (TEG)"
ttcuguccaagcccgguug

SEQ ID NO: 18234 - DNA, 18 bp, Artificial Sequence
  source: /note="Description of Artificial Sequence: Synthetic oligonucleotide"
  source: /note="Description of Combined DNA/RNA Molecule: Synthetic oligonucleotide"
  source: /note="DNA/RNA"
  modified_base (1)..(1): bicyclic nucleic acid (BNA)
  modified_base (2)..(2): bicyclic nucleic acid (BNA)
  modified_base (3)..(3): 5-methyl modified nucleotide
  modified_base (7)..(7): 5-methyl modified nucleotide
  modified_base (8)..(8): 5-methyl modified nucleotide
  modified_base (12)..(12): 5-methyl modified nucleotide
  modified_base (13)..(13): 5-methyl modified nucleotide
  modified_base (14)..(14): 5-methyl modified nucleotide
  source: /note="3' tri-ethylene glycol (TEG)"
ttcuguccaagcccgguu

SEQ ID NO: 18235 - DNA, 17 bp, Artificial Sequence
  source: /note="Description of Artificial Sequence: Synthetic oligonucleotide"
  source: /note="Description of Combined DNA/RNA Molecule: Synthetic oligonucleotide"
  source: /note="DNA/RNA"
  modified_base (1)..(1): bicyclic nucleic acid (BNA)
  modified_base (2)..(2): bicyclic nucleic acid (BNA)
  modified_base (3)..(3): 5-methyl modified nucleotide
  modified_base (7)..(7): 5-methyl modified nucleotide
  modified_base (8)..(8): 5-methyl modified nucleotide
  modified_base (12)..(12): 5-methyl modified nucleotide
  modified_base (13)..(13): 5-methyl modified nucleotide
  modified_base (14)..(14): 5-methyl modified nucleotide
  source: /note="3' tri-ethylene glycol (TEG)"
ttcuguccaagcccggu

SEQ ID NO: 18236 - DNA, 16 bp, Artificial Sequence
  source: /note="Description of Artificial Sequence: Synthetic oligonucleotide"
  source: /note="Description of Combined DNA/RNA Molecule: Synthetic oligonucleotide"
  source: /note="DNA/RNA"
  modified_base (1)..(1): bicyclic nucleic acid (BNA)
  modified_base (2)..(2): bicyclic nucleic acid (BNA)
  modified_base (3)..(3): 5-methyl modified nucleotide
  modified_base (7)..(7): 5-methyl modified nucleotide
  modified_base (8)..(8): 5-methyl modified nucleotide
  modified_base (12)..(12): 5-methyl modified nucleotide
  modified_base (13)..(13): 5-methyl modified nucleotide
  modified_base (14)..(14): 5-methyl modified nucleotide
  source: /note="3' tri-ethylene glycol (TEG)"
ttcuguccaagcccgg

SEQ ID NO: 18237 - DNA, 15 bp, Artificial Sequence
  source: /note="Description of Artificial Sequence: Synthetic oligonucleotide"
  source: /note="Description of Combined DNA/RNA Molecule: Synthetic oligonucleotide"
  source: /note="DNA/RNA"
  modified_base (1)..(1): bicyclic nucleic acid (BNA)
  modified_base (2)..(2): bicyclic nucleic acid (BNA)
  modified_base (3)..(3): 5-methyl modified nucleotide
  modified_base (7)..(7): 5-methyl modified nucleotide
  modified_base (8)..(8): 5-methyl modified nucleotide
  modified_base (12)..(12): 5-methyl modified nucleotide
  modified_base (13)..(13): 5-methyl modified nucleotide
  modified_base (14)..(14): 5-methyl modified nucleotide
  source: /note="3' tri-ethylene glycol (TEG)"
ttcuguccaagcccg

SEQ ID NO: 18238 - DNA, 14 bp, Artificial Sequence
  source: /note="Description of Artificial Sequence: Synthetic oligonucleotide"
  source: /note="Description of Combined DNA/RNA Molecule: Synthetic oligonucleotide"
  source: /note="DNA/RNA"
  modified_base (1)..(1): bicyclic nucleic acid (BNA)
  modified_base (2)..(2): bicyclic nucleic acid (BNA)
  modified_base (3)..(3): 5-methyl modified nucleotide
  modified_base (7)..(7): 5-methyl modified nucleotide
  modified_base (8)..(8): 5-methyl modified nucleotide
  modified_base (12)..(12): 5-methyl modified nucleotide
  modified_base (13)..(13): 5-methyl modified nucleotide
  modified_base (14)..(14): 5-methyl modified nucleotide
  source: /note="3' tri-ethylene glycol (TEG)"
ttcuguccaagccc

SEQ ID NO: 18239 - DNA, 13 bp, Artificial Sequence
  source: /note="Description of Artificial Sequence: Synthetic oligonucleotide"
  source: /note="Description of Combined DNA/RNA Molecule: Synthetic oligonucleotide"
  source: /note="DNA/RNA"
  modified_base (1)..(1): bicyclic nucleic acid (BNA)
  modified_base (2)..(2): bicyclic nucleic acid (BNA)
  modified_base (3)..(3): 5-methyl modified nucleotide
  modified_base (7)..(7): 5-methyl modified nucleotide
  modified_base (8)..(8): 5-methyl modified nucleotide
  modified_base (12)..(12): 5-methyl modified nucleotide
  modified_base (13)..(13): 5-methyl modified nucleotide
  source: /note="3' tri-ethylene glycol (TEG)"
ttcuguccaagcc

SEQ ID NO: 18240 - DNA, 12 bp, Artificial Sequence
  source: /note="Description of Artificial Sequence: Synthetic oligonucleotide"
  source: /note="Description of Combined DNA/RNA Molecule: Synthetic oligonucleotide"
  source: /note="DNA/RNA"
  modified_base (1)..(1): bicyclic nucleic acid (BNA)
  modified_base (2)..(2): bicyclic nucleic acid (BNA)
  modified_base (3)..(3): 5-methyl modified nucleotide
  modified_base (7)..(7): 5-methyl modified nucleotide
  modified_base (8)..(8): 5-methyl modified nucleotide
  modified_base (12)..(12): 5-methyl modified nucleotide
  source: /note="3' tri-ethylene glycol (TEG)"
ttcuguccaagc

SEQ ID NO: 18241 - DNA, 11 bp, Artificial Sequence
  source: /note="Description of Artificial Sequence: Synthetic oligonucleotide"
  source: /note="Description of Combined DNA/RNA Molecule: Synthetic oligonucleotide"
  source: /note="DNA/RNA"
  modified_base (1)..(1): bicyclic nucleic acid (BNA)
  modified_base (2)..(2): bicyclic nucleic acid (BNA)
  modified_base (3)..(3): 5-methyl modified nucleotide
  modified_base (7)..(7): 5-methyl modified nucleotide
  modified_base (8)..(8): 5-methyl modified nucleotide
  source: /note="3' tri-ethylene glycol (TEG)"
ttcuguccaag

SEQ ID NO: 18242 - DNA, 10 bp, Artificial Sequence
  source: /note="Description of Artificial Sequence: Synthetic oligonucleotide"
  source: /note="Description of Combined DNA/RNA Molecule: Synthetic oligonucleotide"
  source: /note="DNA/RNA"
  modified_base (1)..(1): bicyclic nucleic acid (BNA)
  modified_base (2)..(2): bicyclic nucleic acid (BNA)
  modified_base (3)..(3): 5-methyl modified nucleotide
  modified_base (7)..(7): 5-methyl modified nucleotide
  modified_base (8)..(8): 5-methyl modified nucleotide
  source: /note="3' tri-ethylene glycol (TEG)"
ttcuguccaa

SEQ ID NO: 18243 - DNA, 9 bp, Artificial Sequence
  source: /note="Description of Artificial Sequence: Synthetic oligonucleotide"
  source: /note="Description of Combined DNA/RNA Molecule: Synthetic oligonucleotide"
  source: /note="DNA/RNA"
  modified_base (1)..(1): bicyclic nucleic acid (BNA)
  modified_base (2)..(2): bicyclic nucleic acid (BNA)
  modified_base (3)..(3): 5-methyl modified nucleotide
  modified_base (7)..(7): 5-methyl modified nucleotide
  modified_base (8)..(8): 5-methyl modified nucleotide
  source: /note="3' tri-ethylene glycol (TEG)"
ttcugucca

SEQ ID NO: 18244 - DNA, 8 bp, Artificial Sequence
  source: /note="Description of Artificial Sequence: Synthetic oligonucleotide"
  source: /note="Description of Combined DNA/RNA Molecule: Synthetic oligonucleotide"
  source: /note="DNA/RNA"
  modified_base (1)..(1): bicyclic nucleic acid (BNA)
  modified_base (2)..(2): bicyclic nucleic acid (BNA)
  modified_base (3)..(3): 5-methyl modified nucleotide
  modified_base (7)..(7): 5-methyl modified nucleotide
  modified_base (8)..(8): 5-methyl modified nucleotide
  source: /note="3' tri-ethylene glycol (TEG)"
ttcugucc

SEQ ID NO: 18245 - DNA, 19 bp, Artificial Sequence
  source: /note="Description of Artificial Sequence: Synthetic oligonucleotide"
  source: /note="Description of Combined DNA/RNA Molecule: Synthetic oligonucleotide"
  source: /note="DNA/RNA"
  modified_base (1)..(1): bicyclic nucleic acid (BNA)
  modified_base (2)..(2): 5-methyl bicyclic nucleic acid
  modified_base (6)..(6): 5-methyl modified nucleotide
  modified_base (7)..(7): 5-methyl modified nucleotide
  modified_base (11)..(11): 5-methyl modified nucleotide
  modified_base (12)..(12): 5-methyl modified nucleotide
  modified_base (13)..(13): 5-methyl modified nucleotide
  source: /note="3' tri-ethylene glycol (TEG)"
tcuguccaagcccgguuga

SEQ ID NO: 18246 - DNA, 18 bp, Artificial Sequence
  source: /note="Description of Artificial Sequence: Synthetic oligonucleotide"
  source: /note="Description of Combined DNA/RNA Molecule: Synthetic oligonucleotide"
  source: /note="DNA/RNA"
  modified_base (1)..(1): bicyclic nucleic acid (BNA)
  modified_base (2)..(2): 5-methyl bicyclic nucleic acid
  modified_base (6)..(6): 5-methyl modified nucleotide
  modified_base (7)..(7): 5-methyl modified nucleotide
  modified_base (11)..(11): 5-methyl modified nucleotide
  modified_base (12)..(12): 5-methyl modified nucleotide
  modified_base (13)..(13): 5-methyl modified nucleotide
  source: /note="3' tri-ethylene glycol (TEG)"
tcuguccaagcccgguug

SEQ ID NO: 18247 - DNA, 17 bp, Artificial Sequence
  source: /note="Description of Artificial Sequence: Synthetic oligonucleotide"
  source: /note="Description of Combined DNA/RNA Molecule: Synthetic oligonucleotide"
  source: /note="DNA/RNA"
  modified_base (1)..(1): bicyclic nucleic acid (BNA)
  modified_base (2)..(2): 5-methyl bicyclic nucleic acid
  modified_base (6)..(6): 5-methyl modified nucleotide
  modified_base (7)..(7): 5-methyl modified nucleotide
  modified_base (11)..(11): 5-methyl modified nucleotide
  modified_base (12)..(12): 5-methyl modified nucleotide
  modified_base (13)..(13): 5-methyl modified nucleotide
  source: /note="3' tri-ethylene glycol (TEG)"
tcuguccaagcccgguu

SEQ ID NO: 18248 - DNA, 16 bp, Artificial Sequence
  source: /note="Description of Artificial Sequence: Synthetic oligonucleotide"
  source: /note="Description of Combined DNA/RNA Molecule: Synthetic oligonucleotide"
  source: /note="DNA/RNA"
  modified_base (1)..(1): bicyclic nucleic acid (BNA)
  modified_base (2)..(2): 5-methyl bicyclic nucleic acid
  modified_base (6)..(6): 5-methyl modified nucleotide
  modified_base (7)..(7): 5-methyl modified nucleotide
  modified_base (11)..(11): 5-methyl modified nucleotide
  modified_base (12)..(12): 5-methyl modified nucleotide
  modified_base (13)..(13): 5-methyl modified nucleotide
  source: /note="3' tri-ethylene glycol (TEG)"
tcuguccaagcccggu

SEQ ID NO: 18249 - DNA, 15 bp, Artificial Sequence
  source: /note="Description of Artificial Sequence: Synthetic oligonucleotide"
  source: /note="Description of Combined DNA/RNA Molecule: Synthetic oligonucleotide"
  source: /note="DNA/RNA"
  modified_base (1)..(1): bicyclic nucleic acid (BNA)
  modified_base (2)..(2): 5-methyl bicyclic nucleic acid
  modified_base (6)..(6): 5-methyl modified nucleotide
  modified_base (7)..(7): 5-methyl modified nucleotide
  modified_base (11)..(11): 5-methyl modified nucleotide
  modified_base (12)..(12): 5-methyl modified nucleotide
  modified_base (13)..(13): 5-methyl modified nucleotide
  source: /note="3' tri-ethylene glycol (TEG)"
tcuguccaagcccgg

SEQ ID NO: 18250 - DNA, 14 bp, Artificial Sequence
  source: /note="Description of Artificial Sequence: Synthetic oligonucleotide"
  source: /note="Description of Combined DNA/RNA Molecule: Synthetic oligonucleotide"
  source: /note="DNA/RNA"
  modified_base (1)..(1): bicyclic nucleic acid (BNA)
  modified_base (2)..(2): 5-methyl bicyclic nucleic acid
  modified_base (6)..(6): 5-methyl modified nucleotide
  modified_base (7)..(7): 5-methyl modified nucleotide
  modified_base (11)..(11): 5-methyl modified nucleotide
  modified_base (12)..(12): 5-methyl modified nucleotide
  modified_base (13)..(13): 5-methyl modified nucleotide
  source: /note="3' tri-ethylene glycol (TEG)"
tcuguccaagcccg

SEQ ID NO: 18251 - DNA, 13 bp, Artificial Sequence
  source: /note="Description of Artificial Sequence: Synthetic oligonucleotide"
  source: /note="Description of Combined DNA/RNA Molecule: Synthetic oligonucleotide"
  source: /note="DNA/RNA"
  modified_base (1)..(1): bicyclic nucleic acid (BNA)
  modified_base (2)..(2): 5-methyl bicyclic nucleic acid
  modified_base (6)..(6): 5-methyl modified nucleotide
  modified_base (7)..(7): 5-methyl modified nucleotide
  modified_base (11)..(11): 5-methyl modified nucleotide
  modified_base (12)..(12): 5-methyl modified nucleotide
  modified_base (13)..(13): 5-methyl modified nucleotide
  source: /note="3' tri-ethylene glycol (TEG)"
tcuguccaagccc

SEQ ID NO: 18252 - DNA, 12 bp, Artificial Sequence
  source: /note="Description of Artificial Sequence: Synthetic oligonucleotide"
  source: /note="Description of Combined DNA/RNA Molecule: Synthetic oligonucleotide"
  source: /note="DNA/RNA"
  modified_base (1)..(1): bicyclic nucleic acid (BNA)
  modified_base (2)..(2): 5-methyl bicyclic nucleic acid
  modified_base (6)..(6): 5-methyl modified nucleotide
  modified_base (7)..(7): 5-methyl modified nucleotide
  modified_base (11)..(11): 5-methyl modified nucleotide
  modified_base (12)..(12): 5-methyl modified nucleotide
  source: /note="3' tri-ethylene glycol (TEG)"
tcuguccaagcc

SEQ ID NO: 18253 - DNA, 11 bp, Artificial Sequence
  source: /note="Description of Artificial Sequence: Synthetic oligonucleotide"
  source: /note="Description of Combined DNA/RNA Molecule: Synthetic oligonucleotide"
  source: /note="DNA/RNA"
  modified_base (1)..(1): bicyclic nucleic acid (BNA)
  modified_base (2)..(2): 5-methyl bicyclic nucleic acid
  modified_base (6)..(6): 5-methyl modified nucleotide
  modified_base (7)..(7): 5-methyl modified nucleotide
  modified_base (11)..(11): 5-methyl modified nucleotide
  source: /note="3' tri-ethylene glycol (TEG)"
tcuguccaagc

SEQ ID NO: 18254 - DNA, 10 bp, Artificial Sequence
  source: /note="Description of Artificial Sequence: Synthetic oligonucleotide"
  source: /note="Description of Combined DNA/RNA Molecule: Synthetic oligonucleotide"
  source: /note="DNA/RNA"
  modified_base (1)..(1): bicyclic nucleic acid (BNA)
  modified_base (2)..(2): 5-methyl bicyclic nucleic acid
  modified_base (6)..(6): 5-methyl modified nucleotide
  modified_base (7)..(7): 5-methyl modified nucleotide
  source: /note="3' tri-ethylene glycol (TEG)"
tcuguccaag

SEQ ID NO: 18255 - DNA, 9 bp, Artificial Sequence
  source: /note="Description of Artificial Sequence: Synthetic oligonucleotide"
  source: /note="Description of Combined DNA/RNA Molecule: Synthetic oligonucleotide"
  source: /note="DNA/RNA"
  modified_base (1)..(1): bicyclic nucleic acid (BNA)
  modified_base (2)..(2): 5-methyl bicyclic nucleic acid
  modified_base (6)..(6): 5-methyl modified nucleotide
  modified_base (7)..(7): 5-methyl modified nucleotide
  source: /note="3' tri-ethylene glycol (TEG)"
tcuguccaa

SEQ ID NO: 18256 - DNA, 8 bp, Artificial Sequence
  source: /note="Description of Artificial Sequence: Synthetic oligonucleotide"
  source: /note="Description of Combined DNA/RNA Molecule: Synthetic oligonucleotide"
  source: /note="DNA/RNA"
  modified_base (1)..(1): bicyclic nucleic acid (BNA)
  modified_base (2)..(2): 5-methyl bicyclic nucleic acid
  modified_base (6)..(6): 5-methyl modified nucleotide
  modified_base (7)..(7): 5-methyl modified nucleotide
  source: /note="3' tri-ethylene glycol (TEG)"
tcugucca

SEQ ID NO: 18257 - DNA, 17 bp, Artificial Sequence
  source: /note="Description of Artificial Sequence: Synthetic oligonucleotide"
  source: /note="Description of Combined DNA/RNA Molecule: Synthetic oligonucleotide"
  source: /note="DNA/RNA"
  modified_base (1)..(1): 5-methyl bicyclic nucleic acid
  modified_base (2)..(2): bicyclic nucleic acid (BNA)
  modified_base (5)..(5): 5-methyl modified nucleotide
  modified_base (6)..(6): 5-methyl modified nucleotide
  modified_base (10)..(10): 5-methyl modified nucleotide
  modified_base (11)..(11): 5-methyl modified nucleotide
  modified_base (12)..(12): 5-methyl modified nucleotide
  source: /note="3' tri-ethylene glycol (TEG)"
ctguccaagcccgguug

SEQ ID NO: 18258 - DNA, 16 bp, Artificial Sequence
  source: /note="Description of Artificial Sequence: Synthetic oligonucleotide"
  source: /note="Description of Combined DNA/RNA Molecule: Synthetic oligonucleotide"
  source: /note="DNA/RNA"
  modified_base (1)..(1): 5-methyl bicyclic nucleic acid
  modified_base (2)..(2): bicyclic nucleic acid (BNA)
  modified_base (5)..(5): 5-methyl modified nucleotide
  modified_base (6)..(6): 5-methyl modified nucleotide
  modified_base (10)..(10): 5-methyl modified nucleotide
  modified_base (11)..(11): 5-methyl modified nucleotide
  modified_base (12)..(12): 5-methyl modified nucleotide
  source: /note="3' tri-ethylene glycol (TEG)"
ctguccaagcccgguu

SEQ ID NO: 18259 - DNA, 15 bp, Artificial Sequence
  source: /note="Description of Artificial Sequence: Synthetic oligonucleotide"
  source: /note="Description of Combined DNA/RNA Molecule: Synthetic oligonucleotide"
  source: /note="DNA/RNA"
  modified_base (1)..(1): 5-methyl bicyclic nucleic acid
  modified_base (2)..(2): bicyclic nucleic acid (BNA)
  modified_base (5)..(5): 5-methyl modified nucleotide
  modified_base (6)..(6): 5-methyl modified nucleotide
  modified_base (10)..(10): 5-methyl modified nucleotide
  modified_base (11)..(11): 5-methyl modified nucleotide
  modified_base (12)..(12): 5-methyl modified nucleotide
  source: /note="3' tri-ethylene glycol (TEG)"
ctguccaagcccggu

SEQ ID NO: 18260 - DNA, 14 bp, Artificial Sequence
  source: /note="Description of Artificial Sequence: Synthetic oligonucleotide"
  source: /note="Description of Combined DNA/RNA Molecule: Synthetic oligonucleotide"
  source: /note="DNA/RNA"
  modified_base (1)..(1): 5-methyl bicyclic nucleic acid
  modified_base (2)..(2): bicyclic nucleic acid (BNA)
  modified_base (5)..(5): 5-methyl modified nucleotide
  modified_base (6)..(6): 5-methyl modified nucleotide
  modified_base (10)..(10): 5-methyl modified nucleotide
  modified_base (11)..(11): 5-methyl modified nucleotide
  modified_base (12)..(12): 5-methyl modified nucleotide
  source: /note="3' tri-ethylene glycol (TEG)"
ctguccaagcccgg

SEQ ID NO: 18261 - DNA, 13 bp, Artificial Sequence
  source: /note="Description of Artificial Sequence: Synthetic oligonucleotide"
  source: /note="Description of Combined DNA/RNA Molecule: Synthetic oligonucleotide"
  source: /note="DNA/RNA"
  modified_base (1)..(1): 5-methyl bicyclic nucleic acid
  modified_base (2)..(2): bicyclic nucleic acid (BNA)
  modified_base (5)..(5): 5-methyl modified nucleotide
  modified_base (6)..(6): 5-methyl modified nucleotide
  modified_base (10)..(10): 5-methyl modified nucleotide
  modified_base (11)..(11): 5-methyl modified nucleotide
  modified_base (12)..(12): 5-methyl modified nucleotide
  source: /note="3' tri-ethylene glycol (TEG)"
ctguccaagcccg

SEQ ID NO: 18262 - DNA, 12 bp, Artificial Sequence
  source: /note="Description of Artificial Sequence: Synthetic oligonucleotide"
  source: /note="Description of Combined DNA/RNA Molecule: Synthetic oligonucleotide"
  source: /note="DNA/RNA"
  modified_base (1)..(1): 5-methyl bicyclic nucleic acid
  modified_base (2)..(2): bicyclic nucleic acid (BNA)
  modified_base (5)..(5): 5-methyl modified nucleotide
  modified_base (6)..(6): 5-methyl modified nucleotide
  modified_base (10)..(10): 5-methyl modified nucleotide
  modified_base (11)..(11): 5-methyl modified nucleotide
  modified_base (12)..(12): 5-methyl modified nucleotide
  source: /note="3' tri-ethylene glycol (TEG)"
ctguccaagccc

SEQ ID NO: 18263 - DNA, 11 bp, Artificial Sequence
  source: /note="Description of Artificial Sequence: Synthetic oligonucleotide"
  source: /note="Description of Combined DNA/RNA Molecule: Synthetic oligonucleotide"
  source: /note="DNA/RNA"
  modified_base (1)..(1): 5-methyl bicyclic nucleic acid
  modified_base (2)..(2): bicyclic nucleic acid (BNA)
  modified_base (5)..(5): 5-methyl modified nucleotide
  modified_base (6)..(6): 5-methyl modified nucleotide
  modified_base (10)..(10): 5-methyl modified nucleotide
  modified_base (11)..(11): 5-methyl modified nucleotide
  source: /note="3' tri-ethylene glycol (TEG)"
ctguccaagcc

SEQ ID NO: 18264 - DNA, 10 bp, Artificial Sequence
  source: /note="Description of Artificial Sequence: Synthetic oligonucleotide"
  source: /note="Description of Combined DNA/RNA Molecule: Synthetic oligonucleotide"
  source: /note="DNA/RNA"
  modified_base (1)..(1): 5-methyl bicyclic nucleic acid
  modified_base (2)..(2): bicyclic nucleic acid (BNA)
  modified_base (5)..(5): 5-methyl modified nucleotide
  modified_base (6)..(6): 5-methyl modified nucleotide
  modified_base (10)..(10): 5-methyl modified nucleotide
  source: /note="3' tri-ethylene glycol (TEG)"
ctguccaagc

SEQ ID NO: 18265 - DNA, 9 bp, Artificial Sequence
  source: /note="Description of Artificial Sequence: Synthetic oligonucleotide"
  source: /note="Description of Combined DNA/RNA Molecule: Synthetic oligonucleotide"
  source: /note="DNA/RNA"
  modified_base (1)..(1): 5-methyl bicyclic nucleic acid
  modified_base (2)..(2): bicyclic nucleic acid (BNA)
  modified_base (5)..(5): 5-methyl modified nucleotide
  modified_base (6)..(6): 5-methyl modified nucleotide
  source: /note="3' tri-ethylene glycol (TEG)"
ctguccaag

SEQ ID NO: 18266 - DNA, 8 bp, Artificial Sequence
  source: /note="Description of Artificial Sequence: Synthetic oligonucleotide"
  source: /note="Description of Combined DNA/RNA Molecule: Synthetic oligonucleotide"
  source: /note="DNA/RNA"
  modified_base (1)..(1): 5-methyl bicyclic nucleic acid
  modified_base (2)..(2): bicyclic nucleic acid (BNA)
  modified_base (5)..(5): 5-methyl modified nucleotide
  modified_base (6)..(6): 5-methyl modified nucleotide
  source: /note="3' tri-ethylene glycol (TEG)"
ctguccaa

SEQ ID NO: 18267 - DNA, 20 bp, Artificial Sequence
  source: /note="Description of Artificial Sequence: Synthetic oligonucleotide"
  source: /note="Description of Combined DNA/RNA Molecule: Synthetic oligonucleotide"
  source: /note="DNA/RNA"
  modified_base (1)..(1): bicyclic nucleic acid (BNA)
  modified_base (2)..(2): bicyclic nucleic acid (BNA)
  modified_base (4)..(4): 5-methyl modified nucleotide
  modified_base (8)..(8): 5-methyl modified nucleotide
  modified_base (9)..(9): 5-methyl modified nucleotide
  modified_base (13)..(13): 5-methyl modified nucleotide
  modified_base (14)..(14): 5-methyl modified nucleotide
  modified_base (15)..(15): 5-methyl modified nucleotide
  source: /note="3' tri-ethylene glycol (TEG)"
gtucuguccaagcccgguug

SEQ ID NO: 18268 - DNA, 19 bp, Artificial Sequence
  source: /note="Description of Artificial Sequence: Synthetic oligonucleotide"
  source: /note="Description of Combined DNA/RNA Molecule: Synthetic oligonucleotide"
  source: /note="DNA/RNA"
  modified_base (1)..(1): bicyclic nucleic acid (BNA)
  modified_base (2)..(2): bicyclic nucleic acid (BNA)
  modified_base (4)..(4): 5-methyl modified nucleotide
  modified_base (8)..(8): 5-methyl modified nucleotide
  modified_base (9)..(9): 5-methyl modified nucleotide
  modified_base (13)..(13): 5-methyl modified nucleotide
  modified_base (14)..(14): 5-methyl modified nucleotide
  modified_base (15)..(15): 5-methyl modified nucleotide
  source: /note="3' tri-ethylene glycol (TEG)"
gtucuguccaagcccgguu

SEQ ID NO: 18269 - DNA, 18 bp, Artificial Sequence
  source: /note="Description of Artificial Sequence: Synthetic oligonucleotide"
  source: /note="Description of Combined DNA/RNA Molecule: Synthetic oligonucleotide"
  source: /note="DNA/RNA"
  modified_base (1)..(1): bicyclic nucleic acid (BNA)
  modified_base (2)..(2): bicyclic nucleic acid (BNA)
  modified_base (4)..(4): 5-methyl modified nucleotide
  modified_base (8)..(8): 5-methyl modified nucleotide
  modified_base (9)..(9): 5-methyl modified nucleotide
  modified_base (13)..(13): 5-methyl modified nucleotide
  modified_base (14)..(14): 5-methyl modified nucleotide
  modified_base (15)..(15): 5-methyl modified nucleotide
  source: /note="3' tri-ethylene glycol (TEG)"
gtucuguccaagcccggu

SEQ ID NO: 18270 - DNA, 17 bp, Artificial Sequence
  source: /note="Description of Artificial Sequence: Synthetic oligonucleotide"
  source: /note="Description of Combined DNA/RNA Molecule: Synthetic oligonucleotide"
  source: /note="DNA/RNA"
  modified_base (1)..(1): bicyclic nucleic acid (BNA)
  modified_base (2)..(2): bicyclic nucleic acid (BNA)
  modified_base (4)..(4): 5-methyl modified nucleotide
  modified_base (8)..(8): 5-methyl modified nucleotide
  modified_base (9)..(9): 5-methyl modified nucleotide
  modified_base (13)..(13): 5-methyl modified nucleotide
  modified_base (14)..(14): 5-methyl modified nucleotide
  modified_base (15)..(15): 5-methyl modified nucleotide
  source: /note="3' tri-ethylene glycol (TEG)"
gtucuguccaagcccgg

SEQ ID NO: 18271 - DNA, 16 bp, Artificial Sequence
  source: /note="Description of Artificial Sequence: Synthetic oligonucleotide"
  source: /note="Description of Combined DNA/RNA Molecule: Synthetic oligonucleotide"
  source: /note="DNA/RNA"
  modified_base (1)..(1): bicyclic nucleic acid (BNA)
  modified_base (2)..(2): bicyclic nucleic acid (BNA)
  modified_base (4)..(4): 5-methyl modified nucleotide
  modified_base (8)..(8): 5-methyl modified nucleotide
  modified_base (9)..(9): 5-methyl modified nucleotide
  modified_base (13)..(13): 5-methyl modified nucleotide
  modified_base (14)..(14): 5-methyl modified nucleotide
  modified_base (15)..(15): 5-methyl modified nucleotide
  source: /note="3' tri-ethylene glycol (TEG)"
gtucuguccaagcccg

SEQ ID NO: 18272 - DNA, 15 bp, Artificial Sequence
  source: /note="Description of Artificial Sequence: Synthetic oligonucleotide"
  source: /note="Description of Combined DNA/RNA Molecule: Synthetic oligonucleotide"
  source: /note="DNA/RNA"
  modified_base (1)..(1): bicyclic nucleic acid (BNA)
  modified_base (2)..(2): bicyclic nucleic acid (BNA)
  modified_base (4)..(4): 5-methyl modified nucleotide
  modified_base (8)..(8): 5-methyl modified nucleotide
  modified_base (9)..(9): 5-methyl modified nucleotide
  modified_base (13)..(13): 5-methyl modified nucleotide
  modified_base (14)..(14): 5-methyl modified nucleotide
  modified_base (15)..(15): 5-methyl modified nucleotide
  source: /note="3' tri-ethylene glycol (TEG)"
gtucuguccaagccc

SEQ ID NO: 18273 - DNA, 14 bp, Artificial Sequence
  source: /note="Description of Artificial Sequence: Synthetic oligonucleotide"
  source: /note="Description of Combined DNA/RNA Molecule: Synthetic oligonucleotide"
  source: /note="DNA/RNA"
  modified_base (1)..(1): bicyclic nucleic acid (BNA)
  modified_base (2)..(2): bicyclic nucleic acid (BNA)
  modified_base (4)..(4): 5-methyl modified nucleotide
  modified_base (8)..(8): 5-methyl modified nucleotide
  modified_base (9)..(9): 5-methyl modified nucleotide
  modified_base (13)..(13): 5-methyl modified nucleotide
  modified_base (14)..(14): 5-methyl modified nucleotide
  source: /note="3' tri-ethylene glycol (TEG)"
gtucuguccaagcc

SEQ ID NO: 18274 - DNA, 13 bp, Artificial Sequence
  source: /note="Description of Artificial Sequence: Synthetic oligonucleotide"
  source: /note="Description of Combined DNA/RNA Molecule: Synthetic oligonucleotide"
  source: /note="DNA/RNA"
  modified_base (1)..(1): bicyclic nucleic acid (BNA)
  modified_base (2)..(2): bicyclic nucleic acid (BNA)
  modified_base (4)..(4): 5-methyl modified nucleotide
  modified_base (8)..(8): 5-methyl modified nucleotide
  modified_base (9)..(9): 5-methyl modified nucleotide
  modified_base (13)..(13): 5-methyl modified nucleotide
  source: /note="3' tri-ethylene glycol (TEG)"
gtucuguccaagc

SEQ ID NO: 18275 - DNA, 12 bp, Artificial Sequence
  source: /note="Description of Artificial Sequence: Synthetic oligonucleotide"
  source: /note="Description of Combined DNA/RNA Molecule: Synthetic oligonucleotide"
  source: /note="DNA/RNA"
  modified_base (1)..(1): bicyclic nucleic acid (BNA)
  modified_base (2)..(2): bicyclic nucleic acid (BNA)
  modified_base (4)..(4): 5-methyl modified nucleotide
  modified_base (8)..(8): 5-methyl modified nucleotide
  modified_base (9)..(9): 5-methyl modified nucleotide
  source: /note="3' tri-ethylene glycol (TEG)"
gtucuguccaag

SEQ ID NO: 18276 - DNA, 11 bp, Artificial Sequence
  source: /note="Description of Artificial Sequence: Synthetic oligonucleotide"
  source: /note="Description of Combined DNA/RNA Molecule: Synthetic oligonucleotide"
  source: /note="DNA/RNA"
  modified_base (1)..(1): bicyclic nucleic acid (BNA)
  modified_base (2)..(2): bicyclic nucleic acid (BNA)
  modified_base (4)..(4): 5-methyl modified nucleotide
  modified_base (8)..(8): 5-methyl modified nucleotide
  modified_base (9)..(9): 5-methyl modified nucleotide
  source: /note="3' tri-ethylene glycol (TEG)"
gtucuguccaa

SEQ ID NO: 18277 - DNA, 10 bp, Artificial Sequence
  source: /note="Description of Artificial Sequence: Synthetic oligonucleotide"
  source: /note="Description of Combined DNA/RNA Molecule: Synthetic oligonucleotide"
  source: /note="DNA/RNA"
  modified_base (1)..(1): bicyclic nucleic acid (BNA)
  modified_base (2)..(2): bicyclic nucleic acid (BNA)
  modified_base (4)..(4): 5-methyl modified nucleotide
  modified_base (8)..(8): 5-methyl modified nucleotide
  modified_base (9)..(9): 5-methyl modified nucleotide
  source: /note="3' tri-ethylene glycol (TEG)"
gtucugucca

SEQ ID NO: 18278 - DNA, 9 bp, Artificial Sequence
  source: /note="Description of Artificial Sequence: Synthetic oligonucleotide"
  source: /note="Description of Combined DNA/RNA Molecule: Synthetic oligonucleotide"
  source: /note="DNA/RNA"
  modified_base (1)..(1): bicyclic nucleic acid (BNA)
  modified_base (2)..(2): bicyclic nucleic acid (BNA)
  modified_base (4)..(4): 5-methyl modified nucleotide
  modified_base (8)..(8): 5-methyl modified nucleotide
  modified_base (9)..(9): 5-methyl modified nucleotide
  source: /note="3' tri-ethylene glycol (TEG)"
gtucugucc

SEQ ID NO: 18279 - DNA, 8 bp, Artificial Sequence
  source: /note="Description of Artificial Sequence: Synthetic oligonucleotide"
  source: /note="Description of Combined DNA/RNA Molecule: Synthetic oligonucleotide"
  source: /note="DNA/RNA"
  modified_base (1)..(1): bicyclic nucleic acid (BNA)
  modified_base (2)..(2): bicyclic nucleic acid (BNA)
  modified_base (4)..(4): 5-methyl modified nucleotide
  modified_base (8)..(8): 5-methyl modified nucleotide
  source: /note="3' tri-ethylene glycol (TEG)"
gtucuguc

SEQ ID NO: 18280 - RNA, 20 nt, Artificial Sequence
  source: /note="Description of Artificial Sequence: Synthetic oligonucleotide"
  source: /note="RNA"
  modified_base (1)..(1): bicyclic nucleic acid (BNA)
  modified_base (2)..(2): bicyclic nucleic acid (BNA)
  modified_base (5)..(5): 5-methyl modified nucleotide
  modified_base (9)..(9): 5-methyl modified nucleotide
  modified_base (10)..(10): 5-methyl modified nucleotide
  modified_base (14)..(14): 5-methyl modified nucleotide
  modified_base (15)..(15): 5-methyl modified nucleotide
  modified_base (16)..(16): 5-methyl modified nucleotide
  source: /note="3' tri-ethylene glycol (TEG)"
aguucuguccaagcccgguu

SEQ ID NO: 18281 - RNA, 19 nt, Artificial Sequence
  source: /note="Description of Artificial Sequence: Synthetic oligonucleotide"
  source: /note="RNA"
  modified_base (1)..(1): bicyclic nucleic acid (BNA)
  modified_base (2)..(2): bicyclic nucleic acid (BNA)
  modified_base (5)..(5): 5-methyl modified nucleotide
  modified_base (9)..(9): 5-methyl modified nucleotide
  modified_base (10)..(10): 5-methyl modified nucleotide
  modified_base (14)..(14): 5-methyl modified nucleotide
  modified_base (15)..(15): 5-methyl modified nucleotide
  modified_base (16)..(16): 5-methyl modified nucleotide
  source: /note="3' tri-ethylene glycol (TEG)"
aguucuguccaagcccggu

SEQ ID NO: 18282 - RNA, 18 nt, Artificial Sequence
  source: /note="Description of Artificial Sequence: Synthetic oligonucleotide"
  source: /note="RNA"
  modified_base (1)..(1): bicyclic nucleic acid (BNA)
  modified_base (2)..(2): bicyclic nucleic acid (BNA)
  modified_base (5)..(5): 5-methyl modified nucleotide
  modified_base (9)..(9): 5-methyl modified nucleotide
  modified_base (10)..(10): 5-methyl modified nucleotide
  modified_base (14)..(14): 5-methyl modified nucleotide
  modified_base (15)..(15): 5-methyl modified nucleotide
  modified_base (16)..(16): 5-methyl modified nucleotide
  source: /note="3' tri-ethylene glycol (TEG)"
aguucuguccaagcccgg

SEQ ID NO: 18283 - RNA, 17 nt, Artificial Sequence
  source: /note="Description of Artificial Sequence: Synthetic oligonucleotide"
  source: /note="RNA"
  modified_base (1)..(1): bicyclic nucleic acid (BNA)
  modified_base (2)..(2): bicyclic nucleic acid (BNA)
  modified_base (5)..(5): 5-methyl modified nucleotide
  modified_base (9)..(9): 5-methyl modified nucleotide
  modified_base (10)..(10): 5-methyl modified nucleotide
  modified_base (14)..(14): 5-methyl modified nucleotide
  modified_base (15)..(15): 5-methyl modified nucleotide
  modified_base (16)..(16): 5-methyl modified nucleotide
  source: /note="3' tri-ethylene glycol (TEG)"
aguucuguccaagcccg

SEQ ID NO: 18284 - RNA, 16 nt, Artificial Sequence
  source: /note="Description of Artificial Sequence: Synthetic oligonucleotide"
  source: /note="RNA"
  modified_base (1)..(1): bicyclic nucleic acid (BNA)
  modified_base (2)..(2): bicyclic nucleic acid (BNA)
  modified_base (5)..(5): 5-methyl modified nucleotide
  modified_base (9)..(9): 5-methyl modified nucleotide
  modified_base (10)..(10): 5-methyl modified nucleotide
  modified_base (14)..(14): 5-methyl modified nucleotide
  modified_base (15)..(15): 5-methyl modified nucleotide
  modified_base (16)..(16): 5-methyl modified nucleotide
  source: /note="3' tri-ethylene glycol (TEG)"
aguucuguccaagccc

SEQ ID NO: 18285 - RNA, 15 nt, Artificial Sequence
  source: /note="Description of Artificial Sequence: Synthetic oligonucleotide"
  source: /note="RNA"
  modified_base (1)..(1): bicyclic nucleic acid (BNA)
  modified_base (2)..(2): bicyclic nucleic acid (BNA)
  modified_base (5)..(5): 5-methyl modified nucleotide
  modified_base (9)..(9): 5-methyl modified nucleotide
  modified_base (10)..(10): 5-methyl modified nucleotide
  modified_base (14)..(14): 5-methyl modified nucleotide
  modified_base (15)..(15): 5-methyl modified nucleotide
  source: /note="3' tri-ethylene glycol (TEG)"
aguucuguccaagcc

SEQ ID NO: 18286 - RNA, 14 nt, Artificial Sequence
  source: /note="Description of Artificial Sequence: Synthetic oligonucleotide"
  source: /note="RNA"
  modified_base (1)..(1): bicyclic nucleic acid (BNA)
  modified_base (2)..(2): bicyclic nucleic acid (BNA)
  modified_base (5)..(5): 5-methyl modified nucleotide
  modified_base (9)..(9): 5-methyl modified nucleotide
  modified_base (10)..(10): 5-methyl modified nucleotide
  modified_base (14)..(14): 5-methyl modified nucleotide
  source: /note="3' tri-ethylene glycol (TEG)"
aguucuguccaagc

SEQ ID NO: 18287 - RNA, 13 nt, Artificial Sequence
  source: /note="Description of Artificial Sequence: Synthetic oligonucleotide"
  source: /note="RNA"
  modified_base (1)..(1): bicyclic nucleic acid (BNA)
  modified_base (2)..(2): bicyclic nucleic acid (BNA)
  modified_base (5)..(5): 5-methyl modified nucleotide
  modified_base (9)..(9): 5-methyl modified nucleotide
  modified_base (10)..(10): 5-methyl modified nucleotide
  source: /note="3' tri-ethylene glycol (TEG)"
aguucuguccaag

SEQ ID NO: 18288 - RNA, 12 nt, Artificial Sequence
  source: /note="Description of Artificial Sequence: Synthetic oligonucleotide"
  source: /note="RNA"
  modified_base (1)..(1): bicyclic nucleic acid (BNA)
  modified_base (2)..(2): bicyclic nucleic acid (BNA)
  modified_base (5)..(5): 5-methyl modified nucleotide
  modified_base (9)..(9): 5-methyl modified nucleotide
  modified_base (10)..(10): 5-methyl modified nucleotide
  source: /note="3' tri-ethylene glycol (TEG)"
aguucuguccaa

SEQ ID NO: 18289 - RNA, 11 nt, Artificial Sequence
  source: /note="Description of Artificial Sequence: Synthetic oligonucleotide"
  source: /note="RNA"
  modified_base (1)..(1): bicyclic nucleic acid (BNA)
  modified_base (2)..(2): bicyclic nucleic acid (BNA)
  modified_base (5)..(5): 5-methyl modified nucleotide
  modified_base (9)..(9): 5-methyl modified nucleotide
  modified_base (10)..(10): 5-methyl modified nucleotide
  source: /note="3' tri-ethylene glycol (TEG)"
aguucugucca

SEQ ID NO: 18290 - RNA, 10 nt, Artificial Sequence
  source: /note="Description of Artificial Sequence: Synthetic oligonucleotide"
  source: /note="RNA"
  modified_base (1)..(1): bicyclic nucleic acid (BNA)
  modified_base (2)..(2): bicyclic nucleic acid (BNA)
  modified_base (5)..(5): 5-methyl modified nucleotide
  modified_base (9)..(9): 5-methyl modified nucleotide
  modified_base (10)..(10): 5-methyl modified nucleotide
  source: /note="3' tri-ethylene glycol (TEG)"
aguucugucc

SEQ ID NO: 18291 - RNA, 9 nt, Artificial Sequence
  source: /note="Description of Artificial Sequence: Synthetic oligonucleotide"
  source: /note="RNA"
  modified_base (1)..(1): bicyclic nucleic acid (BNA)
  modified_base (2)..(2): bicyclic nucleic acid (BNA)
  modified_base (5)..(5): 5-methyl modified nucleotide
  modified_base (9)..(9): 5-methyl modified nucleotide
  source: /note="3' tri-ethylene glycol (TEG)"
aguucuguc

SEQ ID NO: 18292 - RNA, 8 nt, Artificial Sequence
  source: /note="Description of Artificial Sequence: Synthetic oligonucleotide"
  source: /note="RNA"
  modified_base (1)..(1): bicyclic nucleic acid (BNA)
  modified_base (2)..(2): bicyclic nucleic acid (BNA)
  modified_base (5)..(5): 5-methyl modified nucleotide
  source: /note="3' tri-ethylene glycol (TEG)"
aguucugu

SEQ ID NO: 18293 - RNA, 20 nt, Artificial Sequence
  source: /note="Description of Artificial Sequence: Synthetic oligonucleotide"
  source: /note="RNA"
  modified_base (1)..(1): bicyclic nucleic acid (BNA)
  modified_base (2)..(2): bicyclic nucleic acid (BNA)
  modified_base (6)..(6): 5-methyl modified nucleotide
  modified_base (10)..(10): 5-methyl modified nucleotide
  modified_base (11)..(11): 5-methyl modified nucleotide
  modified_base (15)..(15): 5-methyl modified nucleotide
  modified_base (16)..(16): 5-methyl modified nucleotide
  modified_base (17)..(17): 5-methyl modified nucleotide
  source: /note="3' tri-ethylene glycol (TEG)"
aaguucuguccaagcccggu

SEQ ID NO: 18294 - RNA, 19 nt, Artificial Sequence
  source: /note="Description of Artificial Sequence: Synthetic oligonucleotide"
  source: /note="RNA"
  modified_base (1)..(1): bicyclic nucleic acid (BNA)
  modified_base (2)..(2): bicyclic nucleic acid (BNA)
  modified_base (6)..(6): 5-methyl modified nucleotide
  modified_base (10)..(10): 5-methyl modified nucleotide
  modified_base (11)..(11): 5-methyl modified nucleotide
  modified_base (15)..(15): 5-methyl modified nucleotide
  modified_base (16)..(16): 5-methyl modified nucleotide
  modified_base (17)..(17): 5-methyl modified nucleotide
  source: /note="3' tri-ethylene glycol (TEG)"
aaguucuguccaagcccgg

SEQ ID NO: 18295 - RNA, 18 nt, Artificial Sequence
  source: /note="Description of Artificial Sequence: Synthetic oligonucleotide"
  source: /note="RNA"
  modified_base (1)..(1): bicyclic nucleic acid (BNA)
  modified_base (2)..(2): bicyclic nucleic acid (BNA)
  modified_base (6)..(6): 5-methyl modified nucleotide
  modified_base (10)..(10): 5-methyl modified nucleotide
  modified_base (11)..(11): 5-methyl modified nucleotide
  modified_base (15)..(15): 5-methyl modified nucleotide
  modified_base (16)..(16): 5-methyl modified nucleotide
  modified_base (17)..(17): 5-methyl modified nucleotide
  source: /note="3' tri-ethylene glycol (TEG)"
aaguucuguccaagcccg

SEQ ID NO: 18296 - RNA, 17 nt, Artificial Sequence
  source: /note="Description of Artificial Sequence: Synthetic oligonucleotide"
  source: /note="RNA"
  modified_base (1)..(1): bicyclic nucleic acid (BNA)
  modified_base (2)..(2): bicyclic nucleic acid (BNA)
  modified_base (6)..(6): 5-methyl modified nucleotide
  modified_base (10)..(10): 5-methyl modified nucleotide
  modified_base (11)..(11): 5-methyl modified nucleotide
  modified_base (15)..(15): 5-methyl modified nucleotide
  modified_base (16)..(16): 5-methyl modified nucleotide
  modified_base (17)..(17): 5-methyl modified nucleotide
  source: /note="3' tri-ethylene glycol (TEG)"
aaguucuguccaagccc

SEQ ID NO: 18297 - RNA, 16 nt, Artificial Sequence
  source: /note="Description of Artificial Sequence: Synthetic oligonucleotide"
  source: /note="RNA"
  modified_base (1)..(1): bicyclic nucleic acid (BNA)
  modified_base (2)..(2): bicyclic nucleic acid (BNA)
  modified_base (6)..(6): 5-methyl modified nucleotide
  modified_base (10)..(10): 5-methyl modified nucleotide
  modified_base (11)..(11): 5-methyl modified nucleotide
  modified_base (15)..(15): 5-methyl modified nucleotide
  modified_base (16)..(16): 5-methyl modified nucleotide
  source: /note="3' tri-ethylene glycol (TEG)"
aaguucuguccaagcc

SEQ ID NO: 18298 - RNA, 15 nt, Artificial Sequence
  source: /note="Description of Artificial Sequence: Synthetic oligonucleotide"
  source: /note="RNA"
  modified_base (1)..(1): bicyclic nucleic acid (BNA)
  modified_base (2)..(2): bicyclic nucleic acid (BNA)
  modified_base (6)..(6): 5-methyl modified nucleotide
  modified_base (10)..(10): 5-methyl modified nucleotide
  modified_base (11)..(11): 5-methyl modified nucleotide
  modified_base (15)..(15): 5-methyl modified nucleotide
  source: /note="3' tri-ethylene glycol (TEG)"
aaguucuguccaagc

SEQ ID NO: 18299 - RNA, 14 nt, Artificial Sequence
  source: /note="Description of Artificial Sequence: Synthetic oligonucleotide"
  source: /note="RNA"
  modified_base (1)..(1): bicyclic nucleic acid (BNA)
  modified_base (2)..(2): bicyclic nucleic acid (BNA)
  modified_base (6)..(6): 5-methyl modified nucleotide
  modified_base (10)..(10): 5-methyl modified nucleotide
  modified_base (11)..(11): 5-methyl modified nucleotide
  source: /note="3' tri-ethylene glycol (TEG)"
aaguucuguccaag

SEQ ID NO: 18300 - RNA, 13 nt, Artificial Sequence
  source: /note="Description of Artificial Sequence: Synthetic oligonucleotide"
  source: /note="RNA"
  modified_base (1)..(1): bicyclic nucleic acid (BNA)
  modified_base (2)..(2): bicyclic nucleic acid (BNA)
  modified_base (6)..(6): 5-methyl modified nucleotide
  modified_base (10)..(10): 5-methyl modified nucleotide
  modified_base (11)..(11): 5-methyl modified nucleotide
  source: /note="3' tri-ethylene glycol (TEG)"
aaguucuguccaa

SEQ ID NO: 18301 - RNA, 12 nt, Artificial Sequence
  source: /note="Description of Artificial Sequence: Synthetic oligonucleotide"
  source: /note="RNA"
  modified_base (1)..(1): bicyclic nucleic acid (BNA)
  modified_base (2)..(2): bicyclic nucleic acid (BNA)
  modified_base (6)..(6): 5-methyl modified nucleotide
  modified_base (10)..(10): 5-methyl modified nucleotide
  modified_base (11)..(11): 5-methyl modified nucleotide
  source: /note="3' tri-ethylene glycol (TEG)"
aaguucugucca

SEQ ID NO: 18302 - RNA, 11 nt, Artificial Sequence
  source: /note="Description of Artificial Sequence: Synthetic oligonucleotide"
  source: /note="RNA"
  modified_base (1)..(1): bicyclic nucleic acid (BNA)
  modified_base (2)..(2): bicyclic nucleic acid (BNA)
  modified_base (6)..(6): 5-methyl modified nucleotide
  modified_base (10)..(10): 5-methyl modified nucleotide
  modified_base (11)..(11): 5-methyl modified nucleotide
  source: /note="3' tri-ethylene glycol (TEG)"
aaguucugucc

SEQ ID NO: 18303 - RNA, 10 nt, Artificial Sequence
  source: /note="Description of Artificial Sequence: Synthetic oligonucleotide"
  source: /note="RNA"
  modified_base (1)..(1): bicyclic nucleic acid (BNA)
  modified_base (2)..(2): bicyclic nucleic acid (BNA)
  modified_base (6)..(6): 5-methyl modified nucleotide
  modified_base (10)..(10): 5-methyl modified nucleotide
  source: /note="3' tri-ethylene glycol (TEG)"
aaguucuguc

SEQ ID NO: 18304 - RNA, 9 nt, Artificial Sequence
  source: /note="Description of Artificial Sequence: Synthetic oligonucleotide"
  source: /note="RNA"
  modified_base (1)..(1): bicyclic nucleic acid (BNA)
  modified_base (2)..(2): bicyclic nucleic acid (BNA)
  modified_base (6)..(6): 5-methyl modified nucleotide
  source: /note="3' tri-ethylene glycol (TEG)"
aaguucugu

SEQ ID NO: 18305 - RNA, 8 nt, Artificial Sequence
  source: /note="Description of Artificial Sequence: Synthetic oligonucleotide"
  source: /note="RNA"
  modified_base (1)..(1): bicyclic nucleic acid (BNA)
  modified_base (2)..(2): bicyclic nucleic acid (BNA)
  modified_base (6)..(6): 5-methyl modified nucleotide
  source: /note="3' tri-ethylene glycol (TEG)"
aaguucug

SEQ ID NO: 18306 - DNA, 20 bp, Artificial Sequence
  source: /note="Description of Artificial Sequence: Synthetic oligonucleotide"
  source: /note="Description of Combined DNA/RNA Molecule: Synthetic oligonucleotide"
  source: /note="DNA/RNA"
  modified_base (1)..(1): bicyclic nucleic acid (BNA)
  modified_base (2)..(2): bicyclic nucleic acid (BNA)
  modified_base (7)..(7): 5-methyl modified nucleotide
  modified_base (11)..(11): 5-methyl modified nucleotide
  modified_base (12)..(12): 5-methyl modified nucleotide
  modified_base (16)..(16): 5-methyl modified nucleotide
  modified_base (17)..(17): 5-methyl modified nucleotide
  modified_base (18)..(18): 5-methyl modified nucleotide
  source: /note="3' tri-ethylene glycol (TEG)"
taaguucuguccaagcccgg

SEQ ID NO: 18307 - DNA, 19 bp, Artificial Sequence
  source: /note="Description of Artificial Sequence: Synthetic oligonucleotide"
  source: /note="Description of Combined DNA/RNA Molecule: Synthetic oligonucleotide"
  source: /note="DNA/RNA"
  modified_base (1)..(1): bicyclic nucleic acid (BNA)
  modified_base (2)..(2): bicyclic nucleic acid (BNA)
  modified_base (7)..(7): 5-methyl modified nucleotide
  modified_base (11)..(11): 5-methyl modified nucleotide
  modified_base (12)..(12): 5-methyl modified nucleotide
  modified_base (16)..(16): 5-methyl modified nucleotide
  modified_base (17)..(17): 5-methyl modified nucleotide
  modified_base (18)..(18): 5-methyl modified nucleotide
  source: /note="3' tri-ethylene glycol (TEG)"
taaguucuguccaagcccg

SEQ ID NO: 18308 - DNA, 18 bp, Artificial Sequence
  source: /note="Description of Artificial Sequence: Synthetic oligonucleotide"
  source: /note="Description of Combined DNA/RNA Molecule: Synthetic oligonucleotide"
  source: /note="DNA/RNA"
  modified_base (1)..(1): bicyclic nucleic acid (BNA)
  modified_base (2)..(2): bicyclic nucleic acid (BNA)
  modified_base (7)..(7): 5-methyl modified nucleotide
  modified_base (11)..(11): 5-methyl modified nucleotide
  modified_base (12)..(12): 5-methyl modified nucleotide
  modified_base (16)..(16): 5-methyl modified nucleotide
  modified_base (17)..(17): 5-methyl modified nucleotide
  modified_base (18)..(18): 5-methyl modified nucleotide
  source: /note="3' tri-ethylene glycol (TEG)"
taaguucuguccaagccc

SEQ ID NO: 18309 - DNA, 17 bp, Artificial Sequence
  source: /note="Description of Artificial Sequence: Synthetic oligonucleotide"
  source: /note="Description of Combined DNA/RNA Molecule: Synthetic oligonucleotide"
  source: /note="DNA/RNA"
  modified_base (1)..(1): bicyclic nucleic acid (BNA)
  modified_base (2)..(2): bicyclic nucleic acid (BNA)
  modified_base (7)..(7): 5-methyl modified nucleotide
  modified_base (11)..(11): 5-methyl modified nucleotide
  modified_base (12)..(12): 5-methyl modified nucleotide
  modified_base (16)..(16): 5-methyl modified nucleotide
  modified_base (17)..(17): 5-methyl modified nucleotide
  source: /note="3' tri-ethylene glycol (TEG)"
taaguucuguccaagcc

SEQ ID NO: 18310 - DNA, 16 bp, Artificial Sequence
  source: /note="Description of Artificial Sequence: Synthetic oligonucleotide"
  source: /note="Description of Combined DNA/RNA Molecule: Synthetic oligonucleotide"
  source: /note="DNA/RNA"
  modified_base (1)..(1): bicyclic nucleic acid (BNA)
  modified_base (2)..(2): bicyclic nucleic acid (BNA)
  modified_base (7)..(7): 5-methyl modified nucleotide
  modified_base (11)..(11): 5-methyl modified nucleotide
  modified_base (12)..(12): 5-methyl modified nucleotide
  modified_base (16)..(16): 5-methyl modified nucleotide
  source: /note="3' tri-ethylene glycol (TEG)"
taaguucuguccaagc

SEQ ID NO: 18311 - DNA, 14 bp, Artificial Sequence
  source: /note="Description of Artificial Sequence: Synthetic oligonucleotide"
  source: /note="Description of Combined DNA/RNA Molecule: Synthetic oligonucleotide"
  source: /note="DNA/RNA"
  modified_base (1)..(1): bicyclic nucleic acid (BNA)
  modified_base (2)..(2): bicyclic nucleic acid (BNA)
  modified_base (7)..(7): 5-methyl modified nucleotide
  modified_base (11)..(11): 5-methyl modified nucleotide
  modified_base (12)..(12): 5-methyl modified nucleotide
  source: /note="3' tri-ethylene glycol (TEG)"
taaguucuguccaa

SEQ ID NO: 18312 - DNA, 13 bp, Artificial Sequence
  source: /note="Description of Artificial Sequence: Synthetic oligonucleotide"
  source: /note="Description of Combined DNA/RNA Molecule: Synthetic oligonucleotide"
  source: /note="DNA/RNA"
  modified_base (1)..(1): bicyclic nucleic acid (BNA)
  modified_base (2)..(2): bicyclic nucleic acid (BNA)
  modified_base (7)..(7): 5-methyl modified nucleotide
  modified_base (11)..(11): 5-methyl modified nucleotide
  modified_base (12)..(12): 5-methyl modified nucleotide
  source: /note="3' tri-ethylene glycol (TEG)"
taaguucugucca

SEQ ID NO: 18313 - DNA, 12 bp, Artificial Sequence
  source: /note="Description of Artificial Sequence: Synthetic oligonucleotide"
  source: /note="Description of Combined DNA/RNA Molecule: Synthetic oligonucleotide"
  source: /note="DNA/RNA"
  modified_base (1)..(1): bicyclic nucleic acid (BNA)
  modified_base (2)..(2): bicyclic nucleic acid (BNA)
  modified_base (7)..(7): 5-methyl modified nucleotide
  modified_base (11)..(11): 5-methyl modified nucleotide
  modified_base (12)..(12): 5-methyl modified nucleotide
  source: /note="3' tri-ethylene glycol (TEG)"
taaguucugucc

SEQ ID NO: 18314 - DNA, 11 bp, Artificial Sequence
  source: /note="Description of Artificial Sequence: Synthetic oligonucleotide"
  source: /note="Description of Combined DNA/RNA Molecule: Synthetic oligonucleotide"
  source: /note="DNA/RNA"
  modified_base (1)..(1): bicyclic nucleic acid (BNA)
  modified_base (2)..(2): bicyclic nucleic acid (BNA)
  modified_base (7)..(7): 5-methyl modified nucleotide
  modified_base (11)..(11): 5-methyl modified nucleotide
  source: /note="3' tri-ethylene glycol (TEG)"
taaguucuguc

SEQ ID NO: 18315 - DNA, 10 bp, Artificial Sequence
  source: /note="Description of Artificial Sequence: Synthetic oligonucleotide"
  source: /note="Description of Combined DNA/RNA Molecule: Synthetic oligonucleotide"
  source: /note="DNA/RNA"
  modified_base (1)..(1): bicyclic nucleic acid (BNA)
  modified_base (2)..(2): bicyclic nucleic acid (BNA)
  modified_base (7)..(7): 5-methyl modified nucleotide
  source: /note="3' tri-ethylene glycol (TEG)"
taaguucugu

SEQ ID NO: 18316 - DNA, 9 bp, Artificial Sequence
  source: /note="Description of Artificial Sequence: Synthetic oligonucleotide"
  source: /note="Description of Combined DNA/RNA Molecule: Synthetic oligonucleotide"
  source: /note="DNA/RNA"
  modified_base (1)..(1): bicyclic nucleic acid (BNA)
  modified_base (2)..(2): bicyclic nucleic acid (BNA)
  modified_base (7)..(7): 5-methyl modified nucleotide
  source: /note="3' tri-ethylene glycol (TEG)"
taaguucug

SEQ ID NO: 18317 - DNA, 8 bp, Artificial Sequence
  source: /note="Description of Artificial Sequence: Synthetic oligonucleotide"
  source: /note="Description of Combined DNA/RNA Molecule: Synthetic oligonucleotide"
  source: /note="DNA/RNA"
  modified_base (1)..(1): bicyclic nucleic acid (BNA)
  modified_base (2)..(2): bicyclic nucleic acid (BNA)
  modified_base (7)..(7): 5-methyl modified nucleotide
  source: /note="3' tri-ethylene glycol (TEG)"
taaguucu

SEQ ID NO: 18318 - DNA, 20 bp, Artificial Sequence
  source: /note="Description of Artificial Sequence: Synthetic oligonucleotide"
  source: /note="Description of Combined DNA/RNA Molecule: Synthetic oligonucleotide"
  source: /note="DNA/RNA"
  modified_base (1)..(1): bicyclic nucleic acid (BNA)
  modified_base (2)..(2): bicyclic nucleic acid (BNA)
  modified_base (8)..(8): 5-methyl modified nucleotide
  modified_base (12)..(12): 5-methyl modified nucleotide
  modified_base (13)..(13): 5-methyl modified nucleotide
  modified_base (17)..(17): 5-methyl modified nucleotide
  modified_base (18)..(18): 5-methyl modified nucleotide
  modified_base (19)..(19): 5-methyl modified nucleotide
  source: /note="3' tri-ethylene glycol (TEG)"
gtaaguucuguccaagcccg

SEQ ID NO: 18319 - DNA, 19 bp, Artificial Sequence
  source: /note="Description of Artificial Sequence: Synthetic oligonucleotide"
  source: /note="Description of Combined DNA/RNA Molecule: Synthetic oligonucleotide"
  source: /note="DNA/RNA"
  modified_base (1)..(1): bicyclic nucleic acid (BNA)
  modified_base (2)..(2): bicyclic nucleic acid (BNA)
  modified_base (8)..(8): 5-methyl modified nucleotide
  modified_base (12)..(12): 5-methyl modified nucleotide
  modified_base (13)..(13): 5-methyl modified nucleotide
  modified_base (17)..(17): 5-methyl modified nucleotide
  modified_base (18)..(18): 5-methyl modified nucleotide
  modified_base (19)..(19): 5-methyl modified nucleotide
  source: /note="3' tri-ethylene glycol (TEG)"
gtaaguucuguccaagccc

SEQ ID NO: 18320 - DNA, 17 bp, Artificial Sequence
  source: /note="Description of Artificial Sequence: Synthetic oligonucleotide"
  source: /note="Description of Combined DNA/RNA Molecule: Synthetic oligonucleotide"
  source: /note="DNA/RNA"
  modified_base (1)..(1): bicyclic nucleic acid (BNA)
  modified_base (2)..(2): bicyclic nucleic acid (BNA)
  modified_base (8)..(8): 5-methyl modified nucleotide
  modified_base (12)..(12): 5-methyl modified nucleotide
  modified_base (13)..(13): 5-methyl modified nucleotide
  modified_base (17)..(17): 5-methyl modified nucleotide
  source: /note="3' tri-ethylene glycol (TEG)"
gtaaguucuguccaagc

SEQ ID NO: 18321 - DNA, 16 bp, Artificial Sequence
  source: /note="Description of Artificial Sequence: Synthetic oligonucleotide"
  source: /note="Description of Combined DNA/RNA Molecule: Synthetic oligonucleotide"
  source: /note="DNA/RNA"
  modified_base (1)..(1): bicyclic nucleic acid (BNA)
  modified_base (2)..(2): bicyclic nucleic acid (BNA)
  modified_base (8)..(8): 5-methyl modified nucleotide
  modified_base (12)..(12): 5-methyl modified nucleotide
  modified_base (13)..(13): 5-methyl modified nucleotide
  source: /note="3' tri-ethylene glycol (TEG)"
gtaaguucuguccaag

SEQ ID NO: 18322 - DNA, 15 bp, Artificial Sequence
  source: /note="Description of Artificial Sequence: Synthetic oligonucleotide"
  source: /note="Description of Combined DNA/RNA Molecule: Synthetic oligonucleotide"
  source: /note="DNA/RNA"
  modified_base (1)..(1): bicyclic nucleic acid (BNA)
  modified_base (2)..(2): bicyclic nucleic acid (BNA)
  modified_base (8)..(8): 5-methyl modified nucleotide
  modified_base (12)..(12): 5-methyl modified nucleotide
  modified_base (13)..(13): 5-methyl modified nucleotide
  source: /note="3' tri-ethylene glycol (TEG)"
gtaaguucuguccaa

SEQ ID NO: 18323 - DNA, 14 bp, Artificial Sequence
  source: /note="Description of Artificial Sequence: Synthetic oligonucleotide"
  source: /note="Description of Combined DNA/RNA Molecule: Synthetic oligonucleotide"
  source: /note="DNA/RNA"
  modified_base (1)..(1): bicyclic nucleic acid (BNA)
  modified_base (2)..(2): bicyclic nucleic acid (BNA)
  modified_base (8)..(8): 5-methyl modified nucleotide
  modified_base (12)..(12): 5-methyl modified nucleotide
  modified_base (13)..(13): 5-methyl modified nucleotide
  source: /note="3' tri-ethylene glycol (TEG)"
gtaaguucugucca

SEQ ID NO: 18324 - DNA, 13 bp, Artificial Sequence
  source: /note="Description of Artificial Sequence: Synthetic oligonucleotide"
  source: /note="Description of Combined DNA/RNA Molecule: Synthetic oligonucleotide"
  source: /note="DNA/RNA"
  modified_base (1)..(1): bicyclic nucleic acid (BNA)
  modified_base (2)..(2): bicyclic nucleic acid (BNA)
  modified_base (8)..(8): 5-methyl modified nucleotide
  modified_base (12)..(12): 5-methyl modified nucleotide
  modified_base (13)..(13): 5-methyl modified nucleotide
  source: /note="3' tri-ethylene glycol (TEG)"
gtaaguucugucc

SEQ ID NO: 18325 - DNA, 12 bp, Artificial Sequence
  source: /note="Description of Artificial Sequence: Synthetic oligonucleotide"
  source: /note="Description of Combined DNA/RNA Molecule: Synthetic oligonucleotide"
  source: /note="DNA/RNA"
  modified_base (1)..(1): bicyclic nucleic acid (BNA)
  modified_base (2)..(2): bicyclic nucleic acid (BNA)
  modified_base (8)..(8): 5-methyl modified nucleotide
  modified_base (12)..(12): 5-methyl modified nucleotide
  source: /note="3' tri-ethylene glycol (TEG)"
gtaaguucuguc

SEQ ID NO: 18326 - DNA, 11 bp, Artificial Sequence
  source: /note="Description of Artificial Sequence: Synthetic oligonucleotide"
  source: /note="Description of Combined DNA/RNA Molecule: Synthetic oligonucleotide"
  source: /note="DNA/RNA"
  modified_base (1)..(1): bicyclic nucleic acid (BNA)
  modified_base (2)..(2): bicyclic nucleic acid (BNA)
  modified_base (8)..(8): 5-methyl modified nucleotide
  source: /note="3' tri-ethylene glycol (TEG)"
gtaaguucugu

SEQ ID NO: 18327 - DNA, 10 bp, Artificial Sequence
  source: /note="Description of Artificial Sequence: Synthetic oligonucleotide"
  source: /note="Description of Combined DNA/RNA Molecule: Synthetic oligonucleotide"
  source: /note="DNA/RNA"
  modified_base (1)..(1): bicyclic nucleic acid (BNA)
  modified_base (2)..(2): bicyclic nucleic acid (BNA)
  modified_base (8)..(8): 5-methyl modified nucleotide
  source: /note="3' tri-ethylene glycol (TEG)"
gtaaguucug

SEQ ID NO: 18328 - DNA, 9 bp, Artificial Sequence
  source: /note="Description of Artificial Sequence: Synthetic oligonucleotide"
  source: /note="Description of Combined DNA/RNA Molecule: Synthetic oligonucleotide"
  source: /note="DNA/RNA"
  modified_base (1)..(1): bicyclic nucleic acid (BNA)
  modified_base (2)..(2): bicyclic nucleic acid (BNA)
  modified_base (8)..(8): 5-methyl modified nucleotide
  source: /note="3' tri-ethylene glycol (TEG)"
gtaaguucu

SEQ ID NO: 18329 - DNA, 8 bp, Artificial Sequence
  source: /note="Description of Artificial Sequence: Synthetic oligonucleotide"
  source: /note="Description of Combined DNA/RNA Molecule: Synthetic oligonucleotide"
  source: /note="DNA/RNA"
  modified_base (1)..(1): bicyclic nucleic acid (BNA)
  modified_base (2)..(2): bicyclic nucleic acid (BNA)
  modified_base (8)..(8): 5-methyl modified nucleotide
  source: /note="3' tri-ethylene glycol (TEG)"
gtaaguuc

SEQ ID NO: 18330 - RNA, 20 nt, Artificial Sequence
  source: /note="Description of Artificial Sequence: Synthetic oligonucleotide"
  source: /note="RNA"
  modified_base (1)..(1): bicyclic nucleic acid (BNA)
  modified_base (2)..(2): bicyclic nucleic acid (BNA)
  modified_base (9)..(9): 5-methyl modified nucleotide
  modified_base (13)..(13): 5-methyl modified nucleotide
  modified_base (14)..(14): 5-methyl modified nucleotide
  modified_base (18)..(18): 5-methyl modified nucleotide
  modified_base (19)..(19): 5-methyl modified nucleotide
  modified_base (20)..(20): 5-methyl modified nucleotide
  source: /note="3' tri-ethylene glycol (TEG)"
gguaaguucuguccaagccc

SEQ ID NO: 18331 - RNA, 19 nt, Artificial Sequence
  source: /note="Description of Artificial Sequence: Synthetic oligonucleotide"
  source: /note="RNA"
  modified_base (1)..(1): bicyclic nucleic acid (BNA)
  modified_base (2)..(2): bicyclic nucleic acid (BNA)
  modified_base (9)..(9): 5-methyl modified nucleotide
  modified_base (13)..(13): 5-methyl modified nucleotide
  modified_base (14)..(14): 5-methyl modified nucleotide
  modified_base (18)..(18): 5-methyl modified nucleotide
  modified_base (19)..(19): 5-methyl modified nucleotide
  source: /note="3' tri-ethylene glycol (TEG)"
gguaaguucuguccaagcc

SEQ ID NO: 18332 - RNA, 17 nt, Artificial Sequence
  source: /note="Description of Artificial Sequence: Synthetic oligonucleotide"
  source: /note="RNA"
  modified_base (1)..(1): bicyclic nucleic acid (BNA)
  modified_base (2)..(2): bicyclic nucleic acid (BNA)
  modified_base (9)..(9): 5-methyl modified nucleotide
  modified_base (13)..(13): 5-methyl modified nucleotide
  modified_base (14)..(14): 5-methyl modified nucleotide
  source: /note="3' tri-ethylene glycol (TEG)"
gguaaguucuguccaag

SEQ ID NO: 18333 - RNA, 16 nt, Artificial Sequence
  source: /note="Description of Artificial Sequence: Synthetic oligonucleotide"
  source: /note="RNA"
  modified_base (1)..(1): bicyclic nucleic acid (BNA)
  modified_base (2)..(2): bicyclic nucleic acid (BNA)
  modified_base (9)..(9): 5-methyl modified nucleotide
  modified_base (13)..(13): 5-methyl modified nucleotide
  modified_base (14)..(14): 5-methyl modified nucleotide
  source: /note="3' tri-ethylene glycol (TEG)"
gguaaguucuguccaa

SEQ ID NO: 18334 - RNA, 15 nt, Artificial Sequence
  source: /note="Description of Artificial Sequence: Synthetic oligonucleotide"
  source: /note="RNA"
  modified_base (1)..(1): bicyclic nucleic acid (BNA)
  modified_base (2)..(2): bicyclic nucleic acid (BNA)
  modified_base (9)..(9): 5-methyl modified nucleotide
  modified_base (13)..(13): 5-methyl modified nucleotide
  modified_base (14)..(14): 5-methyl modified nucleotide
  source: /note="3' tri-ethylene glycol (TEG)"
gguaaguucugucca

SEQ ID NO: 18335 - RNA, 14 nt, Artificial Sequence
  source: /note="Description of Artificial Sequence: Synthetic oligonucleotide"
  source: /note="RNA"
  modified_base (1)..(1): bicyclic nucleic acid (BNA)
  modified_base (2)..(2): bicyclic nucleic acid (BNA)
  modified_base (9)..(9): 5-methyl modified nucleotide
  modified_base (13)..(13): 5-methyl modified nucleotide
  modified_base (14)..(14): 5-methyl modified nucleotide
  source: /note="3' tri-ethylene glycol (TEG)"
gguaaguucugucc

SEQ ID NO: 18336 - RNA, 13 nt, Artificial Sequence
  source: /note="Description of Artificial Sequence: Synthetic oligonucleotide"
  source: /note="RNA"
  modified_base (1)..(1): bicyclic nucleic acid (BNA)
  modified_base (2)..(2): bicyclic nucleic acid (BNA)
  modified_base (9)..(9): 5-methyl modified nucleotide
  modified_base (13)..(13): 5-methyl modified nucleotide
  source: /note="3' tri-ethylene glycol (TEG)"
gguaaguucuguc

SEQ ID NO: 18337 - RNA, 12 nt, Artificial Sequence
  source: /note="Description of Artificial Sequence: Synthetic oligonucleotide"
  source: /note="RNA"
  modified_base (1)..(1): bicyclic nucleic acid (BNA)
  modified_base (2)..(2): bicyclic nucleic acid (BNA)
  modified_base (9)..(9): 5-methyl modified nucleotide
  source: /note="3' tri-ethylene glycol (TEG)"
gguaaguucugu

SEQ ID NO: 18338 - RNA, 11 nt, Artificial Sequence
  source: /note="Description of Artificial Sequence: Synthetic oligonucleotide"
  source: /note="RNA"
  modified_base (1)..(1): bicyclic nucleic acid (BNA)
  modified_base (2)..(2): bicyclic nucleic acid (BNA)
  modified_base (9)..(9): 5-methyl modified nucleotide
  source: /note="3' tri-ethylene glycol (TEG)"
gguaaguucug

SEQ ID NO: 18339 - RNA, 10 nt, Artificial Sequence
  source: /note="Description of Artificial Sequence: Synthetic oligonucleotide"
  source: /note="RNA"
  modified_base (1)..(1): bicyclic nucleic acid (BNA)
  modified_base (2)..(2): bicyclic nucleic acid (BNA)
  modified_base (9)..(9): 5-methyl modified nucleotide
  source: /note="3' tri-ethylene glycol (TEG)"
gguaaguucu

SEQ ID NO: 18340 - RNA, 9 nt, Artificial Sequence
  source: /note="Description of Artificial Sequence: Synthetic oligonucleotide"
  source: /note="RNA"
  modified_base (1)..(1): bicyclic nucleic acid (BNA)
  modified_base (2)..(2): bicyclic nucleic acid (BNA)
  modified_base (9)..(9): 5-methyl modified nucleotide
  source: /note="3' tri-ethylene glycol (TEG)"
gguaaguuc

SEQ ID NO: 18341 - RNA, 8 nt, Artificial Sequence
  source: /note="Description of Artificial Sequence: Synthetic oligonucleotide"
  source: /note="RNA"
  modified_base (1)..(1): bicyclic nucleic acid (BNA)
  modified_base (2)..(2): bicyclic nucleic acid (BNA)
  source: /note="3' tri-ethylene glycol (TEG)"
gguaaguu

SEQ ID NO: 18342 - RNA, 20 nt, Artificial Sequence
  source: /note="Description of Artificial Sequence: Synthetic oligonucleotide"
  source: /note="RNA"
  modified_base (1)..(1): 5-methyl bicyclic nucleic acid
  modified_base (2)..(2): bicyclic nucleic acid (BNA)
  modified_base (10)..(10): 5-methyl modified nucleotide
  modified_base (14)..(14): 5-methyl modified nucleotide
  modified_base (15)..(15): 5-methyl modified nucleotide
  modified_base (19)..(19): 5-methyl modified nucleotide
  modified_base (20)..(20): 5-methyl modified nucleotide
  source: /note="3' tri-ethylene glycol (TEG)"
cgguaaguucuguccaagcc

SEQ ID NO: 18343 - RNA, 19 nt, Artificial Sequence
  source: /note="Description of Artificial Sequence: Synthetic oligonucleotide"
  source: /note="RNA"
  modified_base (1)..(1): 5-methyl bicyclic nucleic acid
  modified_base (2)..(2): bicyclic nucleic acid (BNA)
  modified_base (10)..(10): 5-methyl modified nucleotide
  modified_base (14)..(14): 5-methyl modified nucleotide
  modified_base (15)..(15): 5-methyl modified nucleotide
  modified_base (19)..(19): 5-methyl modified nucleotide
  source: /note="3' tri-ethylene glycol (TEG)"
cgguaaguucuguccaagc

SEQ ID NO: 18344 - RNA, 18 nt, Artificial Sequence
  source: /note="Description of Artificial Sequence: Synthetic oligonucleotide"
  source: /note="RNA"
  modified_base (1)..(1): 5-methyl bicyclic nucleic acid
  modified_base (2)..(2): bicyclic nucleic acid (BNA)
  modified_base (10)..(10): 5-methyl modified nucleotide
  modified_base (14)..(14): 5-methyl modified nucleotide
  modified_base (15)..(15): 5-methyl modified nucleotide
  source: /note="3' tri-ethylene glycol (TEG)"
cgguaaguucuguccaag

SEQ ID NO: 18345 - RNA, 17 nt, Artificial Sequence
  source: /note="Description of Artificial Sequence: Synthetic oligonucleotide"
  source: /note="RNA"
  modified_base (1)..(1): 5-methyl bicyclic nucleic acid
  modified_base (2)..(2): bicyclic nucleic acid (BNA)
  modified_base (10)..(10): 5-methyl modified nucleotide
  modified_base (14)..(14): 5-methyl modified nucleotide
  modified_base (15)..(15): 5-methyl modified nucleotide
  source: /note="3' tri-ethylene glycol (TEG)"
cgguaaguucuguccaa

SEQ ID NO: 18346 - RNA, 16 nt, Artificial Sequence
  source: /note="Description of Artificial Sequence: Synthetic oligonucleotide"
  source: /note="RNA"
  modified_base (1)..(1): 5-methyl bicyclic nucleic acid
  modified_base (2)..(2): bicyclic nucleic acid (BNA)
  modified_base (10)..(10): 5-methyl modified nucleotide
  modified_base (14)..(14): 5-methyl modified nucleotide
  modified_base (15)..(15): 5-methyl modified nucleotide
  source: /note="3' tri-ethylene glycol (TEG)"
cgguaaguucugucca

SEQ ID NO: 18347 - RNA, 15 nt, Artificial Sequence
  source: /note="Description of Artificial Sequence: Synthetic oligonucleotide"
  source: /note="RNA"
  modified_base (1)..(1): 5-methyl bicyclic nucleic acid
  modified_base (2)..(2): bicyclic nucleic acid (BNA)
  modified_base (10)..(10): 5-methyl modified nucleotide
  modified_base (14)..(14): 5-methyl modified nucleotide
  modified_base (15)..(15): 5-methyl modified nucleotide
  source: /note="3' tri-ethylene glycol (TEG)"
cgguaaguucugucc

SEQ ID NO: 18348 - RNA, 14 nt, Artificial Sequence
  source: /note="Description of Artificial Sequence: Synthetic oligonucleotide"
  source: /note="RNA"
  modified_base (1)..(1): 5-methyl bicyclic nucleic acid
  modified_base (2)..(2): bicyclic nucleic acid (BNA)
  modified_base (10)..(10): 5-methyl modified nucleotide
  modified_base (14)..(14): 5-methyl modified nucleotide
  source: /note="3' tri-ethylene glycol (TEG)"
cgguaaguucuguc

SEQ ID NO: 18349 - RNA, 13 nt, Artificial Sequence
  source: /note="Description of Artificial Sequence: Synthetic oligonucleotide"
  source: /note="RNA"
  modified_base (1)..(1): 5-methyl bicyclic nucleic acid
  modified_base (2)..(2): bicyclic nucleic acid (BNA)
  modified_base (10)..(10): 5-methyl modified nucleotide
  source: /note="3' tri-ethylene glycol (TEG)"
cgguaaguucugu

SEQ ID NO: 18350 - RNA, 12 nt, Artificial Sequence
  source: /note="Description of Artificial Sequence: Synthetic oligonucleotide"
  source: /note="RNA"
  modified_base (1)..(1): 5-methyl bicyclic nucleic acid
  modified_base (2)..(2): bicyclic nucleic acid (BNA)
  modified_base (10)..(10): 5-methyl modified nucleotide
  source: /note="3' tri-ethylene glycol (TEG)"
cgguaaguucug

SEQ ID NO: 18351 - RNA, 11 nt, Artificial Sequence
  source: /note="Description of Artificial Sequence: Synthetic oligonucleotide"
  source: /note="RNA"
  modified_base (1)..(1): 5-methyl bicyclic nucleic acid
  modified_base (2)..(2): bicyclic nucleic acid (BNA)
  modified_base (10)..(10): 5-methyl modified nucleotide
  source: /note="3' tri-ethylene glycol (TEG)"
cgguaaguucu

SEQ ID NO: 18352 - RNA, 10 nt, Artificial Sequence
  source: /note="Description of Artificial Sequence: Synthetic oligonucleotide"
  source: /note="RNA"
  modified_base (1)..(1): 5-methyl bicyclic nucleic acid
  modified_base (2)..(2): bicyclic nucleic acid (BNA)
  modified_base (10)..(10): 5-methyl modified nucleotide
  source: /note="3' tri-ethylene glycol (TEG)"
cgguaaguuc

SEQ ID NO: 18353 - RNA, 9 nt, Artificial Sequence
  source: /note="Description of Artificial Sequence: Synthetic oligonucleotide"
  source: /note="RNA"
  modified_base (1)..(1): 5-methyl bicyclic nucleic acid
  modified_base (2)..(2): bicyclic nucleic acid (BNA)
  source: /note="3' tri-ethylene glycol (TEG)"
cgguaaguu

SEQ ID NO: 18354 - RNA, 8 nt, Artificial Sequence
  source: /note="Description of Artificial Sequence: Synthetic oligonucleotide"
  source: /note="RNA"
  modified_base (1)..(1): 5-methyl bicyclic nucleic acid
  modified_base (2)..(2): bicyclic nucleic acid (BNA)
  source: /note="3' tri-ethylene glycol (TEG)"
cgguaagu

SEQ ID NO: 18355 - DNA, 20 bp, Artificial Sequence
  source: /note="Description of Artificial Sequence: Synthetic oligonucleotide"
  source: /note="Description of Combined DNA/RNA Molecule: Synthetic oligonucleotide"
  source: /note="DNA/RNA"
  modified_base (1)..(1): bicyclic nucleic acid (BNA)
  modified_base (2)..(2): 5-methyl bicyclic nucleic acid
  modified_base (11)..(11): 5-methyl modified nucleotide
  modified_base (15)..(15): 5-methyl modified nucleotide
  modified_base (16)..(16): 5-methyl modified nucleotide
  modified_base (20)..(20): 5-methyl modified nucleotide
  source: /note="3' tri-ethylene glycol (TEG)"
tcgguaaguucuguccaagc

SEQ ID NO: 18356 - DNA, 19 bp, Artificial Sequence
  source: /note="Description of Artificial Sequence: Synthetic oligonucleotide"
  source: /note="Description of Combined DNA/RNA Molecule: Synthetic oligonucleotide"
  source: /note="DNA/RNA"
  modified_base (1)..(1): bicyclic nucleic acid (BNA)
  modified_base (2)..(2): 5-methyl bicyclic nucleic acid
  modified_base (11)..(11): 5-methyl modified nucleotide
  modified_base (15)..(15): 5-methyl modified nucleotide
  modified_base (16)..(16): 5-methyl modified nucleotide
  source: /note="3' tri-ethylene glycol (TEG)"
tcgguaaguucuguccaag

SEQ ID NO: 18357 - DNA, 18 bp, Artificial Sequence
  source: /note="Description of Artificial Sequence: Synthetic oligonucleotide"
  source: /note="Description of Combined DNA/RNA Molecule: Synthetic oligonucleotide"
  source: /note="DNA/RNA"
  modified_base (1)..(1): bicyclic nucleic acid (BNA)
  modified_base (2)..(2): 5-methyl bicyclic nucleic acid
  modified_base (11)..(11): 5-methyl modified nucleotide
  modified_base (15)..(15): 5-methyl modified nucleotide
  modified_base (16)..(16): 5-methyl modified nucleotide
  source: /note="3' tri-ethylene glycol (TEG)"
tcgguaaguucuguccaa

SEQ ID NO: 18358 - DNA, 17 bp, Artificial Sequence
  source: /note="Description of Artificial Sequence: Synthetic oligonucleotide"
  source: /note="Description of Combined DNA/RNA Molecule: Synthetic oligonucleotide"
  source: /note="DNA/RNA"
  modified_base (1)..(1): bicyclic nucleic acid (BNA)
  modified_base (2)..(2): 5-methyl bicyclic nucleic acid
  modified_base (11)..(11): 5-methyl modified nucleotide
  modified_base (15)..(15): 5-methyl modified nucleotide
  modified_base (16)..(16): 5-methyl modified nucleotide
  source: /note="3' tri-ethylene glycol (TEG)"
tcgguaaguucugucca

SEQ ID NO: 18359 - DNA, 16 bp, Artificial Sequence
  source: /note="Description of Artificial Sequence: Synthetic oligonucleotide"
  source: /note="Description of Combined DNA/RNA Molecule: Synthetic oligonucleotide"
  source: /note="DNA/RNA"
  modified_base (1)..(1): bicyclic nucleic acid (BNA)
  modified_base (2)..(2): 5-methyl bicyclic nucleic acid
  modified_base (11)..(11): 5-methyl modified nucleotide
  modified_base (15)..(15): 5-methyl modified nucleotide
  modified_base (16)..(16): 5-methyl modified nucleotide
  source: /note="3' tri-ethylene glycol (TEG)"
tcgguaaguucugucc

SEQ ID NO: 18360 - DNA, 15 bp, Artificial Sequence
  source: /note="Description of Artificial Sequence: Synthetic oligonucleotide"
  source: /note="Description of Combined DNA/RNA Molecule: Synthetic oligonucleotide"
  source: /note="DNA/RNA"
  modified_base (1)..(1): bicyclic nucleic acid (BNA)
  modified_base (2)..(2): 5-methyl bicyclic nucleic acid
  modified_base (11)..(11): 5-methyl modified nucleotide
  modified_base (15)..(15): 5-methyl modified nucleotide
  source: /note="3' tri-ethylene glycol (TEG)"
tcgguaaguucuguc

SEQ ID NO: 18361 - DNA, 14 bp, Artificial Sequence
  source: /note="Description of Artificial Sequence: Synthetic oligonucleotide"
  source: /note="Description of Combined DNA/RNA Molecule: Synthetic oligonucleotide"
  source: /note="DNA/RNA"
  modified_base (1)..(1): bicyclic nucleic acid (BNA)
  modified_base (2)..(2): 5-methyl bicyclic nucleic acid
  modified_base (11)..(11): 5-methyl modified nucleotide
  source: /note="3' tri-ethylene glycol (TEG)"
tcgguaaguucugu

SEQ ID NO: 18362 - DNA, 13 bp, Artificial Sequence
  source: /note="Description of Artificial Sequence: Synthetic oligonucleotide"
  source: /note="Description of Combined DNA/RNA Molecule: Synthetic oligonucleotide"
  source: /note="DNA/RNA"
  modified_base (1)..(1): bicyclic nucleic acid (BNA)
  modified_base (2)..(2): 5-methyl bicyclic nucleic acid
  modified_base (11)..(11): 5-methyl modified nucleotide
  source: /note="3' tri-ethylene glycol (TEG)"
tcgguaaguucug

SEQ ID NO: 18363 - DNA, 12 bp, Artificial Sequence
  source: /note="Description of Artificial Sequence: Synthetic oligonucleotide"
  source: /note="Description of Combined DNA/RNA Molecule: Synthetic oligonucleotide"
  source: /note="DNA/RNA"
  modified_base (1)..(1): bicyclic nucleic acid (BNA)
  modified_base (2)..(2): 5-methyl bicyclic nucleic acid
  modified_base (11)..(11): 5-methyl modified nucleotide
  source: /note="3' tri-ethylene glycol (TEG)"
tcgguaaguucu

SEQ ID NO: 18364 - DNA, 11 bp, Artificial Sequence
  source: /note="Description of Artificial Sequence: Synthetic oligonucleotide"
  source: /note="Description of Combined DNA/RNA Molecule: Synthetic oligonucleotide"
  source: /note="DNA/RNA"
  modified_base (1)..(1): bicyclic nucleic acid (BNA)
  modified_base (2)..(2): 5-methyl bicyclic nucleic acid
  modified_base (11)..(11): 5-methyl modified nucleotide
  source: /note="3' tri-ethylene glycol (TEG)"
tcgguaaguuc

SEQ ID NO: 18365 - DNA, 10 bp, Artificial Sequence
  source: /note="Description of Artificial Sequence: Synthetic oligonucleotide"
  source: /note="Description of Combined DNA/RNA Molecule: Synthetic oligonucleotide"
  source: /note="DNA/RNA"
  modified_base (1)..(1): bicyclic nucleic acid (BNA)
  modified_base (2)..(2): 5-methyl bicyclic nucleic acid
  source: /note="3' tri-ethylene glycol (TEG)"
tcgguaaguu

SEQ ID NO: 18366 - DNA, 9 bp, Artificial Sequence
  source: /note="Description of Artificial Sequence: Synthetic oligonucleotide"
  source: /note="Description of Combined DNA/RNA Molecule: Synthetic oligonucleotide"
  source: /note="DNA/RNA"
  modified_base (1)..(1): bicyclic nucleic acid (BNA)
  modified_base (2)..(2): 5-methyl bicyclic nucleic acid
  source: /note="3' tri-ethylene glycol (TEG)"
tcgguaagu

SEQ ID NO: 18367 - DNA, 20 bp, Artificial Sequence
  source: /note="Description of Artificial Sequence: Synthetic oligonucleotide"
  source: /note="Description of Combined DNA/RNA Molecule: Synthetic oligonucleotide"
  source: /note="DNA/RNA"
  modified_base (1)..(1): bicyclic nucleic acid (BNA)
  modified_base (2)..(2): bicyclic nucleic acid (BNA)
  modified_base (3)..(3): 5-methyl modified nucleotide
  modified_base (12)..(12): 5-methyl modified nucleotide
  modified_base (16)..(16): 5-methyl modified nucleotide
  modified_base (17)..(17): 5-methyl modified nucleotide
  source: /note="3' tri-ethylene glycol (TEG)"
gtcgguaaguucuguccaag

SEQ ID NO: 18368 - DNA, 19 bp, Artificial Sequence
  source: /note="Description of Artificial Sequence: Synthetic oligonucleotide"
  source: /note="Description of Combined DNA/RNA Molecule: Synthetic oligonucleotide"
  source: /note="DNA/RNA"
  modified_base (1)..(1): bicyclic nucleic acid (BNA)
  modified_base (2)..(2): bicyclic nucleic acid (BNA)
  modified_base (3)..(3): 5-methyl modified nucleotide
  modified_base (12)..(12): 5-methyl modified nucleotide
  modified_base (16)..(16): 5-methyl modified nucleotide
  modified_base (17)..(17): 5-methyl modified nucleotide
  source: /note="3' tri-ethylene glycol (TEG)"
gtcgguaaguucuguccaa

SEQ ID NO: 18369 - DNA, 18 bp, Artificial Sequence
  source: /note="Description of Artificial Sequence: Synthetic oligonucleotide"
  source: /note="Description of Combined DNA/RNA Molecule: Synthetic oligonucleotide"
  source: /note="DNA/RNA"
  modified_base (1)..(1): bicyclic nucleic acid (BNA)
  modified_base (2)..(2): bicyclic nucleic acid (BNA)
  modified_base (3)..(3): 5-methyl modified nucleotide
  modified_base (12)..(12): 5-methyl modified nucleotide
  modified_base (16)..(16): 5-methyl modified nucleotide
  modified_base (17)..(17): 5-methyl modified nucleotide
  source: /note="3' tri-ethylene glycol (TEG)"
gtcgguaaguucugucca

SEQ ID NO: 18370 - DNA, 17 bp, Artificial Sequence
  source: /note="Description of Artificial Sequence: Synthetic oligonucleotide"
  source: /note="Description of Combined DNA/RNA Molecule: Synthetic oligonucleotide"
  source: /note="DNA/RNA"
  modified_base (1)..(1): bicyclic nucleic acid (BNA)
  modified_base (2)..(2): bicyclic nucleic acid (BNA)
  modified_base (3)..(3): 5-methyl modified nucleotide
  modified_base (12)..(12): 5-methyl modified nucleotide
  modified_base (16)..(16): 5-methyl modified nucleotide
  modified_base (17)..(17): 5-methyl modified nucleotide
  source: /note="3' tri-ethylene glycol (TEG)"
gtcgguaaguucugucc

SEQ ID NO: 18371 - DNA, 16 bp, Artificial Sequence
  source: /note="Description of Artificial Sequence: Synthetic oligonucleotide"
  source: /note="Description of Combined DNA/RNA Molecule: Synthetic oligonucleotide"
  source: /note="DNA/RNA"
  modified_base (1)..(1): bicyclic nucleic acid (BNA)
  modified_base (2)..(2): bicyclic nucleic acid (BNA)
  modified_base (3)..(3): 5-methyl modified nucleotide
  modified_base (12)..(12): 5-methyl modified nucleotide
  modified_base (16)..(16): 5-methyl modified nucleotide
  source: /note="3' tri-ethylene glycol (TEG)"
gtcgguaaguucuguc

SEQ ID NO: 18372 - DNA, 15 bp, Artificial Sequence
  source: /note="Description of Artificial Sequence: Synthetic oligonucleotide"
  source: /note="Description of Combined DNA/RNA Molecule: Synthetic oligonucleotide"
  source: /note="DNA/RNA"
  modified_base (1)..(1): bicyclic nucleic acid (BNA)
  modified_base (2)..(2): bicyclic nucleic acid (BNA)
  modified_base (3)..(3): 5-methyl modified nucleotide
  modified_base (12)..(12): 5-methyl modified nucleotide
  source: /note="3' tri-ethylene glycol (TEG)"
gtcgguaaguucugu

SEQ ID NO: 18373 - DNA, 14 bp, Artificial Sequence
  source: /note="Description of Artificial Sequence: Synthetic oligonucleotide"
  source: /note="Description of Combined DNA/RNA Molecule: Synthetic oligonucleotide"
  source: /note="DNA/RNA"
  modified_base (1)..(1): bicyclic nucleic acid (BNA)
  modified_base (2)..(2): bicyclic nucleic acid (BNA)
  modified_base (3)..(3): 5-methyl modified nucleotide
  modified_base (12)..(12): 5-methyl modified nucleotide
  source: /note="3' tri-ethylene glycol (TEG)"
gtcgguaaguucug

SEQ ID NO: 18374 - DNA, 13 bp, Artificial Sequence
  source: /note="Description of Artificial Sequence: Synthetic oligonucleotide"
  source: /note="Description of Combined DNA/RNA Molecule: Synthetic oligonucleotide"
  source: /note="DNA/RNA"
  modified_base (1)..(1): bicyclic nucleic acid (BNA)
  modified_base (2)..(2): bicyclic nucleic acid (BNA)
  modified_base (3)..(3): 5-methyl modified nucleotide
  modified_base (12)..(12): 5-methyl modified nucleotide
  source: /note="3' tri-ethylene glycol (TEG)"
gtcgguaaguucu

SEQ ID NO: 18375 - DNA, 12 bp, Artificial Sequence
  source: /note="Description of Artificial Sequence: Synthetic oligonucleotide"
  source: /note="Description of Combined DNA/RNA Molecule: Synthetic oligonucleotide"
  source: /note="DNA/RNA"
  modified_base (1)..(1): bicyclic nucleic acid (BNA)
  modified_base (2)..(2): bicyclic nucleic acid (BNA)
  modified_base (3)..(3): 5-methyl modified nucleotide
  modified_base (12)..(12): 5-methyl modified nucleotide
  source: /note="3' tri-ethylene glycol (TEG)"
gtcgguaaguuc

SEQ ID NO: 18376 - DNA, 11 bp, Artificial Sequence
  source: /note="Description of Artificial Sequence: Synthetic oligonucleotide"
  source: /note="Description of Combined DNA/RNA Molecule: Synthetic oligonucleotide"
  source: /note="DNA/RNA"
  modified_base (1)..(1): bicyclic nucleic acid (BNA)
  modified_base (2)..(2): bicyclic nucleic acid (BNA)
  modified_base (3)..(3): 5-methyl modified nucleotide
  source: /note="3' tri-ethylene glycol (TEG)"
gtcgguaaguu

SEQ ID NO: 18377 - DNA, 10 bp, Artificial Sequence
  source: /note="Description of Artificial Sequence: Synthetic oligonucleotide"
  source: /note="Description of Combined DNA/RNA Molecule: Synthetic oligonucleotide"
  source: /note="DNA/RNA"
  modified_base (1)..(1): bicyclic nucleic acid (BNA)
  modified_base (2)..(2): bicyclic nucleic acid (BNA)
  modified_base (3)..(3): 5-methyl modified nucleotide
  source: /note="3' tri-ethylene glycol (TEG)"
gtcgguaagu

SEQ ID NO: 18378 - RNA, 20 nt, Artificial Sequence
  source: /note="Description of Artificial Sequence: Synthetic oligonucleotide"
  source: /note="RNA"
  modified_base (1)..(1): bicyclic nucleic acid (BNA)
  modified_base (2)..(2): bicyclic nucleic acid (BNA)
  modified_base (4)..(4): 5-methyl modified nucleotide
  modified_base (13)..(13): 5-methyl modified nucleotide
  modified_base (17)..(17): 5-methyl modified nucleotide
  modified_base (18)..(18): 5-methyl modified nucleotide
  source: /note="3' tri-ethylene glycol (TEG)"
agucgguaaguucuguccaa

SEQ ID NO: 18379 - RNA, 19 nt, Artificial Sequence
  source: /note="Description of Artificial Sequence: Synthetic oligonucleotide"
  source: /note="RNA"
  modified_base (1)..(1): bicyclic nucleic acid (BNA)
  modified_base (2)..(2): bicyclic nucleic acid (BNA)
  modified_base (4)..(4): 5-methyl modified nucleotide
  modified_base (13)..(13): 5-methyl modified nucleotide
  modified_base (17)..(17): 5-methyl modified nucleotide
  modified_base (18)..(18): 5-methyl modified nucleotide
  source: /note="3' tri-ethylene glycol (TEG)"
agucgguaaguucugucca

SEQ ID NO: 18380 - RNA, 17 nt, Artificial Sequence
  source: /note="Description of Artificial Sequence: Synthetic oligonucleotide"
  source: /note="RNA"
  modified_base (1)..(1): bicyclic nucleic acid (BNA)
  modified_base (2)..(2): bicyclic nucleic acid (BNA)
  modified_base (4)..(4): 5-methyl modified nucleotide
  modified_base (13)..(13): 5-methyl modified nucleotide
  modified_base (17)..(17): 5-methyl modified nucleotide
  source: /note="3' tri-ethylene glycol (TEG)"
agucgguaaguucuguc

SEQ ID NO: 18381 - RNA, 16 nt, Artificial Sequence
  source: /note="Description of Artificial Sequence: Synthetic oligonucleotide"
  source: /note="RNA"
  modified_base (1)..(1): bicyclic nucleic acid (BNA)
  modified_base (2)..(2): bicyclic nucleic acid (BNA)
  modified_base (4)..(4): 5-methyl modified nucleotide
  modified_base (13)..(13): 5-methyl modified nucleotide
  source: /note="3' tri-ethylene glycol (TEG)"
agucgguaaguucugu

SEQ ID NO: 18382 - RNA, 15 nt, Artificial Sequence
  source: /note="Description of Artificial Sequence: Synthetic oligonucleotide"
  source: /note="RNA"
  modified_base (1)..(1): bicyclic nucleic acid (BNA)
  modified_base (2)..(2): bicyclic nucleic acid (BNA)
  modified_base (4)..(4): 5-methyl modified nucleotide
  modified_base (13)..(13): 5-methyl modified nucleotide
  source: /note="3' tri-ethylene glycol (TEG)"
agucgguaaguucug

SEQ ID NO: 18383 - RNA, 14 nt, Artificial Sequence
  source: /note="Description of Artificial Sequence: Synthetic oligonucleotide"
  source: /note="RNA"
  modified_base (1)..(1): bicyclic nucleic acid (BNA)
  modified_base (2)..(2): bicyclic nucleic acid (BNA)
  modified_base (4)..(4): 5-methyl modified nucleotide
  modified_base (13)..(13): 5-methyl modified nucleotide
  source: /note="3' tri-ethylene glycol (TEG)"
agucgguaaguucu

SEQ ID NO: 18384 - RNA, 13 nt, Artificial Sequence
  source: /note="Description of Artificial Sequence: Synthetic oligonucleotide"
  source: /note="RNA"
  modified_base (1)..(1): bicyclic nucleic acid (BNA)
  modified_base (2)..(2): bicyclic nucleic acid (BNA)
  modified_base (4)..(4): 5-methyl modified nucleotide
  modified_base (13)..(13): 5-methyl modified nucleotide
  source: /note="3' tri-ethylene glycol (TEG)"
agucgguaaguuc

SEQ ID NO: 18385 - RNA, 12 nt, Artificial Sequence
  source: /note="Description of Artificial Sequence: Synthetic oligonucleotide"
  source: /note="RNA"
  modified_base (1)..(1): bicyclic nucleic acid (BNA)
  modified_base (2)..(2): bicyclic nucleic acid (BNA)
  modified_base (4)..(4): 5-methyl modified nucleotide
  source: /note="3' tri-ethylene glycol (TEG)"
agucgguaaguu

SEQ ID NO: 18386 - RNA, 11 nt, Artificial Sequence
  source: /note="Description of Artificial Sequence: Synthetic oligonucleotide"
  source: /note="RNA"
  modified_base (1)..(1): bicyclic nucleic acid (BNA)
  modified_base (2)..(2): bicyclic nucleic acid (BNA)
  modified_base (4)..(4): 5-methyl modified nucleotide
  source: /note="3' tri-ethylene glycol (TEG)"
agucgguaagu

SEQ ID NO: 18387 - RNA, 20 nt, Artificial Sequence
  source: /note="Description of Artificial Sequence: Synthetic oligonucleotide"
  source: /note="RNA"
  modified_base (1)..(1): 5-methyl bicyclic nucleic acid
  modified_base (2)..(2): bicyclic nucleic acid (BNA)
  modified_base (5)..(5): 5-methyl modified nucleotide
  modified_base (14)..(14): 5-methyl modified nucleotide
  modified_base (18)..(18): 5-methyl modified nucleotide
  modified_base (19)..(19): 5-methyl modified nucleotide
  source: /note="3' tri-ethylene glycol (TEG)"
cagucgguaaguucugucca

SEQ ID NO: 18388 - RNA, 19 nt, Artificial Sequence
  source: /note="Description of Artificial Sequence: Synthetic oligonucleotide"
  source: /note="RNA"
  modified_base (1)..(1): 5-methyl bicyclic nucleic acid
  modified_base (2)..(2): bicyclic nucleic acid (BNA)
  modified_base (5)..(5): 5-methyl modified nucleotide
  modified_base (14)..(14): 5-methyl modified nucleotide
  modified_base (18)..(18): 5-methyl modified nucleotide
  modified_base (19)..(19): 5-methyl modified nucleotide
  source: /note="3' tri-ethylene glycol (TEG)"
cagucgguaaguucugucc

SEQ ID NO: 18389 - RNA, 18 nt, Artificial Sequence
  source: /note="Description of Artificial Sequence: Synthetic oligonucleotide"
  source: /note="RNA"
  modified_base (1)..(1): 5-methyl bicyclic nucleic acid
  modified_base (2)..(2): bicyclic nucleic acid (BNA)
  modified_base (5)..(5): 5-methyl modified nucleotide
  modified_base (14)..(14): 5-methyl modified nucleotide
  modified_base (18)..(18): 5-methyl modified nucleotide
  source: /note="3' tri-ethylene glycol (TEG)"
cagucgguaaguucuguc

SEQ ID NO: 18390 - RNA, 17 nt, Artificial Sequence
  source: /note="Description of Artificial Sequence: Synthetic oligonucleotide"
  source: /note="RNA"
  modified_base (1)..(1): 5-methyl bicyclic nucleic acid
  modified_base (2)..(2): bicyclic nucleic acid (BNA)
  modified_base (5)..(5): 5-methyl modified nucleotide
  modified_base (14)..(14): 5-methyl modified nucleotide
  source: /note="3' tri-ethylene glycol (TEG)"
cagucgguaaguucugu

SEQ ID NO: 18391 - RNA, 16 nt, Artificial Sequence
  source: /note="Description of Artificial Sequence: Synthetic oligonucleotide"
  source: /note="RNA"
  modified_base (1)..(1): 5-methyl bicyclic nucleic acid
  modified_base (2)..(2): bicyclic nucleic acid (BNA)
  modified_base (5)..(5): 5-methyl modified nucleotide
  modified_base (14)..(14): 5-methyl modified nucleotide
  source: /note="3' tri-ethylene glycol (TEG)"
cagucgguaaguucug

SEQ ID NO: 18392 - RNA, 15 nt, Artificial Sequence
  source: /note="Description of Artificial Sequence: Synthetic oligonucleotide"
  source: /note="RNA"
  modified_base (1)..(1): 5-methyl bicyclic nucleic acid
  modified_base (2)..(2): bicyclic nucleic acid (BNA)
  modified_base (5)..(5): 5-methyl modified nucleotide
  modified_base (14)..(14): 5-methyl modified nucleotide
  source: /note="3' tri-ethylene glycol (TEG)"
cagucgguaaguucu

SEQ ID NO: 18393 - RNA, 14 nt, Artificial Sequence
  source: /note="Description of Artificial Sequence: Synthetic oligonucleotide"
  source: /note="RNA"
  modified_base (1)..(1): 5-methyl bicyclic nucleic acid
  modified_base (2)..(2): bicyclic nucleic acid (BNA)
  modified_base (5)..(5): 5-methyl modified nucleotide
  modified_base (14)..(14): 5-methyl modified nucleotide
  source: /note="3' tri-ethylene glycol (TEG)"
cagucgguaaguuc

SEQ ID NO: 18394 - RNA, 13 nt, Artificial Sequence
  source: /note="Description of Artificial Sequence: Synthetic oligonucleotide"
  source: /note="RNA"
  modified_base (1)..(1): 5-methyl bicyclic nucleic acid
  modified_base (2)..(2): bicyclic nucleic acid (BNA)
  modified_base (5)..(5): 5-methyl modified nucleotide
  source: /note="3' tri-ethylene glycol (TEG)"
cagucgguaaguu

SEQ ID NO: 18395 - RNA, 12 nt, Artificial Sequence
  source: /note="Description of Artificial Sequence: Synthetic oligonucleotide"
  source: /note="RNA"
  modified_base (1)..(1): 5-methyl bicyclic nucleic acid
  modified_base (2)..(2): bicyclic nucleic acid (BNA)
  modified_base (5)..(5): 5-methyl modified nucleotide
  source: /note="3' tri-ethylene glycol (TEG)"
cagucgguaagu

SEQ ID NO: 18396 - RNA, 20 nt, Artificial Sequence
  source: /note="Description of Artificial Sequence: Synthetic oligonucleotide"
  source: /note="RNA"
  modified_base (1)..(1): 5-methyl bicyclic nucleic acid
  modified_base (2)..(2): 5-methyl bicyclic nucleic acid
  modified_base (6)..(6): 5-methyl modified nucleotide
  modified_base (15)..(15): 5-methyl modified nucleotide
  modified_base (19)..(19): 5-methyl modified nucleotide
  modified_base (20)..(20): 5-methyl modified nucleotide
  source: /note="3' tri-ethylene glycol (TEG)"
ccagucgguaaguucugucc

SEQ ID NO: 18397 - RNA, 19 nt, Artificial Sequence
  source: /note="Description of Artificial Sequence: Synthetic oligonucleotide"
  source: /note="RNA"
  modified_base (1)..(1): 5-methyl bicyclic nucleic acid
  modified_base (2)..(2): 5-methyl bicyclic nucleic acid
  modified_base (6)..(6): 5-methyl modified nucleotide
  modified_base (15)..(15): 5-methyl modified nucleotide
  modified_base (19)..(19): 5-methyl modified nucleotide
  source: /note="3' tri-ethylene glycol (TEG)"
ccagucgguaaguucuguc

SEQ ID NO: 18398 - RNA, 18 nt, Artificial Sequence
  source: /note="Description of Artificial Sequence: Synthetic oligonucleotide"
  source: /note="RNA"
  modified_base (1)..(1): 5-methyl bicyclic nucleic acid
  modified_base (2)..(2): 5-methyl bicyclic nucleic acid
  modified_base (6)..(6): 5-methyl modified nucleotide
  modified_base (15)..(15): 5-methyl modified nucleotide
  source: /note="3' tri-ethylene glycol (TEG)"
ccagucgguaaguucugu

SEQ ID NO: 18399 - RNA, 17 nt, Artificial Sequence
  source: /note="Description of Artificial Sequence: Synthetic oligonucleotide"
  source: /note="RNA"
  modified_base (1)..(1): 5-methyl bicyclic nucleic acid
  modified_base (2)..(2): 5-methyl bicyclic nucleic acid
  modified_base (6)..(6): 5-methyl modified nucleotide
  modified_base (15)..(15): 5-methyl modified nucleotide
  source: /note="3' tri-ethylene glycol (TEG)"
ccagucgguaaguucug

SEQ ID NO: 18400 - RNA, 16 nt, Artificial Sequence
  source: /note="Description of Artificial Sequence: Synthetic oligonucleotide"
  source: /note="RNA"
  modified_base (1)..(1): 5-methyl bicyclic nucleic acid
  modified_base (2)..(2): 5-methyl bicyclic nucleic acid
  modified_base (6)..(6): 5-methyl modified nucleotide
  modified_base (15)..(15): 5-methyl modified nucleotide
  source: /note="3' tri-ethylene glycol (TEG)"
ccagucgguaaguucu

SEQ ID NO: 18401 - RNA, 15 nt, Artificial Sequence
  source: /note="Description of Artificial Sequence: Synthetic oligonucleotide"
  source: /note="RNA"
  modified_base (1)..(1): 5-methyl bicyclic nucleic acid
  modified_base (2)..(2): 5-methyl bicyclic nucleic acid
  modified_base (6)..(6): 5-methyl modified nucleotide
  modified_base (15)..(15): 5-methyl modified nucleotide
  source: /note="3' tri-ethylene glycol (TEG)"
ccagucgguaaguuc

SEQ ID NO: 18402 - RNA, 14 nt, Artificial Sequence
  source: /note="Description of Artificial Sequence: Synthetic oligonucleotide"
  source: /note="RNA"
  modified_base (1)..(1): 5-methyl bicyclic nucleic acid
  modified_base (2)..(2): 5-methyl bicyclic nucleic acid
  modified_base (6)..(6): 5-methyl modified nucleotide
  source: /note="3' tri-ethylene glycol (TEG)"
ccagucgguaaguu

SEQ ID NO: 18403 - RNA, 13 nt, Artificial Sequence
  source: /note="Description of Artificial Sequence: Synthetic oligonucleotide"
  source: /note="RNA"
  modified_base (1)..(1): 5-methyl bicyclic nucleic acid
  modified_base (2)..(2): 5-methyl bicyclic nucleic acid
  modified_base (6)..(6): 5-methyl modified nucleotide
  source: /note="3' tri-ethylene glycol (TEG)"
ccagucgguaagu

SEQ ID NO: 18404 - RNA, 20 nt, Artificial Sequence
  source: /note="Description of Artificial Sequence: Synthetic oligonucleotide"
  source: /note="RNA"
  modified_base (1)..(1): bicyclic nucleic acid (BNA)
  modified_base (2)..(2): 5-methyl bicyclic nucleic acid
  modified_base (3)..(3): 5-methyl modified nucleotide
  modified_base (7)..(7): 5-methyl modified nucleotide
  modified_base (16)..(16): 5-methyl modified nucleotide
  modified_base (20)..(20): 5-methyl modified nucleotide
  source: /note="3' tri-ethylene glycol (TEG)"
gccagucgguaaguucuguc

SEQ ID NO: 18405 - RNA, 19 nt, Artificial Sequence
  source: /note="Description of Artificial Sequence: Synthetic oligonucleotide"
  source: /note="RNA"
  modified_base (1)..(1): bicyclic nucleic acid (BNA)
  modified_base (2)..(2): 5-methyl bicyclic nucleic acid
  modified_base (3)..(3): 5-methyl modified nucleotide
  modified_base (7)..(7): 5-methyl modified nucleotide
  modified_base (16)..(16): 5-methyl modified nucleotide
  source: /note="3' tri-ethylene glycol (TEG)"
gccagucgguaaguucugu

SEQ ID NO: 18406 - RNA, 18 nt, Artificial Sequence
  source: /note="Description of Artificial Sequence: Synthetic oligonucleotide"
  source: /note="RNA"
  modified_base (1)..(1): bicyclic nucleic acid (BNA)
  modified_base (2)..(2): 5-methyl bicyclic nucleic acid
  modified_base (3)..(3): 5-methyl modified nucleotide
  modified_base (7)..(7): 5-methyl modified nucleotide
  modified_base (16)..(16): 5-methyl modified nucleotide
  source: /note="3' tri-ethylene glycol (TEG)"
gccagucgguaaguucug

SEQ ID NO: 18407 - RNA, 17 nt, Artificial Sequence
  source: /note="Description of Artificial Sequence: Synthetic oligonucleotide"
  source: /note="RNA"
  modified_base (1)..(1): bicyclic nucleic acid (BNA)
  modified_base (2)..(2): 5-methyl bicyclic nucleic acid
  modified_base (3)..(3): 5-methyl modified nucleotide
  modified_base (7)..(7): 5-methyl modified nucleotide
  modified_base (16)..(16): 5-methyl modified nucleotide
  source: /note="3' tri-ethylene glycol (TEG)"
gccagucgguaaguucu

SEQ ID NO: 18408 - RNA, 16 nt, Artificial Sequence
  source: /note="Description of Artificial Sequence: Synthetic oligonucleotide"
  source: /note="RNA"
  modified_base (1)..(1): bicyclic nucleic acid (BNA)
  modified_base (2)..(2): 5-methyl bicyclic nucleic acid
  modified_base (3)..(3): 5-methyl modified nucleotide
  modified_base (7)..(7): 5-methyl modified nucleotide
  modified_base (16)..(16): 5-methyl modified nucleotide
  source: /note="3' tri-ethylene glycol (TEG)"
gccagucgguaaguuc

SEQ ID NO: 18409 - RNA, 15 nt, Artificial Sequence
  source: /note="Description of Artificial Sequence: Synthetic oligonucleotide"
  source: /note="RNA"
  modified_base (1)..(1): bicyclic nucleic acid (BNA)
  modified_base (2)..(2): 5-methyl bicyclic nucleic acid
  modified_base (3)..(3): 5-methyl modified nucleotide
  modified_base (7)..(7): 5-methyl modified nucleotide
  source: /note="3' tri-ethylene glycol (TEG)"
gccagucgguaaguu

SEQ ID NO: 18410 - RNA, 14 nt, Artificial Sequence
  source: /note="Description of Artificial Sequence: Synthetic oligonucleotide"
  source: /note="RNA"
  modified_base (1)..(1): bicyclic nucleic acid (BNA)
  modified_base (2)..(2): 5-methyl bicyclic nucleic acid
  modified_base (3)..(3): 5-methyl modified nucleotide
  modified_base (7)..(7): 5-methyl modified nucleotide
  source: /note="3' tri-ethylene glycol (TEG)"
gccagucgguaagu

SEQ ID NO: 18411 - DNA, 20 bp, Artificial Sequence
  source: /note="Description of Artificial Sequence: Synthetic oligonucleotide"
  source: /note="Description of Combined DNA/RNA Molecule: Synthetic oligonucleotide"
  source: /note="DNA/RNA"
  modified_base (1)..(1): bicyclic nucleic acid (BNA)
  modified_base (2)..(2): 5-methyl bicyclic nucleic acid
  modified_base (14)..(14): 5-methyl modified nucleotide
  modified_base (19)..(19): 5-methyl modified nucleotide
  source: /note="3' tri-ethylene glycol (TEG)"
tcaaggaagauggcauuucu

SEQ ID NO: 18412 - DNA, 22 bp, Artificial Sequence
  source: /note="Description of Artificial Sequence: Synthetic oligonucleotide"
  source: /note="Description of Combined DNA/RNA Molecule: Synthetic oligonucleotide"
  source: /note="DNA/RNA"
  modified_base (1)..(1): bicyclic nucleic acid (BNA)
  modified_base (2)..(2): 5-methyl bicyclic nucleic acid
  modified_base (14)..(14): 5-methyl modified nucleotide
  modified_base (19)..(19): 5-methyl modified nucleotide
  source: /note="3' tri-ethylene glycol (TEG)"
tcaaggaagauggcauuucuag

SEQ ID NO: 18413 - DNA, 16 bp, Artificial Sequence
  source: /note="Description of Artificial Sequence: Synthetic oligonucleotide"
  source: /note="Description of Combined DNA/RNA Molecule: Synthetic oligonucleotide"
  source: /note="DNA/RNA"
  modified_base (1)..(1): bicyclic nucleic acid (BNA)
  modified_base (2)..(2): 5-methyl bicyclic nucleic acid
  modified_base (14)..(14): 5-methyl modified nucleotide
  source: /note="3' tri-ethylene glycol (TEG)"
tcaaggaagauggcau

SEQ ID NO: 18414 - RNA, 15 nt, Artificial Sequence
  source: /note="Description of Artificial Sequence: Synthetic oligonucleotide"
  source: /note="RNA"
  modified_base (1)..(1): bicyclic nucleic acid (BNA)
  modified_base (2)..(2): bicyclic nucleic acid (BNA)
  modified_base (9)..(9): 5-methyl modified nucleotide
  modified_base (14)..(14): 5-methyl modified nucleotide
  source: /note="3' tri-ethylene glycol (TEG)"
gaagauggcauuucu

SEQ ID NO: 18415 - DNA, 21 bp, Artificial Sequence
  source: /note="Description of Artificial Sequence: Synthetic oligonucleotide"
  source: /note="Description of Combined DNA/RNA Molecule: Synthetic oligonucleotide"
  source: /note="DNA/RNA"
  modified_base (1)..(1): bicyclic nucleic acid (BNA)
  modified_base (2)..(2): 5-methyl bicyclic nucleic acid
  modified_base (14)..(14): 5-methyl modified nucleotide
  modified_base (19)..(19): 5-methyl modified nucleotide
  source: /note="3' tri-ethylene glycol (TEG)"
tcaaggaagauggcauuucua

SEQ ID NO: 18416 - DNA, 19 bp, Artificial Sequence
  source: /note="Description of Artificial Sequence: Synthetic oligonucleotide"
  source: /note="Description of Combined DNA/RNA Molecule: Synthetic oligonucleotide"
  source: /note="DNA/RNA"
  modified_base (1)..(1): bicyclic nucleic acid (BNA)
  modified_base (2)..(2): 5-methyl bicyclic nucleic acid
  modified_base (14)..(14): 5-methyl modified nucleotide
  modified_base (19)..(19): 5-methyl modified nucleotide
  source: /note="3' tri-ethylene glycol (TEG)"
tcaaggaagauggcauuuc

SEQ ID NO: 18417 - DNA, 18 bp, Artificial Sequence
  source: /note="Description of Artificial Sequence: Synthetic oligonucleotide"
  source: /note="Description of Combined DNA/RNA Molecule: Synthetic oligonucleotide"
  source: /note="DNA/RNA"
  modified_base (1)..(1): bicyclic nucleic acid (BNA)
  modified_base (2)..(2): 5-methyl bicyclic nucleic acid
  modified_base (14)..(14): 5-methyl modified nucleotide
  source: /note="3' tri-ethylene glycol (TEG)"
tcaaggaagauggcauuu

SEQ ID NO: 18418 - DNA, 17 bp, Artificial Sequence
  source: /note="Description of Artificial Sequence: Synthetic oligonucleotide"
  source: /note="Description of Combined DNA/RNA Molecule: Synthetic oligonucleotide"
  source: /note="DNA/RNA"
  modified_base (1)..(1): bicyclic nucleic acid (BNA)
  modified_base (2)..(2): 5-methyl bicyclic nucleic acid
  modified_base (14)..(14): 5-methyl modified nucleotide
  source: /note="3' tri-ethylene glycol (TEG)"
tcaaggaagauggcauu

SEQ ID NO: 18419 - DNA, 15 bp, Artificial Sequence
  source: /note="Description of Artificial Sequence: Synthetic oligonucleotide"
  source: /note="Description of Combined DNA/RNA Molecule: Synthetic oligonucleotide"
  source: /note="DNA/RNA"
  modified_base (1)..(1): bicyclic nucleic acid (BNA)
  modified_base (2)..(2): 5-methyl bicyclic nucleic acid
  modified_base (14)..(14): 5-methyl modified nucleotide
  source: /note="3' tri-ethylene glycol (TEG)"
tcaaggaagauggca

SEQ ID NO: 18420 - DNA, 14 bp, Artificial Sequence
  source: /note="Description of Artificial Sequence: Synthetic oligonucleotide"
  source: /note="Description of Combined DNA/RNA Molecule: Synthetic oligonucleotide"
  source: /note="DNA/RNA"
  modified_base (1)..(1): bicyclic nucleic acid (BNA)
  modified_base (2)..(2): 5-methyl bicyclic nucleic acid
  modified_base (14)..(14): 5-methyl modified nucleotide
  source: /note="3' tri-ethylene glycol (TEG)"
tcaaggaagauggc

SEQ ID NO: 18421 - DNA, 13 bp, Artificial Sequence
  source: /note="Description of Artificial Sequence: Synthetic oligonucleotide"
  source: /note="Description of Combined DNA/RNA Molecule: Synthetic oligonucleotide"
  source: /note="DNA/RNA"
  modified_base (1)..(1): bicyclic nucleic acid (BNA)
  modified_base (2)..(2): 5-methyl bicyclic nucleic acid
  source: /note="3' tri-ethylene glycol (TEG)"
tcaaggaagaugg

SEQ ID NO: 18422 - DNA, 12 bp, Artificial Sequence
  source: /note="Description of Artificial Sequence: Synthetic oligonucleotide"
  source: /note="Description of Combined DNA/RNA Molecule: Synthetic oligonucleotide"
  source: /note="DNA/RNA"
  modified_base (1)..(1): bicyclic nucleic acid (BNA)
  modified_base (2)..(2): 5-methyl bicyclic nucleic acid
  source: /note="3' tri-ethylene glycol (TEG)"
tcaaggaagaug

SEQ ID NO: 18423 - DNA, 11 bp, Artificial Sequence
  source: /note="Description of Artificial Sequence: Synthetic oligonucleotide"
  source: /note="Description of Combined DNA/RNA Molecule: Synthetic oligonucleotide"
  source: /note="DNA/RNA"
  modified_base (1)..(1): bicyclic nucleic acid (BNA)
  modified_base (2)..(2): 5-methyl bicyclic nucleic acid
  source: /note="3' tri-ethylene glycol (TEG)"
tcaaggaagau

SEQ ID NO: 18424 - DNA, 10 bp, Artificial Sequence
  source: /note="Description of Artificial Sequence: Synthetic oligonucleotide"
  source: /note="DNA/RNA"
  modified_base (1)..(1): bicyclic nucleic acid (BNA)
  modified_base (2)..(2): 5-methyl bicyclic nucleic acid
  source: /note="3' tri-ethylene glycol (TEG)"
tcaaggaaga

SEQ ID NO: 18425 - DNA, 9 bp, Artificial Sequence
  source: /note="Description of Artificial Sequence: Synthetic oligonucleotide"
  source: /note="DNA/RNA"
  modified_base (1)..(1): bicyclic nucleic acid (BNA)
  modified_base (2)..(2): 5-methyl bicyclic nucleic acid
  source: /note="3' tri-ethylene glycol (TEG)"
tcaaggaag

SEQ ID NO: 18426 - RNA, 21 nt, Artificial Sequence
  source: /note="Description of Artificial Sequence: Synthetic oligonucleotide"
  source: /note="RNA"
  modified_base (1)..(1): 5-methyl bicyclic nucleic acid
  modified_base (2)..(2): bicyclic nucleic acid (BNA)
  modified_base (13)..(13): 5-methyl modified nucleotide
  modified_base (18)..(18): 5-methyl modified nucleotide
  source: /note="3' tri-ethylene glycol (TEG)"
caaggaagauggcauuucuag

SEQ ID NO: 18427 - RNA, 20 nt, Artificial Sequence
  source: /note="Description of Artificial Sequence: Synthetic oligonucleotide"
  source: /note="RNA"
  modified_base (1)..(1): 5-methyl bicyclic nucleic acid
  modified_base (2)..(2): bicyclic nucleic acid (BNA)
  modified_base (13)..(13): 5-methyl modified nucleotide
  modified_base (18)..(18): 5-methyl modified nucleotide
  source: /note="3' tri-ethylene glycol (TEG)"
caaggaagauggcauuucua

SEQ ID NO: 18428 - RNA, 19 nt, Artificial Sequence
  source: /note="Description of Artificial Sequence: Synthetic oligonucleotide"
  source: /note="RNA"
  modified_base (1)..(1): 5-methyl bicyclic nucleic acid
  modified_base (2)..(2): bicyclic nucleic acid (BNA)
  modified_base (13)..(13): 5-methyl modified nucleotide
  modified_base (18)..(18): 5-methyl modified nucleotide
  source: /note="3' tri-ethylene glycol (TEG)"
caaggaagauggcauuucu

SEQ ID NO: 18429 - RNA, 18 nt, Artificial Sequence
  source: /note="Description of Artificial Sequence: Synthetic oligonucleotide"
  source: /note="RNA"
  modified_base (1)..(1): 5-methyl bicyclic nucleic acid
  modified_base (2)..(2): bicyclic nucleic acid (BNA)
  modified_base (13)..(13): 5-methyl modified nucleotide
  modified_base (18)..(18): 5-methyl modified nucleotide
  source: /note="3' tri-ethylene glycol (TEG)"
caaggaagauggcauuuc

SEQ ID NO: 18430 - RNA, 17 nt, Artificial Sequence
  source: /note="Description of Artificial Sequence: Synthetic oligonucleotide"
  source: /note="RNA"
  modified_base (1)..(1): 5-methyl bicyclic nucleic acid
  modified_base (2)..(2): bicyclic nucleic acid (BNA)
  modified_base (13)..(13): 5-methyl modified nucleotide
  source: /note="3' tri-ethylene glycol (TEG)"
caaggaagauggcauuu

SEQ ID NO: 18431 - RNA, 16 nt, Artificial Sequence
  source: /note="Description of Artificial Sequence: Synthetic oligonucleotide"
  source: /note="RNA"
  modified_base (1)..(1): 5-methyl bicyclic nucleic acid
  modified_base (2)..(2): bicyclic nucleic acid (BNA)
  modified_base (13)..(13): 5-methyl modified nucleotide
  source: /note="3' tri-ethylene glycol (TEG)"
caaggaagauggcauu

SEQ ID NO: 18432 - RNA, 15 nt, Artificial Sequence
  source: /note="Description of Artificial Sequence: Synthetic oligonucleotide"
  source: /note="RNA"
  modified_base (1)..(1): 5-methyl bicyclic nucleic acid
  modified_base (2)..(2): bicyclic nucleic acid (BNA)
  modified_base (13)..(13): 5-methyl modified nucleotide
  source: /note="3' tri-ethylene glycol (TEG)"
caaggaagauggcau

SEQ ID NO: 18433 - RNA, 14 nt, Artificial Sequence
  source: /note="Description of Artificial Sequence: Synthetic oligonucleotide"
  source: /note="RNA"
  modified_base (1)..(1): 5-methyl bicyclic nucleic acid
  modified_base (2)..(2): bicyclic nucleic acid (BNA)
  modified_base (13)..(13): 5-methyl modified nucleotide
  source: /note="3' tri-ethylene glycol (TEG)"
caaggaagauggca

SEQ ID NO: 18434 - RNA, 13 nt, Artificial Sequence
  source: /note="Description of Artificial Sequence: Synthetic oligonucleotide"
  source: /note="RNA"
  modified_base (1)..(1): 5-methyl bicyclic nucleic acid
  modified_base (2)..(2): bicyclic nucleic acid (BNA)
  modified_base (13)..(13): 5-methyl modified nucleotide
  source: /note="3' tri-ethylene glycol (TEG)"
caaggaagauggc

SEQ ID NO: 18435 - RNA, 12 nt, Artificial Sequence
  source: /note="Description of Artificial Sequence: Synthetic oligonucleotide"
  source: /note="RNA"
  modified_base (1)..(1): 5-methyl bicyclic nucleic acid
  modified_base (2)..(2): bicyclic nucleic acid (BNA)
  source: /note="3' tri-ethylene glycol (TEG)"
caaggaagaugg

SEQ ID NO: 18436 - RNA, 11 nt, Artificial Sequence
  source: /note="Description of Artificial Sequence: Synthetic oligonucleotide"
  source: /note="RNA"
  modified_base (1)..(1): 5-methyl bicyclic nucleic acid
  modified_base (2)..(2): bicyclic nucleic acid (BNA)
  source: /note="3' tri-ethylene glycol (TEG)"
caaggaagaug

SEQ ID NO: 18437 - RNA, 10 nt, Artificial Sequence
  source: /note="Description of Artificial Sequence: Synthetic oligonucleotide"
  source: /note="RNA"
  modified_base (1)..(1): 5-methyl bicyclic nucleic acid
  modified_base (2)..(2): bicyclic nucleic acid (BNA)
  source: /note="3' tri-ethylene glycol (TEG)"
caaggaagau

SEQ ID NO: 18438 - RNA, 9 nt, Artificial Sequence
  source: /note="Description of Artificial Sequence: Synthetic oligonucleotide"
  source: /note="RNA/Antisense Oligonucleotide"
  modified_base (1)..(1): 5-methyl bicyclic nucleic acid
  modified_base (2)..(2): bicyclic nucleic acid (BNA)
  source: /note="3' tri-ethylene glycol (TEG)"
caaggaaga

SEQ ID NO: 18439 - RNA, 8 nt, Artificial Sequence
  source: /note="Description of Artificial Sequence: Synthetic oligonucleotide"
  source: /note="RNA/Antisense Oligonucleotide"
  modified_base (1)..(1): 5-methyl bicyclic nucleic acid
  modified_base (2)..(2): bicyclic nucleic acid (BNA)
  source: /note="3' tri-ethylene glycol (TEG)"
caaggaag

SEQ ID NO: 18440 - RNA, 20 nt, Artificial Sequence
  source: /note="Description of Artificial Sequence: Synthetic oligonucleotide"
  source: /note="RNA"
  modified_base (1)..(1): bicyclic nucleic acid (BNA)
  modified_base (2)..(2): bicyclic nucleic acid (BNA)
  modified_base (12)..(12): 5-methyl modified nucleotide
  modified_base (17)..(17): 5-methyl modified nucleotide
  source: /note="3' tri-ethylene glycol (TEG)"
aaggaagauggcauuucuag

SEQ ID NO: 18441 - RNA, 19 nt, Artificial Sequence
  source: /note="Description of Artificial Sequence: Synthetic oligonucleotide"
  source: /note="RNA"
  modified_base (1)..(1): bicyclic nucleic acid (BNA)
  modified_base (2)..(2): bicyclic nucleic acid (BNA)
  modified_base (12)..(12): 5-methyl modified nucleotide
  modified_base (17)..(17): 5-methyl modified nucleotide
  source: /note="3' tri-ethylene glycol (TEG)"
aaggaagauggcauuucua

SEQ ID NO: 18442 - RNA, 18 nt, Artificial Sequence
  source: /note="Description of Artificial Sequence: Synthetic oligonucleotide"
  source: /note="RNA"
  modified_base (1)..(1): bicyclic nucleic acid (BNA)
  modified_base (2)..(2): bicyclic nucleic acid (BNA)
  modified_base (12)..(12): 5-methyl modified nucleotide
  modified_base (17)..(17): 5-methyl modified nucleotide
  source: /note="3' tri-ethylene glycol (TEG)"
aaggaagauggcauuucu

SEQ ID NO: 18443 - RNA, 17 nt, Artificial Sequence
  source: /note="Description of Artificial Sequence: Synthetic oligonucleotide"
  source: /note="RNA"
  modified_base (1)..(1): bicyclic nucleic acid (BNA)
  modified_base (2)..(2): bicyclic nucleic acid (BNA)
  modified_base (12)..(12): 5-methyl modified nucleotide
  modified_base (17)..(17): 5-methyl modified nucleotide
  source: /note="3' tri-ethylene glycol (TEG)"
aaggaagauggcauuuc

SEQ ID NO: 18444 - RNA, 16 nt, Artificial Sequence
  source: /note="Description of Artificial Sequence: Synthetic oligonucleotide"
  source: /note="RNA"
  modified_base (1)..(1): bicyclic nucleic acid (BNA)
  modified_base (2)..(2): bicyclic nucleic acid (BNA)
  modified_base (12)..(12): 5-methyl modified nucleotide
  source: /note="3' tri-ethylene glycol (TEG)"
aaggaagauggcauuu

SEQ ID NO: 18445 - RNA, 15 nt, Artificial Sequence
  source: /note="Description of Artificial Sequence: Synthetic oligonucleotide"
  source: /note="RNA"
  modified_base (1)..(1): bicyclic nucleic acid (BNA)
  modified_base (2)..(2): bicyclic nucleic acid (BNA)
  modified_base (12)..(12): 5-methyl modified nucleotide
  source: /note="3' tri-ethylene glycol (TEG)"
aaggaagauggcauu

SEQ ID NO: 18446 - RNA, 14 nt, Artificial Sequence
  source: /note="Description of Artificial Sequence: Synthetic oligonucleotide"
  source: /note="RNA"
  modified_base (1)..(1): bicyclic nucleic acid (BNA)
  modified_base (2)..(2): bicyclic nucleic acid (BNA)
  modified_base (12)..(12): 5-methyl modified nucleotide
  source: /note="3' tri-ethylene glycol (TEG)"
aaggaagauggcau

SEQ ID NO: 18447 - RNA, 13 nt, Artificial Sequence
  source: /note="Description of Artificial Sequence: Synthetic oligonucleotide"
  source: /note="RNA"
  modified_base (1)..(1): bicyclic nucleic acid (BNA)
  modified_base (2)..(2): bicyclic nucleic acid (BNA)
  modified_base (12)..(12): 5-methyl modified nucleotide
  source: /note="3' tri-ethylene glycol (TEG)"
aaggaagauggca

SEQ ID NO: 18448 - RNA, 12 nt, Artificial Sequence
  source: /note="Description of Artificial Sequence: Synthetic oligonucleotide"
  source: /note="RNA"
  modified_base (1)..(1): bicyclic nucleic acid (BNA)
  modified_base (2)..(2): bicyclic nucleic acid (BNA)
  modified_base (12)..(12): 5-methyl modified nucleotide
  source: /note="3' tri-ethylene glycol (TEG)"
aaggaagauggc

SEQ ID NO: 18449 - RNA, 11 nt, Artificial Sequence
  source: /note="Description of Artificial Sequence: Synthetic oligonucleotide"
  source: /note="RNA"
  modified_base (1)..(1): bicyclic nucleic acid (BNA)
  modified_base (2)..(2): bicyclic nucleic acid (BNA)
  source: /note="3' tri-ethylene glycol (TEG)"
aaggaagaugg

SEQ ID NO: 18450 - RNA, 10 nt, Artificial Sequence
  source: /note="Description of Artificial Sequence: Synthetic oligonucleotide"
  source: /note="RNA"
  modified_base (1)..(1): bicyclic nucleic acid (BNA)
  modified_base (2)..(2): bicyclic nucleic acid (BNA)
  source: /note="3' tri-ethylene glycol (TEG)"
aaggaagaug

SEQ ID NO: 18451 - RNA, 9 nt, Artificial Sequence
  source: /note="Description of Artificial Sequence: Synthetic oligonucleotide"
  source: /note="RNA"
  modified_base (1)..(1): bicyclic nucleic acid (BNA)
  modified_base (2)..(2): bicyclic nucleic acid (BNA)
  source: /note="3' tri-ethylene glycol (TEG)"
aaggaagau

SEQ ID NO: 18452 - RNA, 8 nt, Artificial Sequence
  source: /note="Description of Artificial Sequence: Synthetic oligonucleotide"
  source: /note="RNA/Antisense Oligonucleotide"
  modified_base (1)..(1): bicyclic nucleic acid (BNA)
  modified_base (2)..(2): bicyclic nucleic acid (BNA)
  source: /note="3' tri-ethylene glycol (TEG)"
aaggaaga

SEQ ID NO: 18453 - RNA, 19 nt, Artificial Sequence
  source: /note="Description of Artificial Sequence: Synthetic oligonucleotide"
  source: /note="RNA"
  modified_base (1)..(1): bicyclic nucleic acid (BNA)
  modified_base (2)..(2): bicyclic nucleic acid (BNA)
  modified_base (11)..(11): 5-methyl modified nucleotide
  modified_base (16)..(16): 5-methyl modified nucleotide
  source: /note="3' tri-ethylene glycol (TEG)"
aggaagauggcauuucuag

SEQ ID NO: 18454 - RNA, 18 nt, Artificial Sequence
  source: /note="Description of Artificial Sequence: Synthetic oligonucleotide"
  source: /note="RNA"
  modified_base (1)..(1): bicyclic nucleic acid (BNA)
  modified_base (2)..(2): bicyclic nucleic acid (BNA)
  modified_base (11)..(11): 5-methyl modified nucleotide
  modified_base (16)..(16): 5-methyl modified nucleotide
  source: /note="3' tri-ethylene glycol (TEG)"
aggaagauggcauuucua

SEQ ID NO: 18455 - RNA, 17 nt, Artificial Sequence
  source: /note="Description of Artificial Sequence: Synthetic oligonucleotide"
  source: /note="RNA"
  modified_base (1)..(1): bicyclic nucleic acid (BNA)
  modified_base (2)..(2): bicyclic nucleic acid (BNA)
  modified_base (11)..(11): 5-methyl modified nucleotide
  modified_base (16)..(16): 5-methyl modified nucleotide
  source: /note="3' tri-ethylene glycol (TEG)"
aggaagauggcauuucu

SEQ ID NO: 18456 - RNA, 16 nt, Artificial Sequence
  source: /note="Description of Artificial Sequence: Synthetic oligonucleotide"
  source: /note="RNA"
  modified_base (1)..(1): bicyclic nucleic acid (BNA)
  modified_base (2)..(2): bicyclic nucleic acid (BNA)
  modified_base (11)..(11): 5-methyl modified nucleotide
  modified_base (16)..(16): 5-methyl modified nucleotide
  source: /note="3' tri-ethylene glycol (TEG)"
aggaagauggcauuuc

SEQ ID NO: 18457 - RNA, 15 nt, Artificial Sequence
  source: /note="Description of Artificial Sequence: Synthetic oligonucleotide"
  source: /note="RNA"
  modified_base (1)..(1): bicyclic nucleic acid (BNA)
  modified_base (2)..(2): bicyclic nucleic acid (BNA)
  modified_base (11)..(11): 5-methyl modified nucleotide
  source: /note="3' tri-ethylene glycol (TEG)"
aggaagauggcauuu

SEQ ID NO: 18458 - RNA, 14 nt, Artificial Sequence
  source: /note="Description of Artificial Sequence: Synthetic oligonucleotide"
  source: /note="RNA"
  modified_base (1)..(1): bicyclic nucleic acid (BNA)
  modified_base (2)..(2): bicyclic nucleic acid (BNA)
  modified_base (11)..(11): 5-methyl modified nucleotide
  source: /note="3' tri-ethylene glycol (TEG)"
aggaagauggcauu

SEQ ID NO: 18459 - RNA, 13 nt, Artificial Sequence
  source: /note="Description of Artificial Sequence: Synthetic oligonucleotide"
  source: /note="RNA"
  modified_base (1)..(1): bicyclic nucleic acid (BNA)
  modified_base (2)..(2): bicyclic nucleic acid (BNA)
  modified_base (11)..(11): 5-methyl modified nucleotide
  source: /note="3' tri-ethylene glycol (TEG)"
aggaagauggcau

SEQ ID NO: 18460 - RNA, 12 nt, Artificial Sequence
  source: /note="Description of Artificial Sequence: Synthetic oligonucleotide"
  source: /note="RNA"
  modified_base (1)..(1): bicyclic nucleic acid (BNA)
  modified_base (2)..(2): bicyclic nucleic acid (BNA)
  modified_base (11)..(11): 5-methyl modified nucleotide
  source: /note="3' tri-ethylene glycol (TEG)"
aggaagauggca

SEQ ID NO: 18461 - RNA, 10 nt, Artificial Sequence
  source: /note="Description of Artificial Sequence: Synthetic oligonucleotide"
  source: /note="RNA"
  modified_base (1)..(1): bicyclic nucleic acid (BNA)
  modified_base (2)..(2): bicyclic nucleic acid (BNA)
  source: /note="3' tri-ethylene glycol (TEG)"
aggaagaugg

SEQ ID NO: 18462 - RNA, 9 nt, Artificial Sequence
  source: /note="Description of Artificial Sequence: Synthetic oligonucleotide"
  source: /note="RNA"
  modified_base (1)..(1): bicyclic nucleic acid (BNA)
  modified_base (2)..(2): bicyclic nucleic acid (BNA)
  source: /note="3' tri-ethylene glycol (TEG)"
aggaagaug

SEQ ID NO: 18463 - RNA, 8 nt, Artificial Sequence
  source: /note="Description of Artificial Sequence: Synthetic oligonucleotide"
  source: /note="RNA"
  modified_base (1)..(1): bicyclic nucleic acid (BNA)
  modified_base (2)..(2): bicyclic nucleic acid (BNA)
  source: /note="3' tri-ethylene glycol (TEG)"
aggaagau

SEQ ID NO: 18464 - RNA, 18 nt, Artificial Sequence
  source: /note="Description of Artificial Sequence: Synthetic oligonucleotide"
  source: /note="RNA"
  modified_base (1)..(1): bicyclic nucleic acid (BNA)
  modified_base (2)..(2): bicyclic nucleic acid (BNA)
  modified_base (10)..(10): 5-methyl modified nucleotide
  modified_base (15)..(15): 5-methyl modified nucleotide
  source: /note="3' tri-ethylene glycol (TEG)"
ggaagauggcauuucuag

SEQ ID NO: 18465 - RNA, 17 nt, Artificial Sequence
  source: /note="Description of Artificial Sequence: Synthetic oligonucleotide"
  source: /note="RNA"
  modified_base (1)..(1): bicyclic nucleic acid (BNA)
  modified_base (2)..(2): bicyclic nucleic acid (BNA)
  modified_base (10)..(10): 5-methyl modified nucleotide
  modified_base (15)..(15): 5-methyl modified nucleotide
  source: /note="3' tri-ethylene glycol (TEG)"
ggaagauggcauuucua

SEQ ID NO: 18466 - RNA, 16 nt, Artificial Sequence
  source: /note="Description of Artificial Sequence: Synthetic oligonucleotide"
  source: /note="RNA"
  modified_base (1)..(1): bicyclic nucleic acid (BNA)
  modified_base (2)..(2): bicyclic nucleic acid (BNA)
  modified_base (10)..(10): 5-methyl modified nucleotide
  modified_base (15)..(15): 5-methyl modified nucleotide
  source: /note="3' tri-ethylene glycol (TEG)"
ggaagauggcauuucu

SEQ ID NO: 18467 - RNA, 15 nt, Artificial Sequence
  source: /note="Description of Artificial Sequence: Synthetic oligonucleotide"
  source: /note="RNA"
  modified_base (1)..(1): bicyclic nucleic acid (BNA)
  modified_base (2)..(2): bicyclic nucleic acid (BNA)
  modified_base (10)..(10): 5-methyl modified nucleotide
  modified_base (15)..(15): 5-methyl modified nucleotide
  source: /note="3' tri-ethylene glycol (TEG)"
ggaagauggcauuuc

SEQ ID NO: 18468 - RNA, 14 nt, Artificial Sequence
  source: /note="Description of Artificial Sequence: Synthetic oligonucleotide"
  source: /note="RNA"
  modified_base (1)..(1): bicyclic nucleic acid (BNA)
  modified_base (2)..(2): bicyclic nucleic acid (BNA)
  modified_base (10)..(10): 5-methyl modified nucleotide
  source: /note="3' tri-ethylene glycol (TEG)"
ggaagauggcauuu

SEQ ID NO: 18469 - RNA, 13 nt, Artificial Sequence
  source: /note="Description of Artificial Sequence: Synthetic oligonucleotide"
  source: /note="RNA"
  modified_base (1)..(1): bicyclic nucleic acid (BNA)
  modified_base (2)..(2): bicyclic nucleic acid (BNA)
  modified_base (10)..(10): 5-methyl modified nucleotide
  source: /note="3' tri-ethylene glycol (TEG)"
ggaagauggcauu

SEQ ID NO: 18470 - RNA, 12 nt, Artificial Sequence
  source: /note="Description of Artificial Sequence: Synthetic oligonucleotide"
  source: /note="RNA"
  modified_base (1)..(1): bicyclic nucleic acid (BNA)
  modified_base (2)..(2): bicyclic nucleic acid (BNA)
  modified_base (10)..(10): 5-methyl modified nucleotide
  source: /note="3' tri-ethylene glycol (TEG)"
ggaagauggcau

SEQ ID NO: 18471 - RNA, 11 nt, Artificial Sequence
  source: /note="Description of Artificial Sequence: Synthetic oligonucleotide"
  source: /note="RNA"
  modified_base (1)..(1): bicyclic nucleic acid (BNA)
  modified_base (2)..(2): bicyclic nucleic acid (BNA)
  modified_base (10)..(10): 5-methyl modified nucleotide
  source: /note="3' tri-ethylene glycol (TEG)"
ggaagauggca

SEQ ID NO: 18472 - RNA, 10 nt, Artificial Sequence
  source: /note="Description of Artificial Sequence: Synthetic oligonucleotide"
  source: /note="RNA"
  modified_base (1)..(1): bicyclic nucleic acid (BNA)
  modified_base (2)..(2): bicyclic nucleic acid (BNA)
  modified_base (10)..(10): 5-methyl modified nucleotide
  source: /note="3' tri-ethylene glycol (TEG)"
ggaagauggc

SEQ ID NO: 18473 - RNA, 8 nt, Artificial Sequence
  source: /note="Description of Artificial Sequence: Synthetic oligonucleotide"
  source: /note="RNA"
  modified_base (1)..(1): bicyclic nucleic acid (BNA)
  modified_base (2)..(2): bicyclic nucleic acid (BNA)
  source: /note="3' tri-ethylene glycol (TEG)"
ggaagaug

SEQ ID NO: 18474 - RNA, 17 nt, Artificial Sequence
  source: /note="Description of Artificial Sequence: Synthetic oligonucleotide"
  source: /note="RNA"
  modified_base (1)..(1): bicyclic nucleic acid (BNA)
  modified_base (2)..(2): bicyclic nucleic acid (BNA)
  modified_base (9)..(9): 5-methyl modified nucleotide
  modified_base (14)..(14): 5-methyl modified nucleotide
  source: /note="3' tri-ethylene glycol (TEG)"
gaagauggcauuucuag

SEQ ID NO: 18475 - RNA, 16 nt, Artificial Sequence
  source: /note="Description of Artificial Sequence: Synthetic oligonucleotide"
  source: /note="RNA"
  modified_base (1)..(1): bicyclic nucleic acid (BNA)
  modified_base (2)..(2): bicyclic nucleic acid (BNA)
  modified_base (9)..(9): 5-methyl modified nucleotide
  modified_base (14)..(14): 5-methyl modified nucleotide
  source: /note="3' tri-ethylene glycol (TEG)"
gaagauggcauuucua

SEQ ID NO: 18476 - RNA, 14 nt, Artificial Sequence
  source: /note="Description of Artificial Sequence: Synthetic oligonucleotide"
  source: /note="RNA"
  modified_base (1)..(1): bicyclic nucleic acid (BNA)
  modified_base (2)..(2): bicyclic nucleic acid (BNA)
  modified_base (9)..(9): 5-methyl modified nucleotide
  modified_base (14)..(14): 5-methyl modified nucleotide
  source: /note="3' tri-ethylene glycol (TEG)"
gaagauggcauuuc

SEQ ID NO: 18477 - RNA, 13 nt, Artificial Sequence
  source: /note="Description of Artificial Sequence: Synthetic oligonucleotide"
  source: /note="RNA"
  modified_base (1)..(1): bicyclic nucleic acid (BNA)
  modified_base (2)..(2): bicyclic nucleic acid (BNA)
  modified_base (9)..(9): 5-methyl modified nucleotide
  source: /note="3' tri-ethylene glycol (TEG)"
gaagauggcauuu

SEQ ID NO: 18478 - RNA, 12 nt, Artificial Sequence
  source: /note="Description of Artificial Sequence: Synthetic oligonucleotide"
  source: /note="RNA"
  modified_base (1)..(1): bicyclic nucleic acid (BNA)
  modified_base (2)..(2): bicyclic nucleic acid (BNA)
  modified_base (9)..(9): 5-methyl modified nucleotide
  source: /note="3' tri-ethylene glycol (TEG)"
gaagauggcauu

SEQ ID NO: 18479 - RNA, 11 nt, Artificial Sequence
  source: /note="Description of Artificial Sequence: Synthetic oligonucleotide"
  source: /note="RNA"
  modified_base (1)..(1): bicyclic nucleic acid (BNA)
  modified_base (2)..(2): bicyclic nucleic acid (BNA)
  modified_base (9)..(9): 5-methyl modified nucleotide
  source: /note="3' tri-ethylene glycol (TEG)"
gaagauggcau

SEQ ID NO: 18480 - RNA, 10 nt, Artificial Sequence
  source: /note="Description of Artificial Sequence: Synthetic oligonucleotide"
  source: /note="RNA"
  modified_base (1)..(1): bicyclic nucleic acid (BNA)
  modified_base (2)..(2): bicyclic nucleic acid (BNA)
  modified_base (9)..(9): 5-methyl modified nucleotide
  source: /note="3' tri-ethylene glycol (TEG)"
gaagauggca

SEQ ID NO: 18481 - RNA, 9 nt, Artificial Sequence
  source: /note="Description of Artificial Sequence: Synthetic oligonucleotide"
  source: /note="RNA"
  modified_base (1)..(1): bicyclic nucleic acid (BNA)
  modified_base (2)..(2): bicyclic nucleic acid (BNA)
  modified_base (9)..(9): 5-methyl modified nucleotide
  source: /note="3' tri-ethylene glycol (TEG)"
gaagauggc

SEQ ID NO: 18482 - RNA, 8 nt, Artificial Sequence
  source: /note="Description of Artificial Sequence: Synthetic oligonucleotide"
  source: /note="RNA"
  modified_base (1)..(1): bicyclic nucleic acid (BNA)
  modified_base (2)..(2): bicyclic nucleic acid (BNA)
  source: /note="3' tri-ethylene glycol (TEG)"
gaagaugg

SEQ ID NO: 18483 - RNA, 16 nt, Artificial Sequence
  source: /note="Description of Artificial Sequence: Synthetic oligonucleotide"
  source: /note="RNA"
  modified_base (1)..(1): bicyclic nucleic acid (BNA)
  modified_base (2)..(2): bicyclic nucleic acid (BNA)
  modified_base (8)..(8): 5-methyl modified nucleotide
  modified_base (13)..(13): 5-methyl modified nucleotide
  source: /note="3' tri-ethylene glycol (TEG)"
aagauggcauuucuag

SEQ ID NO: 18484 - RNA, 15 nt, Artificial Sequence
  source: /note="Description of Artificial Sequence: Synthetic oligonucleotide"
  source: /note="RNA"
  modified_base (1)..(1): bicyclic nucleic acid (BNA)
  modified_base (2)..(2): bicyclic nucleic acid (BNA)
  modified_base (8)..(8): 5-methyl modified nucleotide
  modified_base (13)..(13): 5-methyl modified nucleotide
  source: /note="3' tri-ethylene glycol (TEG)"
aagauggcauuucua

SEQ ID NO: 18485 - RNA, 14 nt, Artificial Sequence
  source: /note="Description of Artificial Sequence: Synthetic oligonucleotide"
  source: /note="RNA"
  modified_base (1)..(1): bicyclic nucleic acid (BNA)
  modified_base (2)..(2): bicyclic nucleic acid (BNA)
  modified_base (8)..(8): 5-methyl modified nucleotide
  modified_base (13)..(13): 5-methyl modified nucleotide
  source: /note="3' tri-ethylene glycol (TEG)"
aagauggcauuucu

SEQ ID NO: 18486 - RNA, 13 nt, Artificial Sequence
  source: /note="Description of Artificial Sequence: Synthetic oligonucleotide"
  source: /note="RNA"
  modified_base (1)..(1): bicyclic nucleic acid (BNA)
  modified_base (2)..(2): bicyclic nucleic acid (BNA)
  modified_base (8)..(8): 5-methyl modified nucleotide
  modified_base (13)..(13): 5-methyl modified nucleotide
  source: /note="3' tri-ethylene glycol (TEG)"
aagauggcauuuc

SEQ ID NO: 18487 - RNA, 12 nt, Artificial Sequence
  source: /note="Description of Artificial Sequence: Synthetic oligonucleotide"
  source: /note="RNA"
  modified_base (1)..(1): bicyclic nucleic acid (BNA)
  modified_base (2)..(2): bicyclic nucleic acid (BNA)
  modified_base (8)..(8): 5-methyl modified nucleotide
  source: /note="3' tri-ethylene glycol (TEG)"
aagauggcauuu

SEQ ID NO: 18488 - RNA, 11 nt, Artificial Sequence
  source: /note="Description of Artificial Sequence: Synthetic oligonucleotide"
  source: /note="RNA"
  modified_base (1)..(1): bicyclic nucleic acid (BNA)
  modified_base (2)..(2): bicyclic nucleic acid (BNA)
  modified_base (8)..(8): 5-methyl modified nucleotide
  source: /note="3' tri-ethylene glycol (TEG)"
aagauggcauu

SEQ ID NO: 18489 - RNA, 10 nt, Artificial Sequence
  source: /note="Description of Artificial Sequence: Synthetic oligonucleotide"
  source: /note="RNA"
  modified_base (1)..(1): bicyclic nucleic acid (BNA)
  modified_base (2)..(2): bicyclic nucleic acid (BNA)
  modified_base (8)..(8): 5-methyl modified nucleotide
  source: /note="3' tri-ethylene glycol (TEG)"
aagauggcau

SEQ ID NO: 18490 - RNA, 9 nt, Artificial Sequence
  source: /note="Description of Artificial Sequence: Synthetic oligonucleotide"
  source: /note="RNA"
  modified_base (1)..(1): bicyclic nucleic acid (BNA)
  modified_base (2)..(2): bicyclic nucleic acid (BNA)
  modified_base (8)..(8): 5-methyl modified nucleotide
  source: /note="3' tri-ethylene glycol (TEG)"
aagauggca

SEQ ID NO: 18491 - RNA, 8 nt, Artificial Sequence
  source: /note="Description of Artificial Sequence: Synthetic oligonucleotide"
  source: /note="RNA"
  modified_base (1)..(1): bicyclic nucleic acid (BNA)
  modified_base (2)..(2): bicyclic nucleic acid (BNA)
  modified_base (8)..(8): 5-methyl modified nucleotide
  source: /note="3' tri-ethylene glycol (TEG)"
aagauggc

SEQ ID NO: 18492 - RNA, 15 nt, Artificial Sequence
  source: /note="Description of Artificial Sequence: Synthetic oligonucleotide"
  source: /note="RNA"
  modified_base (1)..(1): bicyclic nucleic acid (BNA)
  modified_base (2)..(2): bicyclic nucleic acid (BNA)
  modified_base (7)..(7): 5-methyl modified nucleotide
  modified_base (12)..(12): 5-methyl modified nucleotide
  source: /note="3' tri-ethylene glycol (TEG)"
agauggcauuucuag

SEQ ID NO: 18493 - RNA, 14 nt, Artificial Sequence
  source: /note="Description of Artificial Sequence: Synthetic oligonucleotide"
  source: /note="RNA"
  modified_base (1)..(1): bicyclic nucleic acid (BNA)
  modified_base (2)..(2): bicyclic nucleic acid (BNA)
  modified_base (7)..(7): 5-methyl modified nucleotide
  modified_base (12)..(12): 5-methyl modified nucleotide
  source: /note="3' tri-ethylene glycol (TEG)"
agauggcauuucua

SEQ ID NO: 18494 - RNA, 13 nt, Artificial Sequence
  source: /note="Description of Artificial Sequence: Synthetic oligonucleotide"
  source: /note="RNA"
  modified_base (1)..(1): bicyclic nucleic acid (BNA)
  modified_base (2)..(2): bicyclic nucleic acid (BNA)
  modified_base (7)..(7): 5-methyl modified nucleotide
  modified_base (12)..(12): 5-methyl modified nucleotide
  source: /note="3' tri-ethylene glycol (TEG)"
agauggcauuucu

SEQ ID NO: 18495 - RNA, 12 nt, Artificial Sequence
  source: /note="Description of Artificial Sequence: Synthetic oligonucleotide"
  source: /note="RNA"
  modified_base (1)..(1): bicyclic nucleic acid (BNA)
  modified_base (2)..(2): bicyclic nucleic acid (BNA)
  modified_base (7)..(7): 5-methyl modified nucleotide
  modified_base (12)..(12): 5-methyl modified nucleotide
  source: /note="3' tri-ethylene glycol (TEG)"
agauggcauuuc

SEQ ID NO: 18496 - RNA, 11 nt, Artificial Sequence
  source: /note="Description of Artificial Sequence: Synthetic oligonucleotide"
  source: /note="RNA"
  modified_base (1)..(1): bicyclic nucleic acid (BNA)
  modified_base (2)..(2): bicyclic nucleic acid (BNA)
  modified_base (7)..(7): 5-methyl modified nucleotide
  source: /note="3' tri-ethylene glycol (TEG)"
agauggcauuu

SEQ ID NO: 18497 - RNA, 10 nt, Artificial Sequence
  source: /note="Description of Artificial Sequence: Synthetic oligonucleotide"
  source: /note="RNA"
  modified_base (1)..(1): bicyclic nucleic acid (BNA)
  modified_base (2)..(2): bicyclic nucleic acid (BNA)
  modified_base (7)..(7): 5-methyl modified nucleotide
  source: /note="3' tri-ethylene glycol (TEG)"
agauggcauu

SEQ ID NO: 18498 - RNA, 9 nt, Artificial Sequence
  source: /note="Description of Artificial Sequence: Synthetic oligonucleotide"
  source: /note="RNA"
  modified_base (1)..(1): bicyclic nucleic acid (BNA)
  modified_base (2)..(2): bicyclic nucleic acid (BNA)
  modified_base (7)..(7): 5-methyl modified nucleotide
  source: /note="3' tri-ethylene glycol (TEG)"
agauggcau

SEQ ID NO: 18499 - RNA, 8 nt, Artificial Sequence
  source: /note="Description of Artificial Sequence: Synthetic oligonucleotide"
  source: /note="RNA"
  modified_base (1)..(1): bicyclic nucleic acid (BNA)
  modified_base (2)..(2): bicyclic nucleic acid (BNA)
  modified_base (7)..(7): 5-methyl modified nucleotide
  source: /note="3' tri-ethylene glycol (TEG)"
agauggca

SEQ ID NO: 18500 - DNA, 30 bp, Artificial Sequence; identical to SEQ ID NO: 8204
  source: /note="Description of Artificial Sequence: Synthetic oligonucleotide"
  source: /note="Description of Combined DNA/RNA Molecule: Synthetic oligonucleotide"
  source: /note="DNA/RNA"
  modified_base (1)..(1): 5-methyl bicyclic nucleic acid
  modified_base (2)..(2): bicyclic nucleic acid (BNA)
  modified_base (3)..(3): 5-methyl modified nucleotide
  modified_base (4)..(4): 5-methyl modified nucleotide
  modified_base (7)..(7): 5-methyl modified nucleotide
  modified_base (10)..(10): 5-methyl modified nucleotide
  modified_base (22)..(22): 5-methyl modified nucleotide
  modified_base (27)..(27): 5-methyl modified nucleotide
  source: /note="3' tri-ethylene glycol (TEG)"

SEQ ID NO: 18501 - DNA, 29 bp, Artificial Sequence
  source: /note="Description of Artificial Sequence: Synthetic oligonucleotide"
  source: /note="Description of Combined DNA/RNA Molecule: Synthetic oligonucleotide"
  source: /note="DNA/RNA"
  modified_base (1)..(1): 5-methyl bicyclic nucleic acid
  modified_base (2)..(2): bicyclic nucleic acid (BNA)
  modified_base (3)..(3): 5-methyl modified nucleotide
  modified_base (4)..(4): 5-methyl modified nucleotide
  modified_base (7)..(7): 5-methyl modified nucleotide
  modified_base (10)..(10): 5-methyl modified nucleotide
  modified_base (22)..(22): 5-methyl modified nucleotide
  modified_base (27)..(27): 5-methyl modified nucleotide
  source: /note="3' tri-ethylene glycol (TEG)"
ctccaacaucaaggaagauggcauuucua

SEQ ID NO: 18502 - DNA, 28 bp, Artificial Sequence
  source: /note="Description of Artificial Sequence: Synthetic oligonucleotide"
  source: /note="Description of Combined DNA/RNA Molecule: Synthetic oligonucleotide"
  source: /note="DNA/RNA"
  modified_base (1)..(1): 5-methyl bicyclic nucleic acid
  modified_base (2)..(2): bicyclic nucleic acid (BNA)
  modified_base (3)..(3): 5-methyl modified nucleotide
  modified_base (4)..(4): 5-methyl modified nucleotide
  modified_base (7)..(7): 5-methyl modified nucleotide
  modified_base (10)..(10): 5-methyl modified nucleotide
  modified_base (22)..(22): 5-methyl modified nucleotide
  modified_base (27)..(27): 5-methyl modified nucleotide
  source: /note="3' tri-ethylene glycol (TEG)"
ctccaacaucaaggaagauggcauuucu

SEQ ID NO: 18503 - DNA, 27 bp, Artificial Sequence
  source: /note="Description of Artificial Sequence: Synthetic oligonucleotide"
  source: /note="Description of Combined DNA/RNA Molecule: Synthetic oligonucleotide"
  source: /note="DNA/RNA"
  modified_base (1)..(1): 5-methyl bicyclic nucleic acid
  modified_base (2)..(2): bicyclic nucleic acid (BNA)
  modified_base (3)..(3): 5-methyl modified nucleotide
  modified_base (4)..(4): 5-methyl modified nucleotide
  modified_base (7)..(7): 5-methyl modified nucleotide
  modified_base (10)..(10): 5-methyl modified nucleotide
  modified_base (22)..(22): 5-methyl modified nucleotide
  modified_base (27)..(27): 5-methyl modified nucleotide
  source: /note="3' tri-ethylene glycol (TEG)"
ctccaacaucaaggaagauggcauuuc

SEQ ID NO: 18504 - DNA, 26 bp, Artificial Sequence
  source: /note="Description of Artificial Sequence: Synthetic oligonucleotide"
  source: /note="Description of Combined DNA/RNA Molecule: Synthetic oligonucleotide"
  source: /note="DNA/RNA"
  modified_base (1)..(1): 5-methyl bicyclic nucleic acid
  modified_base (2)..(2): bicyclic nucleic acid (BNA)
  modified_base (3)..(3): 5-methyl modified nucleotide
  modified_base (4)..(4): 5-methyl modified nucleotide
  modified_base (7)..(7): 5-methyl modified nucleotide
  modified_base (10)..(10): 5-methyl modified nucleotide
  modified_base (22)..(22): 5-methyl modified nucleotide
  source: /note="3' tri-ethylene glycol (TEG)"
ctccaacaucaaggaagauggcauuu

SEQ ID NO: 18505 - DNA, 25 bp, Artificial Sequence
  source: /note="Description of Artificial Sequence: Synthetic oligonucleotide"
  source: /note="Description of Combined DNA/RNA Molecule: Synthetic oligonucleotide"
  source: /note="DNA/RNA"
  modified_base (1)..(1): 5-methyl bicyclic nucleic acid
  modified_base (2)..(2): bicyclic nucleic acid (BNA)
  modified_base (3)..(3): 5-methyl modified nucleotide
  modified_base (4)..(4): 5-methyl modified nucleotide
  modified_base (7)..(7): 5-methyl modified nucleotide
  modified_base (10)..(10): 5-methyl modified nucleotide
  modified_base (22)..(22): 5-methyl modified nucleotide
  source: /note="3' tri-ethylene glycol (TEG)"
ctccaacaucaaggaagauggcauu

SEQ ID NO: 18506 - DNA, 24 bp, Artificial Sequence
  source: /note="Description of Artificial Sequence: Synthetic oligonucleotide"
  source: /note="Description of Combined DNA/RNA Molecule: Synthetic oligonucleotide"
  source: /note="DNA/RNA"
  modified_base (1)..(1): 5-methyl bicyclic nucleic acid
  modified_base (2)..(2): bicyclic nucleic acid (BNA)
  modified_base (3)..(3): 5-methyl modified nucleotide
  modified_base (4)..(4): 5-methyl modified nucleotide
  modified_base (7)..(7): 5-methyl modified nucleotide
  modified_base (10)..(10): 5-methyl modified nucleotide
  modified_base (22)..(22): 5-methyl modified nucleotide
  source: /note="3' tri-ethylene glycol (TEG)"
ctccaacaucaaggaagauggcau

SEQ ID NO: 18507 - DNA, 23 bp, Artificial Sequence
  source: /note="Description of Artificial Sequence: Synthetic oligonucleotide"
  source: /note="Description of Combined DNA/RNA Molecule: Synthetic oligonucleotide"
  source: /note="DNA/RNA"
  modified_base (1)..(1): 5-methyl bicyclic nucleic acid
  modified_base (2)..(2): bicyclic nucleic acid (BNA)
  modified_base (3)..(3): 5-methyl modified nucleotide
  modified_base (4)..(4): 5-methyl modified nucleotide
  modified_base (7)..(7): 5-methyl modified nucleotide
  modified_base (10)..(10): 5-methyl modified nucleotide
  modified_base (22)..(22): 5-methyl modified nucleotide
  source: /note="3' tri-ethylene glycol (TEG)"
ctccaacaucaaggaagauggca

SEQ ID NO: 18508 - DNA, 22 bp, Artificial Sequence
  source: /note="Description of Artificial Sequence: Synthetic oligonucleotide"
  source: /note="Description of Combined DNA/RNA Molecule: Synthetic oligonucleotide"
  source: /note="DNA/RNA"
  modified_base (1)..(1): 5-methyl bicyclic nucleic acid
  modified_base (2)..(2): bicyclic nucleic acid (BNA)
  modified_base (3)..(3): 5-methyl modified nucleotide
  modified_base (4)..(4): 5-methyl modified nucleotide
  modified_base (7)..(7): 5-methyl modified nucleotide
  modified_base (10)..(10): 5-methyl modified nucleotide
  modified_base (22)..(22): 5-methyl modified nucleotide
  source: /note="3' tri-ethylene glycol (TEG)"
ctccaacaucaaggaagauggc

SEQ ID NO: 18509 - DNA, 21 bp, Artificial Sequence
  source: /note="Description of Artificial Sequence: Synthetic oligonucleotide"
  source: /note="Description of Combined DNA/RNA Molecule: Synthetic oligonucleotide"
  source: /note="DNA/RNA"
  modified_base (1)..(1): 5-methyl bicyclic nucleic acid
  modified_base (2)..(2): bicyclic nucleic acid (BNA)
  modified_base (3)..(3): 5-methyl modified nucleotide
  modified_base (4)..(4): 5-methyl modified nucleotide
  modified_base (7)..(7): 5-methyl modified nucleotide
  modified_base (10)..(10): 5-methyl modified nucleotide
  source: /note="3' tri-ethylene glycol (TEG)"
ctccaacaucaaggaagaugg

SEQ ID NO: 18510 - DNA, 20 bp, Artificial Sequence
  source: /note="Description of Artificial Sequence: Synthetic oligonucleotide"
  source: /note="Description of Combined DNA/RNA Molecule: Synthetic oligonucleotide"
  source: /note="DNA/RNA"
  modified_base (1)..(1): 5-methyl bicyclic nucleic acid
  modified_base (2)..(2): bicyclic nucleic acid (BNA)
  modified_base (3)..(3): 5-methyl modified nucleotide
  modified_base (4)..(4): 5-methyl modified nucleotide
  modified_base (7)..(7): 5-methyl modified nucleotide
  modified_base (10)..(10): 5-methyl modified nucleotide
  source: /note="3' tri-ethylene glycol (TEG)"
ctccaacaucaaggaagaug

SEQ ID NO: 18511 - DNA, 19 bp, Artificial Sequence
  source: /note="Description of Artificial Sequence: Synthetic oligonucleotide"
  source: /note="Description of Combined DNA/RNA Molecule: Synthetic oligonucleotide"
  source: /note="DNA/RNA"
  modified_base (1)..(1): 5-methyl bicyclic nucleic acid
  modified_base (2)..(2): bicyclic nucleic acid (BNA)
  modified_base (3)..(3): 5-methyl modified nucleotide
  modified_base (4)..(4): 5-methyl modified nucleotide
  modified_base (7)..(7): 5-methyl modified nucleotide
  modified_base (10)..(10): 5-methyl modified nucleotide
  source: /note="3' tri-ethylene glycol (TEG)"
ctccaacaucaaggaagau

SEQ ID NO: 18512 - DNA, 18 bp, Artificial Sequence
  source: /note="Description of Artificial Sequence: Synthetic oligonucleotide"
  source: /note="Description of Combined DNA/RNA Molecule: Synthetic oligonucleotide"
  source: /note="DNA/RNA"
  modified_base (1)..(1): 5-methyl bicyclic nucleic acid
  modified_base (2)..(2): bicyclic nucleic acid (BNA)
  modified_base (3)..(3): 5-methyl modified nucleotide
  modified_base (4)..(4): 5-methyl modified nucleotide
  modified_base (7)..(7): 5-methyl modified nucleotide
  modified_base (10)..(10): 5-methyl modified nucleotide
  source: /note="3' tri-ethylene glycol (TEG)"
ctccaacaucaaggaaga

SEQ ID NO: 18513 - DNA, 17 bp, Artificial Sequence
  source: /note="Description of Artificial Sequence: Synthetic oligonucleotide"
  source: /note="Description of Combined DNA/RNA Molecule: Synthetic oligonucleotide"
  source: /note="DNA/RNA"
  modified_base (1)..(1): 5-methyl bicyclic nucleic acid
  modified_base (2)..(2): bicyclic nucleic acid (BNA)
  modified_base (3)..(3): 5-methyl modified nucleotide
  modified_base (4)..(4): 5-methyl modified nucleotide
  modified_base (7)..(7): 5-methyl modified nucleotide
  modified_base (10)..(10): 5-methyl modified nucleotide
  source: /note="3' tri-ethylene glycol (TEG)"
ctccaacaucaaggaag

SEQ ID NO: 18514 - DNA, 29 bp, Artificial Sequence
  source: /note="Description of Artificial Sequence: Synthetic oligonucleotide"
  source: /note="Description of Combined DNA/RNA Molecule: Synthetic oligonucleotide"
  source: /note="DNA/RNA"
  modified_base (1)..(1): bicyclic nucleic acid (BNA)
  modified_base (2)..(2): 5-methyl bicyclic nucleic acid
  modified_base (3)..(3): 5-methyl modified nucleotide
  modified_base (6)..(6): 5-methyl modified nucleotide
  modified_base (9)..(9): 5-methyl modified nucleotide
  modified_base (21)..(21): 5-methyl modified nucleotide
  modified_base (26)..(26): 5-methyl modified nucleotide
  source: /note="3' tri-ethylene glycol (TEG)"
tccaacaucaaggaagauggcauuucuag

SEQ ID NO: 18515 - DNA, 28 bp, Artificial Sequence
  source: /note="Description of Artificial Sequence: Synthetic oligonucleotide"
  source: /note="Description of Combined DNA/RNA Molecule: Synthetic oligonucleotide"
  source: /note="DNA/RNA"
  modified_base (1)..(1): bicyclic nucleic acid (BNA)
  modified_base (2)..(2): 5-methyl bicyclic nucleic acid
  modified_base (3)..(3): 5-methyl modified nucleotide
  modified_base (6)..(6): 5-methyl modified nucleotide
  modified_base (9)..(9): 5-methyl modified nucleotide
  modified_base (21)..(21): 5-methyl modified nucleotide
  modified_base (26)..(26): 5-methyl modified nucleotide
  source: /note="3' tri-ethylene glycol (TEG)"
tccaacaucaaggaagauggcauuucua

SEQ ID NO: 18516 - DNA, 27 bp, Artificial Sequence
  source: /note="Description of Artificial Sequence: Synthetic oligonucleotide"
  source: /note="Description of Combined DNA/RNA Molecule: Synthetic oligonucleotide"
  source: /note="DNA/RNA"
  modified_base (1)..(1): bicyclic nucleic acid (BNA)
  modified_base (2)..(2): 5-methyl bicyclic nucleic acid
  modified_base (3)..(3): 5-methyl modified nucleotide
  modified_base (6)..(6): 5-methyl modified nucleotide
  modified_base (9)..(9): 5-methyl modified nucleotide
  modified_base (21)..(21): 5-methyl modified nucleotide
  modified_base (26)..(26): 5-methyl modified nucleotide
  source: /note="3' tri-ethylene glycol (TEG)"
tccaacaucaaggaagauggcauuucu

SEQ ID NO: 18517 - DNA, 26 bp, Artificial Sequence
  source: /note="Description of Artificial Sequence: Synthetic oligonucleotide"
  source: /note="Description of Combined DNA/RNA Molecule: Synthetic oligonucleotide"
  source: /note="DNA/RNA"
  modified_base (1)..(1): bicyclic nucleic acid (BNA)
  modified_base (2)..(2): 5-methyl bicyclic nucleic acid
  modified_base (3)..(3): 5-methyl modified nucleotide
  modified_base (6)..(6): 5-methyl modified nucleotide
  modified_base (9)..(9): 5-methyl modified nucleotide
  modified_base (21)..(21): 5-methyl modified nucleotide
  modified_base (26)..(26): 5-methyl modified nucleotide
  source: /note="3' tri-ethylene glycol (TEG)"
tccaacaucaaggaagauggcauuuc

SEQ ID NO: 18518 - DNA, 25 bp, Artificial Sequence
  source: /note="Description of Artificial Sequence: Synthetic oligonucleotide"
  source: /note="Description of Combined DNA/RNA Molecule: Synthetic oligonucleotide"
  source: /note="DNA/RNA"
  modified_base (1)..(1): bicyclic nucleic acid (BNA)
  modified_base (2)..(2): 5-methyl bicyclic nucleic acid
  modified_base (3)..(3): 5-methyl modified nucleotide
  modified_base (6)..(6): 5-methyl modified nucleotide
  modified_base (9)..(9): 5-methyl modified nucleotide
  modified_base (21)..(21): 5-methyl modified nucleotide
  source: /note="3' tri-ethylene glycol (TEG)"
tccaacaucaaggaagauggcauuu

SEQ ID NO: 18519 - DNA, 24 bp, Artificial Sequence
  source: /note="Description of Artificial Sequence: Synthetic oligonucleotide"
  source: /note="Description of Combined DNA/RNA Molecule: Synthetic oligonucleotide"
  source: /note="DNA/RNA"
  modified_base (1)..(1): bicyclic nucleic acid (BNA)
  modified_base (2)..(2): 5-methyl bicyclic nucleic acid
  modified_base (3)..(3): 5-methyl modified nucleotide
  modified_base (6)..(6): 5-methyl modified nucleotide
  modified_base (9)..(9): 5-methyl modified nucleotide
  modified_base (21)..(21): 5-methyl modified nucleotide
  source: /note="3' tri-ethylene glycol (TEG)"
tccaacaucaaggaagauggcauu

SEQ ID NO: 18520 - DNA, 23 bp, Artificial Sequence
  source: /note="Description of Artificial Sequence: Synthetic oligonucleotide"
  source: /note="Description of Combined DNA/RNA Molecule: Synthetic oligonucleotide"
  source: /note="DNA/RNA"
  modified_base (1)..(1): bicyclic nucleic acid (BNA)
  modified_base (2)..(2): 5-methyl bicyclic nucleic acid
  modified_base (3)..(3): 5-methyl modified nucleotide
  modified_base (6)..(6): 5-methyl modified nucleotide
  modified_base (9)..(9): 5-methyl modified nucleotide
  modified_base (21)..(21): 5-methyl modified nucleotide
  source: /note="3' tri-ethylene glycol (TEG)"
tccaacaucaaggaagauggcau

SEQ ID NO: 18521 - DNA, 22 bp, Artificial Sequence
  source: /note="Description of Artificial Sequence: Synthetic oligonucleotide"
  source: /note="Description of Combined DNA/RNA Molecule: Synthetic oligonucleotide"
  source: /note="DNA/RNA"
  modified_base (1)..(1): bicyclic nucleic acid (BNA)
  modified_base (2)..(2): 5-methyl bicyclic nucleic acid
  modified_base (3)..(3): 5-methyl modified nucleotide
  modified_base (6)..(6): 5-methyl modified nucleotide
  modified_base (9)..(9): 5-methyl modified nucleotide
  modified_base (21)..(21): 5-methyl modified nucleotide
  source: /note="3' tri-ethylene glycol (TEG)"
tccaacaucaaggaagauggca

SEQ ID NO: 18522 - DNA, 21 bp, Artificial Sequence
  source: /note="Description of Artificial Sequence: Synthetic oligonucleotide"
  source: /note="Description of Combined DNA/RNA Molecule: Synthetic oligonucleotide"
  source: /note="DNA/RNA"
  modified_base (1)..(1): bicyclic nucleic acid (BNA)
  modified_base (2)..(2): 5-methyl bicyclic nucleic acid
  modified_base (3)..(3): 5-methyl modified nucleotide
  modified_base (6)..(6): 5-methyl modified nucleotide
  modified_base (9)..(9): 5-methyl modified nucleotide
  modified_base (21)..(21): 5-methyl modified nucleotide
  source: /note="3' tri-ethylene glycol (TEG)"
tccaacaucaaggaagauggc

SEQ ID NO: 18523 - DNA, 20 bp, Artificial Sequence
  source: /note="Description of Artificial Sequence: Synthetic oligonucleotide"
  source: /note="Description of Combined DNA/RNA Molecule: Synthetic oligonucleotide"
  source: /note="DNA/RNA"
  modified_base (1)..(1): bicyclic nucleic acid (BNA)
  modified_base (2)..(2): 5-methyl bicyclic nucleic acid
  modified_base (3)..(3): 5-methyl modified nucleotide
  modified_base (6)..(6): 5-methyl modified nucleotide
  modified_base (9)..(9): 5-methyl modified nucleotide
  source: /note="3' tri-ethylene glycol (TEG)"
tccaacaucaaggaagaugg

SEQ ID NO: 18524 - DNA, 19 bp, Artificial Sequence
  source: /note="Description of Artificial Sequence: Synthetic oligonucleotide"
  source: /note="Description of Combined DNA/RNA Molecule: Synthetic oligonucleotide"
  source: /note="DNA/RNA"
  modified_base (1)..(1): bicyclic nucleic acid (BNA)
  modified_base (2)..(2): 5-methyl bicyclic nucleic acid
  modified_base (3)..(3): 5-methyl modified nucleotide
  modified_base (6)..(6): 5-methyl modified nucleotide
  modified_base (9)..(9): 5-methyl modified nucleotide
  source: /note="3' tri-ethylene glycol (TEG)"
tccaacaucaaggaagaug

SEQ ID NO: 18525 - DNA, 18 bp, Artificial Sequence
  source: /note="Description of Artificial Sequence: Synthetic oligonucleotide"
  source: /note="Description of Combined DNA/RNA Molecule: Synthetic oligonucleotide"
  source: /note="DNA/RNA"
  modified_base (1)..(1): bicyclic nucleic acid (BNA)
  modified_base (2)..(2): 5-methyl bicyclic nucleic acid
  modified_base (3)..(3): 5-methyl modified nucleotide
  modified_base (6)..(6): 5-methyl modified nucleotide
  modified_base (9)..(9): 5-methyl modified nucleotide
  source: /note="3' tri-ethylene glycol (TEG)"
tccaacaucaaggaagau

SEQ ID NO: 18526 - DNA, 17 bp, Artificial Sequence
  source: /note="Description of Artificial Sequence: Synthetic oligonucleotide"
  source: /note="Description of Combined DNA/RNA Molecule: Synthetic oligonucleotide"
  source: /note="DNA/RNA"
  modified_base (1)..(1): bicyclic nucleic acid (BNA)
  modified_base (2)..(2): 5-methyl bicyclic nucleic acid
  modified_base (3)..(3): 5-methyl modified nucleotide
  modified_base (6)..(6): 5-methyl modified nucleotide
  modified_base (9)..(9): 5-methyl modified nucleotide
  source: /note="3' tri-ethylene glycol (TEG)"
tccaacaucaaggaaga

SEQ ID NO: 18527 - DNA, 16 bp, Artificial Sequence
  source: /note="Description of Artificial Sequence: Synthetic oligonucleotide"
  source: /note="Description of Combined DNA/RNA Molecule: Synthetic oligonucleotide"
  source: /note="DNA/RNA"
  modified_base (1)..(1): bicyclic nucleic acid (BNA)
  modified_base (2)..(2): 5-methyl bicyclic nucleic acid
  modified_base (3)..(3): 5-methyl modified nucleotide
  modified_base (6)..(6): 5-methyl modified nucleotide
  modified_base (9)..(9): 5-methyl modified nucleotide
  source: /note="3' tri-ethylene glycol (TEG)"
tccaacaucaaggaag

SEQ ID NO: 18528 - RNA, 28 nt, Artificial Sequence
  source: /note="Description of Artificial Sequence: Synthetic oligonucleotide"
  source: /note="RNA"
  modified_base (1)..(1): 5-methyl bicyclic nucleic acid
  modified_base (2)..(2): 5-methyl bicyclic nucleic acid
  modified_base (5)..(5): 5-methyl modified nucleotide
  modified_base (8)..(8): 5-methyl modified nucleotide
  modified_base (20)..(20): 5-methyl modified nucleotide
  modified_base (25)..(25): 5-methyl modified nucleotide
  source: /note="3' tri-ethylene glycol (TEG)"
ccaacaucaaggaagauggcauuucuag

SEQ ID NO: 18529 - RNA, 27 nt, Artificial Sequence
  source: /note="Description of Artificial Sequence: Synthetic oligonucleotide"
  source: /note="RNA"
  modified_base (1)..(1): 5-methyl bicyclic nucleic acid
  modified_base (2)..(2): 5-methyl bicyclic nucleic acid
  modified_base (5)..(5): 5-methyl modified nucleotide
  modified_base (8)..(8): 5-methyl modified nucleotide
  modified_base (20)..(20): 5-methyl modified nucleotide
  modified_base (25)..(25): 5-methyl modified nucleotide
  source: /note="3' tri-ethylene glycol (TEG)"
ccaacaucaaggaagauggcauuucua

SEQ ID NO: 18530 - RNA, 26 nt, Artificial Sequence
  source: /note="Description of Artificial Sequence: Synthetic oligonucleotide"
  source: /note="RNA"
  modified_base (1)..(1): 5-methyl bicyclic nucleic acid
  modified_base (2)..(2): 5-methyl bicyclic nucleic acid
  modified_base (5)..(5): 5-methyl modified nucleotide
  modified_base (8)..(8): 5-methyl modified nucleotide
  modified_base (20)..(20): 5-methyl modified nucleotide
  modified_base (25)..(25): 5-methyl modified nucleotide
  source: /note="3' tri-ethylene glycol (TEG)"
ccaacaucaaggaagauggcauuucu

SEQ ID NO: 18531 - RNA, 25 nt, Artificial Sequence
  source: /note="Description of Artificial Sequence: Synthetic oligonucleotide"
  source: /note="RNA"
  modified_base (1)..(1): 5-methyl bicyclic nucleic acid
  modified_base (2)..(2): 5-methyl bicyclic nucleic acid
  modified_base (5)..(5): 5-methyl modified nucleotide
  modified_base (8)..(8): 5-methyl modified nucleotide
  modified_base (20)..(20): 5-methyl modified nucleotide
  modified_base (25)..(25): 5-methyl modified nucleotide
  source: /note="3' tri-ethylene glycol (TEG)"
ccaacaucaaggaagauggcauuuc

SEQ ID NO: 18532 - RNA, 24 nt, Artificial Sequence
  source: /note="Description of Artificial Sequence: Synthetic oligonucleotide"
  source: /note="RNA"
  modified_base (1)..(1): 5-methyl bicyclic nucleic acid
  modified_base (2)..(2): 5-methyl bicyclic nucleic acid
  modified_base (5)..(5): 5-methyl modified nucleotide
  modified_base (8)..(8): 5-methyl modified nucleotide
  modified_base (20)..(20): 5-methyl modified nucleotide
  source: /note="3' tri-ethylene glycol (TEG)"
ccaacaucaaggaagauggcauuu

SEQ ID NO: 18533 - RNA, 23 nt, Artificial Sequence
  source: /note="Description of Artificial Sequence: Synthetic oligonucleotide"
  source: /note="RNA"
  modified_base (1)..(1): 5-methyl bicyclic nucleic acid
  modified_base (2)..(2): 5-methyl bicyclic nucleic acid
  modified_base (5)..(5): 5-methyl modified nucleotide
  modified_base (8)..(8): 5-methyl modified nucleotide
  modified_base (20)..(20): 5-methyl modified nucleotide
  source: /note="3' tri-ethylene glycol (TEG)"
ccaacaucaaggaagauggcauu

SEQ ID NO: 18534 - RNA, 22 nt, Artificial Sequence
  source: /note="Description of Artificial Sequence: Synthetic oligonucleotide"
  source: /note="RNA"
  modified_base (1)..(1): 5-methyl bicyclic nucleic acid
  modified_base (2)..(2): 5-methyl bicyclic nucleic acid
  modified_base (5)..(5): 5-methyl modified nucleotide
  modified_base (8)..(8): 5-methyl modified nucleotide
  modified_base (20)..(20): 5-methyl modified nucleotide
  source: /note="3' tri-ethylene glycol (TEG)"
ccaacaucaaggaagauggcau

SEQ ID NO: 18535 - RNA, 21 nt, Artificial Sequence
  source: /note="Description of Artificial Sequence: Synthetic oligonucleotide"
  source: /note="RNA"
  modified_base (1)..(1): 5-methyl bicyclic nucleic acid
  modified_base (2)..(2): 5-methyl bicyclic nucleic acid
  modified_base (5)..(5): 5-methyl modified nucleotide
  modified_base (8)..(8): 5-methyl modified nucleotide
  modified_base (20)..(20): 5-methyl modified nucleotide
  source: /note="3' tri-ethylene glycol (TEG)"
ccaacaucaaggaagauggca

SEQ ID NO: 18536 - RNA, 20 nt, Artificial Sequence
  source: /note="Description of Artificial Sequence: Synthetic oligonucleotide"
  source: /note="RNA"
  modified_base (1)..(1): 5-methyl bicyclic nucleic acid
  modified_base (2)..(2): 5-methyl bicyclic nucleic acid
  modified_base (5)..(5): 5-methyl modified nucleotide
  modified_base (8)..(8): 5-methyl modified nucleotide
  modified_base (20)..(20): 5-methyl modified nucleotide
  source: /note="3' tri-ethylene glycol (TEG)"
ccaacaucaaggaagauggc

SEQ ID NO: 18537 - RNA, 19 nt, Artificial Sequence
  source: /note="Description of Artificial Sequence: Synthetic oligonucleotide"
  source: /note="RNA"
  modified_base (1)..(1): 5-methyl bicyclic nucleic acid
  modified_base (2)..(2): 5-methyl bicyclic nucleic acid
  modified_base (5)..(5): 5-methyl modified nucleotide
  modified_base (8)..(8): 5-methyl modified nucleotide
  source: /note="3' tri-ethylene glycol (TEG)"
ccaacaucaaggaagaugg

SEQ ID NO: 18538 - RNA, 18 nt, Artificial Sequence
  source: /note="Description of Artificial Sequence: Synthetic oligonucleotide"
  source: /note="RNA"
  modified_base (1)..(1): 5-methyl bicyclic nucleic acid
  modified_base (2)..(2): 5-methyl bicyclic nucleic acid
  modified_base (5)..(5): 5-methyl modified nucleotide
  modified_base (8)..(8): 5-methyl modified nucleotide
  source: /note="3' tri-ethylene glycol (TEG)"
ccaacaucaaggaagaug

SEQ ID NO: 18539 - RNA, 17 nt, Artificial Sequence
  source: /note="Description of Artificial Sequence: Synthetic oligonucleotide"
  source: /note="RNA"
  modified_base (1)..(1): 5-methyl bicyclic nucleic acid
  modified_base (2)..(2): 5-methyl bicyclic nucleic acid
  modified_base (5)..(5): 5-methyl modified nucleotide
  modified_base (8)..(8): 5-methyl modified nucleotide
  source: /note="3' tri-ethylene glycol (TEG)"
ccaacaucaaggaagau

SEQ ID NO: 18540 - RNA, 16 nt, Artificial Sequence
  source: /note="Description of Artificial Sequence: Synthetic oligonucleotide"
  source: /note="RNA"
  modified_base (1)..(1): 5-methyl bicyclic nucleic acid
  modified_base (2)..(2): 5-methyl bicyclic nucleic acid
  modified_base (5)..(5): 5-methyl modified nucleotide
  modified_base (8)..(8): 5-methyl modified nucleotide
  source: /note="3' tri-ethylene glycol (TEG)"
ccaacaucaaggaaga

SEQ ID NO: 18541 - RNA, 15 nt, Artificial Sequence
  source: /note="Description of Artificial Sequence: Synthetic oligonucleotide"
  source: /note="RNA"
  modified_base (1)..(1): 5-methyl bicyclic nucleic acid
  modified_base (2)..(2): 5-methyl bicyclic nucleic acid
  modified_base (5)..(5): 5-methyl modified nucleotide
  modified_base (8)..(8): 5-methyl modified nucleotide
  source: /note="3' tri-ethylene glycol (TEG)"
ccaacaucaaggaag

SEQ ID NO: 18542 - RNA, 27 nt, Artificial Sequence
  source: /note="Description of Artificial Sequence: Synthetic oligonucleotide"
  source: /note="RNA"
  modified_base (1)..(1): 5-methyl bicyclic nucleic acid
  modified_base (2)..(2): bicyclic nucleic acid (BNA)
  modified_base (4)..(4): 5-methyl modified nucleotide
  modified_base (7)..(7): 5-methyl modified nucleotide
  modified_base (19)..(19): 5-methyl modified nucleotide
  modified_base (24)..(24): 5-methyl modified nucleotide
  source: /note="3' tri-ethylene glycol (TEG)"
caacaucaaggaagauggcauuucuag

SEQ ID NO: 18543 - RNA, 26 nt, Artificial Sequence
  source: /note="Description of Artificial Sequence: Synthetic oligonucleotide"
  source: /note="RNA"
  modified_base (1)..(1): 5-methyl bicyclic nucleic acid
  modified_base (2)..(2): bicyclic nucleic acid (BNA)
  modified_base (4)..(4): 5-methyl modified nucleotide
  modified_base (7)..(7): 5-methyl modified nucleotide
  modified_base (19)..(19): 5-methyl modified nucleotide
  modified_base (24)..(24): 5-methyl modified nucleotide
  source: /note="3' tri-ethylene glycol (TEG)"
caacaucaaggaagauggcauuucua

SEQ ID NO: 18544 - RNA, 25 nt, Artificial Sequence
  source: /note="Description of Artificial Sequence: Synthetic oligonucleotide"
  source: /note="RNA"
  modified_base (1)..(1): 5-methyl bicyclic nucleic acid
  modified_base (2)..(2): bicyclic nucleic acid (BNA)
  modified_base (4)..(4): 5-methyl modified nucleotide
  modified_base (7)..(7): 5-methyl modified nucleotide
  modified_base (19)..(19): 5-methyl modified nucleotide
  modified_base (24)..(24): 5-methyl modified nucleotide
  source: /note="3' tri-ethylene glycol (TEG)"
caacaucaaggaagauggcauuucu

SEQ ID NO: 18545 - RNA, 24 nt, Artificial Sequence
  source: /note="Description of Artificial Sequence: Synthetic oligonucleotide"
  source: /note="RNA"
  modified_base (1)..(1): 5-methyl bicyclic nucleic acid
  modified_base (2)..(2): bicyclic nucleic acid (BNA)
  modified_base (4)..(4): 5-methyl modified nucleotide
  modified_base (7)..(7): 5-methyl modified nucleotide
  modified_base (19)..(19): 5-methyl modified nucleotide
  modified_base (24)..(24): 5-methyl modified nucleotide
  source: /note="3' tri-ethylene glycol (TEG)"
caacaucaaggaagauggcauuuc

SEQ ID NO: 18546 - RNA, 23 nt, Artificial Sequence
  source: /note="Description of Artificial Sequence: Synthetic oligonucleotide"
  source: /note="RNA"
  modified_base (1)..(1): 5-methyl bicyclic nucleic acid
  modified_base (2)..(2): bicyclic nucleic acid (BNA)
  modified_base (4)..(4): 5-methyl modified nucleotide
  modified_base (7)..(7): 5-methyl modified nucleotide
  modified_base (19)..(19): 5-methyl modified nucleotide
  source: /note="3' tri-ethylene glycol (TEG)"
caacaucaaggaagauggcauuu

SEQ ID NO: 18547 - RNA, 22 nt, Artificial Sequence
  source: /note="Description of Artificial Sequence: Synthetic oligonucleotide"
  source: /note="RNA"
  modified_base (1)..(1): 5-methyl bicyclic nucleic acid
  modified_base (2)..(2): bicyclic nucleic acid (BNA)
  modified_base (4)..(4): 5-methyl modified nucleotide
  modified_base (7)..(7): 5-methyl modified nucleotide
  modified_base (19)..(19): 5-methyl modified nucleotide
  source: /note="3' tri-ethylene glycol (TEG)"
caacaucaaggaagauggcauu

SEQ ID NO: 18548 - RNA, 21 nt, Artificial Sequence
  source: /note="Description of Artificial Sequence: Synthetic oligonucleotide"
  source: /note="RNA"
  modified_base (1)..(1): 5-methyl bicyclic nucleic acid
  modified_base (2)..(2): bicyclic nucleic acid (BNA)
  modified_base (4)..(4): 5-methyl modified nucleotide
  modified_base (7)..(7): 5-methyl modified nucleotide
  modified_base (19)..(19): 5-methyl modified nucleotide
  source: /note="3' tri-ethylene glycol (TEG)"
caacaucaaggaagauggcau

SEQ ID NO: 18549 - RNA, 20 nt, Artificial Sequence
  source: /note="Description of Artificial Sequence: Synthetic oligonucleotide"
  source: /note="RNA"
  modified_base (1)..(1): 5-methyl bicyclic nucleic acid
  modified_base (2)..(2): bicyclic nucleic acid (BNA)
  modified_base (4)..(4): 5-methyl modified nucleotide
  modified_base (7)..(7): 5-methyl modified nucleotide
  modified_base (19)..(19): 5-methyl modified nucleotide
  source: /note="3' tri-ethylene glycol (TEG)"
caacaucaaggaagauggca

SEQ ID NO: 18550 - RNA, 19 nt, Artificial Sequence
  source: /note="Description of Artificial Sequence: Synthetic oligonucleotide"
  source: /note="RNA"
  modified_base (1)..(1): 5-methyl bicyclic nucleic acid
  modified_base (2)..(2): bicyclic nucleic acid (BNA)
  modified_base (4)..(4): 5-methyl modified nucleotide
  modified_base (7)..(7): 5-methyl modified nucleotide
  modified_base (19)..(19): 5-methyl modified nucleotide
  source: /note="3' tri-ethylene glycol (TEG)"
caacaucaaggaagauggc

SEQ ID NO: 18551 - RNA, 18 nt, Artificial Sequence
  source: /note="Description of Artificial Sequence: Synthetic oligonucleotide"
  source: /note="RNA"
  modified_base (1)..(1): 5-methyl bicyclic nucleic acid
  modified_base (2)..(2): bicyclic nucleic acid (BNA)
  modified_base (4)..(4): 5-methyl modified nucleotide
  modified_base (7)..(7): 5-methyl modified nucleotide
  source: /note="3' tri-ethylene glycol (TEG)"
caacaucaaggaagaugg

SEQ ID NO: 18552 - RNA, 17 nt, Artificial Sequence
  source: /note="Description of Artificial Sequence: Synthetic oligonucleotide"
  source: /note="RNA"
  modified_base (1)..(1): 5-methyl bicyclic nucleic acid
  modified_base (2)..(2): bicyclic nucleic acid (BNA)
  modified_base (4)..(4): 5-methyl modified nucleotide
  modified_base (7)..(7): 5-methyl modified nucleotide
  source: /note="3' tri-ethylene glycol (TEG)"
caacaucaaggaagaug

SEQ ID NO: 18553 - RNA, 16 nt, Artificial Sequence
  source: /note="Description of Artificial Sequence: Synthetic oligonucleotide"
  source: /note="RNA"
  modified_base (1)..(1): 5-methyl bicyclic nucleic acid
  modified_base (2)..(2): bicyclic nucleic acid (BNA)
  modified_base (4)..(4): 5-methyl modified nucleotide
  modified_base (7)..(7): 5-methyl modified nucleotide
  source: /note="3' tri-ethylene glycol (TEG)"
caacaucaaggaagau

SEQ ID NO: 18554 - RNA, 15 nt, Artificial Sequence
  source: /note="Description of Artificial Sequence: Synthetic oligonucleotide"
  source: /note="RNA"
  modified_base (1)..(1): 5-methyl bicyclic nucleic acid
  modified_base (2)..(2): bicyclic nucleic acid (BNA)
  modified_base (4)..(4): 5-methyl modified nucleotide
  modified_base (7)..(7): 5-methyl modified nucleotide
  source: /note="3' tri-ethylene glycol (TEG)"
caacaucaaggaaga

SEQ ID NO: 18555 - RNA, 14 nt, Artificial Sequence
  source: /note="Description of Artificial Sequence: Synthetic oligonucleotide"
  source: /note="RNA"
  modified_base (1)..(1): 5-methyl bicyclic nucleic acid
  modified_base (2)..(2): bicyclic nucleic acid (BNA)
  modified_base (4)..(4): 5-methyl modified nucleotide
  modified_base (7)..(7): 5-methyl modified nucleotide
  source: /note="3' tri-ethylene glycol (TEG)"
caacaucaaggaag

SEQ ID NO: 18556 - RNA, 26 nt, Artificial Sequence
  source: /note="Description of Artificial Sequence: Synthetic oligonucleotide"
  source: /note="RNA"
  modified_base (1)..(1): bicyclic nucleic acid (BNA)
  modified_base (2)..(2): bicyclic nucleic acid (BNA)
  modified_base (3)..(3): 5-methyl modified nucleotide
  modified_base (6)..(6): 5-methyl modified nucleotide
  modified_base (18)..(18): 5-methyl modified nucleotide
  modified_base (23)..(23): 5-methyl modified nucleotide
  source: /note="3' tri-ethylene glycol (TEG)"
aacaucaaggaagauggcauuucuag

SEQ ID NO: 18557 - RNA, 25 nt, Artificial Sequence
  source: /note="Description of Artificial Sequence: Synthetic oligonucleotide"
  source: /note="RNA"
  modified_base (1)..(1): bicyclic nucleic acid (BNA)
  modified_base (2)..(2): bicyclic nucleic acid (BNA)
  modified_base (3)..(3): 5-methyl modified nucleotide
  modified_base (6)..(6): 5-methyl modified nucleotide
  modified_base (18)..(18): 5-methyl modified nucleotide
  modified_base (23)..(23): 5-methyl modified nucleotide
  source: /note="3' tri-ethylene glycol (TEG)"
aacaucaaggaagauggcauuucua

SEQ ID NO: 18558 - RNA, 24 nt, Artificial Sequence
  source: /note="Description of Artificial Sequence: Synthetic oligonucleotide"
  source: /note="RNA"
  modified_base (1)..(1): bicyclic nucleic acid (BNA)
  modified_base (2)..(2): bicyclic nucleic acid (BNA)
  modified_base (3)..(3): 5-methyl modified nucleotide
  modified_base (6)..(6): 5-methyl modified nucleotide
  modified_base (18)..(18): 5-methyl modified nucleotide
  modified_base (23)..(23): 5-methyl modified nucleotide
  source: /note="3' tri-ethylene glycol (TEG)"
aacaucaaggaagauggcauuucu

SEQ ID NO: 18559 - RNA, 23 nt, Artificial Sequence
  source: /note="Description of Artificial Sequence: Synthetic oligonucleotide"
  source: /note="RNA"
  modified_base (1)..(1): bicyclic nucleic acid (BNA)
  modified_base (2)..(2): bicyclic nucleic acid (BNA)
  modified_base (3)..(3): 5-methyl modified nucleotide
  modified_base (6)..(6): 5-methyl modified nucleotide
  modified_base (18)..(18): 5-methyl modified nucleotide
  modified_base (23)..(23): 5-methyl modified nucleotide
  source: /note="3' tri-ethylene glycol (TEG)"
aacaucaaggaagauggcauuuc

SEQ ID NO: 18560 - RNA, 22 nt, Artificial Sequence
  source: /note="Description of Artificial Sequence: Synthetic oligonucleotide"
  source: /note="RNA"
  modified_base (1)..(1): bicyclic nucleic acid (BNA)
  modified_base (2)..(2): bicyclic nucleic acid (BNA)
  modified_base (3)..(3): 5-methyl modified nucleotide
  modified_base (6)..(6): 5-methyl modified nucleotide
  modified_base (18)..(18): 5-methyl modified nucleotide
  source: /note="3' tri-ethylene glycol (TEG)"
aacaucaaggaagauggcauuu

SEQ ID NO: 18561 - RNA, 21 nt, Artificial Sequence
  source: /note="Description of Artificial Sequence: Synthetic oligonucleotide"
  source: /note="RNA"
  modified_base (1)..(1): bicyclic nucleic acid (BNA)
  modified_base (2)..(2): bicyclic nucleic acid (BNA)
  modified_base (3)..(3): 5-methyl modified nucleotide
  modified_base (6)..(6): 5-methyl modified nucleotide
  modified_base (18)..(18): 5-methyl modified nucleotide
  source: /note="3' tri-ethylene glycol (TEG)"
aacaucaaggaagauggcauu

SEQ ID NO: 18562 - RNA, 20 nt, Artificial Sequence
  source: /note="Description of Artificial Sequence: Synthetic oligonucleotide"
  source: /note="RNA"
  modified_base (1)..(1): bicyclic nucleic acid (BNA)
  modified_base (2)..(2): bicyclic nucleic acid (BNA)
  modified_base (3)..(3): 5-methyl modified nucleotide
  modified_base (6)..(6): 5-methyl modified nucleotide
  modified_base (18)..(18): 5-methyl modified nucleotide
  source: /note="3' tri-ethylene glycol (TEG)"
aacaucaaggaagauggcau

SEQ ID NO: 18563 - RNA, 19 nt, Artificial Sequence
  source: /note="Description of Artificial Sequence: Synthetic oligonucleotide"
  source: /note="RNA"
  modified_base (1)..(1): bicyclic nucleic acid (BNA)
  modified_base (2)..(2): bicyclic nucleic acid (BNA)
  modified_base (3)..(3): 5-methyl modified nucleotide
  modified_base (6)..(6): 5-methyl modified nucleotide
  modified_base (18)..(18): 5-methyl modified nucleotide
  source: /note="3' tri-ethylene glycol (TEG)"
aacaucaaggaagauggca

SEQ ID NO: 18564 - RNA, 18 nt, Artificial Sequence
  source: /note="Description of Artificial Sequence: Synthetic oligonucleotide"
  source: /note="RNA"
  modified_base (1)..(1): bicyclic nucleic acid (BNA)
  modified_base (2)..(2): bicyclic nucleic acid (BNA)
  modified_base (3)..(3): 5-methyl modified nucleotide
  modified_base (6)..(6): 5-methyl modified nucleotide
  modified_base (18)..(18): 5-methyl modified nucleotide
  source: /note="3' tri-ethylene glycol (TEG)"
aacaucaaggaagauggc

SEQ ID NO: 18565 - RNA, 17 nt, Artificial Sequence
  source: /note="Description of Artificial Sequence: Synthetic oligonucleotide"
  source: /note="RNA"
  modified_base (1)..(1): bicyclic nucleic acid (BNA)
  modified_base (2)..(2): bicyclic nucleic acid (BNA)
  modified_base (3)..(3): 5-methyl modified nucleotide
  modified_base (6)..(6): 5-methyl modified nucleotide
  source: /note="3' tri-ethylene glycol (TEG)"
aacaucaaggaagaugg

SEQ ID NO: 18566 - RNA, 16 nt, Artificial Sequence
  source: /note="Description of Artificial Sequence: Synthetic oligonucleotide"
  source: /note="RNA"
  modified_base (1)..(1): bicyclic nucleic acid (BNA)
  modified_base (2)..(2): bicyclic nucleic acid (BNA)
  modified_base (3)..(3): 5-methyl modified nucleotide
  modified_base (6)..(6): 5-methyl modified nucleotide
  source: /note="3' tri-ethylene glycol (TEG)"
aacaucaaggaagaug

SEQ ID NO: 18567 - RNA, 15 nt, Artificial Sequence
  source: /note="Description of Artificial Sequence: Synthetic oligonucleotide"
  source: /note="RNA"
  modified_base (1)..(1): bicyclic nucleic acid (BNA)
  modified_base (2)..(2): bicyclic nucleic acid (BNA)
  modified_base (3)..(3): 5-methyl modified nucleotide
  modified_base (6)..(6): 5-methyl modified nucleotide
  source: /note="3' tri-ethylene glycol (TEG)"
aacaucaaggaagau

SEQ ID NO: 18568 - RNA, 14 nt, Artificial Sequence
  source: /note="Description of Artificial Sequence: Synthetic oligonucleotide"
  source: /note="RNA"
  modified_base (1)..(1): bicyclic nucleic acid (BNA)
  modified_base (2)..(2): bicyclic nucleic acid (BNA)
  modified_base (3)..(3): 5-methyl modified nucleotide
  modified_base (6)..(6): 5-methyl modified nucleotide
  source: /note="3' tri-ethylene glycol (TEG)"
aacaucaaggaaga

SEQ ID NO: 18569 - RNA, 13 nt, Artificial Sequence
  source: /note="Description of Artificial Sequence: Synthetic oligonucleotide"
  source: /note="RNA"
  modified_base (1)..(1): bicyclic nucleic acid (BNA)
  modified_base (2)..(2): bicyclic nucleic acid (BNA)
  modified_base (3)..(3): 5-methyl modified nucleotide
  modified_base (6)..(6): 5-methyl modified nucleotide
  source: /note="3' tri-ethylene glycol (TEG)"
aacaucaaggaag

SEQ ID NO: 18570 - RNA, 25 nt, Artificial Sequence
  source: /note="Description of Artificial Sequence: Synthetic oligonucleotide"
  source: /note="RNA"
  modified_base (1)..(1): bicyclic nucleic acid (BNA)
  modified_base (2)..(2): 5-methyl bicyclic nucleic acid
  modified_base (5)..(5): 5-methyl modified nucleotide
  modified_base (17)..(17): 5-methyl modified nucleotide
  modified_base (22)..(22): 5-methyl modified nucleotide
  source: /note="3' tri-ethylene glycol (TEG)"
acaucaaggaagauggcauuucuag

SEQ ID NO: 18571 - RNA, 24 nt, Artificial Sequence
  source: /note="Description of Artificial Sequence: Synthetic oligonucleotide"
  source: /note="RNA"
  modified_base (1)..(1): bicyclic nucleic acid (BNA)
  modified_base (2)..(2): 5-methyl bicyclic nucleic acid
  modified_base (5)..(5): 5-methyl modified nucleotide
  modified_base (17)..(17): 5-methyl modified nucleotide
  modified_base (22)..(22): 5-methyl modified nucleotide
  source: /note="3' tri-ethylene glycol (TEG)"
acaucaaggaagauggcauuucua

SEQ ID NO: 18572 - RNA, 23 nt, Artificial Sequence
  source: /note="Description of Artificial Sequence: Synthetic oligonucleotide"
  source: /note="RNA"
  modified_base (1)..(1): bicyclic nucleic acid (BNA)
  modified_base (2)..(2): 5-methyl bicyclic nucleic acid
  modified_base (5)..(5): 5-methyl modified nucleotide
  modified_base (17)..(17): 5-methyl modified nucleotide
  modified_base (22)..(22): 5-methyl modified nucleotide
  source: /note="3' tri-ethylene glycol (TEG)"
acaucaaggaagauggcauuucu

SEQ ID NO: 18573 - RNA, 22 nt, Artificial Sequence
  source: /note="Description of Artificial Sequence: Synthetic oligonucleotide"
  source: /note="RNA"
  modified_base (1)..(1): bicyclic nucleic acid (BNA)
  modified_base (2)..(2): 5-methyl bicyclic nucleic acid
  modified_base (5)..(5): 5-methyl modified nucleotide
  modified_base (17)..(17): 5-methyl modified nucleotide
  modified_base (22)..(22): 5-methyl modified nucleotide
  source: /note="3' tri-ethylene glycol (TEG)"
acaucaaggaagauggcauuuc

SEQ ID NO: 18574 - RNA, 21 nt, Artificial Sequence
  source: /note="Description of Artificial Sequence: Synthetic oligonucleotide"
  source: /note="RNA"
  modified_base (1)..(1): bicyclic nucleic acid (BNA)
  modified_base (2)..(2): 5-methyl bicyclic nucleic acid
  modified_base (5)..(5): 5-methyl modified nucleotide
  modified_base (17)..(17): 5-methyl modified nucleotide
  source: /note="3' tri-ethylene glycol (TEG)"
acaucaaggaagauggcauuu

SEQ ID NO: 18575 - RNA, 20 nt, Artificial Sequence
  source: /note="Description of Artificial Sequence: Synthetic oligonucleotide"
  source: /note="RNA"
  modified_base (1)..(1): bicyclic nucleic acid (BNA)
  modified_base (2)..(2): 5-methyl bicyclic nucleic acid
  modified_base (5)..(5): 5-methyl modified nucleotide
  modified_base (17)..(17): 5-methyl modified nucleotide
  source: /note="3' tri-ethylene glycol (TEG)"
acaucaaggaagauggcauu

SEQ ID NO: 18576 - RNA, 19 nt, Artificial Sequence
  source: /note="Description of Artificial Sequence: Synthetic oligonucleotide"
  source: /note="RNA"
  modified_base (1)..(1): bicyclic nucleic acid (BNA)
  modified_base (2)..(2): 5-methyl bicyclic nucleic acid
  modified_base (5)..(5): 5-methyl modified nucleotide
  modified_base (17)..(17): 5-methyl modified nucleotide
  source: /note="3' tri-ethylene glycol (TEG)"
acaucaaggaagauggcau

SEQ ID NO: 18577 - RNA, 18 nt, Artificial Sequence
  source: /note="Description of Artificial Sequence: Synthetic oligonucleotide"
  source: /note="RNA"
  modified_base (1)..(1): bicyclic nucleic acid (BNA)
  modified_base (2)..(2): 5-methyl bicyclic nucleic acid
  modified_base (5)..(5): 5-methyl modified nucleotide
  modified_base (17)..(17): 5-methyl modified nucleotide
  source: /note="3' tri-ethylene glycol (TEG)"
acaucaaggaagauggca

SEQ ID NO: 18578 - RNA, 17 nt, Artificial Sequence
  source: /note="Description of Artificial Sequence: Synthetic oligonucleotide"
  source: /note="RNA"
  modified_base (1)..(1): bicyclic nucleic acid (BNA)
  modified_base (2)..(2): 5-methyl bicyclic nucleic acid
  modified_base (5)..(5): 5-methyl modified nucleotide
  modified_base (17)..(17): 5-methyl modified nucleotide
  source: /note="3' tri-ethylene glycol (TEG)"
acaucaaggaagauggc

SEQ ID NO: 18579 - RNA, 16 nt, Artificial Sequence
  source: /note="Description of Artificial Sequence: Synthetic oligonucleotide"
  source: /note="RNA"
  modified_base (1)..(1): bicyclic nucleic acid (BNA)
  modified_base (2)..(2): 5-methyl bicyclic nucleic acid
  modified_base (5)..(5): 5-methyl modified nucleotide
  source: /note="3' tri-ethylene glycol (TEG)"
acaucaaggaagaugg

SEQ ID NO: 18580 - RNA, 15 nt, Artificial Sequence
  source: /note="Description of Artificial Sequence: Synthetic oligonucleotide"
  source: /note="RNA"
  modified_base (1)..(1): bicyclic nucleic acid (BNA)
  modified_base (2)..(2): 5-methyl bicyclic nucleic acid
  modified_base (5)..(5): 5-methyl modified nucleotide
  source: /note="3' tri-ethylene glycol (TEG)"
acaucaaggaagaug

SEQ ID NO: 18581 - RNA, 14 nt, Artificial Sequence
  source: /note="Description of Artificial Sequence: Synthetic oligonucleotide"
  source: /note="RNA"
  modified_base (1)..(1): bicyclic nucleic acid (BNA)
  modified_base (2)..(2): 5-methyl bicyclic nucleic acid
  modified_base (5)..(5): 5-methyl modified nucleotide
  source: /note="3' tri-ethylene glycol (TEG)"
acaucaaggaagau

SEQ ID NO: 18582 - RNA, 13 nt, Artificial Sequence
  source: /note="Description of Artificial Sequence: Synthetic oligonucleotide"
  source: /note="RNA"
  modified_base (1)..(1): bicyclic nucleic acid (BNA)
  modified_base (2)..(2): 5-methyl bicyclic nucleic acid
  modified_base (5)..(5): 5-methyl modified nucleotide
  source: /note="3' tri-ethylene glycol (TEG)"
acaucaaggaaga

SEQ ID NO: 18583 - RNA, 12 nt, Artificial Sequence
  source: /note="Description of Artificial Sequence: Synthetic oligonucleotide"
  source: /note="RNA"
  modified_base (1)..(1): bicyclic nucleic acid (BNA)
  modified_base (2)..(2): 5-methyl bicyclic nucleic acid
  modified_base (5)..(5): 5-methyl modified nucleotide
  source: /note="3' tri-ethylene glycol (TEG)"
acaucaaggaag

SEQ ID NO: 18584 - RNA, 24 nt, Artificial Sequence
  source: /note="Description of Artificial Sequence: Synthetic oligonucleotide"
  source: /note="RNA"
  modified_base (1)..(1): 5-methyl bicyclic nucleic acid
  modified_base (2)..(2): bicyclic nucleic acid (BNA)
  modified_base (4)..(4): 5-methyl modified nucleotide
  modified_base (16)..(16): 5-methyl modified nucleotide
  modified_base (21)..(21): 5-methyl modified nucleotide
  source: /note="3' tri-ethylene glycol (TEG)"
caucaaggaagauggcauuucuag

SEQ ID NO: 18585 - RNA, 23 nt, Artificial Sequence
  source: /note="Description of Artificial Sequence: Synthetic oligonucleotide"
  source: /note="RNA"
  modified_base (1)..(1): 5-methyl bicyclic nucleic acid
  modified_base (2)..(2): bicyclic nucleic acid (BNA)
  modified_base (4)..(4): 5-methyl modified nucleotide
  modified_base (16)..(16): 5-methyl modified nucleotide
  modified_base (21)..(21): 5-methyl modified nucleotide
  source: /note="3' tri-ethylene glycol (TEG)"
caucaaggaagauggcauuucua

SEQ ID NO: 18586 - RNA, 22 nt, Artificial Sequence
  source: /note="Description of Artificial Sequence: Synthetic oligonucleotide"
  source: /note="RNA"
  modified_base (1)..(1): 5-methyl bicyclic nucleic acid
  modified_base (2)..(2): bicyclic nucleic acid (BNA)
  modified_base (4)..(4): 5-methyl modified nucleotide
  modified_base (16)..(16): 5-methyl modified nucleotide
  modified_base (21)..(21): 5-methyl modified nucleotide
  source: /note="3' tri-ethylene glycol (TEG)"
caucaaggaagauggcauuucu

SEQ ID NO: 18587 - RNA, 21 nt, Artificial Sequence
  source: /note="Description of Artificial Sequence: Synthetic oligonucleotide"
  source: /note="RNA"
  modified_base (1)..(1): 5-methyl bicyclic nucleic acid
  modified_base (2)..(2): bicyclic nucleic acid (BNA)
  modified_base (4)..(4): 5-methyl modified nucleotide
  modified_base (16)..(16): 5-methyl modified nucleotide
  modified_base (21)..(21): 5-methyl modified nucleotide
  source: /note="3' tri-ethylene glycol (TEG)"
caucaaggaagauggcauuuc

SEQ ID NO: 18588 - RNA, 20 nt, Artificial Sequence
  source: /note="Description of Artificial Sequence: Synthetic oligonucleotide"
  source: /note="RNA"
  modified_base (1)..(1): 5-methyl bicyclic nucleic acid
  modified_base (2)..(2): bicyclic nucleic acid (BNA)
  modified_base (4)..(4): 5-methyl modified nucleotide
  modified_base (16)..(16): 5-methyl modified nucleotide
  source: /note="3' tri-ethylene glycol (TEG)"
caucaaggaagauggcauuu

SEQ ID NO: 18589 - RNA, 19 nt, Artificial Sequence
  source: /note="Description of Artificial Sequence: Synthetic oligonucleotide"
  source: /note="RNA"
  modified_base (1)..(1): 5-methyl bicyclic nucleic acid
  modified_base (2)..(2): bicyclic nucleic acid (BNA)
  modified_base (4)..(4): 5-methyl modified nucleotide
  modified_base (16)..(16): 5-methyl modified nucleotide
  source: /note="3' tri-ethylene glycol (TEG)"
caucaaggaagauggcauu

SEQ ID NO: 18590 - RNA, 18 nt, Artificial Sequence
  source: /note="Description of Artificial Sequence: Synthetic oligonucleotide"
  source: /note="RNA"
  modified_base (1)..(1): 5-methyl bicyclic nucleic acid
  modified_base (2)..(2): bicyclic nucleic acid (BNA)
  modified_base (4)..(4): 5-methyl modified nucleotide
  modified_base (16)..(16): 5-methyl modified nucleotide
  source: /note="3' tri-ethylene glycol (TEG)"
caucaaggaagauggcau

SEQ ID NO: 18591 - RNA, 17 nt, Artificial Sequence
  source: /note="Description of Artificial Sequence: Synthetic oligonucleotide"
  source: /note="RNA"
  modified_base (1)..(1): 5-methyl bicyclic nucleic acid
  modified_base (2)..(2): bicyclic nucleic acid (BNA)
  modified_base (4)..(4): 5-methyl modified nucleotide
  modified_base (16)..(16): 5-methyl modified nucleotide
  source: /note="3' tri-ethylene glycol (TEG)"
caucaaggaagauggca

SEQ ID NO: 18592 - RNA, 16 nt, Artificial Sequence
  source: /note="Description of Artificial Sequence: Synthetic oligonucleotide"
  source: /note="RNA"
  modified_base (1)..(1): 5-methyl bicyclic nucleic acid
  modified_base (2)..(2): bicyclic nucleic acid (BNA)
  modified_base (4)..(4): 5-methyl modified nucleotide
  modified_base (16)..(16): 5-methyl modified nucleotide
  source: /note="3' tri-ethylene glycol (TEG)"
caucaaggaagauggc

SEQ ID NO: 18593 - RNA, 15 nt, Artificial Sequence
  source: /note="Description of Artificial Sequence: Synthetic oligonucleotide"
  source: /note="RNA"
  modified_base (1)..(1): 5-methyl bicyclic nucleic acid
  modified_base (2)..(2): bicyclic nucleic acid (BNA)
  modified_base (4)..(4): 5-methyl modified nucleotide
  source: /note="3' tri-ethylene glycol (TEG)"
caucaaggaagaugg

SEQ ID NO: 18594 - RNA, 14 nt, Artificial Sequence
  source: /note="Description of Artificial Sequence: Synthetic oligonucleotide"
  source: /note="RNA"
  modified_base (1)..(1): 5-methyl bicyclic nucleic acid
  modified_base (2)..(2): bicyclic nucleic acid (BNA)
  modified_base (4)..(4): 5-methyl modified nucleotide
  source: /note="3' tri-ethylene glycol (TEG)"
caucaaggaagaug

SEQ ID NO: 18595 - RNA, 13 nt, Artificial Sequence
  source: /note="Description of Artificial Sequence: Synthetic oligonucleotide"
  source: /note="RNA"
  modified_base (1)..(1): 5-methyl bicyclic nucleic acid
  modified_base (2)..(2): bicyclic nucleic acid (BNA)
  modified_base (4)..(4): 5-methyl modified nucleotide
  source: /note="3' tri-ethylene glycol (TEG)"
caucaaggaagau

SEQ ID NO: 18596 - RNA, 12 nt, Artificial Sequence
  source: /note="Description of Artificial Sequence: Synthetic oligonucleotide"
  source: /note="RNA"
  modified_base (1)..(1): 5-methyl bicyclic nucleic acid
  modified_base (2)..(2): bicyclic nucleic acid (BNA)
  modified_base (4)..(4): 5-methyl modified nucleotide
  source: /note="3' tri-ethylene glycol (TEG)"
caucaaggaaga

SEQ ID NO: 18597 - RNA, 11 nt, Artificial Sequence
  source: /note="Description of Artificial Sequence: Synthetic oligonucleotide"
  source: /note="RNA"
  modified_base (1)..(1): 5-methyl bicyclic nucleic acid
  modified_base (2)..(2): bicyclic nucleic acid (BNA)
  modified_base (4)..(4): 5-methyl modified nucleotide
  source: /note="3' tri-ethylene glycol (TEG)"
caucaaggaag

SEQ ID NO: 18598 - DNA, 23 bp, Artificial Sequence
  source: /note="Description of Artificial Sequence: Synthetic oligonucleotide"
  source: /note="Description of Combined DNA/RNA Molecule: Synthetic oligonucleotide"
  source: /note="DNA/RNA"
  modified_base (1)..(1): bicyclic nucleic acid (BNA)
  modified_base (2)..(2): bicyclic nucleic acid (BNA)
  modified_base (3)..(3): 5-methyl modified nucleotide
  modified_base (15)..(15): 5-methyl modified nucleotide
  modified_base (20)..(20): 5-methyl modified nucleotide
  source: /note="3' tri-ethylene glycol (TEG)"
atcaaggaagauggcauuucuag

SEQ ID NO: 18599 - DNA, 22 bp, Artificial Sequence
  source: /note="Description of Artificial Sequence: Synthetic oligonucleotide"
  source: /note="Description of Combined DNA/RNA Molecule: Synthetic oligonucleotide"
  source: /note="DNA/RNA"
  modified_base (1)..(1): bicyclic nucleic acid (BNA)
  modified_base (2)..(2): bicyclic nucleic acid (BNA)
  modified_base (3)..(3): 5-methyl modified nucleotide
  modified_base (15)..(15): 5-methyl modified nucleotide
  modified_base (20)..(20): 5-methyl modified nucleotide
  source: /note="3' tri-ethylene glycol (TEG)"
atcaaggaagauggcauuucua

SEQ ID NO: 18600 - DNA, 21 bp, Artificial Sequence
  source: /note="Description of Artificial Sequence: Synthetic oligonucleotide"
  source: /note="Description of Combined DNA/RNA Molecule: Synthetic oligonucleotide"
  source: /note="DNA/RNA"
  modified_base (1)..(1): bicyclic nucleic acid (BNA)
  modified_base (2)..(2): bicyclic nucleic acid (BNA)
  modified_base (3)..(3): 5-methyl modified nucleotide
  modified_base (15)..(15): 5-methyl modified nucleotide
  modified_base (20)..(20): 5-methyl modified nucleotide
  source: /note="3' tri-ethylene glycol (TEG)"
atcaaggaagauggcauuucu

SEQ ID NO: 18601 - DNA, 20 bp, Artificial Sequence
  source: /note="Description of Artificial Sequence: Synthetic oligonucleotide"
  source: /note="Description of Combined DNA/RNA Molecule: Synthetic oligonucleotide"
  source: /note="DNA/RNA"
  modified_base (1)..(1): bicyclic nucleic acid (BNA)
  modified_base (2)..(2): bicyclic nucleic acid (BNA)
  modified_base (3)..(3): 5-methyl modified nucleotide
  modified_base (15)..(15): 5-methyl modified nucleotide
  modified_base (20)..(20): 5-methyl modified nucleotide
  source: /note="3' tri-ethylene glycol (TEG)"
atcaaggaagauggcauuuc

SEQ ID NO: 18602 - DNA, 19 bp, Artificial Sequence
  source: /note="Description of Artificial Sequence: Synthetic oligonucleotide"
  source: /note="Description of Combined DNA/RNA Molecule: Synthetic oligonucleotide"
  source: /note="DNA/RNA"
  modified_base (1)..(1): bicyclic nucleic acid (BNA)
  modified_base (2)..(2): bicyclic nucleic acid (BNA)
  modified_base (3)..(3): 5-methyl modified nucleotide
  modified_base (15)..(15): 5-methyl modified nucleotide
  source: /note="3' tri-ethylene glycol (TEG)"
atcaaggaagauggcauuu

SEQ ID NO: 18603 - DNA, 18 bp, Artificial Sequence
  source: /note="Description of Artificial Sequence: Synthetic oligonucleotide"
  source: /note="Description of Combined DNA/RNA Molecule: Synthetic oligonucleotide"
  source: /note="DNA/RNA"
  modified_base (1)..(1): bicyclic nucleic acid (BNA)
  modified_base (2)..(2): bicyclic nucleic acid (BNA)
  modified_base (3)..(3): 5-methyl modified nucleotide
  modified_base (15)..(15): 5-methyl modified nucleotide
  source: /note="3' tri-ethylene glycol (TEG)"
atcaaggaagauggcauu

SEQ ID NO: 18604 - DNA, 17 bp, Artificial Sequence
  source: /note="Description of Artificial Sequence: Synthetic oligonucleotide"
  source: /note="Description of Combined DNA/RNA Molecule: Synthetic oligonucleotide"
  source: /note="DNA/RNA"
  modified_base (1)..(1): bicyclic nucleic acid (BNA)
  modified_base (2)..(2): bicyclic nucleic acid (BNA)
  modified_base (3)..(3): 5-methyl modified nucleotide
  modified_base (15)..(15): 5-methyl modified nucleotide
  source: /note="3' tri-ethylene glycol (TEG)"
atcaaggaagauggcau

SEQ ID NO: 18605 - DNA, 16 bp, Artificial Sequence
  source: /note="Description of Artificial Sequence: Synthetic oligonucleotide"
  source: /note="Description of Combined DNA/RNA Molecule: Synthetic oligonucleotide"
  source: /note="DNA/RNA"
  modified_base (1)..(1): bicyclic nucleic acid (BNA)
  modified_base (2)..(2): bicyclic nucleic acid (BNA)
  modified_base (3)..(3): 5-methyl modified nucleotide
  modified_base (15)..(15): 5-methyl modified nucleotide
  source: /note="3' tri-ethylene glycol (TEG)"
atcaaggaagauggca

SEQ ID NO: 18606 - DNA, 15 bp, Artificial Sequence
  source: /note="Description of Artificial Sequence: Synthetic oligonucleotide"
  source: /note="Description of Combined DNA/RNA Molecule: Synthetic oligonucleotide"
  source: /note="DNA/RNA"
  modified_base (1)..(1): bicyclic nucleic acid (BNA)
  modified_base (2)..(2): bicyclic nucleic acid (BNA)
  modified_base (3)..(3): 5-methyl modified nucleotide
  modified_base (15)..(15): 5-methyl modified nucleotide
  source: /note="3' tri-ethylene glycol (TEG)"
atcaaggaagauggc

SEQ ID NO: 18607 - DNA, 14 bp, Artificial Sequence
  source: /note="Description of Artificial Sequence: Synthetic oligonucleotide"
  source: /note="Description of Combined DNA/RNA Molecule: Synthetic oligonucleotide"
  source: /note="DNA/RNA"
  modified_base (1)..(1): bicyclic nucleic acid (BNA)
  modified_base (2)..(2): bicyclic nucleic acid (BNA)
  modified_base (3)..(3): 5-methyl modified nucleotide
  source: /note="3' tri-ethylene glycol (TEG)"
atcaaggaagaugg

SEQ ID NO: 18608 - DNA, 13 bp, Artificial Sequence
  source: /note="Description of Artificial Sequence: Synthetic oligonucleotide"
  source: /note="Description of Combined DNA/RNA Molecule: Synthetic oligonucleotide"
  source: /note="DNA/RNA"
  modified_base (1)..(1): bicyclic nucleic acid (BNA)
  modified_base (2)..(2): bicyclic nucleic acid (BNA)
  modified_base (3)..(3): 5-methyl modified nucleotide
  source: /note="3' tri-ethylene glycol (TEG)"
atcaaggaagaug

SEQ ID NO: 18609 - DNA, 12 bp, Artificial Sequence
  source: /note="Description of Artificial Sequence: Synthetic oligonucleotide"
  source: /note="Description of Combined DNA/RNA Molecule: Synthetic oligonucleotide"
  source: /note="DNA/RNA"
  modified_base (1)..(1): bicyclic nucleic acid (BNA)
  modified_base (2)..(2): bicyclic nucleic acid (BNA)
  modified_base (3)..(3): 5-methyl modified nucleotide
  source: /note="3' tri-ethylene glycol (TEG)"
atcaaggaagau

SEQ ID NO: 18610 - DNA, 11 bp, Artificial Sequence
  source: /note="Description of Artificial Sequence: Synthetic oligonucleotide"
  source: /note="DNA/RNA"
  modified_base (1)..(1): bicyclic nucleic acid (BNA)
  modified_base (2)..(2): bicyclic nucleic acid (BNA)
  modified_base (3)..(3): 5-methyl modified nucleotide
  source: /note="3' tri-ethylene glycol (TEG)"
atcaaggaaga

SEQ ID NO: 18611 - DNA, 10 bp, Artificial Sequence
  source: /note="Description of Artificial Sequence: Synthetic oligonucleotide"
  source: /note="DNA/RNA"
  modified_base (1)..(1): bicyclic nucleic acid (BNA)
  modified_base (2)..(2): bicyclic nucleic acid (BNA)
  modified_base (3)..(3): 5-methyl modified nucleotide
  source: /note="3' tri-ethylene glycol (TEG)"
atcaaggaag

SEQ ID NO: 18612 - RNA, 23 nt, Artificial Sequence
  source: /note="Description of Artificial Sequence: Synthetic oligonucleotide"
  source: /note="RNA"
  modified_base (1)..(1): 5-methyl bicyclic nucleic acid
  modified_base (2)..(2): 5-methyl bicyclic nucleic acid
  modified_base (7)..(7): 5-methyl modified nucleotide
  modified_base (13)..(13): 5-methyl modified nucleotide
  modified_base (14)..(14): 5-methyl modified nucleotide
  modified_base (16)..(16): 5-methyl modified nucleotide
  modified_base (17)..(17): 5-methyl modified nucleotide
  modified_base (20)..(20): 5-methyl modified nucleotide
  modified_base (23)..(23): 5-methyl modified nucleotide
  source: /note="3' tri-ethylene glycol (TEG)"
ccagagcagguaccuccaacauc

SEQ ID NO: 18613 - RNA, 18 nt, Artificial Sequence
  source: /note="Description of Artificial Sequence: Synthetic oligonucleotide"
  source: /note="RNA"
  modified_base (1)..(1): 5-methyl bicyclic nucleic acid
  modified_base (2)..(2): 5-methyl bicyclic nucleic acid
  modified_base (7)..(7): 5-methyl modified nucleotide
  modified_base (13)..(13): 5-methyl modified nucleotide
  modified_base (14)..(14): 5-methyl modified nucleotide
  modified_base (16)..(16): 5-methyl modified nucleotide
  modified_base (17)..(17): 5-methyl modified nucleotide
  source: /note="3' tri-ethylene glycol (TEG)"
ccagagcagguaccucca

SEQ ID NO: 18614 - RNA, 23 nt, Artificial Sequence
  source: /note="Description of Artificial Sequence: Synthetic oligonucleotide"
  source: /note="RNA"
  modified_base (1)..(1): 5-methyl bicyclic nucleic acid
  modified_base (2)..(2): 5-methyl bicyclic nucleic acid
  modified_base (4)..(4): 5-methyl modified nucleotide
  modified_base (18)..(18): 5-methyl modified nucleotide
  source: /note="3' tri-ethylene glycol (TEG)"
ccucugugauuuuauaacuugau

SEQ ID NO: 18615 - DNA, 17 bp, Artificial Sequence
  source: /note="Description of Artificial Sequence: Synthetic oligonucleotide"
  source: /note="Description of Combined DNA/RNA Molecule: Synthetic oligonucleotide"
  source: /note="DNA/RNA"
  modified_base (1)..(1): bicyclic nucleic acid (BNA)
  modified_base (2)..(2): 5-methyl bicyclic nucleic acid
  modified_base (4)..(4): 5-methyl modified nucleotide
  modified_base (5)..(5): 5-methyl modified nucleotide
  modified_base (6)..(6): 5-methyl modified nucleotide
  modified_base (8)..(8): 5-methyl modified nucleotide
  modified_base (9)..(9): 5-methyl modified nucleotide
  modified_base (12)..(12): 5-methyl modified nucleotide
  modified_base (14)..(14): 5-methyl modified nucleotide
  modified_base (15)..(15): 5-methyl modified nucleotide
  modified_base (16)..(16): 5-methyl modified nucleotide
  source: /note="3' tri-ethylene glycol (TEG)"
tcacccaccaucacccu

SEQ ID NO: 18616 - DNA, 20 bp, Artificial Sequence
  source: /note="Description of Artificial Sequence: Synthetic oligonucleotide"
  source: /note="Description of Combined DNA/RNA Molecule: Synthetic oligonucleotide"
  source: /note="DNA/RNA"
  modified_base (1)..(1): bicyclic nucleic acid (BNA)
  modified_base (2)..(2): bicyclic nucleic acid (BNA)
  modified_base (7)..(7): 5-methyl modified nucleotide
  modified_base (8)..(8): 5-methyl modified nucleotide
  modified_base (10)..(10): 5-methyl modified nucleotide
  modified_base (16)..(16): 5-methyl modified nucleotide
  modified_base (18)..(18): 5-methyl modified nucleotide
  modified_base (19)..(19): 5-methyl modified nucleotide
  modified_base (20)..(20): 5-methyl modified nucleotide
  source: /note="3' tri-ethylene glycol (TEG)"
tgauauccucaaggucaccc

SEQ ID NO: 18617 - DNA, 22 bp, Artificial Sequence
  source: /note="Description of Artificial Sequence: Synthetic oligonucleotide"
  source: /note="Description of Combined DNA/RNA Molecule: Synthetic oligonucleotide"
  source: /note="DNA/RNA"
  modified_base (1)..(1): 5-methyl bicyclic nucleic acid
  modified_base (2)..(2): bicyclic nucleic acid (BNA)
  modified_base (4)..(4): 5-methyl modified nucleotide
  modified_base (13)..(13): 5-methyl modified nucleotide
  modified_base (16)..(16): 5-methyl modified nucleotide
  modified_base (18)..(18): 5-methyl modified nucleotide
  source: /note="3' tri-ethylene glycol (TEG)"
ctgcuugaugaucaucucguug

SEQ ID NO: 18618 - DNA, 18 bp, Artificial Sequence
  source: /note="Description of Artificial Sequence: Synthetic oligonucleotide"
  source: /note="Description of Combined DNA/RNA Molecule: Synthetic oligonucleotide"
  source: /note="DNA/RNA"
  modified_base (1)..(1): 5-methyl bicyclic nucleic acid
  modified_base (2)..(2): bicyclic nucleic acid (BNA)
  modified_base (4)..(4): 5-methyl modified nucleotide
  modified_base (13)..(13): 5-methyl modified nucleotide
  modified_base (16)..(16): 5-methyl modified nucleotide
  modified_base (18)..(18): 5-methyl modified nucleotide
  source: /note="3' tri-ethylene glycol (TEG)"
ctgcuugaugaucaucuc

SEQ ID NO: 18619 - DNA, 19 bp, Artificial Sequence
  source: /note="Description of Artificial Sequence: Synthetic oligonucleotide"
  source: /note="Description of Combined DNA/RNA Molecule: Synthetic oligonucleotide"
  source: /note="DNA/RNA"
  modified_base (1)..(1): bicyclic nucleic acid (BNA)
  modified_base (2)..(2): bicyclic nucleic acid (BNA)
  modified_base (5)..(5): 5-methyl modified nucleotide
  modified_base (6)..(6): 5-methyl modified nucleotide
  modified_base (14)..(14): 5-methyl modified nucleotide
  modified_base (15)..(15): 5-methyl modified nucleotide
  modified_base (17)..(17): 5-methyl modified nucleotide
  source: /note="3' tri-ethylene glycol (TEG)"
gtuuccuuaguaaccacag

SEQ ID NO: 18620 - DNA, 17 bp, Artificial Sequence
  source: /note="Description of Artificial Sequence: Synthetic oligonucleotide"
  source: /note="Description of Combined DNA/RNA Molecule: Synthetic oligonucleotide"
  source: /note="DNA/RNA"
  modified_base (1)..(1): bicyclic nucleic acid (BNA)
  modified_base (2)..(2): bicyclic nucleic acid (BNA)
  modified_base (5)..(5): 5-methyl modified nucleotide
  modified_base (6)..(6): 5-methyl modified nucleotide
  modified_base (14)..(14): 5-methyl modified nucleotide
  modified_base (15)..(15): 5-methyl modified nucleotide
  modified_base (17)..(17): 5-methyl modified nucleotide
  source: /note="3' tri-ethylene glycol (TEG)"
gtuuccuuaguaaccac

SEQ ID NO: 18621 - DNA, 20 bp, Artificial Sequence
  source: /note="Description of Artificial Sequence: Synthetic oligonucleotide"
  source: /note="Description of Combined DNA/RNA Molecule: Synthetic oligonucleotide"
  source: /note="DNA/RNA"
  source: /note="5' tri-ethylene glycol (TEG)"
  modified_base (1)..(1): bicyclic nucleic acid (BNA)
  modified_base (2)..(2): 5-methyl bicyclic nucleic acid
  modified_base (14)..(14): 5-methyl modified nucleotide
  modified_base (19)..(19): 5-methyl modified nucleotide
  source: /note="3' tri-ethylene glycol (TEG)"
tcaaggaagauggcauuucu

SEQ ID NO: 18622 - DNA, 22 bp, Artificial Sequence
  source: /note="Description of Artificial Sequence: Synthetic oligonucleotide"
  source: /note="Description of Combined DNA/RNA Molecule: Synthetic oligonucleotide"
  source: /note="DNA/RNA"
  source: /note="5' tri-ethylene glycol (TEG)"
  modified_base (1)..(1): bicyclic nucleic acid (BNA)
  modified_base (2)..(2): 5-methyl bicyclic nucleic acid
  modified_base (14)..(14): 5-methyl modified nucleotide
  modified_base (19)..(19): 5-methyl modified nucleotide
  source: /note="3' tri-ethylene glycol (TEG)"
tcaaggaagauggcauuucuag

SEQ ID NO: 18623 - RNA, 18 nt, Artificial Sequence
  source: /note="Description of Artificial Sequence: Synthetic oligonucleotide"
  source: /note="RNA"
  source: /note="5' tri-ethylene glycol (TEG)"
  modified_base (1)..(1): bicyclic nucleic acid (BNA)
  modified_base (2)..(2): bicyclic nucleic acid (BNA)
  modified_base (9)..(9): 5-methyl modified nucleotide
  modified_base (13)..(13): 5-methyl modified nucleotide
  modified_base (14)..(14): 5-methyl modified nucleotide
  modified_base (18)..(18): 5-methyl modified nucleotide
  source: /note="3' tri-ethylene glycol (TEG)"
gguaaguucuguccaagc

SEQ ID NO: 18624 - DNA, 18 bp, Artificial Sequence
  source: /note="Description of Artificial Sequence: Synthetic oligonucleotide"
  source: /note="Description of Combined DNA/RNA Molecule: Synthetic oligonucleotide"
  source: /note="DNA/RNA"
  source: /note="5' tri-ethylene glycol (TEG)"
  modified_base (1)..(1): bicyclic nucleic acid (BNA)
  modified_base (2)..(2): bicyclic nucleic acid (BNA)
  modified_base (8)..(8): 5-methyl modified nucleotide
  modified_base (12)..(12): 5-methyl modified nucleotide
  modified_base (13)..(13): 5-methyl modified nucleotide
  modified_base (17)..(17): 5-methyl modified nucleotide
  modified_base (18)..(18): 5-methyl modified nucleotide
  source: /note="3' tri-ethylene glycol (TEG)"
gtaaguucuguccaagcc

SEQ ID NO: 18625 - RNA, 18 nt, Artificial Sequence
  source: /note="Description of Artificial Sequence: Synthetic oligonucleotide"
  source: /note="RNA"
  source: /note="5' tri-ethylene glycol (TEG)"
  modified_base (1)..(1): bicyclic nucleic acid (BNA)
  modified_base (2)..(2): bicyclic nucleic acid (BNA)
  modified_base (4)..(4): 5-methyl modified nucleotide
  modified_base (13)..(13): 5-methyl modified nucleotide
  modified_base (17)..(17): 5-methyl modified nucleotide
  modified_base (18)..(18): 5-methyl modified nucleotide
  source: /note="3' tri-ethylene glycol (TEG)"
agucgguaaguucugucc

SEQ ID NO: 18626 - DNA, 18 bp, Artificial Sequence
  source: /note="Description of Artificial Sequence: Synthetic oligonucleotide"
  source: /note="Description of Combined DNA/RNA Molecule: Synthetic oligonucleotide"
  source: /note="DNA/RNA"
  source: /note="5' tri-ethylene glycol (TEG)"
  modified_base (1)..(1): 5-methyl bicyclic nucleic acid
  modified_base (2)..(2): bicyclic nucleic acid (BNA)
  modified_base (5)..(5): 5-methyl modified nucleotide
  modified_base (6)..(6): 5-methyl modified nucleotide
  modified_base (10)..(10): 5-methyl modified nucleotide
  modified_base (11)..(11): 5-methyl modified nucleotide
  modified_base (12)..(12): 5-methyl modified nucleotide
  source: /note="3' tri-ethylene glycol (TEG)"
ctguccaagcccgguuga

SEQ ID NO: 18627 - DNA, 15 bp, Artificial Sequence
  source: /note="Description of Artificial Sequence: Synthetic oligonucleotide"
  source: /note="Description of Combined DNA/RNA Molecule: Synthetic oligonucleotide"
  source: /note="DNA/RNA"
  source: /note="5' tri-ethylene glycol (TEG)"
  modified_base (1)..(1): bicyclic nucleic acid (BNA)
  modified_base (2)..(2): bicyclic nucleic acid (BNA)
  modified_base (7)..(7): 5-methyl modified nucleotide
  modified_base (11)..(11): 5-methyl modified nucleotide
  modified_base (12)..(12): 5-methyl modified nucleotide
  source: /note="3' tri-ethylene glycol (TEG)"
taaguucuguccaag

SEQ ID NO: 18628 - DNA, 20 bp, Artificial Sequence
  source: /note="Description of Artificial Sequence: Synthetic oligonucleotide"
  source: /note="Description of Combined DNA/RNA Molecule: Synthetic oligonucleotide"
  source: /note="DNA/RNA"
  source: /note="5' tri-ethylene glycol (TEG)"
  modified_base (1)..(1): bicyclic nucleic acid (BNA)
  modified_base (2)..(2): bicyclic nucleic acid (BNA)
  modified_base (3)..(3): 5-methyl modified nucleotide
  modified_base (7)..(7): 5-methyl modified nucleotide
  modified_base (8)..(8): 5-methyl modified nucleotide
  modified_base (12)..(12): 5-methyl modified nucleotide
  modified_base (13)..(13): 5-methyl modified nucleotide
  modified_base (14)..(14): 5-methyl modified nucleotide
  source: /note="3' tri-ethylene glycol (TEG)"
ttcuguccaagcccgguuga

SEQ ID NO: 18629 - DNA, 19 bp, Artificial Sequence
  source: /note="Description of Artificial Sequence: Synthetic oligonucleotide"
  source: /note="Description of Combined DNA/RNA Molecule: Synthetic oligonucleotide"
  source: /note="DNA/RNA"
  source: /note="5' tri-ethylene glycol (TEG)"
  modified_base (1)..(1): bicyclic nucleic acid (BNA)
  modified_base (2)..(2): bicyclic nucleic acid (BNA)
  modified_base (3)..(3): 5-methyl modified nucleotide
  modified_base (7)..(7): 5-methyl modified nucleotide
  modified_base (8)..(8): 5-methyl modified nucleotide
  modified_base (12)..(12): 5-methyl modified nucleotide
  modified_base (13)..(13): 5-methyl modified nucleotide
  modified_base (14)..(14): 5-methyl modified nucleotide
  source: /note="3' tri-ethylene glycol (TEG)"
ttcuguccaagcccgguug

SEQ ID NO: 18630 - DNA, 18 bp, Artificial Sequence
  source: /note="Description of Artificial Sequence: Synthetic oligonucleotide"
  source: /note="Description of Combined DNA/RNA Molecule: Synthetic oligonucleotide"
  source: /note="DNA/RNA"
  source: /note="5' tri-ethylene glycol (TEG)"
  modified_base (1)..(1): bicyclic nucleic acid (BNA)
  modified_base (2)..(2): bicyclic nucleic acid (BNA)
  modified_base (3)..(3): 5-methyl modified nucleotide
  modified_base (7)..(7): 5-methyl modified nucleotide
  modified_base (8)..(8): 5-methyl modified nucleotide
  modified_base (12)..(12): 5-methyl modified nucleotide
  modified_base (13)..(13): 5-methyl modified nucleotide
  modified_base (14)..(14): 5-methyl modified nucleotide
  source: /note="3' tri-ethylene glycol (TEG)"
ttcuguccaagcccgguu

SEQ ID NO: 18631 - DNA, 17 bp, Artificial Sequence
  source: /note="Description of Artificial Sequence: Synthetic oligonucleotide"
  source: /note="Description of Combined DNA/RNA Molecule: Synthetic oligonucleotide"
  source: /note="DNA/RNA"
  source: /note="5' tri-ethylene glycol (TEG)"
  modified_base (1)..(1): bicyclic nucleic acid (BNA)
  modified_base (2)..(2): bicyclic nucleic acid (BNA)
  modified_base (3)..(3): 5-methyl modified nucleotide
  modified_base (7)..(7): 5-methyl modified nucleotide
  modified_base (8)..(8): 5-methyl modified nucleotide
  modified_base (12)..(12): 5-methyl modified nucleotide
  modified_base (13)..(13): 5-methyl modified nucleotide
  modified_base (14)..(14): 5-methyl modified nucleotide
  source: /note="3' tri-ethylene glycol (TEG)"
ttcuguccaagcccggu

SEQ ID NO: 18632 - DNA, 16 bp, Artificial Sequence
  source: /note="Description of Artificial Sequence: Synthetic oligonucleotide"
  source: /note="Description of Combined DNA/RNA Molecule: Synthetic oligonucleotide"
  source: /note="DNA/RNA"
  source: /note="5' tri-ethylene glycol (TEG)"
  modified_base (1)..(1): bicyclic nucleic acid (BNA)
  modified_base (2)..(2): bicyclic nucleic acid (BNA)
  modified_base (3)..(3): 5-methyl modified nucleotide
  modified_base (7)..(7): 5-methyl modified nucleotide
  modified_base (8)..(8): 5-methyl modified nucleotide
  modified_base (12)..(12): 5-methyl modified nucleotide
  modified_base (13)..(13): 5-methyl modified nucleotide
  modified_base (14)..(14): 5-methyl modified nucleotide
  source: /note="3' tri-ethylene glycol (TEG)"
ttcuguccaagcccgg

SEQ ID NO: 18633 - DNA, 15 bp, Artificial Sequence
  source: /note="Description of Artificial Sequence: Synthetic oligonucleotide"
  source: /note="Description of Combined DNA/RNA Molecule: Synthetic oligonucleotide"
  source: /note="DNA/RNA"
  source: /note="5' tri-ethylene glycol (TEG)"
  modified_base (1)..(1): bicyclic nucleic acid (BNA)
  modified_base (2)..(2): bicyclic nucleic acid (BNA)
  modified_base (3)..(3): 5-methyl modified nucleotide
  modified_base (7)..(7): 5-methyl modified nucleotide
  modified_base (8)..(8): 5-methyl modified nucleotide
  modified_base (12)..(12): 5-methyl modified nucleotide
  modified_base (13)..(13): 5-methyl modified nucleotide
  modified_base (14)..(14): 5-methyl modified nucleotide
  source: /note="3' tri-ethylene glycol (TEG)"
ttcuguccaagcccg

SEQ ID NO: 18634 - DNA, 14 bp, Artificial Sequence
  source: /note="Description of Artificial Sequence: Synthetic oligonucleotide"
  source: /note="Description of Combined DNA/RNA Molecule: Synthetic oligonucleotide"
  source: /note="DNA/RNA"
  source: /note="5' tri-ethylene glycol (TEG)"
  modified_base (1)..(1): bicyclic nucleic acid (BNA)
  modified_base (2)..(2): bicyclic nucleic acid (BNA)
  modified_base (3)..(3): 5-methyl modified nucleotide
  modified_base (7)..(7): 5-methyl modified nucleotide
  modified_base (8)..(8): 5-methyl modified nucleotide
  modified_base (12)..(12): 5-methyl modified nucleotide
  modified_base (13)..(13): 5-methyl modified nucleotide
  modified_base (14)..(14): 5-methyl modified nucleotide
  source: /note="3' tri-ethylene glycol (TEG)"
ttcuguccaagccc

SEQ ID NO: 18635 - DNA, 13 bp, Artificial Sequence
  source: /note="Description of Artificial Sequence: Synthetic oligonucleotide"
  source: /note="Description of Combined DNA/RNA Molecule: Synthetic oligonucleotide"
  source: /note="DNA/RNA"
  source: /note="5' tri-ethylene glycol (TEG)"
  modified_base (1)..(1): bicyclic nucleic acid (BNA)
  modified_base (2)..(2): bicyclic nucleic acid (BNA)
  modified_base (3)..(3): 5-methyl modified nucleotide
  modified_base (7)..(7): 5-methyl modified nucleotide
  modified_base (8)..(8): 5-methyl modified nucleotide
  modified_base (12)..(12): 5-methyl modified nucleotide
  modified_base (13)..(13): 5-methyl modified nucleotide
  source: /note="3' tri-ethylene glycol (TEG)"
ttcuguccaagcc

SEQ ID NO: 18636 - DNA, 12 bp, Artificial Sequence
  source: /note="Description of Artificial Sequence: Synthetic oligonucleotide"
  source: /note="Description of Combined DNA/RNA Molecule: Synthetic oligonucleotide"
  source: /note="DNA/RNA"
  source: /note="5' tri-ethylene glycol (TEG)"
  modified_base (1)..(1): bicyclic nucleic acid (BNA)
  modified_base (2)..(2): bicyclic nucleic acid (BNA)
  modified_base (3)..(3): 5-methyl modified nucleotide
  modified_base (7)..(7): 5-methyl modified nucleotide
  modified_base (8)..(8): 5-methyl modified nucleotide
  modified_base (12)..(12): 5-methyl modified nucleotide
  source: /note="3' tri-ethylene glycol (TEG)"
ttcuguccaagc

SEQ ID NO: 18637 - DNA, 11 bp, Artificial Sequence
  source: /note="Description of Artificial Sequence: Synthetic oligonucleotide"
  source: /note="Description of Combined DNA/RNA Molecule: Synthetic oligonucleotide"
  source: /note="DNA/RNA"
  source: /note="5' tri-ethylene glycol (TEG)"
  modified_base (1)..(1): bicyclic nucleic acid (BNA)
  modified_base (2)..(2): bicyclic nucleic acid (BNA)
  modified_base (3)..(3): 5-methyl modified nucleotide
  modified_base (7)..(7): 5-methyl modified nucleotide
  modified_base (8)..(8): 5-methyl modified nucleotide
  source: /note="3' tri-ethylene glycol (TEG)"
ttcuguccaag

SEQ ID NO: 18638 - DNA, 10 bp, Artificial Sequence
  source: /note="Description of Artificial Sequence: Synthetic oligonucleotide"
  source: /note="Description of Combined DNA/RNA Molecule: Synthetic oligonucleotide"
  source: /note="DNA/RNA"
  source: /note="5' tri-ethylene glycol (TEG)"
  modified_base (1)..(1): bicyclic nucleic acid (BNA)
  modified_base (2)..(2): bicyclic nucleic acid (BNA)
  modified_base (3)..(3): 5-methyl modified nucleotide
  modified_base (7)..(7): 5-methyl modified nucleotide
  modified_base (8)..(8): 5-methyl modified nucleotide
  source: /note="3' tri-ethylene glycol (TEG)"
ttcuguccaa

SEQ ID NO: 18639 - DNA, 9 bp, Artificial Sequence
  source: /note="Description of Artificial Sequence: Synthetic oligonucleotide"
  source: /note="Description of Combined DNA/RNA Molecule: Synthetic oligonucleotide"
  source: /note="DNA/RNA"
  source: /note="5' tri-ethylene glycol (TEG)"
  modified_base (1)..(1): bicyclic nucleic acid (BNA)
  modified_base (2)..(2): bicyclic nucleic acid (BNA)
  modified_base (3)..(3): 5-methyl modified nucleotide
  modified_base (7)..(7): 5-methyl modified nucleotide
  modified_base (8)..(8): 5-methyl modified nucleotide
  source: /note="3' tri-ethylene glycol (TEG)"
ttcugucca

SEQ ID NO: 18640 - DNA, 8 bp, Artificial Sequence
  source: /note="Description of Artificial Sequence: Synthetic oligonucleotide"
  source: /note="Description of Combined DNA/RNA Molecule: Synthetic oligonucleotide"
  source: /note="DNA/RNA"
  source: /note="5' tri-ethylene glycol (TEG)"
  modified_base (1)..(1): bicyclic nucleic acid (BNA)
  modified_base (2)..(2): bicyclic nucleic acid (BNA)
  modified_base (3)..(3): 5-methyl modified nucleotide
  modified_base (7)..(7): 5-methyl modified nucleotide
  modified_base (8)..(8): 5-methyl modified nucleotide
  source: /note="3' tri-ethylene glycol (TEG)"
ttcugucc

SEQ ID NO: 18641 - DNA, 19 bp, Artificial Sequence
  source: /note="Description of Artificial Sequence: Synthetic oligonucleotide"
  source: /note="Description of Combined DNA/RNA Molecule: Synthetic oligonucleotide"
  source: /note="DNA/RNA"
  source: /note="5' tri-ethylene glycol (TEG)"
  modified_base (1)..(1): bicyclic nucleic acid (BNA)
  modified_base (2)..(2): 5-methyl bicyclic nucleic acid
  modified_base (6)..(6): 5-methyl modified nucleotide
  modified_base (7)..(7): 5-methyl modified nucleotide
  modified_base (11)..(11): 5-methyl modified nucleotide
  modified_base (12)..(12): 5-methyl modified nucleotide
  modified_base (13)..(13): 5-methyl modified nucleotide
  source: /note="3' tri-ethylene glycol (TEG)"
tcuguccaagcccgguuga

SEQ ID NO: 18642 - DNA, 18 bp, Artificial Sequence
  source: /note="Description of Artificial Sequence: Synthetic oligonucleotide"
  source: /note="Description of Combined DNA/RNA Molecule: Synthetic oligonucleotide"
  source: /note="DNA/RNA"
  source: /note="5' tri-ethylene glycol (TEG)"
  modified_base (1)..(1): bicyclic nucleic acid (BNA)
  modified_base (2)..(2): 5-methyl bicyclic nucleic acid
  modified_base (6)..(6): 5-methyl modified nucleotide
  modified_base (7)..(7): 5-methyl modified nucleotide
  modified_base (11)..(11): 5-methyl modified nucleotide
  modified_base (12)..(12): 5-methyl modified nucleotide
  modified_base (13)..(13): 5-methyl modified nucleotide
  source: /note="3' tri-ethylene glycol (TEG)"
tcuguccaagcccgguug

SEQ ID NO: 18643 - DNA, 17 bp, Artificial Sequence
  source: /note="Description of Artificial Sequence: Synthetic oligonucleotide"
  source: /note="Description of Combined DNA/RNA Molecule: Synthetic oligonucleotide"
  source: /note="DNA/RNA"
  source: /note="5' tri-ethylene glycol (TEG)"
  modified_base (1)..(1): bicyclic nucleic acid (BNA)
  modified_base (2)..(2): 5-methyl bicyclic nucleic acid
  modified_base (6)..(6): 5-methyl modified nucleotide
  modified_base (7)..(7): 5-methyl modified nucleotide
  modified_base (11)..(11): 5-methyl modified nucleotide
  modified_base (12)..(12): 5-methyl modified nucleotide
  modified_base (13)..(13): 5-methyl modified nucleotide
  source: /note="3' tri-ethylene glycol (TEG)"
tcuguccaagcccgguu

SEQ ID NO: 18644 - DNA, 16 bp, Artificial Sequence
  source: /note="Description of Artificial Sequence: Synthetic oligonucleotide"
  source: /note="Description of Combined DNA/RNA Molecule: Synthetic oligonucleotide"
  source: /note="DNA/RNA"
  source: /note="5' tri-ethylene glycol (TEG)"
  modified_base (1)..(1): bicyclic nucleic acid (BNA)
  modified_base (2)..(2): 5-methyl bicyclic nucleic acid
  modified_base (6)..(6): 5-methyl modified nucleotide
  modified_base (7)..(7): 5-methyl modified nucleotide
  modified_base (11)..(11): 5-methyl modified nucleotide
  modified_base (12)..(12): 5-methyl modified nucleotide
  modified_base (13)..(13): 5-methyl modified nucleotide
  source: /note="3' tri-ethylene glycol (TEG)"
tcuguccaagcccggu

SEQ ID NO: 18645 - DNA, 15 bp, Artificial Sequence
  source: /note="Description of Artificial Sequence: Synthetic oligonucleotide"
  source: /note="Description of Combined DNA/RNA Molecule: Synthetic oligonucleotide"
  source: /note="DNA/RNA"
  source: /note="5' tri-ethylene glycol (TEG)"
  modified_base (1)..(1): bicyclic nucleic acid (BNA)
  modified_base (2)..(2): 5-methyl bicyclic nucleic acid
  modified_base (6)..(6): 5-methyl modified nucleotide
  modified_base (7)..(7): 5-methyl modified nucleotide
  modified_base (11)..(11): 5-methyl modified nucleotide
  modified_base (12)..(12): 5-methyl modified nucleotide
  modified_base (13)..(13): 5-methyl modified nucleotide
  source: /note="3' tri-ethylene glycol (TEG)"
tcuguccaagcccgg

SEQ ID NO: 18646 - DNA, 14 bp, Artificial Sequence
  source: /note="Description of Artificial Sequence: Synthetic oligonucleotide"
  source: /note="Description of Combined DNA/RNA Molecule: Synthetic oligonucleotide"
  source: /note="DNA/RNA"
  source: /note="5' tri-ethylene glycol (TEG)"
  modified_base (1)..(1): bicyclic nucleic acid (BNA)
  modified_base (2)..(2): 5-methyl bicyclic nucleic acid
  modified_base (6)..(6): 5-methyl modified nucleotide
  modified_base (7)..(7): 5-methyl modified nucleotide
  modified_base (11)..(11): 5-methyl modified nucleotide
  modified_base (12)..(12): 5-methyl modified nucleotide
  modified_base (13)..(13): 5-methyl modified nucleotide
  source: /note="3' tri-ethylene glycol (TEG)"
tcuguccaagcccg

SEQ ID NO: 18647 - DNA, 13 bp, Artificial Sequence
  source: /note="Description of Artificial Sequence: Synthetic oligonucleotide"
  source: /note="Description of Combined DNA/RNA Molecule: Synthetic oligonucleotide"
  source: /note="DNA/RNA"
  source: /note="5' tri-ethylene glycol (TEG)"
  modified_base (1)..(1): bicyclic nucleic acid (BNA)
  modified_base (2)..(2): 5-methyl bicyclic nucleic acid
  modified_base (6)..(6): 5-methyl modified nucleotide
  modified_base (7)..(7): 5-methyl modified nucleotide
  modified_base (11)..(11): 5-methyl modified nucleotide
  modified_base (12)..(12): 5-methyl modified nucleotide
  modified_base (13)..(13): 5-methyl modified nucleotide
  source: /note="3' tri-ethylene glycol (TEG)"
tcuguccaagccc

SEQ ID NO: 18648 - DNA, 12 bp, Artificial Sequence
  source: /note="Description of Artificial Sequence: Synthetic oligonucleotide"
  source: /note="Description of Combined DNA/RNA Molecule: Synthetic oligonucleotide"
  source: /note="DNA/RNA"
  source: /note="5' tri-ethylene glycol (TEG)"
  modified_base (1)..(1): bicyclic nucleic acid (BNA)
  modified_base (2)..(2): 5-methyl bicyclic nucleic acid
  modified_base (6)..(6): 5-methyl modified nucleotide
  modified_base (7)..(7): 5-methyl modified nucleotide
  modified_base (11)..(11): 5-methyl modified nucleotide
  modified_base (12)..(12): 5-methyl modified nucleotide
  source: /note="3' tri-ethylene glycol (TEG)"
tcuguccaagcc

SEQ ID NO: 18649 - DNA, 11 bp, Artificial Sequence
  source: /note="Description of Artificial Sequence: Synthetic oligonucleotide"
  source: /note="Description of Combined DNA/RNA Molecule: Synthetic oligonucleotide"
  source: /note="DNA/RNA"
  source: /note="5' tri-ethylene glycol (TEG)"
  modified_base (1)..(1): bicyclic nucleic acid (BNA)
  modified_base (2)..(2): 5-methyl bicyclic nucleic acid
  modified_base (6)..(6): 5-methyl modified nucleotide
  modified_base (7)..(7): 5-methyl modified nucleotide
  modified_base (11)..(11): 5-methyl modified nucleotide
  source: /note="3' tri-ethylene glycol (TEG)"
tcuguccaagc

SEQ ID NO: 18650 - DNA, 10 bp, Artificial Sequence
  source: /note="Description of Artificial Sequence: Synthetic oligonucleotide"
  source: /note="Description of Combined DNA/RNA Molecule: Synthetic oligonucleotide"
  source: /note="DNA/RNA"
  source: /note="5' tri-ethylene glycol (TEG)"
  modified_base (1)..(1): bicyclic nucleic acid (BNA)
  modified_base (2)..(2): 5-methyl bicyclic nucleic acid
  modified_base (6)..(6): 5-methyl modified nucleotide
  modified_base (7)..(7): 5-methyl modified nucleotide
  source: /note="3' tri-ethylene glycol (TEG)"
tcuguccaag

SEQ ID NO: 18651 - DNA, 9 bp, Artificial Sequence
  source: /note="Description of Artificial Sequence: Synthetic oligonucleotide"
  source: /note="Description of Combined DNA/RNA Molecule: Synthetic oligonucleotide"
  source: /note="DNA/RNA"
  source: /note="5' tri-ethylene glycol (TEG)"
  modified_base (1)..(1): bicyclic nucleic acid (BNA)
  modified_base (2)..(2): 5-methyl bicyclic nucleic acid
  modified_base (6)..(6): 5-methyl modified nucleotide
  modified_base (7)..(7): 5-methyl modified nucleotide
  source: /note="3' tri-ethylene glycol (TEG)"
tcuguccaa

SEQ ID NO: 18652 - DNA, 8 bp, Artificial Sequence
  source: /note="Description of Artificial Sequence: Synthetic oligonucleotide"
  source: /note="Description of Combined DNA/RNA Molecule: Synthetic oligonucleotide"
  source: /note="DNA/RNA"
  source: /note="5' tri-ethylene glycol (TEG)"
  modified_base (1)..(1): bicyclic nucleic acid (BNA)
  modified_base (2)..(2): 5-methyl bicyclic nucleic acid
  modified_base (6)..(6): 5-methyl modified nucleotide
  modified_base (7)..(7): 5-methyl modified nucleotide
  source: /note="3' tri-ethylene glycol (TEG)"
tcugucca

SEQ ID NO: 18653 - DNA, 17 bp, Artificial Sequence
  source: /note="Description of Artificial Sequence: Synthetic oligonucleotide"
  source: /note="Description of Combined DNA/RNA Molecule: Synthetic oligonucleotide"
  source: /note="DNA/RNA"
  source: /note="5' tri-ethylene glycol (TEG)"
  modified_base (1)..(1): 5-methyl bicyclic nucleic acid
  modified_base (2)..(2): bicyclic nucleic acid (BNA)
  modified_base (5)..(5): 5-methyl modified nucleotide
  modified_base (6)..(6): 5-methyl modified nucleotide
  modified_base (10)..(10): 5-methyl modified nucleotide
  modified_base (11)..(11): 5-methyl modified nucleotide
  modified_base (12)..(12): 5-methyl modified nucleotide
  source: /note="3' tri-ethylene glycol (TEG)"
ctguccaagcccgguug

SEQ ID NO: 18654 - DNA, 16 bp, Artificial Sequence
  source: /note="Description of Artificial Sequence: Synthetic oligonucleotide"
  source: /note="Description of Combined DNA/RNA Molecule: Synthetic oligonucleotide"
  source: /note="DNA/RNA"
  source: /note="5' tri-ethylene glycol (TEG)"
  modified_base (1)..(1): 5-methyl bicyclic nucleic acid
  modified_base (2)..(2): bicyclic nucleic acid (BNA)
  modified_base (5)..(5): 5-methyl modified nucleotide
  modified_base (6)..(6): 5-methyl modified nucleotide
  modified_base (10)..(10): 5-methyl modified nucleotide
  modified_base (11)..(11): 5-methyl modified nucleotide
  modified_base (12)..(12): 5-methyl modified nucleotide
  source: /note="3' tri-ethylene glycol (TEG)"
ctguccaagcccgguu

SEQ ID NO: 18655 - DNA, 15 bp, Artificial Sequence
  source: /note="Description of Artificial Sequence: Synthetic oligonucleotide"
  source: /note="Description of Combined DNA/RNA Molecule: Synthetic oligonucleotide"
  source: /note="DNA/RNA"
  source: /note="5' tri-ethylene glycol (TEG)"
  modified_base (1)..(1): 5-methyl bicyclic nucleic acid
  modified_base (2)..(2): bicyclic nucleic acid (BNA)
  modified_base (5)..(5): 5-methyl modified nucleotide
  modified_base (6)..(6): 5-methyl modified nucleotide
  modified_base (10)..(10): 5-methyl modified nucleotide
  modified_base (11)..(11): 5-methyl modified nucleotide
  modified_base (12)..(12): 5-methyl modified nucleotide
  source: /note="3' tri-ethylene glycol (TEG)"
ctguccaagcccggu

SEQ ID NO: 18656 - DNA, 14 bp, Artificial Sequence
  source: /note="Description of Artificial Sequence: Synthetic oligonucleotide"
  source: /note="Description of Combined DNA/RNA Molecule: Synthetic oligonucleotide"
  source: /note="DNA/RNA"
  source: /note="5' tri-ethylene glycol (TEG)"
  modified_base (1)..(1): 5-methyl bicyclic nucleic acid
  modified_base (2)..(2): bicyclic nucleic acid (BNA)
  modified_base (5)..(5): 5-methyl modified nucleotide
  modified_base (6)..(6): 5-methyl modified nucleotide
  modified_base (10)..(10): 5-methyl modified nucleotide
  modified_base (11)..(11): 5-methyl modified nucleotide
  modified_base (12)..(12): 5-methyl modified nucleotide
  source: /note="3' tri-ethylene glycol (TEG)"
ctguccaagcccgg

SEQ ID NO: 18657 - DNA, 13 bp, Artificial Sequence
  source: /note="Description of Artificial Sequence: Synthetic oligonucleotide"
  source: /note="Description of Combined DNA/RNA Molecule: Synthetic oligonucleotide"
  source: /note="DNA/RNA"
  source: /note="5' tri-ethylene glycol (TEG)"
  modified_base (1)..(1): 5-methyl bicyclic nucleic acid
  modified_base (2)..(2): bicyclic nucleic acid (BNA)
  modified_base (5)..(5): 5-methyl modified nucleotide
  modified_base (6)..(6): 5-methyl modified nucleotide
  modified_base (10)..(10): 5-methyl modified nucleotide
  modified_base (11)..(11): 5-methyl modified nucleotide
  modified_base (12)..(12): 5-methyl modified nucleotide
  source: /note="3' tri-ethylene glycol (TEG)"
ctguccaagcccg

SEQ ID NO: 18658 - DNA, 12 bp, Artificial Sequence
  source: /note="Description of Artificial Sequence: Synthetic oligonucleotide"
  source: /note="Description of Combined DNA/RNA Molecule: Synthetic oligonucleotide"
  source: /note="DNA/RNA"
  source: /note="5' tri-ethylene glycol (TEG)"
  modified_base (1)..(1): 5-methyl bicyclic nucleic acid
  modified_base (2)..(2): bicyclic nucleic acid (BNA)
  modified_base (5)..(5): 5-methyl modified nucleotide
  modified_base (6)..(6): 5-methyl modified nucleotide
  modified_base (10)..(10): 5-methyl modified nucleotide
  modified_base (11)..(11): 5-methyl modified nucleotide
  modified_base (12)..(12): 5-methyl modified nucleotide
  source: /note="3' tri-ethylene glycol (TEG)"
ctguccaagccc

SEQ ID NO: 18659 - DNA, 11 bp, Artificial Sequence
  source: /note="Description of Artificial Sequence: Synthetic oligonucleotide"
  source: /note="Description of Combined DNA/RNA Molecule: Synthetic oligonucleotide"
  source: /note="DNA/RNA"
  source: /note="5' tri-ethylene glycol (TEG)"
  modified_base (1)..(1): 5-methyl bicyclic nucleic acid
  modified_base (2)..(2): bicyclic nucleic acid (BNA)
  modified_base (5)..(5): 5-methyl modified nucleotide
  modified_base (6)..(6): 5-methyl modified nucleotide
  modified_base (10)..(10): 5-methyl modified nucleotide
  modified_base (11)..(11): 5-methyl modified nucleotide
  source: /note="3' tri-ethylene glycol (TEG)"
ctguccaagcc

SEQ ID NO: 18660 - DNA, 10 bp, Artificial Sequence
  source: /note="Description of Artificial Sequence: Synthetic oligonucleotide"
  source: /note="Description of Combined DNA/RNA Molecule: Synthetic oligonucleotide"
  source: /note="DNA/RNA"
  source: /note="5' tri-ethylene glycol (TEG)"
  modified_base (1)..(1): 5-methyl bicyclic nucleic acid
  modified_base (2)..(2): bicyclic nucleic acid (BNA)
  modified_base (5)..(5): 5-methyl modified nucleotide
  modified_base (6)..(6): 5-methyl modified nucleotide
  modified_base (10)..(10): 5-methyl modified nucleotide
  source: /note="3' tri-ethylene glycol (TEG)"
ctguccaagc

SEQ ID NO: 18661 - DNA, 9 bp, Artificial Sequence
  source: /note="Description of Artificial Sequence: Synthetic oligonucleotide"
  source: /note="Description of Combined DNA/RNA Molecule: Synthetic oligonucleotide"
  source: /note="DNA/RNA"
  source: /note="5' tri-ethylene glycol (TEG)"
  modified_base (1)..(1): 5-methyl bicyclic nucleic acid
  modified_base (2)..(2): bicyclic nucleic acid (BNA)
  modified_base (5)..(5): 5-methyl modified nucleotide
  modified_base (6)..(6): 5-methyl modified nucleotide
  source: /note="3' tri-ethylene glycol (TEG)"
ctguccaag

SEQ ID NO: 18662 - DNA, 8 bp, Artificial Sequence
  source: /note="Description of Artificial Sequence: Synthetic oligonucleotide"
  source: /note="Description of Combined DNA/RNA Molecule: Synthetic oligonucleotide"
  source: /note="DNA/RNA"
  source: /note="5' tri-ethylene glycol (TEG)"
  modified_base (1)..(1): 5-methyl bicyclic nucleic acid
  modified_base (2)..(2): bicyclic nucleic acid (BNA)
  modified_base (5)..(5): 5-methyl modified nucleotide
  modified_base (6)..(6): 5-methyl modified nucleotide
  source: /note="3' tri-ethylene glycol (TEG)"
ctguccaa

SEQ ID NO: 18663 - DNA, 20 bp, Artificial Sequence
  source: /note="Description of Artificial Sequence: Synthetic oligonucleotide"
  source: /note="Description of Combined DNA/RNA Molecule: Synthetic oligonucleotide"
  source: /note="DNA/RNA"
  source: /note="5' tri-ethylene glycol (TEG)"
  modified_base (1)..(1): bicyclic nucleic acid (BNA)
  modified_base (2)..(2): bicyclic nucleic acid (BNA)
  modified_base (4)..(4): 5-methyl modified nucleotide
  modified_base (8)..(8): 5-methyl modified nucleotide
  modified_base (9)..(9): 5-methyl modified nucleotide
  modified_base (13)..(13): 5-methyl modified nucleotide
  modified_base (14)..(14): 5-methyl modified nucleotide
  modified_base (15)..(15): 5-methyl modified nucleotide
  source: /note="3' tri-ethylene glycol (TEG)"
gtucuguccaagcccgguug

SEQ ID NO: 18664 - DNA, 19 bp, Artificial Sequence
  source: /note="Description of Artificial Sequence: Synthetic oligonucleotide"
  source: /note="Description of Combined DNA/RNA Molecule: Synthetic oligonucleotide"
  source: /note="DNA/RNA"
  source: /note="5' tri-ethylene glycol (TEG)"
  modified_base (1)..(1): bicyclic nucleic acid (BNA)
  modified_base (2)..(2): bicyclic nucleic acid (BNA)
  modified_base (4)..(4): 5-methyl modified nucleotide
  modified_base (8)..(8): 5-methyl modified nucleotide
  modified_base (9)..(9): 5-methyl modified nucleotide
  modified_base (13)..(13): 5-methyl modified nucleotide
  modified_base (14)..(14): 5-methyl modified nucleotide
  modified_base (15)..(15): 5-methyl modified nucleotide
  source: /note="3' tri-ethylene glycol (TEG)"
gtucuguccaagcccgguu

SEQ ID NO: 18665 - DNA, 18 bp, Artificial Sequence
  source: /note="Description of Artificial Sequence: Synthetic oligonucleotide"
  source: /note="Description of Combined DNA/RNA Molecule: Synthetic oligonucleotide"
  source: /note="DNA/RNA"
  source: /note="5' tri-ethylene glycol (TEG)"
  modified_base (1)..(1): bicyclic nucleic acid (BNA)
  modified_base (2)..(2): bicyclic nucleic acid (BNA)
  modified_base (4)..(4): 5-methyl modified nucleotide
  modified_base (8)..(8): 5-methyl modified nucleotide
  modified_base (9)..(9): 5-methyl modified nucleotide
  modified_base (13)..(13): 5-methyl modified nucleotide
  modified_base (14)..(14): 5-methyl modified nucleotide
  modified_base (15)..(15): 5-methyl modified nucleotide
  source: /note="3' tri-ethylene glycol (TEG)"
gtucuguccaagcccggu

SEQ ID NO: 18666 - DNA, 17 bp, Artificial Sequence
  source: /note="Description of Artificial Sequence: Synthetic oligonucleotide"
  source: /note="Description of Combined DNA/RNA Molecule: Synthetic oligonucleotide"
  source: /note="DNA/RNA"
  source: /note="5' tri-ethylene glycol (TEG)"
  modified_base (1)..(1): bicyclic nucleic acid (BNA)
  modified_base (2)..(2): bicyclic nucleic acid (BNA)
  modified_base (4)..(4): 5-methyl modified nucleotide
  modified_base (8)..(8): 5-methyl modified nucleotide
  modified_base (9)..(9): 5-methyl modified nucleotide
  modified_base (13)..(13): 5-methyl modified nucleotide
  modified_base (14)..(14): 5-methyl modified nucleotide
  modified_base (15)..(15): 5-methyl modified nucleotide
  source: /note="3' tri-ethylene glycol (TEG)"
gtucuguccaagcccgg

SEQ ID NO: 18667 - DNA, 16 bp, Artificial Sequence
  source: /note="Description of Artificial Sequence: Synthetic oligonucleotide"
  source: /note="Description of Combined DNA/RNA Molecule: Synthetic oligonucleotide"
  source: /note="DNA/RNA"
  source: /note="5' tri-ethylene glycol (TEG)"
  modified_base (1)..(1): bicyclic nucleic acid (BNA)
  modified_base (2)..(2): bicyclic nucleic acid (BNA)
  modified_base (4)..(4): 5-methyl modified nucleotide
  modified_base (8)..(8): 5-methyl modified nucleotide
  modified_base (9)..(9): 5-methyl modified nucleotide
  modified_base (13)..(13): 5-methyl modified nucleotide
  modified_base (14)..(14): 5-methyl modified nucleotide
  modified_base (15)..(15): 5-methyl modified nucleotide
  source: /note="3' tri-ethylene glycol (TEG)"
gtucuguccaagcccg

SEQ ID NO: 18668 - DNA, 15 bp, Artificial Sequence
  source: /note="Description of Artificial Sequence: Synthetic oligonucleotide"
  source: /note="Description of Combined DNA/RNA Molecule: Synthetic oligonucleotide"
  source: /note="DNA/RNA"
  source: /note="5' tri-ethylene glycol (TEG)"
  modified_base (1)..(1): bicyclic nucleic acid (BNA)
  modified_base (2)..(2): bicyclic nucleic acid (BNA)
  modified_base (4)..(4): 5-methyl modified nucleotide
  modified_base (8)..(8): 5-methyl modified nucleotide
  modified_base (9)..(9): 5-methyl modified nucleotide
  modified_base (13)..(13): 5-methyl modified nucleotide
  modified_base (14)..(14): 5-methyl modified nucleotide
  modified_base (15)..(15): 5-methyl modified nucleotide
  source: /note="3' tri-ethylene glycol (TEG)"
gtucuguccaagccc

SEQ ID NO: 18669 - DNA, 14 bp, Artificial Sequence
  source: /note="Description of Artificial Sequence: Synthetic oligonucleotide"
  source: /note="Description of Combined DNA/RNA Molecule: Synthetic oligonucleotide"
  source: /note="DNA/RNA"
  source: /note="5' tri-ethylene glycol (TEG)"
  modified_base (1)..(1): bicyclic nucleic acid (BNA)
  modified_base (2)..(2): bicyclic nucleic acid (BNA)
  modified_base (4)..(4): 5-methyl modified nucleotide
  modified_base (8)..(8): 5-methyl modified nucleotide
  modified_base (9)..(9): 5-methyl modified nucleotide
  modified_base (13)..(13): 5-methyl modified nucleotide
  modified_base (14)..(14): 5-methyl modified nucleotide
  source: /note="3' tri-ethylene glycol (TEG)"
gtucuguccaagcc

SEQ ID NO: 18670 - DNA, 13 bp, Artificial Sequence
  source: /note="Description of Artificial Sequence: Synthetic oligonucleotide"
  source: /note="Description of Combined DNA/RNA Molecule: Synthetic oligonucleotide"
  source: /note="DNA/RNA"
  source: /note="5' tri-ethylene glycol (TEG)"
  modified_base (1)..(1): bicyclic nucleic acid (BNA)
  modified_base (2)..(2): bicyclic nucleic acid (BNA)
  modified_base (4)..(4): 5-methyl modified nucleotide
  modified_base (8)..(8): 5-methyl modified nucleotide
  modified_base (9)..(9): 5-methyl modified nucleotide
  modified_base (13)..(13): 5-methyl modified nucleotide
  source: /note="3' tri-ethylene glycol (TEG)"
gtucuguccaagc

SEQ ID NO: 18671 - DNA, 12 bp, Artificial Sequence
  source: /note="Description of Artificial Sequence: Synthetic oligonucleotide"
  source: /note="Description of Combined DNA/RNA Molecule: Synthetic oligonucleotide"
  source: /note="DNA/RNA"
  source: /note="5' tri-ethylene glycol (TEG)"
  modified_base (1)..(1): bicyclic nucleic acid (BNA)
  modified_base (2)..(2): bicyclic nucleic acid (BNA)
  modified_base (4)..(4): 5-methyl modified nucleotide
  modified_base (8)..(8): 5-methyl modified nucleotide
  modified_base (9)..(9): 5-methyl modified nucleotide
  source: /note="3' tri-ethylene glycol (TEG)"
gtucuguccaag

SEQ ID NO: 18672 - DNA, 11 bp, Artificial Sequence
  source: /note="Description of Artificial Sequence: Synthetic oligonucleotide"
  source: /note="Description of Combined DNA/RNA Molecule: Synthetic oligonucleotide"
  source: /note="DNA/RNA"
  source: /note="5' tri-ethylene glycol (TEG)"
  modified_base (1)..(1): bicyclic nucleic acid (BNA)
  modified_base (2)..(2): bicyclic nucleic acid (BNA)
  modified_base (4)..(4): 5-methyl modified nucleotide
  modified_base (8)..(8): 5-methyl modified nucleotide
  modified_base (9)..(9): 5-methyl modified nucleotide
  source: /note="3' tri-ethylene glycol (TEG)"
gtucuguccaa

SEQ ID NO: 18673 - DNA, 10 bp, Artificial Sequence
  source: /note="Description of Artificial Sequence: Synthetic oligonucleotide"
  source: /note="Description of Combined DNA/RNA Molecule: Synthetic oligonucleotide"
  source: /note="DNA/RNA"
  source: /note="5' tri-ethylene glycol (TEG)"
  modified_base (1)..(1): bicyclic nucleic acid (BNA)
  modified_base (2)..(2): bicyclic nucleic acid (BNA)
  modified_base (4)..(4): 5-methyl modified nucleotide
  modified_base (8)..(8): 5-methyl modified nucleotide
  modified_base (9)..(9): 5-methyl modified nucleotide
  source: /note="3' tri-ethylene glycol (TEG)"
gtucugucca

SEQ ID NO: 18674 - DNA, 9 bp, Artificial Sequence
  source: /note="Description of Artificial Sequence: Synthetic oligonucleotide"
  source: /note="Description of Combined DNA/RNA Molecule: Synthetic oligonucleotide"
  source: /note="DNA/RNA"
  source: /note="5' tri-ethylene glycol (TEG)"
  modified_base (1)..(1): bicyclic nucleic acid (BNA)
  modified_base (2)..(2): bicyclic nucleic acid (BNA)
  modified_base (4)..(4): 5-methyl modified nucleotide
  modified_base (8)..(8): 5-methyl modified nucleotide
  modified_base (9)..(9): 5-methyl modified nucleotide
  source: /note="3' tri-ethylene glycol (TEG)"
gtucugucc

SEQ ID NO: 18675 - DNA, 8 bp, Artificial Sequence
  source: /note="Description of Artificial Sequence: Synthetic oligonucleotide"
  source: /note="Description of Combined DNA/RNA Molecule: Synthetic oligonucleotide"
  source: /note="DNA/RNA"
  source: /note="5' tri-ethylene glycol (TEG)"
  modified_base (1)..(1): bicyclic nucleic acid (BNA)
  modified_base (2)..(2): bicyclic nucleic acid (BNA)
  modified_base (4)..(4): 5-methyl modified nucleotide
  modified_base (8)..(8): 5-methyl modified nucleotide
  source: /note="3' tri-ethylene glycol (TEG)"
gtucuguc

SEQ ID NO: 18676 - RNA, 20 nt, Artificial Sequence
  source: /note="Description of Artificial Sequence: Synthetic oligonucleotide"
  source: /note="RNA"
  source: /note="5' tri-ethylene glycol (TEG)"
  modified_base (1)..(1): bicyclic nucleic acid (BNA)
  modified_base (2)..(2): bicyclic nucleic acid (BNA)
  modified_base (5)..(5): 5-methyl modified nucleotide
  modified_base (9)..(9): 5-methyl modified nucleotide
  modified_base (10)..(10): 5-methyl modified nucleotide
  modified_base (14)..(14): 5-methyl modified nucleotide
  modified_base (15)..(15): 5-methyl modified nucleotide
  modified_base (16)..(16): 5-methyl modified nucleotide
  source: /note="3' tri-ethylene glycol (TEG)"
aguucuguccaagcccgguu

SEQ ID NO: 18677 - RNA, 19 nt, Artificial Sequence
  source: /note="Description of Artificial Sequence: Synthetic oligonucleotide"
  source: /note="RNA"
  source: /note="5' tri-ethylene glycol (TEG)"
  modified_base (1)..(1): bicyclic nucleic acid (BNA)
  modified_base (2)..(2): bicyclic nucleic acid (BNA)
  modified_base (5)..(5): 5-methyl modified nucleotide
  modified_base (9)..(9): 5-methyl modified nucleotide
  modified_base (10)..(10): 5-methyl modified nucleotide
  modified_base (14)..(14): 5-methyl modified nucleotide
  modified_base (15)..(15): 5-methyl modified nucleotide
  modified_base (16)..(16): 5-methyl modified nucleotide
  source: /note="3' tri-ethylene glycol (TEG)"
aguucuguccaagcccggu

SEQ ID NO: 18678 - RNA, 18 nt, Artificial Sequence
  source: /note="Description of Artificial Sequence: Synthetic oligonucleotide"
  source: /note="RNA"
  source: /note="5' tri-ethylene glycol (TEG)"
  modified_base (1)..(1): bicyclic nucleic acid (BNA)
  modified_base (2)..(2): bicyclic nucleic acid (BNA)
  modified_base (5)..(5): 5-methyl modified nucleotide
  modified_base (9)..(9): 5-methyl modified nucleotide
  modified_base (10)..(10): 5-methyl modified nucleotide
  modified_base (14)..(14): 5-methyl modified nucleotide
  modified_base (15)..(15): 5-methyl modified nucleotide
  modified_base (16)..(16): 5-methyl modified nucleotide
  source: /note="3' tri-ethylene glycol (TEG)"
aguucuguccaagcccgg

SEQ ID NO: 18679 - RNA, 17 nt, Artificial Sequence
  source: /note="Description of Artificial Sequence: Synthetic oligonucleotide"
  source: /note="RNA"
  source: /note="5' tri-ethylene glycol (TEG)"
  modified_base (1)..(1): bicyclic nucleic acid (BNA)
  modified_base (2)..(2): bicyclic nucleic acid (BNA)
  modified_base (5)..(5): 5-methyl modified nucleotide
  modified_base (9)..(9): 5-methyl modified nucleotide
  modified_base (10)..(10): 5-methyl modified nucleotide
  modified_base (14)..(14): 5-methyl modified nucleotide
  modified_base (15)..(15): 5-methyl modified nucleotide
  modified_base (16)..(16): 5-methyl modified nucleotide
  source: /note="3' tri-ethylene glycol (TEG)"
aguucuguccaagcccg

SEQ ID NO: 18680 - RNA, 16 nt, Artificial Sequence
  source: /note="Description of Artificial Sequence: Synthetic oligonucleotide"
  source: /note="RNA"
  source: /note="5' tri-ethylene glycol (TEG)"
  modified_base (1)..(1): bicyclic nucleic acid (BNA)
  modified_base (2)..(2): bicyclic nucleic acid (BNA)
  modified_base (5)..(5): 5-methyl modified nucleotide
  modified_base (9)..(9): 5-methyl modified nucleotide
  modified_base (10)..(10): 5-methyl modified nucleotide
  modified_base (14)..(14): 5-methyl modified nucleotide
  modified_base (15)..(15): 5-methyl modified nucleotide
  modified_base (16)..(16): 5-methyl modified nucleotide
  source: /note="3' tri-ethylene glycol (TEG)"
aguucuguccaagccc

SEQ ID NO: 18681 - RNA, 15 nt, Artificial Sequence
  source: /note="Description of Artificial Sequence: Synthetic oligonucleotide"
  source: /note="RNA"
  source: /note="5' tri-ethylene glycol (TEG)"
  modified_base (1)..(1): bicyclic nucleic acid (BNA)
  modified_base (2)..(2): bicyclic nucleic acid (BNA)
  modified_base (5)..(5): 5-methyl modified nucleotide
  modified_base (9)..(9): 5-methyl modified nucleotide
  modified_base (10)..(10): 5-methyl modified nucleotide
  modified_base (14)..(14): 5-methyl modified nucleotide
  modified_base (15)..(15): 5-methyl modified nucleotide
  source: /note="3' tri-ethylene glycol (TEG)"
aguucuguccaagcc

SEQ ID NO: 18682 - RNA, 14 nt, Artificial Sequence
  source: /note="Description of Artificial Sequence: Synthetic oligonucleotide"
  source: /note="RNA"
  source: /note="5' tri-ethylene glycol (TEG)"
  modified_base (1)..(1): bicyclic nucleic acid (BNA)
  modified_base (2)..(2): bicyclic nucleic acid (BNA)
  modified_base (5)..(5): 5-methyl modified nucleotide
  modified_base (9)..(9): 5-methyl modified nucleotide
  modified_base (10)..(10): 5-methyl modified nucleotide
  modified_base (14)..(14): 5-methyl modified nucleotide
  source: /note="3' tri-ethylene glycol (TEG)"
aguucuguccaagc

SEQ ID NO: 18683 - RNA, 13 nt, Artificial Sequence
  source: /note="Description of Artificial Sequence: Synthetic oligonucleotide"
  source: /note="RNA"
  source: /note="5' tri-ethylene glycol (TEG)"
  modified_base (1)..(1): bicyclic nucleic acid (BNA)
  modified_base (2)..(2): bicyclic nucleic acid (BNA)
  modified_base (5)..(5): 5-methyl modified nucleotide
  modified_base (9)..(9): 5-methyl modified nucleotide
  modified_base (10)..(10): 5-methyl modified nucleotide
  source: /note="3' tri-ethylene glycol (TEG)"
aguucuguccaag

SEQ ID NO: 18684 - RNA, 12 nt, Artificial Sequence
  source: /note="Description of Artificial Sequence: Synthetic oligonucleotide"
  source: /note="RNA"
  source: /note="5' tri-ethylene glycol (TEG)"
  modified_base (1)..(1): bicyclic nucleic acid (BNA)
  modified_base (2)..(2): bicyclic nucleic acid (BNA)
  modified_base (5)..(5): 5-methyl modified nucleotide
  modified_base (9)..(9): 5-methyl modified nucleotide
  modified_base (10)..(10): 5-methyl modified nucleotide
  source: /note="3' tri-ethylene glycol (TEG)"
aguucuguccaa

SEQ ID NO: 18685 - RNA, 11 nt, Artificial Sequence
  source: /note="Description of Artificial Sequence: Synthetic oligonucleotide"
  source: /note="RNA"
  source: /note="5' tri-ethylene glycol (TEG)"
  modified_base (1)..(1): bicyclic nucleic acid (BNA)
  modified_base (2)..(2): bicyclic nucleic acid (BNA)
  modified_base (5)..(5): 5-methyl modified nucleotide
  modified_base (9)..(9): 5-methyl modified nucleotide
  modified_base (10)..(10): 5-methyl modified nucleotide
  source: /note="3' tri-ethylene glycol (TEG)"
aguucugucca

SEQ ID NO: 18686 - RNA, 10 nt, Artificial Sequence
  source: /note="Description of Artificial Sequence: Synthetic oligonucleotide"
  source: /note="RNA"
  source: /note="5' tri-ethylene glycol (TEG)"
  modified_base (1)..(1): bicyclic nucleic acid (BNA)
  modified_base (2)..(2): bicyclic nucleic acid (BNA)
  modified_base (5)..(5): 5-methyl modified nucleotide
  modified_base (9)..(9): 5-methyl modified nucleotide
  modified_base (10)..(10): 5-methyl modified nucleotide
  source: /note="3' tri-ethylene glycol (TEG)"
aguucugucc

SEQ ID NO: 18687 - RNA, 9 nt, Artificial Sequence
  source: /note="Description of Artificial Sequence: Synthetic oligonucleotide"
  source: /note="RNA"
  source: /note="5' tri-ethylene glycol (TEG)"
  modified_base (1)..(1): bicyclic nucleic acid (BNA)
  modified_base (2)..(2): bicyclic nucleic acid (BNA)
  modified_base (5)..(5): 5-methyl modified nucleotide
  modified_base (9)..(9): 5-methyl modified nucleotide
  source: /note="3' tri-ethylene glycol (TEG)"
aguucuguc

SEQ ID NO: 18688 - RNA, 8 nt, Artificial Sequence
  source: /note="Description of Artificial Sequence: Synthetic oligonucleotide"
  source: /note="RNA"
  source: /note="5' tri-ethylene glycol (TEG)"
  modified_base (1)..(1): bicyclic nucleic acid (BNA)
  modified_base (2)..(2): bicyclic nucleic acid (BNA)
  modified_base (5)..(5): 5-methyl modified nucleotide
  source: /note="3' tri-ethylene glycol (TEG)"
aguucugu

SEQ ID NO: 18689 - RNA, 20 nt, Artificial Sequence
  source: /note="Description of Artificial Sequence: Synthetic oligonucleotide"
  source: /note="RNA"
  source: /note="5' tri-ethylene glycol (TEG)"
  modified_base (1)..(1): bicyclic nucleic acid (BNA)
  modified_base (2)..(2): bicyclic nucleic acid (BNA)
  modified_base (6)..(6): 5-methyl modified nucleotide
  modified_base (10)..(10): 5-methyl modified nucleotide
  modified_base (11)..(11): 5-methyl modified nucleotide
  modified_base (15)..(15): 5-methyl modified nucleotide
  modified_base (16)..(16): 5-methyl modified nucleotide
  modified_base (17)..(17): 5-methyl modified nucleotide
  source: /note="3' tri-ethylene glycol (TEG)"
aaguucuguccaagcccggu

SEQ ID NO: 18690 - RNA, 19 nt, Artificial Sequence
  source: /note="Description of Artificial Sequence: Synthetic oligonucleotide"
  source: /note="RNA"
  source: /note="5' tri-ethylene glycol (TEG)"
  modified_base (1)..(1): bicyclic nucleic acid (BNA)
  modified_base (2)..(2): bicyclic nucleic acid (BNA)
  modified_base (6)..(6): 5-methyl modified nucleotide
  modified_base (10)..(10): 5-methyl modified nucleotide
  modified_base (11)..(11): 5-methyl modified nucleotide
  modified_base (15)..(15): 5-methyl modified nucleotide
  modified_base (16)..(16): 5-methyl modified nucleotide
  modified_base (17)..(17): 5-methyl modified nucleotide
  source: /note="3' tri-ethylene glycol (TEG)"
aaguucuguccaagcccgg

SEQ ID NO: 18691 - RNA, 18 nt, Artificial Sequence
  source: /note="Description of Artificial Sequence: Synthetic oligonucleotide"
  source: /note="RNA"
  source: /note="5' tri-ethylene glycol (TEG)"
  modified_base (1)..(1): bicyclic nucleic acid (BNA)
  modified_base (2)..(2): bicyclic nucleic acid (BNA)
  modified_base (6)..(6): 5-methyl modified nucleotide
  modified_base (10)..(10): 5-methyl modified nucleotide
  modified_base (11)..(11): 5-methyl modified nucleotide
  modified_base (15)..(15): 5-methyl modified nucleotide
  modified_base (16)..(16): 5-methyl modified nucleotide
  modified_base (17)..(17): 5-methyl modified nucleotide
  source: /note="3' tri-ethylene glycol (TEG)"
aaguucuguccaagcccg

SEQ ID NO: 18692 - RNA, 17 nt, Artificial Sequence
  source: /note="Description of Artificial Sequence: Synthetic oligonucleotide"
  source: /note="RNA"
  source: /note="5' tri-ethylene glycol (TEG)"
  modified_base (1)..(1): bicyclic nucleic acid (BNA)
  modified_base (2)..(2): bicyclic nucleic acid (BNA)
  modified_base (6)..(6): 5-methyl modified nucleotide
  modified_base (10)..(10): 5-methyl modified nucleotide
  modified_base (11)..(11): 5-methyl modified nucleotide
  modified_base (15)..(15): 5-methyl modified nucleotide
  modified_base (16)..(16): 5-methyl modified nucleotide
  modified_base (17)..(17): 5-methyl modified nucleotide
  source: /note="3' tri-ethylene glycol (TEG)"
aaguucuguccaagccc

SEQ ID NO: 18693 - RNA, 16 nt, Artificial Sequence
  source: /note="Description of Artificial Sequence: Synthetic oligonucleotide"
  source: /note="RNA"
  source: /note="5' tri-ethylene glycol (TEG)"
  modified_base (1)..(1): bicyclic nucleic acid (BNA)
  modified_base (2)..(2): bicyclic nucleic acid (BNA)
  modified_base (6)..(6): 5-methyl modified nucleotide
  modified_base (10)..(10): 5-methyl modified nucleotide
  modified_base (11)..(11): 5-methyl modified nucleotide
  modified_base (15)..(15): 5-methyl modified nucleotide
  modified_base (16)..(16): 5-methyl modified nucleotide
  source: /note="3' tri-ethylene glycol (TEG)"
aaguucuguccaagcc

SEQ ID NO: 18694 - RNA, 15 nt, Artificial Sequence
  source: /note="Description of Artificial Sequence: Synthetic oligonucleotide"
  source: /note="RNA"
  source: /note="5' tri-ethylene glycol (TEG)"
  modified_base (1)..(1): bicyclic nucleic acid (BNA)
  modified_base (2)..(2): bicyclic nucleic acid (BNA)
  modified_base (6)..(6): 5-methyl modified nucleotide
  modified_base (10)..(10): 5-methyl modified nucleotide
  modified_base (11)..(11): 5-methyl modified nucleotide
  modified_base (15)..(15): 5-methyl modified nucleotide
  source: /note="3' tri-ethylene glycol (TEG)"
aaguucuguccaagc

SEQ ID NO: 18695 - RNA, 14 nt, Artificial Sequence
  source: /note="Description of Artificial Sequence: Synthetic oligonucleotide"
  source: /note="RNA"
  source: /note="5' tri-ethylene glycol (TEG)"
  modified_base (1)..(1): bicyclic nucleic acid (BNA)
  modified_base (2)..(2): bicyclic nucleic acid (BNA)
  modified_base (6)..(6): 5-methyl modified nucleotide
  modified_base (10)..(10): 5-methyl modified nucleotide
  modified_base (11)..(11): 5-methyl modified nucleotide
  source: /note="3' tri-ethylene glycol (TEG)"
aaguucuguccaag

SEQ ID NO: 18696 - RNA, 13 nt, Artificial Sequence
  source: /note="Description of Artificial Sequence: Synthetic oligonucleotide"
  source: /note="RNA"
  source: /note="5' tri-ethylene glycol (TEG)"
  modified_base (1)..(1): bicyclic nucleic acid (BNA)
  modified_base (2)..(2): bicyclic nucleic acid (BNA)
  modified_base (6)..(6): 5-methyl modified nucleotide
  modified_base (10)..(10): 5-methyl modified nucleotide
  modified_base (11)..(11): 5-methyl modified nucleotide
  source: /note="3' tri-ethylene glycol (TEG)"
aaguucuguccaa

SEQ ID NO: 18697 - RNA, 12 nt, Artificial Sequence
  source: /note="Description of Artificial Sequence: Synthetic oligonucleotide"
  source: /note="RNA"
  source: /note="5' tri-ethylene glycol (TEG)"
  modified_base (1)..(1): bicyclic nucleic acid (BNA)
  modified_base (2)..(2): bicyclic nucleic acid (BNA)
  modified_base (6)..(6): 5-methyl modified nucleotide
  modified_base (10)..(10): 5-methyl modified nucleotide
  modified_base (11)..(11): 5-methyl modified nucleotide
  source: /note="3' tri-ethylene glycol (TEG)"
aaguucugucca

SEQ ID NO: 18698 - RNA, 11 nt, Artificial Sequence
  source: /note="Description of Artificial Sequence: Synthetic oligonucleotide"
  source: /note="RNA"
  source: /note="5' tri-ethylene glycol (TEG)"
  modified_base (1)..(1): bicyclic nucleic acid (BNA)
  modified_base (2)..(2): bicyclic nucleic acid (BNA)
  modified_base (6)..(6): 5-methyl modified nucleotide
  modified_base (10)..(10): 5-methyl modified nucleotide
  modified_base (11)..(11): 5-methyl modified nucleotide
  source: /note="3' tri-ethylene glycol (TEG)"
aaguucugucc

SEQ ID NO: 18699 - RNA, 10 nt, Artificial Sequence
  source: /note="Description of Artificial Sequence: Synthetic oligonucleotide"
  source: /note="RNA"
  source: /note="5' tri-ethylene glycol (TEG)"
  modified_base (1)..(1): bicyclic nucleic acid (BNA)
  modified_base (2)..(2): bicyclic nucleic acid (BNA)
  modified_base (6)..(6): 5-methyl modified nucleotide
  modified_base (10)..(10): 5-methyl modified nucleotide
  source: /note="3' tri-ethylene glycol (TEG)"
aaguucuguc

SEQ ID NO: 18700 - RNA, 9 nt, Artificial Sequence
  source: /note="Description of Artificial Sequence: Synthetic oligonucleotide"
  source: /note="RNA"
  source: /note="5' tri-ethylene glycol (TEG)"
  modified_base (1)..(1): bicyclic nucleic acid (BNA)
  modified_base (2)..(2): bicyclic nucleic acid (BNA)
  modified_base (6)..(6): 5-methyl modified nucleotide
  source: /note="3' tri-ethylene glycol (TEG)"
aaguucugu

SEQ ID NO: 18701 - RNA, 8 nt, Artificial Sequence
  source: /note="Description of Artificial Sequence: Synthetic oligonucleotide"
  source: /note="RNA"
  source: /note="5' tri-ethylene glycol (TEG)"
  modified_base (1)..(1): bicyclic nucleic acid (BNA)
  modified_base (2)..(2): bicyclic nucleic acid (BNA)
  modified_base (6)..(6): 5-methyl modified nucleotide
  source: /note="3' tri-ethylene glycol (TEG)"
aaguucug

SEQ ID NO: 18702 - DNA, 20 bp, Artificial Sequence
  source: /note="Description of Artificial Sequence: Synthetic oligonucleotide"
  source: /note="Description of Combined DNA/RNA Molecule: Synthetic oligonucleotide"
  source: /note="DNA/RNA"
  source: /note="5' tri-ethylene glycol (TEG)"
  modified_base (1)..(1): bicyclic nucleic acid (BNA)
  modified_base (2)..(2): bicyclic nucleic acid (BNA)
  modified_base (7)..(7): 5-methyl modified nucleotide
  modified_base (11)..(11): 5-methyl modified nucleotide
  modified_base (12)..(12): 5-methyl modified nucleotide
  modified_base (16)..(16): 5-methyl modified nucleotide
  modified_base (17)..(17): 5-methyl modified nucleotide
  modified_base (18)..(18): 5-methyl modified nucleotide
  source: /note="3' tri-ethylene glycol (TEG)"
taaguucuguccaagcccgg

SEQ ID NO: 18703 - DNA, 19 bp, Artificial Sequence
  source: /note="Description of Artificial Sequence: Synthetic oligonucleotide"
  source: /note="Description of Combined DNA/RNA Molecule: Synthetic oligonucleotide"
  source: /note="DNA/RNA"
  source: /note="5' tri-ethylene glycol (TEG)"
  modified_base (1)..(1): bicyclic nucleic acid (BNA)
  modified_base (2)..(2): bicyclic nucleic acid (BNA)
  modified_base (7)..(7): 5-methyl modified nucleotide
  modified_base (11)..(11): 5-methyl modified nucleotide
  modified_base (12)..(12): 5-methyl modified nucleotide
  modified_base (16)..(16): 5-methyl modified nucleotide
  modified_base (17)..(17): 5-methyl modified nucleotide
  modified_base (18)..(18): 5-methyl modified nucleotide
  source: /note="3' tri-ethylene glycol (TEG)"
taaguucuguccaagcccg

SEQ ID NO: 18704 - DNA, 18 bp, Artificial Sequence
  source: /note="Description of Artificial Sequence: Synthetic oligonucleotide"
  source: /note="Description of Combined DNA/RNA Molecule: Synthetic oligonucleotide"
  source: /note="DNA/RNA"
  source: /note="5' tri-ethylene glycol (TEG)"
  modified_base (1)..(1): bicyclic nucleic acid (BNA)
  modified_base (2)..(2): bicyclic nucleic acid (BNA)
  modified_base (7)..(7): 5-methyl modified nucleotide
  modified_base (11)..(11): 5-methyl modified nucleotide
  modified_base (12)..(12): 5-methyl modified nucleotide
  modified_base (16)..(16): 5-methyl modified nucleotide
  modified_base (17)..(17): 5-methyl modified nucleotide
  modified_base (18)..(18): 5-methyl modified nucleotide
  source: /note="3' tri-ethylene glycol (TEG)"
taaguucuguccaagccc

SEQ ID NO: 18705 - DNA, 17 bp, Artificial Sequence
  source: /note="Description of Artificial Sequence: Synthetic oligonucleotide"
  source: /note="Description of Combined DNA/RNA Molecule: Synthetic oligonucleotide"
  source: /note="DNA/RNA"
  source: /note="5' tri-ethylene glycol (TEG)"
  modified_base (1)..(1): bicyclic nucleic acid (BNA)
  modified_base (2)..(2): bicyclic nucleic acid (BNA)
  modified_base (7)..(7): 5-methyl modified nucleotide
  modified_base (11)..(11): 5-methyl modified nucleotide
  modified_base (12)..(12): 5-methyl modified nucleotide
  modified_base (16)..(16): 5-methyl modified nucleotide
  modified_base (17)..(17): 5-methyl modified nucleotide
  source: /note="3' tri-ethylene glycol (TEG)"
taaguucuguccaagcc

SEQ ID NO: 18706 - DNA, 16 bp, Artificial Sequence
  source: /note="Description of Artificial Sequence: Synthetic oligonucleotide"
  source: /note="Description of Combined DNA/RNA Molecule: Synthetic oligonucleotide"
  source: /note="DNA/RNA"
  source: /note="5' tri-ethylene glycol (TEG)"
  modified_base (1)..(1): bicyclic nucleic acid (BNA)
  modified_base (2)..(2): bicyclic nucleic acid (BNA)
  modified_base (7)..(7): 5-methyl modified nucleotide
  modified_base (11)..(11): 5-methyl modified nucleotide
  modified_base (12)..(12): 5-methyl modified nucleotide
  modified_base (16)..(16): 5-methyl modified nucleotide
  source: /note="3' tri-ethylene glycol (TEG)"
taaguucuguccaagc

SEQ ID NO: 18707 - DNA, 14 bp, Artificial Sequence
  source: /note="Description of Artificial Sequence: Synthetic oligonucleotide"
  source: /note="Description of Combined DNA/RNA Molecule: Synthetic oligonucleotide"
  source: /note="DNA/RNA"
  source: /note="5' tri-ethylene glycol (TEG)"
  modified_base (1)..(1): bicyclic nucleic acid (BNA)
  modified_base (2)..(2): bicyclic nucleic acid (BNA)
  modified_base (7)..(7): 5-methyl modified nucleotide
  modified_base (11)..(11): 5-methyl modified nucleotide
  modified_base (12)..(12): 5-methyl modified nucleotide
  source: /note="3' tri-ethylene glycol (TEG)"
taaguucuguccaa
